United States Patent Application Publication US 2025/0333767 A1 - sequence listing, part 6

SEQ ID NO: 30901 - protein, 978 aa, synthetic construct
  REGION 1..978: note = engineered CasX variant
QEIKRINKIRRRLVKDSNTKKAGKTGPMKTLLVRVMTPDLRERLENLRKKPENIPQPISNTSRANLNKLLTDYTEMKKAILHVYWEEFQKDPVGLMSRVAQPASKKIDQNKLKPEMDEKGNLTTAGFACSQCGQPLFVYKLEQVSEKGKAYTNYFGRCNVAEHEKLILLDQLKPEKDSDEAVTYSLGKFGQRALDFYSIHVTKESTHPVKPLAQIAGNRYASSPVGKALSDACMGTIASFLSKYQDIIIEHQKVVKGNQKRLESLRELAGKENLEYPSVTLPPQPHTKEGLDAYNEVIARVRMWVNLNLWQKLKLSRDDAKPLLRLKGFPSFPLVERQANEVDWWDMVCNVKKLINEKKEDGKVFWQNLAGYKRQEALRPYLSSEEDRKKGKKFARYQLGDLLLHLEKKHGEDWGKVYDEAWERIDKKVEGLSKHIKLEEERRSEDAQSKAALTDWLRAKASFVIEGLKEADKDEFCRCELKLQKWYGDLRGKPFAIEAENSILDISGFSKQYNCAFIWQKDGVKKLNLYLIINYFKGGKLRFKKIKPEAFEANRFYTVINKKSGEIVPMEVNFNFDDPNLIILPLAFGKRQGREFIWNDLLSLETGSLKLANGRVIEKTLYNRRTRQDEPALFVALTFERREVLDSSNIKPMNLIGVDRGENIPAVIALTDPEGCPLSRFKDSLGNPTHILRIGESYKEKQRTIQAKKEVEQRRAGGYSRKYASKAKNLADDMVRNTARDLLYYAVTQDAMLIFENLSRGFGRQGKRTFMAERQYTRMEDWLTAKLAYEGLPSKTYLSKTLAQYTSKTCSNCGFTITSADYDRVLEKLKKTATGWMTTINGKELKVEGQITYYNRYKRQNVVKDLSVELDRLSEESVNNDISSWTKGRSGEALSLLKKRFSHRPVQEKFVCLNCGFETHADEQAALNIARSWLFLRSQEYKKYQTNKTTGNTDKRAFVETWQSFYRKKLKEVWKPAV

SEQ ID NO: 30902 - protein, 978 aa, synthetic construct
  REGION 1..978: note = engineered CasX variant
QEIKRINKIRRRLVKDSNTKKAGKTGPMKTLLVRVMTPDLRERLENLRKKPENIPQPISNTSRANLNKLLTDYTEMKKAILHVYWEEFQKDPVGLMSRVAQPASKKIDQNKLKPEMDEKGNLTTAGFACSQCGQPLFVYKLEQVSEKGKAYTNYFGRCNVAEHEKLILLDQLKPEKDSDEAVTYSLGKFGQRALDFYSIHVTKESTHPVKPLAQIAGNRYASTPVGKALSDACMGTIASFLSKYQDIIIEHQKVVKGNQKRLESLRELAGKENLEYPSVTLPPQPHTKEGLDAYNEVIARVRMWVNLNLWQKLKLSRDDAKPLLRLKGFPSFPLVERQANEVDWWDMVCNVKKLINEKKEDGKVFWQNLAGYKRQEALRPYLSSEEDRKKGKKFARYQLGDLLLHLEKKHGEDWGKVYDEAWERIDKKVEGLSKHIKLEEERRSEDAQSKAALTDWLRAKASFVIEGLKEADKDEFCRCELKLQKWYGDLRGKPFAIEAENSILDISGFSKQYNCAFIWQKDGVKKLNLYLIINYFKGGKLRFKKIKPEAFEANRFYTVINKKSGEIVPMEVNFNFDDPNLIILPLAFGKRQGREFIWNDLLSLETGSLKLANGRVIEKTLYNRRTRQDEPALFVALTFERREVLDSSNIKPMNLIGVDRGENIPAVIALTDPEGCPLSRFKDSLGNPTHILRIGESYKEKQRTIQAKKEVEQRRAGGYSRKYASKAKNLADDMVRNTARDLLYYAVTQDAMLIFENLSRGFGRQGKRTFMAERQYTRMEDWLTAKLAYEGLPSKTYLSKTLAQYTSKTCSNCGFTITSADYDRVLEKLKKTATGWMTTINGKELKVEGQITYYNRYKRQNVVKDLSVELDRLSEESVNNDISSWTKGRSGEALSLLKKRFSHRPVQEKFVCLNCGFETHADEQAALNIARSWLFLRSQEYKKYQTNKTTGNTDKRAFVETWQSFYRKKLKEVWKPAV

SEQ ID NO: 30903 - protein, 978 aa, synthetic construct
  REGION 1..978: note = engineered CasX variant
QEIKRINKIRRRLVKDSNTKKAGKTGPMKTLLVRVMTPDLRERLENLRKKPENIPQPISNTSRANLNKLLTDYTEMKKAILHVYWEEFQKDPVGLMSRVAQPASKKIDQNKLKPEMDEKGNLTTAGFACSQCGQPLFVYKLEQVSEKGKAYTNYFGRCNVAEHEKLILLDQLKPEKDSDEAVTYSLGKFGQRALDFYSIHVTKESTHPVKPLAQIAGNRYASAPVGKALSDACMGTIASFLSKYQDIIIEHQKVVKGNQKRLESLRELAGKENLEYPSVTLPPQPHTKEGLDAYNEVIARVRMWVNLNLWQKLKLSRDDAKPLLRLKGFPSFPLVERQANEVDWWDMVCNVKKLINEKKEDGKVFWQNLAGYKRQEALRPYLSSEEDRKKGKKFARYQLGDLLLHLEKKHGEDWGKVYDEAWERIDKKVEGLSKHIKLEEERRSEDAQSKAALTDWLRAKASFVIEGLKEADKDEFCRCELKLQKWYGDLRGKPFAIEAENSILDISGFSKQYNCAFIWQKDGVKKLNLYLIINYFKGGKLRFKKIKPEAFEANRFYTVINKKSGEIVPMEVNFNFDDPNLIILPLAFGKRQGREFIWNDLLSLETGSLKLANGRVIEKTLYNRRTRQDEPALFVALTFERREVLDSSNIKPMNLIGVDRGENIPAVIALTDPEGCPLSRFKDSLGNPTHILRIGESYKEKQRTIQAKKEVEQRRAGGYSRKYASKAKNLADDMVRNTARDLLYYAVTQDAMLIFENLSRGFGRQGKRTFMAERQYTRMEDWLTAKLAYEGLPSKTYLSKTLAQYTSKTCSNCGFTITSADYDRVLEKLKKTATGWMTTINGKELKVEGQITYYNRYKRQNVVKDLSVELDRLSEESVNNDISSWTKGRSGEALSLLKKRFSHRPVQEKFVCLNCGFETHADEQAALNIARSWLFLRSQEYKKYQTNKTTGNTDKRAFVETWQSFYRKKLKEVWKPAV

SEQ ID NO: 30904 - protein, 978 aa, synthetic construct
  REGION 1..978: note = engineered CasX variant
QEIKRINKIRRRLVKDSNTKKAGKTGPMKTLLVRVMTPDLRERLENLRKKPENIPQPISNTSRANLNKLLTDYTEMKKAILHVYWEEFQKDPVGLMSRVAQPASKKIDQNKLKPEMDEKGNLTTAGFACSQCGQPLFVYKLEQVSEKGKAYTNYFGRCNVAEHEKLILLDQLKPEKDSDEAVTYSLGKFGQRALDFYSIHVTKESTHPVKPLAQIAGNRYASVPVGKALSDACMGTIASFLSKYQDIIIEHQKVVKGNQKRLESLRELAGKENLEYPSVTLPPQPHTKEGLDAYNEVIARVRMWVNLNLWQKLKLSRDDAKPLLRLKGFPSFPLVERQANEVDWWDMVCNVKKLINEKKEDGKVFWQNLAGYKRQEALRPYLSSEEDRKKGKKFARYQLGDLLLHLEKKHGEDWGKVYDEAWERIDKKVEGLSKHIKLEEERRSEDAQSKAALTDWLRAKASFVIEGLKEADKDEFCRCELKLQKWYGDLRGKPFAIEAENSILDISGFSKQYNCAFIWQKDGVKKLNLYLIINYFKGGKLRFKKIKPEAFEANRFYTVINKKSGEIVPMEVNFNFDDPNLIILPLAFGKRQGREFIWNDLLSLETGSLKLANGRVIEKTLYNRRTRQDEPALFVALTFERREVLDSSNIKPMNLIGVDRGENIPAVIALTDPEGCPLSRFKDSLGNPTHILRIGESYKEKQRTIQAKKEVEQRRAGGYSRKYASKAKNLADDMVRNTARDLLYYAVTQDAMLIFENLSRGFGRQGKRTFMAERQYTRMEDWLTAKLAYEGLPSKTYLSKTLAQYTSKTCSNCGFTITSADYDRVLEKLKKTATGWMTTINGKELKVEGQITYYNRYKRQNVVKDLSVELDRLSEESVNNDISSWTKGRSGEALSLLKKRFSHRPVQEKFVCLNCGFETHADEQAALNIARSWLFLRSQEYKKYQTNKTTGNTDKRAFVETWQSFYRKKLKEVWKPAV

SEQ ID NO: 30905 - protein, 978 aa, synthetic construct
  REGION 1..978: note = engineered CasX variant
QEIKRINKIRRRLVKDSNTKKAGKTGPMKTLLVRVMTPDLRERLENLRKKPENIPQPISNTSRANLNKLLTDYTEMKKAILHVYWEEFQKDPVGLMSRVAQPASKKIDQNKLKPEMDEKGNLTTAGFACSQCGQPLFVYKLEQVSEKGKAYTNYFGRCNVAEHEKLIKLDQLKPEKDSDEAVTYSLGKFGQRALDFYSIHVTKESTHPVKPLAQIAGNRYASGPVGKALSDACMGTIASFLSKYQDIIIEHQKVVKGNQKRLESLRELAGKENLEYPSVTLPPQPHTKEGLDAYNEVIARVRMWVNLNLWQKLKLSRDDAKPLLRLKGFPSFPLVERQANEVDWWDMVCNVKKLINEKKEDGKVFWQNLAGYKRQEALRPYLSSEEDRKKGKKFARYQLGDLLLHLEKKHGEDWGKVYDEAWERIDKKVEGLSKHIKLEEERRSEDAQSKAALTDWLRAKASFVIEGLKEADKDEFCRCELKLQKWYGDLRGKPFAIEAENSILDISGFSKQYNCAFIWQKDGVKKLNLYLIINYFKGGKLRFKKIKPEAFEANRFYTVINKKSGEIVPMEVNFNFDDPNLIILPLAFGKRQGREFIWNDLLSLETGSLKLANGRVIEKTLYNRRTRQDEPALFVALTFERREVLDSSNIKPMNLIGVDRGENIPAVIALTDPEGCPLSRFKDSLGNPTHILRIGESYKEKQRTIQAKKEVEQRRAGGYSRKYASKAKNLADDMVRNTARDLLYYAVTQDAMLIFENLSRGFGRQGKRTFMAERQYTRMEDWLTAKLAYEGLPSKTYLSKTLAQYTSKTCSNCGFTITSADYDRVLEKLKKTATGWMTTINGKELKVEGQITYYNRYKRQNVVKDLSVELDRLSEESVNNDISSWTKGRSGEALSLLKKRFSHRPVQEKFVCLNCGFETHADEQAALNIARSWLFLRSQEYKKYQTNKTTGNTDKRAFVETWQSFYRKKLKEVWKPAV

SEQ ID NO: 30906 - protein, 977 aa, synthetic construct
  REGION 1..977: note = engineered CasX variant
QEIKRINKIRRRLVKDSNTKKAGKTGPMKTLLVRVMTPDLRERLENLRKKPENIPQPISNTSRANLNKLLTDYTEMKKAILHVYWEEFQKDPVGLMSRVAQPASKKIDQNKLKPEMDEKGNLTTAGFACSQCGQPLFVYKLEQVSEKGKAYTNYFGRCNVAEHEKLILLDQLKPEKDSDEAVTYSLGKFGQRALDFYSIHVTKESTHPVKPLAQIAGNRYASPVGKALSDACMGTIASFLSKYQDIIIEHQKVVKGNQKRLESLRELAGKENLEYPSVTLPPQPHTKEGLDAYNEVIARVRMWVNLNLWQKLKLSRDDAKPLLRLKGFPSFPLVERQANEVDWWDMVCNVKKLINEKKEDGKVFWQNLAGYKRQEALRPYLSSEEDRKKGKKFARYQLGDLLLHLEKKHGEDWGKVYDEAWERIDKKVEGLSKHIKLEEERRSEDAQSKAALTDWLRAKASFVIEGLKEADKDEFCRCELKLQKWYGDLRGKPFAIEAENSILDISGFSKQYNCAFIWQKDGVKKLNLYLIINYFKGGKLRFKKIKPEAFEANRFYTVINKKSGEIVPMEVNFNFDDPNLIILPLAFGKRQGREFIWNDLLSLETGSLKLANGRVIEKTLYNRRTRQDEPALFVALTFERREVLDSSNIKPMNLIGVDRGENIPAVIALTDPEGCPLSRFKDSLGNPTHILRIGESYKEKQRTIQAKKEVEQRRAGGYSRKYASKAKNLADDMVRNTARDLLYYAVTQDAMLIFENLSRGFGRQGKRTFMAERQYTRMEDWLTAKLAYEGLPSKTYLSKTLAQYTSKTCSNCGFTITSADYDRVLEKLKKTATGWMTTINGKELKVEGQITYYNRYKRQNVVKDLSVELDRLSEESVNNDISSWTKGRSGEALSLLKKRFSHRPVQEKFVCLNCGFETHADEQAALNIARSWLFLRSQEYKKYQTNKTTGNTDKRAFVETWQSFYRKKLKEVWKPAV

SEQ ID NO: 30907 - protein, 978 aa, synthetic construct
  REGION 1..978: note = engineered CasX variant
QEIKRINKIRRRLVKDSNTKKAGKTGPMKTLLVRVMTPDLRERLENLRKKPENIPQPISNTSRANLNKLLTDYTEMKKAILHVYWEEFQKDPVGLMSRVAQPASKKIDQNKLKPEMDEKGNLTTAGFACSQCGQPLFVYKLEQVSEKGKAYTNYFGRCNVAEHEKLILLDQLKPEKDSDEAVTYSLGKFGQRALDFYSIHVTKESTHPVKPLAQIAGNRYASYPVGKALSDACMGTIASFLSKYQDIIIEHQKVVKGNQKRLESLRELAGKENLEYPSVTLPPQPHTKEGVDAYNEVIARVRTWVNLNLWQKLKLSRDDAKPLLRLKGFPSFPLVERQANEVDWWDMVCNVKKLINEKKEDGKVFWQNLAGYKRQEALRPYLSSEEDRKKGKKFARYQLGDLLLHLEKKHGEDWGKVYDEAWERIDKKVEGLSKHIKLEEERRSEDAQSKAALTDWLRAKASFVIEGLKEADKDEFCRCELKLQKWYGDLRGKPFAIEAENSILDISGFSKQYNCAFIWQKDGVKKLNLYLIINYFKGGKLRFKKIKPEAFEANRFYTVINKKSGEIVPMEVNFNFDDPNLIILPLAFGKRQGREFIWNDLLSLETGSLKLANGRVIEKTLYNRRTRQDEPALFVALTFERREVLDSSNIKPMNLIGVDRGENIPAVIALTDPEGCPLSRFKDSLGNPTHILRIGESYKEKQRTIQAKKEVEQRRAGGYSRKYASKAKNLADDMVRNTARDLLYYAVTQDAMLIFENLSRGFGRQGKRTFMAERQYTRMEDWLTAKLAYEGLPSKTYLSKTLAQYTSKTCSNCGFTITSADYDRVLEKLKKTATGWMTTINGKELKVEGQITYYNRYKRQNVVKDLSVELDRLSEESVNNDISSWTKGRSGEALSLLKKRFSHRPVQEKFVCLNCGFETHADEQAALNIARSWLFLRSQEYKKYQTNKTTGNTDKRAFVETWQSFYRKKLKEVWKPAV

SEQ ID NO: 30908 - protein, 978 aa, synthetic construct
  REGION 1..978: note = engineered CasX variant
QEIKRINKIRRRLVKDSNTKKAGKTGPMKTLLVRVMTPDLRERLENLRKKPENIPQPISNTSRANLNKLLTDYTEMKKAILHVYWEEFQKDPVGLMSRVAQPASKKIDQNKLKPEMDEKGNLTTAGFACSQCGQPLFVYKLEQVSEKGKAYTNYFGRCNVAEHEKLILLDQLKPEKDSDEAVTYSLGKFGQRALDFYSIHVTKESTHPVKPLAQIAGNRYASHPVGKALSDACMGTIASFLSKYQDIIIEHQKVVKGNQKRLESLRELAGKENLEYPSVTLPPQPHTKEGVDAYNEVIARVRTWVNLNLWQKLKLSRDDAKPLLRLKGFPSFPLVERQANEVDWWDMVCNVKKLINEKKEDGKVFWQNLAGYKRQEALRPYLSSEEDRKKGKKFARYQLGDLLLHLEKKHGEDWGKVYDEAWERIDKKVEGLSKHIKLEEERRSEDAQSKAALTDWLRAKASFVIEGLKEADKDEFCRCELKLQKWYGDLRGKPFAIEAENSILDISGFSKQYNCAFIWQKDGVKKLNLYLIINYFKGGKLRFKKIKPEAFEANRFYTVINKKSGEIVPMEVNFNFDDPNLIILPLAFGKRQGREFIWNDLLSLETGSLKLANGRVIEKTLYNRRTRQDEPALFVALTFERREVLDSSNIKPMNLIGVDRGENIPAVIALTDPEGCPLSRFKDSLGNPTHILRIGESYKEKQRTIQAKKEVEQRRAGGYSRKYASKAKNLADDMVRNTARDLLYYAVTQDAMLIFENLSRGFGRQGKRTFMAERQYTRMEDWLTAKLAYEGLPSKTYLSKTLAQYTSKTCSNCGFTITSADYDRVLEKLKKTATGWMTTINGKELKVEGQITYYNRYKRQNVVKDLSVELDRLSEESVNNDISSWTKGRSGEALSLLKKRFSHRPVQEKFVCLNCGFETHADEQAALNIARSWLFLRSQEYKKYQTNKTTGNTDKRAFVETWQSFYRKKLKEVWKPAV

SEQ ID NO: 30909 - protein, 978 aa, synthetic construct
  REGION 1..978: note = engineered CasX variant
QEIKRINKIRRRLVKDSNTKKAGKTGPMKTLLVRVMTPDLRERLENLRKKPENIPQPISNTSRANLNKLLTDYTEMKKAILHVYWEEFQKDPVGLMSRVAQPASKKIDQNKLKPEMDEKGNLTTAGFACSQCGQPLFVYKLEQVSEKGKAYTNYFGRCNVAEHEKLILLDQLKPEKDSDEAVTYSLGKFGQRALDFYSIHVTKESTHPVKPLAQIAGNRYASSPVGKALSDACMGTIASFLSKYQDIIIEHQKVVKGNQKRLESLRELAGKENLEYPSVTLPPQPHTKEGVDAYNEVIARVRTWVNLNLWQKLKLSRDDAKPLLRLKGFPSFPLVERQANEVDWWDMVCNVKKLINEKKEDGKVFWQNLAGYKRQEALRPYLSSEEDRKKGKKFARYQLGDLLLHLEKKHGEDWGKVYDEAWERIDKKVEGLSKHIKLEEERRSEDAQSKAALTDWLRAKASFVIEGLKEADKDEFCRCELKLQKWYGDLRGKPFAIEAENSILDISGFSKQYNCAFIWQKDGVKKLNLYLIINYFKGGKLRFKKIKPEAFEANRFYTVINKKSGEIVPMEVNFNFDDPNLIILPLAFGKRQGREFIWNDLLSLETGSLKLANGRVIEKTLYNRRTRQDEPALFVALTFERREVLDSSNIKPMNLIGVDRGENIPAVIALTDPEGCPLSRFKDSLGNPTHILRIGESYKEKQRTIQAKKEVEQRRAGGYSRKYASKAKNLADDMVRNTARDLLYYAVTQDAMLIFENLSRGFGRQGKRTFMAERQYTRMEDWLTAKLAYEGLPSKTYLSKTLAQYTSKTCSNCGFTITSADYDRVLEKLKKTATGWMTTINGKELKVEGQITYYNRYKRQNVVKDLSVELDRLSEESVNNDISSWTKGRSGEALSLLKKRFSHRPVQEKFVCLNCGFETHADEQAALNIARSWLFLRSQEYKKYQTNKTTGNTDKRAFVETWQSFYRKKLKEVWKPAV

SEQ ID NO: 30910 - protein, 978 aa, synthetic construct
  REGION 1..978: note = engineered CasX variant
QEIKRINKIRRRLVKDSNTKKAGKTGPMKTLLVRVMTPDLRERLENLRKKPENIPQPISNTSRANLNKLLTDYTEMKKAILHVYWEEFQKDPVGLMSRVAQPASKKIDQNKLKPEMDEKGNLTTAGFACSQCGQPLFVYKLEQVSEKGKAYTNYFGRCNVAEHEKLILLDQLKPEKDSDEAVTYSLGKFGQRALDFYSIHVTKESTHPVKPLAQIAGNRYASTPVGKALSDACMGTIASFLSKYQDIIIEHQKVVKGNQKRLESLRELAGKENLEYPSVTLPPQPHTKEGVDAYNEVIARVRTWVNLNLWQKLKLSRDDAKPLLRLKGFPSFPLVERQANEVDWWDMVCNVKKLINEKKEDGKVFWQNLAGYKRQEALRPYLSSEEDRKKGKKFARYQLGDLLLHLEKKHGEDWGKVYDEAWERIDKKVEGLSKHIKLEEERRSEDAQSKAALTDWLRAKASFVIEGLKEADKDEFCRCELKLQKWYGDLRGKPFAIEAENSILDISGFSKQYNCAFIWQKDGVKKLNLYLIINYFKGGKLRFKKIKPEAFEANRFYTVINKKSGEIVPMEVNFNFDDPNLIILPLAFGKRQGREFIWNDLLSLETGSLKLANGRVIEKTLYNRRTRQDEPALFVALTFERREVLDSSNIKPMNLIGVDRGENIPAVIALTDPEGCPLSRFKDSLGNPTHILRIGESYKEKQRTIQAKKEVEQRRAGGYSRKYASKAKNLADDMVRNTARDLLYYAVTQDAMLIFENLSRGFGRQGKRTFMAERQYTRMEDWLTAKLAYEGLPSKTYLSKTLAQYTSKTCSNCGFTITSADYDRVLEKLKKTATGWMTTINGKELKVEGQITYYNRYKRQNVVKDLSVELDRLSEESVNNDISSWTKGRSGEALSLLKKRFSHRPVQEKFVCLNCGFETHADEQAALNIARSWLFLRSQEYKKYQTNKTTGNTDKRAFVETWQSFYRKKLKEVWKPAV

SEQ ID NO: 30911 - protein, 978 aa, synthetic construct
  REGION 1..978: note = engineered CasX variant
QEIKRINKIRRRLVKDSNTKKAGKTGPMKTLLVRVMTPDLRERLENLRKKPENIPQPISNTSRANLNKLLTDYTEMKKAILHVYWEEFQKDPVGLMSRVAQPASKKIDQNKLKPEMDEKGNLTTAGFACSQCGQPLFVYKLEQVSEKGKAYTNYFGRCNVAEHEKLILLDQLKPEKDSDEAVTYSLGKFGQRALDFYSIHVTKESTHPVKPLAQIAGNRYASAPVGKALSDACMGTIASFLSKYQDIIIEHQKVVKGNQKRLESLRELAGKENLEYPSVTLPPQPHTKEGVDAYNEVIARVRTWVNLNLWQKLKLSRDDAKPLLRLKGFPSFPLVERQANEVDWWDMVCNVKKLINEKKEDGKVFWQNLAGYKRQEALRPYLSSEEDRKKGKKFARYQLGDLLLHLEKKHGEDWGKVYDEAWERIDKKVEGLSKHIKLEEERRSEDAQSKAALTDWLRAKASFVIEGLKEADKDEFCRCELKLQKWYGDLRGKPFAIEAENSILDISGFSKQYNCAFIWQKDGVKKLNLYLIINYFKGGKLRFKKIKPEAFEANRFYTVINKKSGEIVPMEVNFNFDDPNLIILPLAFGKRQGREFIWNDLLSLETGSLKLANGRVIEKTLYNRRTRQDEPALFVALTFERREVLDSSNIKPMNLIGVDRGENIPAVIALTDPEGCPLSRFKDSLGNPTHILRIGESYKEKQRTIQAKKEVEQRRAGGYSRKYASKAKNLADDMVRNTARDLLYYAVTQDAMLIFENLSRGFGRQGKRTFMAERQYTRMEDWLTAKLAYEGLPSKTYLSKTLAQYTSKTCSNCGFTITSADYDRVLEKLKKTATGWMTTINGKELKVEGQITYYNRYKRQNVVKDLSVELDRLSEESVNNDISSWTKGRSGEALSLLKKRFSHRPVQEKFVCLNCGFETHADEQAALNIARSWLFLRSQEYKKYQTNKTTGNTDKRAFVETWQSFYRKKLKEVWKPAV

SEQ ID NO: 30912 - protein, 978 aa, synthetic construct
  REGION 1..978: note = engineered CasX variant
QEIKRINKIRRRLVKDSNTKKAGKTGPMKTLLVRVMTPDLRERLENLRKKPENIPQPISNTSRANLNKLLTDYTEMKKAILHVYWEEFQKDPVGLMSRVAQPASKKIDQNKLKPEMDEKGNLTTAGFACSQCGQPLFVYKLEQVSEKGKAYTNYFGRCNVAEHEKLILLDQLKPEKDSDEAVTYSLGKFGQRALDFYSIHVTKESTHPVKPLAQIAGNRYASVPVGKALSDACMGTIASFLSKYQDIIIEHQKVVKGNQKRLESLRELAGKENLEYPSVTLPPQPHTKEGVDAYNEVIARVRTWVNLNLWQKLKLSRDDAKPLLRLKGFPSFPLVERQANEVDWWDMVCNVKKLINEKKEDGKVFWQNLAGYKRQEALRPYLSSEEDRKKGKKFARYQLGDLLLHLEKKHGEDWGKVYDEAWERIDKKVEGLSKHIKLEEERRSEDAQSKAALTDWLRAKASFVIEGLKEADKDEFCRCELKLQKWYGDLRGKPFAIEAENSILDISGFSKQYNCAFIWQKDGVKKLNLYLIINYFKGGKLRFKKIKPEAFEANRFYTVINKKSGEIVPMEVNFNFDDPNLIILPLAFGKRQGREFIWNDLLSLETGSLKLANGRVIEKTLYNRRTRQDEPALFVALTFERREVLDSSNIKPMNLIGVDRGENIPAVIALTDPEGCPLSRFKDSLGNPTHILRIGESYKEKQRTIQAKKEVEQRRAGGYSRKYASKAKNLADDMVRNTARDLLYYAVTQDAMLIFENLSRGFGRQGKRTFMAERQYTRMEDWLTAKLAYEGLPSKTYLSKTLAQYTSKTCSNCGFTITSADYDRVLEKLKKTATGWMTTINGKELKVEGQITYYNRYKRQNVVKDLSVELDRLSEESVNNDISSWTKGRSGEALSLLKKRFSHRPVQEKFVCLNCGFETHADEQAALNIARSWLFLRSQEYKKYQTNKTTGNTDKRAFVETWQSFYRKKLKEVWKPAV

SEQ ID NO: 30913 - protein, 978 aa, synthetic construct
  REGION 1..978: note = engineered CasX variant
QEIKRINKIRRRLVKDSNTKKAGKTGPMKTLLVRVMTPDLRERLENLRKKPENIPQPISNTSRANLNKLLTDYTEMKKAILHVYWEEFQKDPVGLMSRVAQPASKKIDQNKLKPEMDEKGNLTTAGFACSQCGQPLFVYKLEQVSEKGKAYTNYFGRCNVAEHEKLIKLDQLKPEKDSDEAVTYSLGKFGQRALDFYSIHVTKESTHPVKPLAQIAGNRYASGPVGKALSDACMGTIASFLSKYQDIIIEHQKVVKGNQKRLESLRELAGKENLEYPSVTLPPQPHTKEGVDAYNEVIARVRTWVNLNLWQKLKLSRDDAKPLLRLKGFPSFPLVERQANEVDWWDMVCNVKKLINEKKEDGKVFWQNLAGYKRQEALRPYLSSEEDRKKGKKFARYQLGDLLLHLEKKHGEDWGKVYDEAWERIDKKVEGLSKHIKLEEERRSEDAQSKAALTDWLRAKASFVIEGLKEADKDEFCRCELKLQKWYGDLRGKPFAIEAENSILDISGFSKQYNCAFIWQKDGVKKLNLYLIINYFKGGKLRFKKIKPEAFEANRFYTVINKKSGEIVPMEVNFNFDDPNLIILPLAFGKRQGREFIWNDLLSLETGSLKLANGRVIEKTLYNRRTRQDEPALFVALTFERREVLDSSNIKPMNLIGVDRGENIPAVIALTDPEGCPLSRFKDSLGNPTHILRIGESYKEKQRTIQAKKEVEQRRAGGYSRKYASKAKNLADDMVRNTARDLLYYAVTQDAMLIFENLSRGFGRQGKRTFMAERQYTRMEDWLTAKLAYEGLPSKTYLSKTLAQYTSKTCSNCGFTITSADYDRVLEKLKKTATGWMTTINGKELKVEGQITYYNRYKRQNVVKDLSVELDRLSEESVNNDISSWTKGRSGEALSLLKKRFSHRPVQEKFVCLNCGFETHADEQAALNIARSWLFLRSQEYKKYQTNKTTGNTDKRAFVETWQSFYRKKLKEVWKPAV

SEQ ID NO: 30914 - protein, 977 aa, synthetic construct
  REGION 1..977: note = engineered CasX variant
QEIKRINKIRRRLVKDSNTKKAGKTGPMKTLLVRVMTPDLRERLENLRKKPENIPQPISNTSRANLNKLLTDYTEMKKAILHVYWEEFQKDPVGLMSRVAQPASKKIDQNKLKPEMDEKGNLTTAGFACSQCGQPLFVYKLEQVSEKGKAYTNYFGRCNVAEHEKLILLDQLKPEKDSDEAVTYSLGKFGQRALDFYSIHVTKESTHPVKPLAQIAGNRYASPVGKALSDACMGTIASFLSKYQDIIIEHQKVVKGNQKRLESLRELAGKENLEYPSVTLPPQPHTKEGVDAYNEVIARVRTWVNLNLWQKLKLSRDDAKPLLRLKGFPSFPLVERQANEVDWWDMVCNVKKLINEKKEDGKVFWQNLAGYKRQEALRPYLSSEEDRKKGKKFARYQLGDLLLHLEKKHGEDWGKVYDEAWERIDKKVEGLSKHIKLEEERRSEDAQSKAALTDWLRAKASFVIEGLKEADKDEFCRCELKLQKWYGDLRGKPFAIEAENSILDISGFSKQYNCAFIWQKDGVKKLNLYLIINYFKGGKLRFKKIKPEAFEANRFYTVINKKSGEIVPMEVNFNFDDPNLIILPLAFGKRQGREFIWNDLLSLETGSLKLANGRVIEKTLYNRRTRQDEPALFVALTFERREVLDSSNIKPMNLIGVDRGENIPAVIALTDPEGCPLSRFKDSLGNPTHILRIGESYKEKQRTIQAKKEVEQRRAGGYSRKYASKAKNLADDMVRNTARDLLYYAVTQDAMLIFENLSRGFGRQGKRTFMAERQYTRMEDWLTAKLAYEGLPSKTYLSKTLAQYTSKTCSNCGFTITSADYDRVLEKLKKTATGWMTTINGKELKVEGQITYYNRYKRQNVVKDLSVELDRLSEESVNNDISSWTKGRSGEALSLLKKRFSHRPVQEKFVCLNCGFETHADEQAALNIARSWLFLRSQEYKKYQTNKTTGNTDKRAFVETWQSFYRKKLKEVWKPAV

SEQ ID NO: 30915 - protein, 978 aa, synthetic construct
  REGION 1..978: note = engineered CasX variant
QEIKRINKIRRRLVKDSNTKKAGKTGPMKTLLVRVMTPDLRERLENLRKKPENIPQPISNTSRANLNKLLTDYTEMKKAILHVYWEEFQKDPVGLMSRVAQPASKKIDQNKLKPEMDEKGNLTTAGFACSQCGQPLFVYKLEQVSEKGKAYTNYFGRCNVAEHEKLILLDQLKPEKDSDEAVTYSLGKFGQRALDFYSIHVTKESTHPVKPLAQIAGNRYASYPVGKALSDACMGTIASFLSKYQDIIIEHQKVVKGNQKRLESLRELAGKENLEYPSVTLPPQPHTKEGVDAYNEVIARVRWWVNLNLWQKLKLSRDDAKPLLRLKGFPSFPLVERQANEVDWWDMVCNVKKLINEKKEDGKVFWQNLAGYKRQEALRPYLSSEEDRKKGKKFARYQLGDLLLHLEKKHGEDWGKVYDEAWERIDKKVEGLSKHIKLEEERRSEDAQSKAALTDWLRAKASFVIEGLKEADKDEFCRCELKLQKWYGDLRGKPFAIEAENSILDISGFSKQYNCAFIWQKDGVKKLNLYLIINYFKGGKLRFKKIKPEAFEANRFYTVINKKSGEIVPMEVNFNFDDPNLIILPLAFGKRQGREFIWNDLLSLETGSLKLANGRVIEKTLYNRRTRQDEPALFVALTFERREVLDSSNIKPMNLIGVDRGENIPAVIALTDPEGCPLSRFKDSLGNPTHILRIGESYKEKQRTIQAKKEVEQRRAGGYSRKYASKAKNLADDMVRNTARDLLYYAVTQDAMLIFENLSRGFGRQGKRTFMAERQYTRMEDWLTAKLAYEGLPSKTYLSKTLAQYTSKTCSNCGFTITSADYDRVLEKLKKTATGWMTTINGKELKVEGQITYYNRYKRQNVVKDLSVELDRLSEESVNNDISSWTKGRSGEALSLLKKRFSHRPVQEKFVCLNCGFETHADEQAALNIARSWLFLRSQEYKKYQTNKTTGNTDKRAFVETWQSFYRKKLKEVWKPAV

SEQ ID NO: 30916 - protein, 978 aa, synthetic construct
  REGION 1..978: note = engineered CasX variant
QEIKRINKIRRRLVKDSNTKKAGKTGPMKTLLVRVMTPDLRERLENLRKKPENIPQPISNTSRANLNKLLTDYTEMKKAILHVYWEEFQKDPVGLMSRVAQPASKKIDQNKLKPEMDEKGNLTTAGFACSQCGQPLFVYKLEQVSEKGKAYTNYFGRCNVAEHEKLILLDQLKPEKDSDEAVTYSLGKFGQRALDFYSIHVTKESTHPVKPLAQIAGNRYASHPVGKALSDACMGTIASFLSKYQDIIIEHQKVVKGNQKRLESLRELAGKENLEYPSVTLPPQPHTKEGVDAYNEVIARVRWWVNLNLWQKLKLSRDDAKPLLRLKGFPSFPLVERQANEVDWWDMVCNVKKLINEKKEDGKVFWQNLAGYKRQEALRPYLSSEEDRKKGKKFARYQLGDLLLHLEKKHGEDWGKVYDEAWERIDKKVEGLSKHIKLEEERRSEDAQSKAALTDWLRAKASFVIEGLKEADKDEFCRCELKLQKWYGDLRGKPFAIEAENSILDISGFSKQYNCAFIWQKDGVKKLNLYLIINYFKGGKLRFKKIKPEAFEANRFYTVINKKSGEIVPMEVNFNFDDPNLIILPLAFGKRQGREFIWNDLLSLETGSLKLANGRVIEKTLYNRRTRQDEPALFVALTFERREVLDSSNIKPMNLIGVDRGENIPAVIALTDPEGCPLSRFKDSLGNPTHILRIGESYKEKQRTIQAKKEVEQRRAGGYSRKYASKAKNLADDMVRNTARDLLYYAVTQDAMLIFENLSRGFGRQGKRTFMAERQYTRMEDWLTAKLAYEGLPSKTYLSKTLAQYTSKTCSNCGFTITSADYDRVLEKLKKTATGWMTTINGKELKVEGQITYYNRYKRQNVVKDLSVELDRLSEESVNNDISSWTKGRSGEALSLLKKRFSHRPVQEKFVCLNCGFETHADEQAALNIARSWLFLRSQEYKKYQTNKTTGNTDKRAFVETWQSFYRKKLKEVWKPAV

SEQ ID NO: 30917 - protein, 978 aa, synthetic construct
  REGION 1..978: note = engineered CasX variant
QEIKRINKIRRRLVKDSNTKKAGKTGPMKTLLVRVMTPDLRERLENLRKKPENIPQPISNTSRANLNKLLTDYTEMKKAILHVYWEEFQKDPVGLMSRVAQPASKKIDQNKLKPEMDEKGNLTTAGFACSQCGQPLFVYKLEQVSEKGKAYTNYFGRCNVAEHEKLILLDQLKPEKDSDEAVTYSLGKFGQRALDFYSIHVTKESTHPVKPLAQIAGNRYASSPVGKALSDACMGTIASFLSKYQDIIIEHQKVVKGNQKRLESLRELAGKENLEYPSVTLPPQPHTKEGVDAYNEVIARVRWWVNLNLWQKLKLSRDDAKPLLRLKGFPSFPLVERQANEVDWWDMVCNVKKLINEKKEDGKVFWQNLAGYKRQEALRPYLSSEEDRKKGKKFARYQLGDLLLHLEKKHGEDWGKVYDEAWERIDKKVEGLSKHIKLEEERRSEDAQSKAALTDWLRAKASFVIEGLKEADKDEFCRCELKLQKWYGDLRGKPFAIEAENSILDISGFSKQYNCAFIWQKDGVKKLNLYLIINYFKGGKLRFKKIKPEAFEANRFYTVINKKSGEIVPMEVNFNFDDPNLIILPLAFGKRQGREFIWNDLLSLETGSLKLANGRVIEKTLYNRRTRQDEPALFVALTFERREVLDSSNIKPMNLIGVDRGENIPAVIALTDPEGCPLSRFKDSLGNPTHILRIGESYKEKQRTIQAKKEVEQRRAGGYSRKYASKAKNLADDMVRNTARDLLYYAVTQDAMLIFENLSRGFGRQGKRTFMAERQYTRMEDWLTAKLAYEGLPSKTYLSKTLAQYTSKTCSNCGFTITSADYDRVLEKLKKTATGWMTTINGKELKVEGQITYYNRYKRQNVVKDLSVELDRLSEESVNNDISSWTKGRSGEALSLLKKRFSHRPVQEKFVCLNCGFETHADEQAALNIARSWLFLRSQEYKKYQTNKTTGNTDKRAFVETWQSFYRKKLKEVWKPAV

SEQ ID NO: 30918 - protein, 978 aa, synthetic construct
  REGION 1..978: note = engineered CasX variant
QEIKRINKIRRRLVKDSNTKKAGKTGPMKTLLVRVMTPDLRERLENLRKKPENIPQPISNTSRANLNKLLTDYTEMKKAILHVYWEEFQKDPVGLMSRVAQPASKKIDQNKLKPEMDEKGNLTTAGFACSQCGQPLFVYKLEQVSEKGKAYTNYFGRCNVAEHEKLILLDQLKPEKDSDEAVTYSLGKFGQRALDFYSIHVTKESTHPVKPLAQIAGNRYASTPVGKALSDACMGTIASFLSKYQDIIIEHQKVVKGNQKRLESLRELAGKENLEYPSVTLPPQPHTKEGVDAYNEVIARVRWWVNLNLWQKLKLSRDDAKPLLRLKGFPSFPLVERQANEVDWWDMVCNVKKLINEKKEDGKVFWQNLAGYKRQEALRPYLSSEEDRKKGKKFARYQLGDLLLHLEKKHGEDWGKVYDEAWERIDKKVEGLSKHIKLEEERRSEDAQSKAALTDWLRAKASFVIEGLKEADKDEFCRCELKLQKWYGDLRGKPFAIEAENSILDISGFSKQYNCAFIWQKDGVKKLNLYLIINYFKGGKLRFKKIKPEAFEANRFYTVINKKSGEIVPMEVNFNFDDPNLIILPLAFGKRQGREFIWNDLLSLETGSLKLANGRVIEKTLYNRRTRQDEPALFVALTFERREVLDSSNIKPMNLIGVDRGENIPAVIALTDPEGCPLSRFKDSLGNPTHILRIGESYKEKQRTIQAKKEVEQRRAGGYSRKYASKAKNLADDMVRNTARDLLYYAVTQDAMLIFENLSRGFGRQGKRTFMAERQYTRMEDWLTAKLAYEGLPSKTYLSKTLAQYTSKTCSNCGFTITSADYDRVLEKLKKTATGWMTTINGKELKVEGQITYYNRYKRQNVVKDLSVELDRLSEESVNNDISSWTKGRSGEALSLLKKRFSHRPVQEKFVCLNCGFETHADEQAALNIARSWLFLRSQEYKKYQTNKTTGNTDKRAFVETWQSFYRKKLKEVWKPAV

SEQ ID NO: 30919 - protein, 978 aa, synthetic construct
  REGION 1..978: note = engineered CasX variant
QEIKRINKIRRRLVKDSNTKKAGKTGPMKTLLVRVMTPDLRERLENLRKKPENIPQPISNTSRANLNKLLTDYTEMKKAILHVYWEEFQKDPVGLMSRVAQPASKKIDQNKLKPEMDEKGNLTTAGFACSQCGQPLFVYKLEQVSEKGKAYTNYFGRCNVAEHEKLILLDQLKPEKDSDEAVTYSLGKFGQRALDFYSIHVTKESTHPVKPLAQIAGNRYASAPVGKALSDACMGTIASFLSKYQDIIIEHQKVVKGNQKRLESLRELAGKENLEYPSVTLPPQPHTKEGVDAYNEVIARVRWWVNLNLWQKLKLSRDDAKPLLRLKGFPSFPLVERQANEVDWWDMVCNVKKLINEKKEDGKVFWQNLAGYKRQEALRPYLSSEEDRKKGKKFARYQLGDLLLHLEKKHGEDWGKVYDEAWERIDKKVEGLSKHIKLEEERRSEDAQSKAALTDWLRAKASFVIEGLKEADKDEFCRCELKLQKWYGDLRGKPFAIEAENSILDISGFSKQYNCAFIWQKDGVKKLNLYLIINYFKGGKLRFKKIKPEAFEANRFYTVINKKSGEIVPMEVNFNFDDPNLIILPLAFGKRQGREFIWNDLLSLETGSLKLANGRVIEKTLYNRRTRQDEPALFVALTFERREVLDSSNIKPMNLIGVDRGENIPAVIALTDPEGCPLSRFKDSLGNPTHILRIGESYKEKQRTIQAKKEVEQRRAGGYSRKYASKAKNLADDMVRNTARDLLYYAVTQDAMLIFENLSRGFGRQGKRTFMAERQYTRMEDWLTAKLAYEGLPSKTYLSKTLAQYTSKTCSNCGFTITSADYDRVLEKLKKTATGWMTTINGKELKVEGQITYYNRYKRQNVVKDLSVELDRLSEESVNNDISSWTKGRSGEALSLLKKRFSHRPVQEKFVCLNCGFETHADEQAALNIARSWLFLRSQEYKKYQTNKTTGNTDKRAFVETWQSFYRKKLKEVWKPAV

SEQ ID NO: 30920 - protein, 978 aa, synthetic construct
  REGION 1..978: note = engineered CasX variant
QEIKRINKIRRRLVKDSNTKKAGKTGPMKTLLVRVMTPDLRERLENLRKKPENIPQPISNTSRANLNKLLTDYTEMKKAILHVYWEEFQKDPVGLMSRVAQPASKKIDQNKLKPEMDEKGNLTTAGFACSQCGQPLFVYKLEQVSEKGKAYTNYFGRCNVAEHEKLILLDQLKPEKDSDEAVTYSLGKFGQRALDFYSIHVTKESTHPVKPLAQIAGNRYASVPVGKALSDACMGTIASFLSKYQDIIIEHQKVVKGNQKRLESLRELAGKENLEYPSVTLPPQPHTKEGVDAYNEVIARVRWWVNLNLWQKLKLSRDDAKPLLRLKGFPSFPLVERQANEVDWWDMVCNVKKLINEKKEDGKVFWQNLAGYKRQEALRPYLSSEEDRKKGKKFARYQLGDLLLHLEKKHGEDWGKVYDEAWERIDKKVEGLSKHIKLEEERRSEDAQSKAALTDWLRAKASFVIEGLKEADKDEFCRCELKLQKWYGDLRGKPFAIEAENSILDISGFSKQYNCAFIWQKDGVKKLNLYLIINYFKGGKLRFKKIKPEAFEANRFYTVINKKSGEIVPMEVNFNFDDPNLIILPLAFGKRQGREFIWNDLLSLETGSLKLANGRVIEKTLYNRRTRQDEPALFVALTFERREVLDSSNIKPMNLIGVDRGENIPAVIALTDPEGCPLSRFKDSLGNPTHILRIGESYKEKQRTIQAKKEVEQRRAGGYSRKYASKAKNLADDMVRNTARDLLYYAVTQDAMLIFENLSRGFGRQGKRTFMAERQYTRMEDWLTAKLAYEGLPSKTYLSKTLAQYTSKTCSNCGFTITSADYDRVLEKLKKTATGWMTTINGKELKVEGQITYYNRYKRQNVVKDLSVELDRLSEESVNNDISSWTKGRSGEALSLLKKRFSHRPVQEKFVCLNCGFETHADEQAALNIARSWLFLRSQEYKKYQTNKTTGNTDKRAFVETWQSFYRKKLKEVWKPAV

SEQ ID NO: 30921 - protein, 978 aa, synthetic construct
  REGION 1..978: note = engineered CasX variant
QEIKRINKIRRRLVKDSNTKKAGKTGPMKTLLVRVMTPDLRERLENLRKKPENIPQPISNTSRANLNKLLTDYTEMKKAILHVYWEEFQKDPVGLMSRVAQPASKKIDQNKLKPEMDEKGNLTTAGFACSQCGQPLFVYKLEQVSEKGKAYTNYFGRCNVAEHEKLIKLDQLKPEKDSDEAVTYSLGKFGQRALDFYSIHVTKESTHPVKPLAQIAGNRYASGPVGKALSDACMGTIASFLSKYQDIIIEHQKVVKGNQKRLESLRELAGKENLEYPSVTLPPQPHTKEGVDAYNEVIARVRWWVNLNLWQKLKLSRDDAKPLLRLKGFPSFPLVERQANEVDWWDMVCNVKKLINEKKEDGKVFWQNLAGYKRQEALRPYLSSEEDRKKGKKFARYQLGDLLLHLEKKHGEDWGKVYDEAWERIDKKVEGLSKHIKLEEERRSEDAQSKAALTDWLRAKASFVIEGLKEADKDEFCRCELKLQKWYGDLRGKPFAIEAENSILDISGFSKQYNCAFIWQKDGVKKLNLYLIINYFKGGKLRFKKIKPEAFEANRFYTVINKKSGEIVPMEVNFNFDDPNLIILPLAFGKRQGREFIWNDLLSLETGSLKLANGRVIEKTLYNRRTRQDEPALFVALTFERREVLDSSNIKPMNLIGVDRGENIPAVIALTDPEGCPLSRFKDSLGNPTHILRIGESYKEKQRTIQAKKEVEQRRAGGYSRKYASKAKNLADDMVRNTARDLLYYAVTQDAMLIFENLSRGFGRQGKRTFMAERQYTRMEDWLTAKLAYEGLPSKTYLSKTLAQYTSKTCSNCGFTITSADYDRVLEKLKKTATGWMTTINGKELKVEGQITYYNRYKRQNVVKDLSVELDRLSEESVNNDISSWTKGRSGEALSLLKKRFSHRPVQEKFVCLNCGFETHADEQAALNIARSWLFLRSQEYKKYQTNKTTGNTDKRAFVETWQSFYRKKLKEVWKPAV

SEQ ID NO: 30922 - protein, 977 aa, synthetic construct
  REGION 1..977: note = engineered CasX variant
QEIKRINKIRRRLVKDSNTKKAGKTGPMKTLLVRVMTPDLRERLENLRKKPENIPQPISNTSRANLNKLLTDYTEMKKAILHVYWEEFQKDPVGLMSRVAQPASKKIDQNKLKPEMDEKGNLTTAGFACSQCGQPLFVYKLEQVSEKGKAYTNYFGRCNVAEHEKLILLDQLKPEKDSDEAVTYSLGKFGQRALDFYSIHVTKESTHPVKPLAQIAGNRYASPVGKALSDACMGTIASFLSKYQDIIIEHQKVVKGNQKRLESLRELAGKENLEYPSVTLPPQPHTKEGVDAYNEVIARVRWWVNLNLWQKLKLSRDDAKPLLRLKGFPSFPLVERQANEVDWWDMVCNVKKLINEKKEDGKVFWQNLAGYKRQEALRPYLSSEEDRKKGKKFARYQLGDLLLHLEKKHGEDWGKVYDEAWERIDKKVEGLSKHIKLEEERRSEDAQSKAALTDWLRAKASFVIEGLKEADKDEFCRCELKLQKWYGDLRGKPFAIEAENSILDISGFSKQYNCAFIWQKDGVKKLNLYLIINYFKGGKLRFKKIKPEAFEANRFYTVINKKSGEIVPMEVNFNFDDPNLIILPLAFGKRQGREFIWNDLLSLETGSLKLANGRVIEKTLYNRRTRQDEPALFVALTFERREVLDSSNIKPMNLIGVDRGENIPAVIALTDPEGCPLSRFKDSLGNPTHILRIGESYKEKQRTIQAKKEVEQRRAGGYSRKYASKAKNLADDMVRNTARDLLYYAVTQDAMLIFENLSRGFGRQGKRTFMAERQYTRMEDWLTAKLAYEGLPSKTYLSKTLAQYTSKTCSNCGFTITSADYDRVLEKLKKTATGWMTTINGKELKVEGQITYYNRYKRQNVVKDLSVELDRLSEESVNNDISSWTKGRSGEALSLLKKRFSHRPVQEKFVCLNCGFETHADEQAALNIARSWLFLRSQEYKKYQTNKTTGNTDKRAFVETWQSFYRKKLKEVWKPAV

SEQ ID NO: 30923 - protein, 979 aa, synthetic construct
  REGION 1..979: note = engineered CasX variant
QEIKRINKIRRRLVKDSNTKKAGKTGPMKTLLVRVMTPDLRERLENLRKKPENIPQPISNTSRANLNKLLTDYTEMKKAILHVYWEEFQKDPVGLMSRVAQPASKKIDQNKLKPEMDEKGNLTTAGFACSQCGQPLFVYKLEQVSEKGKAYTNYFGRCNVAEHEKLILLDQLKPEKDSDEAVTYSLGKFGQRALDFYSIHVTKESTHPVKPLAQIAGNRYASYPVGKALSDACMGTIASFLSKYQDIIIEHQKVVKGNQKRLESLRELAGKENLEYPSVTLPPQPHTKEGVDAYNEVIARVRMWVNLNLWQKLKLSRDDAKPLLRLKGFPSFPLVERQQANEVDWWDMVCNVKKLINEKKEDGKVFWQNLAGYKRQEALRPYLSSEEDRKKGKKFARYQLGDLLLHLEKKHGEDWGKVYDEAWERIDKKVEGLSKHIKLEEERRSEDAQSKAALTDWLRAKASFVIEGLKEADKDEFCRCELKLQKWYGDLRGKPFAIEAENSILDISGFSKQYNCAFIWQKDGVKKLNLYLIINYFKGGKLRFKKIKPEAFEANRFYTVINKKSGEIVPMEVNFNFDDPNLIILPLAFGKRQGREFIWNDLLSLETGSLKLANGRVIEKTLYNRRTRQDEPALFVALTFERREVLDSSNIKPMNLIGVDRGENIPAVIALTDPEGCPLSRFKDSLGNPTHILRIGESYKEKQRTIQAKKEVEQRRAGGYSRKYASKAKNLADDMVRNTARDLLYYAVTQDAMLIFENLSRGFGRQGKRTFMAERQYTRMEDWLTAKLAYEGLPSKTYLSKTLAQYTSKTCSNCGFTITSADYDRVLEKLKKTATGWMTTINGKELKVEGQITYYNRYKRQNVVKDLSVELDRLSEESVNNDISSWTKGRSGEALSLLKKRFSHRPVQEKFVCLNCGFETHADEQAALNIARSWLFLRSQEYKKYQTNKTTGNTDKRAFVETWQSFYRKKLKEVWKPAV

SEQ ID NO: 30924 - protein, 979 aa, synthetic construct
  REGION 1..979: note = engineered CasX variant
QEIKRINKIRRRLVKDSNTKKAGKTGPMKTLLVRVMTPDLRERLENLRKKPENIPQPISNTSRANLNKLLTDYTEMKKAILHVYWEEFQKDPVGLMSRVAQPASKKIDQNKLKPEMDEKGNLTTAGFACSQCGQPLFVYKLEQVSEKGKAYTNYFGRCNVAEHEKLILLDQLKPEKDSDEAVTYSLGKFGQRALDFYSIHVTKESTHPVKPLAQIAGNRYASHPVGKALSDACMGTIASFLSKYQDIIIEHQKVVKGNQKRLESLRELAGKENLEYPSVTLPPQPHTKEGVDAYNEVIARVRMWVNLNLWQKLKLSRDDAKPLLRLKGFPSFPLVERQQANEVDWWDMVCNVKKLINEKKEDGKVFWQNLAGYKRQEALRPYLSSEEDRKKGKKFARYQLGDLLLHLEKKHGEDWGKVYDEAWERIDKKVEGLSKHIKLEEERRSEDAQSKAALTDWLRAKASFVIEGLKEADKDEFCRCELKLQKWYGDLRGKPFAIEAENSILDISGFSKQYNCAFIWQKDGVKKLNLYLIINYFKGGKLRFKKIKPEAFEANRFYTVINKKSGEIVPMEVNFNFDDPNLIILPLAFGKRQGREFIWNDLLSLETGSLKLANGRVIEKTLYNRRTRQDEPALFVALTFERREVLDSSNIKPMNLIGVDRGENIPAVIALTDPEGCPLSRFKDSLGNPTHILRIGESYKEKQRTIQAKKEVEQRRAGGYSRKYASKAKNLADDMVRNTARDLLYYAVTQDAMLIFENLSRGFGRQGKRTFMAERQYTRMEDWLTAKLAYEGLPSKTYLSKTLAQYTSKTCSNCGFTITSADYDRVLEKLKKTATGWMTTINGKELKVEGQITYYNRYKRQNVVKDLSVELDRLSEESVNNDISSWTKGRSGEALSLLKKRFSHRPVQEKFVCLNCGFETHADEQAALNIARSWLFLRSQEYKKYQTNKTTGNTDKRAFVETWQSFYRKKLKEVWKPAV

SEQ ID NO: 30925 - protein, 979 aa, synthetic construct
  REGION 1..979: note = engineered CasX variant
QEIKRINKIRRRLVKDSNTKKAGKTGPMKTLLVRVMTPDLRERLENLRKKPENIPQPISNTSRANLNKLLTDYTEMKKAILHVYWEEFQKDPVGLMSRVAQPASKKIDQNKLKPEMDEKGNLTTAGFACSQCGQPLFVYKLEQVSEKGKAYTNYFGRCNVAEHEKLILLDQLKPEKDSDEAVTYSLGKFGQRALDFYSIHVTKESTHPVKPLAQIAGNRYASSPVGKALSDACMGTIASFLSKYQDIIIEHQKVVKGNQKRLESLRELAGKENLEYPSVTLPPQPHTKEGVDAYNEVIARVRMWVNLNLWQKLKLSRDDAKPLLRLKGFPSFPLVERQQANEVDWWDMVCNVKKLINEKKEDGKVFWQNLAGYKRQEALRPYLSSEEDRKKGKKFARYQLGDLLLHLEKKHGEDWGKVYDEAWERIDKKVEGLSKHIKLEEERRSEDAQSKAALTDWLRAKASFVIEGLKEADKDEFCRCELKLQKWYGDLRGKPFAIEAENSILDISGFSKQYNCAFIWQKDGVKKLNLYLIINYFKGGKLRFKKIKPEAFEANRFYTVINKKSGEIVPMEVNFNFDDPNLIILPLAFGKRQGREFIWNDLLSLETGSLKLANGRVIEKTLYNRRTRQDEPALFVALTFERREVLDSSNIKPMNLIGVDRGENIPAVIALTDPEGCPLSRFKDSLGNPTHILRIGESYKEKQRTIQAKKEVEQRRAGGYSRKYASKAKNLADDMVRNTARDLLYYAVTQDAMLIFENLSRGFGRQGKRTFMAERQYTRMEDWLTAKLAYEGLPSKTYLSKTLAQYTSKTCSNCGFTITSADYDRVLEKLKKTATGWMTTINGKELKVEGQITYYNRYKRQNVVKDLSVELDRLSEESVNNDISSWTKGRSGEALSLLKKRFSHRPVQEKFVCLNCGFETHADEQAALNIARSWLFLRSQEYKKYQTNKTTGNTDKRAFVETWQSFYRKKLKEVWKPAV

SEQ ID NO: 30926 - protein, 979 aa, synthetic construct
  REGION 1..979: note = engineered CasX variant
QEIKRINKIRRRLVKDSNTKKAGKTGPMKTLLVRVMTPDLRERLENLRKKPENIPQPISNTSRANLNKLLTDYTEMKKAILHVYWEEFQKDPVGLMSRVAQPASKKIDQNKLKPEMDEKGNLTTAGFACSQCGQPLFVYKLEQVSEKGKAYTNYFGRCNVAEHEKLILLDQLKPEKDSDEAVTYSLGKFGQRALDFYSIHVTKESTHPVKPLAQIAGNRYASTPVGKALSDACMGTIASFLSKYQDIIIEHQKVVKGNQKRLESLRELAGKENLEYPSVTLPPQPHTKEGVDAYNEVIARVRMWVNLNLWQKLKLSRDDAKPLLRLKGFPSFPLVERQQANEVDWWDMVCNVKKLINEKKEDGKVFWQNLAGYKRQEALRPYLSSEEDRKKGKKFARYQLGDLLLHLEKKHGEDWGKVYDEAWERIDKKVEGLSKHIKLEEERRSEDAQSKAALTDWLRAKASFVIEGLKEADKDEFCRCELKLQKWYGDLRGKPFAIEAENSILDISGFSKQYNCAFIWQKDGVKKLNLYLIINYFKGGKLRFKKIKPEAFEANRFYTVINKKSGEIVPMEVNFNFDDPNLIILPLAFGKRQGREFIWNDLLSLETGSLKLANGRVIEKTLYNRRTRQDEPALFVALTFERREVLDSSNIKPMNLIGVDRGENIPAVIALTDPEGCPLSRFKDSLGNPTHILRIGESYKEKQRTIQAKKEVEQRRAGGYSRKYASKAKNLADDMVRNTARDLLYYAVTQDAMLIFENLSRGFGRQGKRTFMAERQYTRMEDWLTAKLAYEGLPSKTYLSKTLAQYTSKTCSNCGFTITSADYDRVLEKLKKTATGWMTTINGKELKVEGQITYYNRYKRQNVVKDLSVELDRLSEESVNNDISSWTKGRSGEALSLLKKRFSHRPVQEKFVCLNCGFETHADEQAALNIARSWLFLRSQEYKKYQTNKTTGNTDKRAFVETWQSFYRKKLKEVWKPAV

SEQ ID NO: 30927 - protein, 979 aa, synthetic construct
  REGION 1..979: note = engineered CasX variant
QEIKRINKIRRRLVKDSNTKKAGKTGPMKTLLVRVMTPDLRERLENLRKKPENIPQPISNTSRANLNKLLTDYTEMKKAILHVYWEEFQKDPVGLMSRVAQPASKKIDQNKLKPEMDEKGNLTTAGFACSQCGQPLFVYKLEQVSEKGKAYTNYFGRCNVAEHEKLILLDQLKPEKDSDEAVTYSLGKFGQRALDFYSIHVTKESTHPVKPLAQIAGNRYASAPVGKALSDACMGTIASFLSKYQDIIIEHQKVVKGNQKRLESLRELAGKENLEYPSVTLPPQPHTKEGVDAYNEVIARVRMWVNLNLWQKLKLSRDDAKPLLRLKGFPSFPLVERQQANEVDWWDMVCNVKKLINEKKEDGKVFWQNLAGYKRQEALRPYLSSEEDRKKGKKFARYQLGDLLLHLEKKHGEDWGKVYDEAWERIDKKVEGLSKHIKLEEERRSEDAQSKAALTDWLRAKASFVIEGLKEADKDEFCRCELKLQKWYGDLRGKPFAIEAENSILDISGFSKQYNCAFIWQKDGVKKLNLYLIINYFKGGKLRFKKIKPEAFEANRFYTVINKKSGEIVPMEVNFNFDDPNLIILPLAFGKRQGREFIWNDLLSLETGSLKLANGRVIEKTLYNRRTRQDEPALFVALTFERREVLDSSNIKPMNLIGVDRGENIPAVIALTDPEGCPLSRFKDSLGNPTHILRIGESYKEKQRTIQAKKEVEQRRAGGYSRKYASKAKNLADDMVRNTARDLLYYAVTQDAMLIFENLSRGFGRQGKRTFMAERQYTRMEDWLTAKLAYEGLPSKTYLSKTLAQYTSKTCSNCGFTITSADYDRVLEKLKKTATGWMTTINGKELKVEGQITYYNRYKRQNVVKDLSVELDRLSEESVNNDISSWTKGRSGEALSLLKKRFSHRPVQEKFVCLNCGFETHADEQAALNIARSWLFLRSQEYKKYQTNKTTGNTDKRAFVETWQSFYRKKLKEVWKPAV

SEQ ID NO: 30928 - protein, 979 aa, synthetic construct
  REGION 1..979: note = engineered CasX variant
QEIKRINKIRRRLVKDSNTKKAGKTGPMKTLLVRVMTPDLRERLENLRKKPENIPQPISNTSRANLNKLLTDYTEMKKAILHVYWEEFQKDPVGLMSRVAQPASKKIDQNKLKPEMDEKGNLTTAGFACSQCGQPLFVYKLEQVSEKGKAYTNYFGRCNVAEHEKLILLDQLKPEKDSDEAVTYSLGKFGQRALDFYSIHVTKESTHPVKPLAQIAGNRYASVPVGKALSDACMGTIASFLSKYQDIIIEHQKVVKGNQKRLESLRELAGKENLEYPSVTLPPQPHTKEGVDAYNEVIARVRMWVNLNLWQKLKLSRDDAKPLLRLKGFPSFPLVERQQANEVDWWDMVCNVKKLINEKKEDGKVFWQNLAGYKRQEALRPYLSSEEDRKKGKKFARYQLGDLLLHLEKKHGEDWGKVYDEAWERIDKKVEGLSKHIKLEEERRSEDAQSKAALTDWLRAKASFVIEGLKEADKDEFCRCELKLQKWYGDLRGKPFAIEAENSILDISGFSKQYNCAFIWQKDGVKKLNLYLIINYFKGGKLRFKKIKPEAFEANRFYTVINKKSGEIVPMEVNFNFDDPNLIILPLAFGKRQGREFIWNDLLSLETGSLKLANGRVIEKTLYNRRTRQDEPALFVALTFERREVLDSSNIKPMNLIGVDRGENIPAVIALTDPEGCPLSRFKDSLGNPTHILRIGESYKEKQRTIQAKKEVEQRRAGGYSRKYASKAKNLADDMVRNTARDLLYYAVTQDAMLIFENLSRGFGRQGKRTFMAERQYTRMEDWLTAKLAYEGLPSKTYLSKTLAQYTSKTCSNCGFTITSADYDRVLEKLKKTATGWMTTINGKELKVEGQITYYNRYKRQNVVKDLSVELDRLSEESVNNDISSWTKGRSGEALSLLKKRFSHRPVQEKFVCLNCGFETHADEQAALNIARSWLFLRSQEYKKYQTNKTTGNTDKRAFVETWQSFYRKKLKEVWKPAV

SEQ ID NO: 30929 - protein, 979 aa, synthetic construct
  REGION 1..979: note = engineered CasX variant
QEIKRINKIRRRLVKDSNTKKAGKTGPMKTLLVRVMTPDLRERLENLRKKPENIPQPISNTSRANLNKLLTDYTEMKKAILHVYWEEFQKDPVGLMSRVAQPASKKIDQNKLKPEMDEKGNLTTAGFACSQCGQPLFVYKLEQVSEKGKAYTNYFGRCNVAEHEKLIKLDQLKPEKDSDEAVTYSLGKFGQRALDFYSIHVTKESTHPVKPLAQIAGNRYASGPVGKALSDACMGTIASFLSKYQDIIIEHQKVVKGNQKRLESLRELAGKENLEYPSVTLPPQPHTKEGVDAYNEVIARVRMWVNLNLWQKLKLSRDDAKPLLRLKGFPSFPLVERQQANEVDWWDMVCNVKKLINEKKEDGKVFWQNLAGYKRQEALRPYLSSEEDRKKGKKFARYQLGDLLLHLEKKHGEDWGKVYDEAWERIDKKVEGLSKHIKLEEERRSEDAQSKAALTDWLRAKASFVIEGLKEADKDEFCRCELKLQKWYGDLRGKPFAIEAENSILDISGFSKQYNCAFIWQKDGVKKLNLYLIINYFKGGKLRFKKIKPEAFEANRFYTVINKKSGEIVPMEVNFNFDDPNLIILPLAFGKRQGREFIWNDLLSLETGSLKLANGRVIEKTLYNRRTRQDEPALFVALTFERREVLDSSNIKPMNLIGVDRGENIPAVIALTDPEGCPLSRFKDSLGNPTHILRIGESYKEKQRTIQAKKEVEQRRAGGYSRKYASKAKNLADDMVRNTARDLLYYAVTQDAMLIFENLSRGFGRQGKRTFMAERQYTRMEDWLTAKLAYEGLPSKTYLSKTLAQYTSKTCSNCGFTITSADYDRVLEKLKKTATGWMTTINGKELKVEGQITYYNRYKRQNVVKDLSVELDRLSEESVNNDISSWTKGRSGEALSLLKKRFSHRPVQEKFVCLNCGFETHADEQAALNIARSWLFLRSQEYKKYQTNKTTGNTDKRAFVETWQSFYRKKLKEVWKPAV

SEQ ID NO: 30930 - protein, 978 aa, synthetic construct
  REGION 1..978: note = engineered CasX variant
QEIKRINKIRRRLVKDSNTKKAGKTGPMKTLLVRVMTPDLRERLENLRKKPENIPQPISNTSRANLNKLLTDYTEMKKAILHVYWEEFQKDPVGLMSRVAQPASKKIDQNKLKPEMDEKGNLTTAGFACSQCGQPLFVYKLEQVSEKGKAYTNYFGRCNVAEHEKLILLDQLKPEKDSDEAVTYSLGKFGQRALDFYSIHVTKESTHPVKPLAQIAGNRYASPVGKALSDACMGTIASFLSKYQDIIIEHQKVVKGNQKRLESLRELAGKENLEYPSVTLPPQPHTKEGVDAYNEVIARVRMWVNLNLWQKLKLSRDDAKPLLRLKGFPSFPLVERQQANEVDWWDMVCNVKKLINEKKEDGKVFWQNLAGYKRQEALRPYLSSEEDRKKGKKFARYQLGDLLLHLEKKHGEDWGKVYDEAWERIDKKVEGLSKHIKLEEERRSEDAQSKAALTDWLRAKASFVIEGLKEADKDEFCRCELKLQKWYGDLRGKPFAIEAENSILDISGFSKQYNCAFIWQKDGVKKLNLYLIINYFKGGKLRFKKIKPEAFEANRFYTVINKKSGEIVPMEVNFNFDDPNLIILPLAFGKRQGREFIWNDLLSLETGSLKLANGRVIEKTLYNRRTRQDEPALFVALTFERREVLDSSNIKPMNLIGVDRGENIPAVIALTDPEGCPLSRFKDSLGNPTHILRIGESYKEKQRTIQAKKEVEQRRAGGYSRKYASKAKNLADDMVRNTARDLLYYAVTQDAMLIFENLSRGFGRQGKRTFMAERQYTRMEDWLTAKLAYEGLPSKTYLSKTLAQYTSKTCSNCGFTITSADYDRVLEKLKKTATGWMTTINGKELKVEGQITYYNRYKRQNVVKDLSVELDRLSEESVNNDISSWTKGRSGEALSLLKKRFSHRPVQEKFVCLNCGFETHADEQAALNIARSWLFLRSQEYKKYQTNKTTGNTDKRAFVETWQSFYRKKLKEVWKPAV

SEQ ID NO: 30931 - protein, 979 aa, synthetic construct
  REGION 1..979: note = engineered CasX variant
QEIKRINKIRRRLVKDSNTKKAGKTGPMKTLLVRVMTPDLRERLENLRKKPENIPQPISNTSRANLNKLLTDYTEMKKAILHVYWEEFQKDPVGLMSRVAQPASKKIDQNKLKPEMDEKGNLTTAGFACSQCGQPLFVYKLEQVSEKGKAYTNYFGRCNVAEHEKLILLDQLKPEKDSDEAVTYSLGKFGQRALDFYSIHVTKESTHPVKPLAQIAGNRYASYPVGKALSDACMGTIASFLSKYQDIIIEHQKVVKGNQKRLESLRELAGKENLEYPSVTLPPQPHTKEGVDAYNEVIARVRMWVNLNLWQKLKLSRDDAKPLLRLKGFPSFPLVERQANAEVDWWDMVCNVKKLINEKKEDGKVFWQNLAGYKRQEALRPYLSSEEDRKKGKKFARYQLGDLLLHLEKKHGEDWGKVYDEAWERIDKKVEGLSKHIKLEEERRSEDAQSKAALTDWLRAKASFVIEGLKEADKDEFCRCELKLQKWYGDLRGKPFAIEAENSILDISGFSKQYNCAFIWQKDGVKKLNLYLIINYFKGGKLRFKKIKPEAFEANRFYTVINKKSGEIVPMEVNFNFDDPNLIILPLAFGKRQGREFIWNDLLSLETGSLKLANGRVIEKTLYNRRTRQDEPALFVALTFERREVLDSSNIKPMNLIGVDRGENIPAVIALTDPEGCPLSRFKDSLGNPTHILRIGESYKEKQRTIQAKKEVEQRRAGGYSRKYASKAKNLADDMVRNTARDLLYYAVTQDAMLIFENLSRGFGRQGKRTFMAERQYTRMEDWLTAKLAYEGLPSKTYLSKTLAQYTSKTCSNCGFTITSADYDRVLEKLKKTATGWMTTINGKELKVEGQITYYNRYKRQNVVKDLSVELDRLSEESVNNDISSWTKGRSGEALSLLKKRFSHRPVQEKFVCLNCGFETHADEQAALNIARSWLFLRSQEYKKYQTNKTTGNTDKRAFVETWQSFYRKKLKEVWKPAV

SEQ ID NO: 30932 - protein, 979 aa, synthetic construct
  REGION 1..979: note = engineered CasX variant
QEIKRINKIRRRLVKDSNTKKAGKTGPMKTLLVRVMTPDLRERLENLRKKPENIPQPISNTSRANLNKLLTDYTEMKKAILHVYWEEFQKDPVGLMSRVAQPASKKIDQNKLKPEMDEKGNLTTAGFACSQCGQPLFVYKLEQVSEKGKAYTNYFGRCNVAEHEKLILLDQLKPEKDSDEAVTYSLGKFGQRALDFYSIHVTKESTHPVKPLAQIAGNRYASHPVGKALSDACMGTIASFLSKYQDIIIEHQKVVKGNQKRLESLRELAGKENLEYPSVTLPPQPHTKEGVDAYNEVIARVRMWVNLNLWQKLKLSRDDAKPLLRLKGFPSFPLVERQANAEVDWWDMVCNVKKLINEKKEDGKVFWQNLAGYKRQEALRPYLSSEEDRKKGKKFARYQLGDLLLHLEKKHGEDWGKVYDEAWERIDKKVEGLSKHIKLEEERRSEDAQSKAALTDWLRAKASFVIEGLKEADKDEFCRCELKLQKWYGDLRGKPFAIEAENSILDISGFSKQYNCAFIWQKDGVKKLNLYLIINYFKGGKLRFKKIKPEAFEANRFYTVINKKSGEIVPMEVNFNFDDPNLIILPLAFGKRQGREFIWNDLLSLETGSLKLANGRVIEKTLYNRRTRQDEPALFVALTFERREVLDSSNIKPMNLIGVDRGENIPAVIALTDPEGCPLSRFKDSLGNPTHILRIGESYKEKQRTIQAKKEVEQRRAGGYSRKYASKAKNLADDMVRNTARDLLYYAVTQDAMLIFENLSRGFGRQGKRTFMAERQYTRMEDWLTAKLAYEGLPSKTYLSKTLAQYTSKTCSNCGFTITSADYDRVLEKLKKTATGWMTTINGKELKVEGQITYYNRYKRQNVVKDLSVELDRLSEESVNNDISSWTKGRSGEALSLLKKRFSHRPVQEKFVCLNCGFETHADEQAALNIARSWLFLRSQEYKKYQTNKTTGNTDKRAFVETWQSFYRKKLKEVWKPAV

SEQ ID NO: 30933 - protein, 979 aa, synthetic construct
  REGION 1..979: note = engineered CasX variant
QEIKRINKIRRRLVKDSNTKKAGKTGPMKTLLVRVMTPDLRERLENLRKKPENIPQPISNTSRANLNKLLTDYTEMKKAILHVYWEEFQKDPVGLMSRVAQPASKKIDQNKLKPEMDEKGNLTTAGFACSQCGQPLFVYKLEQVSEKGKAYTNYFGRCNVAEHEKLILLDQLKPEKDSDEAVTYSLGKFGQRALDFYSIHVTKESTHPVKPLAQIAGNRYASSPVGKALSDACMGTIASFLSKYQDIIIEHQKVVKGNQKRLESLRELAGKENLEYPSVTLPPQPHTKEGVDAYNEVIARVRMWVNLNLWQKLKLSRDDAKPLLRLKGFPSFPLVERQANAEVDWWDMVCNVKKLINEKKEDGKVFWQNLAGYKRQEALRPYLSSEEDRKKGKKFARYQLGDLLLHLEKKHGEDWGKVYDEAWERIDKKVEGLSKHIKLEEERRSEDAQSKAALTDWLRAKASFVIEGLKEADKDEFCRCELKLQKWYGDLRGKPFAIEAENSILDISGFSKQYNCAFIWQKDGVKKLNLYLIINYFKGGKLRFKKIKPEAFEANRFYTVINKKSGEIVPMEVNFNFDDPNLIILPLAFGKRQGREFIWNDLLSLETGSLKLANGRVIEKTLYNRRTRQDEPALFVALTFERREVLDSSNIKPMNLIGVDRGENIPAVIALTDPEGCPLSRFKDSLGNPTHILRIGESYKEKQRTIQAKKEVEQRRAGGYSRKYASKAKNLADDMVRNTARDLLYYAVTQDAMLIFENLSRGFGRQGKRTFMAERQYTRMEDWLTAKLAYEGLPSKTYLSKTLAQYTSKTCSNCGFTITSADYDRVLEKLKKTATGWMTTINGKELKVEGQITYYNRYKRQNVVKDLSVELDRLSEESVNNDISSWTKGRSGEALSLLKKRFSHRPVQEKFVCLNCGFETHADEQAALNIARSWLFLRSQEYKKYQTNKTTGNTDKRAFVETWQSFYRKKLKEVWKPAV

SEQ ID NO: 30934 - protein, 979 aa, synthetic construct
  REGION 1..979: note = engineered CasX variant
QEIKRINKIRRRLVKDSNTKKAGKTGPMKTLLVRVMTPDLRERLENLRKKPENIPQPISNTSRANLNKLLTDYTEMKKAILHVYWEEFQKDPVGLMSRVAQPASKKIDQNKLKPEMDEKGNLTTAGFACSQCGQPLFVYKLEQVSEKGKAYTNYFGRCNVAEHEKLILLDQLKPEKDSDEAVTYSLGKFGQRALDFYSIHVTKESTHPVKPLAQIAGNRYASTPVGKALSDACMGTIASFLSKYQDIIIEHQKVVKGNQKRLESLRELAGKENLEYPSVTLPPQPHTKEGVDAYNEVIARVRMWVNLNLWQKLKLSRDDAKPLLRLKGFPSFPLVERQANAEVDWWDMVCNVKKLINEKKEDGKVFWQNLAGYKRQEALRPYLSSEEDRKKGKKFARYQLGDLLLHLEKKHGEDWGKVYDEAWERIDKKVEGLSKHIKLEEERRSEDAQSKAALTDWLRAKASFVIEGLKEADKDEFCRCELKLQKWYGDLRGKPFAIEAENSILDISGFSKQYNCAFIWQKDGVKKLNLYLIINYFKGGKLRFKKIKPEAFEANRFYTVINKKSGEIVPMEVNFNFDDPNLIILPLAFGKRQGREFIWNDLLSLETGSLKLANGRVIEKTLYNRRTRQDEPALFVALTFERREVLDSSNIKPMNLIGVDRGENIPAVIALTDPEGCPLSRFKDSLGNPTHILRIGESYKEKQRTIQAKKEVEQRRAGGYSRKYASKAKNLADDMVRNTARDLLYYAVTQDAMLIFENLSRGFGRQGKRTFMAERQYTRMEDWLTAKLAYEGLPSKTYLSKTLAQYTSKTCSNCGFTITSADYDRVLEKLKKTATGWMTTINGKELKVEGQITYYNRYKRQNVVKDLSVELDRLSEESVNNDISSWTKGRSGEALSLLKKRFSHRPVQEKFVCLNCGFETHADEQAALNIARSWLFLRSQEYKKYQTNKTTGNTDKRAFVETWQSFYRKKLKEVWKPAV

SEQ ID NO: 30935 - protein, 979 aa, synthetic construct
  REGION 1..979: note = engineered CasX variant
QEIKRINKIRRRLVKDSNTKKAGKTGPMKTLLVRVMTPDLRERLENLRKKPENIPQPISNTSRANLNKLLTDYTEMKKAILHVYWEEFQKDPVGLMSRVAQPASKKIDQNKLKPEMDEKGNLTTAGFACSQCGQPLFVYKLEQVSEKGKAYTNYFGRCNVAEHEKLILLDQLKPEKDSDEAVTYSLGKFGQRALDFYSIHVTKESTHPVKPLAQIAGNRYASAPVGKALSDACMGTIASFLSKYQDIIIEHQKVVKGNQKRLESLRELAGKENLEYPSVTLPPQPHTKEGVDAYNEVIARVRMWVNLNLWQKLKLSRDDAKPLLRLKGFPSFPLVERQANAEVDWWDMVCNVKKLINEKKEDGKVFWQNLAGYKRQEALRPYLSSEEDRKKGKKFARYQLGDLLLHLEKKHGEDWGKVYDEAWERIDKKVEGLSKHIKLEEERRSEDAQSKAALTDWLRAKASFVIEGLKEADKDEFCRCELKLQKWYGDLRGKPFAIEAENSILDISGFSKQYNCAFIWQKDGVKKLNLYLIINYFKGGKLRFKKIKPEAFEANRFYTVINKKSGEIVPMEVNFNFDDPNLIILPLAFGKRQGREFIWNDLLSLETGSLKLANGRVIEKTLYNRRTRQDEPALFVALTFERREVLDSSNIKPMNLIGVDRGENIPAVIALTDPEGCPLSRFKDSLGNPTHILRIGESYKEKQRTIQAKKEVEQRRAGGYSRKYASKAKNLADDMVRNTARDLLYYAVTQDAMLIFENLSRGFGRQGKRTFMAERQYTRMEDWLTAKLAYEGLPSKTYLSKTLAQYTSKTCSNCGFTITSADYDRVLEKLKKTATGWMTTINGKELKVEGQITYYNRYKRQNVVKDLSVELDRLSEESVNNDISSWTKGRSGEALSLLKKRFSHRPVQEKFVCLNCGFETHADEQAALNIARSWLFLRSQEYKKYQTNKTTGNTDKRAFVETWQSFYRKKLKEVWKPAV

SEQ ID NO: 30936 - protein, 979 aa, synthetic construct
  REGION 1..979: note = engineered CasX variant
QEIKRINKIRRRLVKDSNTKKAGKTGPMKTLLVRVMTPDLRERLENLRKKPENIPQPISNTSRANLNKLLTDYTEMKKAILHVYWEEFQKDPVGLMSRVAQPASKKIDQNKLKPEMDEKGNLTTAGFACSQCGQPLFVYKLEQVSEKGKAYTNYFGRCNVAEHEKLILLDQLKPEKDSDEAVTYSLGKFGQRALDFYSIHVTKESTHPVKPLAQIAGNRYASVPVGKALSDACMGTIASFLSKYQDIIIEHQKVVKGNQKRLESLRELAGKENLEYPSVTLPPQPHTKEGVDAYNEVIARVRMWVNLNLWQKLKLSRDDAKPLLRLKGFPSFPLVERQANAEVDWWDMVCNVKKLINEKKEDGKVFWQNLAGYKRQEALRPYLSSEEDRKKGKKFARYQLGDLLLHLEKKHGEDWGKVYDEAWERIDKKVEGLSKHIKLEEERRSEDAQSKAALTDWLRAKASFVIEGLKEADKDEFCRCELKLQKWYGDLRGKPFAIEAENSILDISGFSKQYNCAFIWQKDGVKKLNLYLIINYFKGGKLRFKKIKPEAFEANRFYTVINKKSGEIVPMEVNFNFDDPNLIILPLAFGKRQGREFIWNDLLSLETGSLKLANGRVIEKTLYNRRTRQDEPALFVALTFERREVLDSSNIKPMNLIGVDRGENIPAVIALTDPEGCPLSRFKDSLGNPTHILRIGESYKEKQRTIQAKKEVEQRRAGGYSRKYASKAKNLADDMVRNTARDLLYYAVTQDAMLIFENLSRGFGRQGKRTFMAERQYTRMEDWLTAKLAYEGLPSKTYLSKTLAQYTSKTCSNCGFTITSADYDRVLEKLKKTATGWMTTINGKELKVEGQITYYNRYKRQNVVKDLSVELDRLSEESVNNDISSWTKGRSGEALSLLKKRFSHRPVQEKFVCLNCGFETHADEQAALNIARSWLFLRSQEYKKYQTNKTTGNTDKRAFVETWQSFYRKKLKEVWKPAV

SEQ ID NO: 30937 - protein, 979 aa, synthetic construct
  REGION 1..979: note = engineered CasX variant
QEIKRINKIRRRLVKDSNTKKAGKTGPMKTLLVRVMTPDLRERLENLRKKPENIPQPISNTSRANLNKLLTDYTEMKKAILHVYWEEFQKDPVGLMSRVAQPASKKIDQNKLKPEMDEKGNLTTAGFACSQCGQPLFVYKLEQVSEKGKAYTNYFGRCNVAEHEKLIKLDQLKPEKDSDEAVTYSLGKFGQRALDFYSIHVTKESTHPVKPLAQIAGNRYASGPVGKALSDACMGTIASFLSKYQDIIIEHQKVVKGNQKRLESLRELAGKENLEYPSVTLPPQPHTKEGVDAYNEVIARVRMWVNLNLWQKLKLSRDDAKPLLRLKGFPSFPLVERQANAEVDWWDMVCNVKKLINEKKEDGKVFWQNLAGYKRQEALRPYLSSEEDRKKGKKFARYQLGDLLLHLEKKHGEDWGKVYDEAWERIDKKVEGLSKHIKLEEERRSEDAQSKAALTDWLRAKASFVIEGLKEADKDEFCRCELKLQKWYGDLRGKPFAIEAENSILDISGFSKQYNCAFIWQKDGVKKLNLYLIINYFKGGKLRFKKIKPEAFEANRFYTVINKKSGEIVPMEVNFNFDDPNLIILPLAFGKRQGREFIWNDLLSLETGSLKLANGRVIEKTLYNRRTRQDEPALFVALTFERREVLDSSNIKPMNLIGVDRGENIPAVIALTDPEGCPLSRFKDSLGNPTHILRIGESYKEKQRTIQAKKEVEQRRAGGYSRKYASKAKNLADDMVRNTARDLLYYAVTQDAMLIFENLSRGFGRQGKRTFMAERQYTRMEDWLTAKLAYEGLPSKTYLSKTLAQYTSKTCSNCGFTITSADYDRVLEKLKKTATGWMTTINGKELKVEGQITYYNRYKRQNVVKDLSVELDRLSEESVNNDISSWTKGRSGEALSLLKKRFSHRPVQEKFVCLNCGFETHADEQAALNIARSWLFLRSQEYKKYQTNKTTGNTDKRAFVETWQSFYRKKLKEVWKPAV

SEQ ID NO: 30938 - protein, 978 aa, synthetic construct
  REGION 1..978: note = engineered CasX variant
QEIKRINKIRRRLVKDSNTKKAGKTGPMKTLLVRVMTPDLRERLENLRKKPENIPQPISNTSRANLNKLLTDYTEMKKAILHVYWEEFQKDPVGLMSRVAQPASKKIDQNKLKPEMDEKGNLTTAGFACSQCGQPLFVYKLEQVSEKGKAYTNYFGRCNVAEHEKLILLDQLKPEKDSDEAVTYSLGKFGQRALDFYSIHVTKESTHPVKPLAQIAGNRYASPVGKALSDACMGTIASFLSKYQDIIIEHQKVVKGNQKRLESLRELAGKENLEYPSVTLPPQPHTKEGVDAYNEVIARVRMWVNLNLWQKLKLSRDDAKPLLRLKGFPSFPLVERQANAEVDWWDMVCNVKKLINEKKEDGKVFWQNLAGYKRQEALRPYLSSEEDRKKGKKFARYQLGDLLLHLEKKHGEDWGKVYDEAWERIDKKVEGLSKHIKLEEERRSEDAQSKAALTDWLRAKASFVIEGLKEADKDEFCRCELKLQKWYGDLRGKPFAIEAENSILDISGFSKQYNCAFIWQKDGVKKLNLYLIINYFKGGKLRFKKIKPEAFEANRFYTVINKKSGEIVPMEVNFNFDDPNLIILPLAFGKRQGREFIWNDLLSLETGSLKLANGRVIEKTLYNRRTRQDEPALFVALTFERREVLDSSNIKPMNLIGVDRGENIPAVIALTDPEGCPLSRFKDSLGNPTHILRIGESYKEKQRTIQAKKEVEQRRAGGYSRKYASKAKNLADDMVRNTARDLLYYAVTQDAMLIFENLSRGFGRQGKRTFMAERQYTRMEDWLTAKLAYEGLPSKTYLSKTLAQYTSKTCSNCGFTITSADYDRVLEKLKKTATGWMTTINGKELKVEGQITYYNRYKRQNVVKDLSVELDRLSEESVNNDISSWTKGRSGEALSLLKKRFSHRPVQEKFVCLNCGFETHADEQAALNIARSWLFLRSQEYKKYQTNKTTGNTDKRAFVETWQSFYRKKLKEVWKPAV

SEQ ID NO: 30939 - protein, 978 aa, synthetic construct
  REGION 1..978: note = engineered CasX variant
QEIKRINKIRRRLVKDSNTKKAGKTGPMKTLLVRVMTPDLRERLENLRKKPENIPQPISNTSRANLNKLLTDYTEMKKAILHVYWEEFQKDPVGLMSRVAQPASKKIDQNKLKPEMDEKGNLTTAGFACSQCGQPLFVYKLEQVSEKGKAYTNYFGRCNVAEHEKLILLDQLKPEKDSDEAVTYSLGKFGQRALDFYSIHVTKESTHPVKPLAQIAGNRYASYPVGKALSDACMGTIASFLSKYQDIIIEHQKVVKGNQKRLESLRELAGKENLEYPSVTLPPQPHTKEGVDAYNEVIARVRMWVNLNLWQKLKLSRDDAKPLLRLKGFPSFPLVERQANEVDWWDMVCNVKKLINEKKEDGKVFWQNLAGYKRQEALRPYLSSEEDRKKGKKFARTQLGDLLLHLEKKHGEDWGKVYDEAWERIDKKVEGLSKHIKLEEERRSEDAQSKAALTDWLRAKASFVIEGLKEADKDEFCRCELKLQKWYGDLRGKPFAIEAENSILDISGFSKQYNCAFIWQKDGVKKLNLYLIINYFKGGKLRFKKIKPEAFEANRFYTVINKKSGEIVPMEVNFNFDDPNLIILPLAFGKRQGREFIWNDLLSLETGSLKLANGRVIEKTLYNRRTRQDEPALFVALTFERREVLDSSNIKPMNLIGVDRGENIPAVIALTDPEGCPLSRFKDSLGNPTHILRIGESYKEKQRTIQAKKEVEQRRAGGYSRKYASKAKNLADDMVRNTARDLLYYAVTQDAMLIFENLSRGFGRQGKRTFMAERQYTRMEDWLTAKLAYEGLPSKTYLSKTLAQYTSKTCSNCGFTITSADYDRVLEKLKKTATGWMTTINGKELKVEGQITYYNRYKRQNVVKDLSVELDRLSEESVNNDISSWTKGRSGEALSLLKKRFSHRPVQEKFVCLNCGFETHADEQAALNIARSWLFLRSQEYKKYQTNKTTGNTDKRAFVETWQSFYRKKLKEVWKPAV

SEQ ID NO: 30940 - protein, 978 aa, synthetic construct
  REGION 1..978: note = engineered CasX variant
QEIKRINKIRRRLVKDSNTKKAGKTGPMKTLLVRVMTPDLRERLENLRKKPENIPQPISNTSRANLNKLLTDYTEMKKAILHVYWEEFQKDPVGLMSRVAQPASKKIDQNKLKPEMDEKGNLTTAGFACSQCGQPLFVYKLEQVSEKGKAYTNYFGRCNVAEHEKLILLDQLKPEKDSDEAVTYSLGKFGQRALDFYSIHVTKESTHPVKPLAQIAGNRYASHPVGKALSDACMGTIASFLSKYQDIIIEHQKVVKGNQKRLESLRELAGKENLEYPSVTLPPQPHTKEGVDAYNEVIARVRMWVNLNLWQKLKLSRDDAKPLLRLKGFPSFPLVERQANEVDWWDMVCNVKKLINEKKEDGKVFWQNLAGYKRQEALRPYLSSEEDRKKGKKFARTQLGDLLLHLEKKHGEDWGKVYDEAWERIDKKVEGLSKHIKLEEERRSEDAQSKAALTDWLRAKASFVIEGLKEADKDEFCRCELKLQKWYGDLRGKPFAIEAENSILDISGFSKQYNCAFIWQKDGVKKLNLYLIINYFKGGKLRFKKIKPEAFEANRFYTVINKKSGEIVPMEVNFNFDDPNLIILPLAFGKRQGREFIWNDLLSLETGSLKLANGRVIEKTLYNRRTRQDEPALFVALTFERREVLDSSNIKPMNLIGVDRGENIPAVIALTDPEGCPLSRFKDSLGNPTHILRIGESYKEKQRTIQAKKEVEQRRAGGYSRKYASKAKNLADDMVRNTARDLLYYAVTQDAMLIFENLSRGFGRQGKRTFMAERQYTRMEDWLTAKLAYEGLPSKTYLSKTLAQYTSKTCSNCGFTITSADYDRVLEKLKKTATGWMTTINGKELKVEGQITYYNRYKRQNVVKDLSVELDRLSEESVNNDISSWTKGRSGEALSLLKKRFSHRPVQEKFVCLNCGFETHADEQAALNIARSWLFLRSQEYKKYQTNKTTGNTDKRAFVETWQSFYRKKLKEVWKPAV

SEQ ID NO: 30941 - protein, 978 aa, synthetic construct
  REGION 1..978: note = engineered CasX variant
QEIKRINKIRRRLVKDSNTKKAGKTGPMKTLLVRVMTPDLRERLENLRKKPENIPQPISNTSRANLNKLLTDYTEMKKAILHVYWEEFQKDPVGLMSRVAQPASKKIDQNKLKPEMDEKGNLTTAGFACSQCGQPLFVYKLEQVSEKGKAYTNYFGRCNVAEHEKLILLDQLKPEKDSDEAVTYSLGKFGQRALDFYSIHVTKESTHPVKPLAQIAGNRYASSPVGKALSDACMGTIASFLSKYQDIIIEHQKVVKGNQKRLESLRELAGKENLEYPSVTLPPQPHTKEGVDAYNEVIARVRMWVNLNLWQKLKLSRDDAKPLLRLKGFPSFPLVERQANEVDWWDMVCNVKKLINEKKEDGKVFWQNLAGYKRQEALRPYLSSEEDRKKGKKFARTQLGDLLLHLEKKHGEDWGKVYDEAWERIDKKVEGLSKHIKLEEERRSEDAQSKAALTDWLRAKASFVIEGLKEADKDEFCRCELKLQKWYGDLRGKPFAIEAENSILDISGFSKQYNCAFIWQKDGVKKLNLYLIINYFKGGKLRFKKIKPEAFEANRFYTVINKKSGEIVPMEVNFNFDDPNLIILPLAFGKRQGREFIWNDLLSLETGSLKLANGRVIEKTLYNRRTRQDEPALFVALTFERREVLDSSNIKPMNLIGVDRGENIPAVIALTDPEGCPLSRFKDSLGNPTHILRIGESYKEKQRTIQAKKEVEQRRAGGYSRKYASKAKNLADDMVRNTARDLLYYAVTQDAMLIFENLSRGFGRQGKRTFMAERQYTRMEDWLTAKLAYEGLPSKTYLSKTLAQYTSKTCSNCGFTITSADYDRVLEKLKKTATGWMTTINGKELKVEGQITYYNRYKRQNVVKDLSVELDRLSEESVNNDISSWTKGRSGEALSLLKKRFSHRPVQEKFVCLNCGFETHADEQAALNIARSWLFLRSQEYKKYQTNKTTGNTDKRAFVETWQSFYRKKLKEVWKPAV

SEQ ID NO: 30942 - protein, 978 aa, synthetic construct
  REGION 1..978: note = engineered CasX variant
QEIKRINKIRRRLVKDSNTKKAGKTGPMKTLLVRVMTPDLRERLENLRKKPENIPQPISNTSRANLNKLLTDYTEMKKAILHVYWEEFQKDPVGLMSRVAQPASKKIDQNKLKPEMDEKGNLTTAGFACSQCGQPLFVYKLEQVSEKGKAYTNYFGRCNVAEHEKLILLDQLKPEKDSDEAVTYSLGKFGQRALDFYSIHVTKESTHPVKPLAQIAGNRYASTPVGKALSDACMGTIASFLSKYQDIIIEHQKVVKGNQKRLESLRELAGKENLEYPSVTLPPQPHTKEGVDAYNEVIARVRMWVNLNLWQKLKLSRDDAKPLLRLKGFPSFPLVERQANEVDWWDMVCNVKKLINEKKEDGKVFWQNLAGYKRQEALRPYLSSEEDRKKGKKFARTQLGDLLLHLEKKHGEDWGKVYDEAWERIDKKVEGLSKHIKLEEERRSEDAQSKAALTDWLRAKASFVIEGLKEADKDEFCRCELKLQKWYGDLRGKPFAIEAENSILDISGFSKQYNCAFIWQKDGVKKLNLYLIINYFKGGKLRFKKIKPEAFEANRFYTVINKKSGEIVPMEVNFNFDDPNLIILPLAFGKRQGREFIWNDLLSLETGSLKLANGRVIEKTLYNRRTRQDEPALFVALTFERREVLDSSNIKPMNLIGVDRGENIPAVIALTDPEGCPLSRFKDSLGNPTHILRIGESYKEKQRTIQAKKEVEQRRAGGYSRKYASKAKNLADDMVRNTARDLLYYAVTQDAMLIFENLSRGFGRQGKRTFMAERQYTRMEDWLTAKLAYEGLPSKTYLSKTLAQYTSKTCSNCGFTITSADYDRVLEKLKKTATGWMTTINGKELKVEGQITYYNRYKRQNVVKDLSVELDRLSEESVNNDISSWTKGRSGEALSLLKKRFSHRPVQEKFVCLNCGFETHADEQAALNIARSWLFLRSQEYKKYQTNKTTGNTDKRAFVETWQSFYRKKLKEVWKPAV

SEQ ID NO: 30943 - protein, 978 aa, synthetic construct
  REGION 1..978: note = engineered CasX variant
QEIKRINKIRRRLVKDSNTKKAGKTGPMKTLLVRVMTPDLRERLENLRKKPENIPQPISNTSRANLNKLLTDYTEMKKAILHVYWEEFQKDPVGLMSRVAQPASKKIDQNKLKPEMDEKGNLTTAGFACSQCGQPLFVYKLEQVSEKGKAYTNYFGRCNVAEHEKLILLDQLKPEKDSDEAVTYSLGKFGQRALDFYSIHVTKESTHPVKPLAQIAGNRYASAPVGKALSDACMGTIASFLSKYQDIIIEHQKVVKGNQKRLESLRELAGKENLEYPSVTLPPQPHTKEGVDAYNEVIARVRMWVNLNLWQKLKLSRDDAKPLLRLKGFPSFPLVERQANEVDWWDMVCNVKKLINEKKEDGKVFWQNLAGYKRQEALRPYLSSEEDRKKGKKFARTQLGDLLLHLEKKHGEDWGKVYDEAWERIDKKVEGLSKHIKLEEERRSEDAQSKAALTDWLRAKASFVIEGLKEADKDEFCRCELKLQKWYGDLRGKPFAIEAENSILDISGFSKQYNCAFIWQKDGVKKLNLYLIINYFKGGKLRFKKIKPEAFEANRFYTVINKKSGEIVPMEVNFNFDDPNLIILPLAFGKRQGREFIWNDLLSLETGSLKLANGRVIEKTLYNRRTRQDEPALFVALTFERREVLDSSNIKPMNLIGVDRGENIPAVIALTDPEGCPLSRFKDSLGNPTHILRIGESYKEKQRTIQAKKEVEQRRAGGYSRKYASKAKNLADDMVRNTARDLLYYAVTQDAMLIFENLSRGFGRQGKRTFMAERQYTRMEDWLTAKLAYEGLPSKTYLSKTLAQYTSKTCSNCGFTITSADYDRVLEKLKKTATGWMTTINGKELKVEGQITYYNRYKRQNVVKDLSVELDRLSEESVNNDISSWTKGRSGEALSLLKKRFSHRPVQEKFVCLNCGFETHADEQAALNIARSWLFLRSQEYKKYQTNKTTGNTDKRAFVETWQSFYRKKLKEVWKPAV

SEQ ID NO: 30944 - protein, 978 aa, synthetic construct
  REGION 1..978: note = engineered CasX variant
QEIKRINKIRRRLVKDSNTKKAGKTGPMKTLLVRVMTPDLRERLENLRKKPENIPQPISNTSRANLNKLLTDYTEMKKAILHVYWEEFQKDPVGLMSRVAQPASKKIDQNKLKPEMDEKGNLTTAGFACSQCGQPLFVYKLEQVSEKGKAYTNYFGRCNVAEHEKLILLDQLKPEKDSDEAVTYSLGKFGQRALDFYSIHVTKESTHPVKPLAQIAGNRYASVPVGKALSDACMGTIASFLSKYQDIIIEHQKVVKGNQKRLESLRELAGKENLEYPSVTLPPQPHTKEGVDAYNEVIARVRMWVNLNLWQKLKLSRDDAKPLLRLKGFPSFPLVERQANEVDWWDMVCNVKKLINEKKEDGKVFWQNLAGYKRQEALRPYLSSEEDRKKGKKFARTQLGDLLLHLEKKHGEDWGKVYDEAWERIDKKVEGLSKHIKLEEERRSEDAQSKAALTDWLRAKASFVIEGLKEADKDEFCRCELKLQKWYGDLRGKPFAIEAENSILDISGFSKQYNCAFIWQKDGVKKLNLYLIINYFKGGKLRFKKIKPEAFEANRFYTVINKKSGEIVPMEVNFNFDDPNLIILPLAFGKRQGREFIWNDLLSLETGSLKLANGRVIEKTLYNRRTRQDEPALFVALTFERREVLDSSNIKPMNLIGVDRGENIPAVIALTDPEGCPLSRFKDSLGNPTHILRIGESYKEKQRTIQAKKEVEQRRAGGYSRKYASKAKNLADDMVRNTARDLLYYAVTQDAMLIFENLSRGFGRQGKRTFMAERQYTRMEDWLTAKLAYEGLPSKTYLSKTLAQYTSKTCSNCGFTITSADYDRVLEKLKKTATGWMTTINGKELKVEGQITYYNRYKRQNVVKDLSVELDRLSEESVNNDISSWTKGRSGEALSLLKKRFSHRPVQEKFVCLNCGFETHADEQAALNIARSWLFLRSQEYKKYQTNKTTGNTDKRAFVETWQSFYRKKLKEVWKPAV

SEQ ID NO: 30945 - protein, 978 aa, synthetic construct
  REGION 1..978: note = engineered CasX variant
QEIKRINKIRRRLVKDSNTKKAGKTGPMKTLLVRVMTPDLRERLENLRKKPENIPQPISNTSRANLNKLLTDYTEMKKAILHVYWEEFQKDPVGLMSRVAQPASKKIDQNKLKPEMDEKGNLTTAGFACSQCGQPLFVYKLEQVSEKGKAYTNYFGRCNVAEHEKLIKLDQLKPEKDSDEAVTYSLGKFGQRALDFYSIHVTKESTHPVKPLAQIAGNRYASGPVGKALSDACMGTIASFLSKYQDIIIEHQKVVKGNQKRLESLRELAGKENLEYPSVTLPPQPHTKEGVDAYNEVIARVRMWVNLNLWQKLKLSRDDAKPLLRLKGFPSFPLVERQANEVDWWDMVCNVKKLINEKKEDGKVFWQNLAGYKRQEALRPYLSSEEDRKKGKKFARTQLGDLLLHLEKKHGEDWGKVYDEAWERIDKKVEGLSKHIKLEEERRSEDAQSKAALTDWLRAKASFVIEGLKEADKDEFCRCELKLQKWYGDLRGKPFAIEAENSILDISGFSKQYNCAFIWQKDGVKKLNLYLIINYFKGGKLRFKKIKPEAFEANRFYTVINKKSGEIVPMEVNFNFDDPNLIILPLAFGKRQGREFIWNDLLSLETGSLKLANGRVIEKTLYNRRTRQDEPALFVALTFERREVLDSSNIKPMNLIGVDRGENIPAVIALTDPEGCPLSRFKDSLGNPTHILRIGESYKEKQRTIQAKKEVEQRRAGGYSRKYASKAKNLADDMVRNTARDLLYYAVTQDAMLIFENLSRGFGRQGKRTFMAERQYTRMEDWLTAKLAYEGLPSKTYLSKTLAQYTSKTCSNCGFTITSADYDRVLEKLKKTATGWMTTINGKELKVEGQITYYNRYKRQNVVKDLSVELDRLSEESVNNDISSWTKGRSGEALSLLKKRFSHRPVQEKFVCLNCGFETHADEQAALNIARSWLFLRSQEYKKYQTNKTTGNTDKRAFVETWQSFYRKKLKEVWKPAV

SEQ ID NO: 30946 - protein, 977 aa, synthetic construct
  REGION 1..977: note = engineered CasX variant
QEIKRINKIRRRLVKDSNTKKAGKTGPMKTLLVRVMTPDLRERLENLRKKPENIPQPISNTSRANLNKLLTDYTEMKKAILHVYWEEFQKDPVGLMSRVAQPASKKIDQNKLKPEMDEKGNLTTAGFACSQCGQPLFVYKLEQVSEKGKAYTNYFGRCNVAEHEKLILLDQLKPEKDSDEAVTYSLGKFGQRALDFYSIHVTKESTHPVKPLAQIAGNRYASPVGKALSDACMGTIASFLSKYQDIIIEHQKVVKGNQKRLESLRELAGKENLEYPSVTLPPQPHTKEGVDAYNEVIARVRMWVNLNLWQKLKLSRDDAKPLLRLKGFPSFPLVERQANEVDWWDMVCNVKKLINEKKEDGKVFWQNLAGYKRQEALRPYLSSEEDRKKGKKFARTQLGDLLLHLEKKHGEDWGKVYDEAWERIDKKVEGLSKHIKLEEERRSEDAQSKAALTDWLRAKASFVIEGLKEADKDEFCRCELKLQKWYGDLRGKPFAIEAENSILDISGFSKQYNCAFIWQKDGVKKLNLYLIINYFKGGKLRFKKIKPEAFEANRFYTVINKKSGEIVPMEVNFNFDDPNLIILPLAFGKRQGREFIWNDLLSLETGSLKLANGRVIEKTLYNRRTRQDEPALFVALTFERREVLDSSNIKPMNLIGVDRGENIPAVIALTDPEGCPLSRFKDSLGNPTHILRIGESYKEKQRTIQAKKEVEQRRAGGYSRKYASKAKNLADDMVRNTARDLLYYAVTQDAMLIFENLSRGFGRQGKRTFMAERQYTRMEDWLTAKLAYEGLPSKTYLSKTLAQYTSKTCSNCGFTITSADYDRVLEKLKKTATGWMTTINGKELKVEGQITYYNRYKRQNVVKDLSVELDRLSEESVNNDISSWTKGRSGEALSLLKKRFSHRPVQEKFVCLNCGFETHADEQAALNIARSWLFLRSQEYKKYQTNKTTGNTDKRAFVETWQSFYRKKLKEVWKPAV

SEQ ID NO: 30947 - protein, 979 aa, synthetic construct
  REGION 1..979: note = engineered CasX variant
QEIKRINKIRRRLVKDSNTKKAGKTGPMKTLLVRVMTPDLRERLENLRKKPENIPQPISNTSRANLNKLLTDYTEMKKAILHVYWEEFQKDPVGLMSRVAQPASKKIDQNKLKPEMDEKGNLTTAGFACSQCGQPLFVYKLEQVSEKGKAYTNYFGRCNVAEHEKLILLDQLKPEKDSDEAVTYSLGKFGQRALDFYSIHVTKESTHPVKPLAQIAGNRYASYPVGKALSDACMGTIASFLSKYQDIIIEHQKVVKGNQKRLESLRELAGKENLEYPSVTLPPQPHTKEGVDAYNEVIARVRMWVNLNLWQKLKLSRDDAKPLLRLKGFPSFPLVERQANEVDWWDMVCNVKKLINEKKEDGKVFWQNLAGYKRQEALRPYLSSEEDRKKGKKFARYQLGDLLLHLEKKHEGEDWGKVYDEAWERIDKKVEGLSKHIKLEEERRSEDAQSKAALTDWLRAKASFVIEGLKEADKDEFCRCELKLQKWYGDLRGKPFAIEAENSILDISGFSKQYNCAFIWQKDGVKKLNLYLIINYFKGGKLRFKKIKPEAFEANRFYTVINKKSGEIVPMEVNFNFDDPNLIILPLAFGKRQGREFIWNDLLSLETGSLKLANGRVIEKTLYNRRTRQDEPALFVALTFERREVLDSSNIKPMNLIGVDRGENIPAVIALTDPEGCPLSRFKDSLGNPTHILRIGESYKEKQRTIQAKKEVEQRRAGGYSRKYASKAKNLADDMVRNTARDLLYYAVTQDAMLIFENLSRGFGRQGKRTFMAERQYTRMEDWLTAKLAYEGLPSKTYLSKTLAQYTSKTCSNCGFTITSADYDRVLEKLKKTATGWMTTINGKELKVEGQITYYNRYKRQNVVKDLSVELDRLSEESVNNDISSWTKGRSGEALSLLKKRFSHRPVQEKFVCLNCGFETHADEQAALNIARSWLFLRSQEYKKYQTNKTTGNTDKRAFVETWQSFYRKKLKEVWKPAV

SEQ ID NO: 30948 - protein, 979 aa, synthetic construct
  REGION 1..979: note = engineered CasX variant
QEIKRINKIRRRLVKDSNTKKAGKTGPMKTLLVRVMTPDLRERLENLRKKPENIPQPISNTSRANLNKLLTDYTEMKKAILHVYWEEFQKDPVGLMSRVAQPASKKIDQNKLKPEMDEKGNLTTAGFACSQCGQPLFVYKLEQVSEKGKAYTNYFGRCNVAEHEKLILLDQLKPEKDSDEAVTYSLGKFGQRALDFYSIHVTKESTHPVKPLAQIAGNRYASHPVGKALSDACMGTIASFLSKYQDIIIEHQKVVKGNQKRLESLRELAGKENLEYPSVTLPPQPHTKEGVDAYNEVIARVRMWVNLNLWQKLKLSRDDAKPLLRLKGFPSFPLVERQANEVDWWDMVCNVKKLINEKKEDGKVFWQNLAGYKRQEALRPYLSSEEDRKKGKKFARYQLGDLLLHLEKKHEGEDWGKVYDEAWERIDKKVEGLSKHIKLEEERRSEDAQSKAALTDWLRAKASFVIEGLKEADKDEFCRCELKLQKWYGDLRGKPFAIEAENSILDISGFSKQYNCAFIWQKDGVKKLNLYLIINYFKGGKLRFKKIKPEAFEANRFYTVINKKSGEIVPMEVNFNFDDPNLIILPLAFGKRQGREFIWNDLLSLETGSLKLANGRVIEKTLYNRRTRQDEPALFVALTFERREVLDSSNIKPMNLIGVDRGENIPAVIALTDPEGCPLSRFKDSLGNPTHILRIGESYKEKQRTIQAKKEVEQRRAGGYSRKYASKAKNLADDMVRNTARDLLYYAVTQDAMLIFENLSRGFGRQGKRTFMAERQYTRMEDWLTAKLAYEGLPSKTYLSKTLAQYTSKTCSNCGFTITSADYDRVLEKLKKTATGWMTTINGKELKVEGQITYYNRYKRQNVVKDLSVELDRLSEESVNNDISSWTKGRSGEALSLLKKRFSHRPVQEKFVCLNCGFETHADEQAALNIARSWLFLRSQEYKKYQTNKTTGNTDKRAFVETWQSFYRKKLKEVWKPAV

SEQ ID NO: 30949 - protein, 979 aa, synthetic construct
  REGION 1..979: note = engineered CasX variant
QEIKRINKIRRRLVKDSNTKKAGKTGPMKTLLVRVMTPDLRERLENLRKKPENIPQPISNTSRANLNKLLTDYTEMKKAILHVYWEEFQKDPVGLMSRVAQPASKKIDQNKLKPEMDEKGNLTTAGFACSQCGQPLFVYKLEQVSEKGKAYTNYFGRCNVAEHEKLILLDQLKPEKDSDEAVTYSLGKFGQRALDFYSIHVTKESTHPVKPLAQIAGNRYASSPVGKALSDACMGTIASFLSKYQDIIIEHQKVVKGNQKRLESLRELAGKENLEYPSVTLPPQPHTKEGVDAYNEVIARVRMWVNLNLWQKLKLSRDDAKPLLRLKGFPSFPLVERQANEVDWWDMVCNVKKLINEKKEDGKVFWQNLAGYKRQEALRPYLSSEEDRKKGKKFARYQLGDLLLHLEKKHEGEDWGKVYDEAWERIDKKVEGLSKHIKLEEERRSEDAQSKAALTDWLRAKASFVIEGLKEADKDEFCRCELKLQKWYGDLRGKPFAIEAENSILDISGFSKQYNCAFIWQKDGVKKLNLYLIINYFKGGKLRFKKIKPEAFEANRFYTVINKKSGEIVPMEVNFNFDDPNLIILPLAFGKRQGREFIWNDLLSLETGSLKLANGRVIEKTLYNRRTRQDEPALFVALTFERREVLDSSNIKPMNLIGVDRGENIPAVIALTDPEGCPLSRFKDSLGNPTHILRIGESYKEKQRTIQAKKEVEQRRAGGYSRKYASKAKNLADDMVRNTARDLLYYAVTQDAMLIFENLSRGFGRQGKRTFMAERQYTRMEDWLTAKLAYEGLPSKTYLSKTLAQYTSKTCSNCGFTITSADYDRVLEKLKKTATGWMTTINGKELKVEGQITYYNRYKRQNVVKDLSVELDRLSEESVNNDISSWTKGRSGEALSLLKKRFSHRPVQEKFVCLNCGFETHADEQAALNIARSWLFLRSQEYKKYQTNKTTGNTDKRAFVETWQSFYRKKLKEVWKPAV

SEQ ID NO: 30950 - protein, 979 aa, synthetic construct
  REGION 1..979: note = engineered CasX variant
QEIKRINKIRRRLVKDSNTKKAGKTGPMKTLLVRVMTPDLRERLENLRKKPENIPQPISNTSRANLNKLLTDYTEMKKAILHVYWEEFQKDPVGLMSRVAQPASKKIDQNKLKPEMDEKGNLTTAGFACSQCGQPLFVYKLEQVSEKGKAYTNYFGRCNVAEHEKLILLDQLKPEKDSDEAVTYSLGKFGQRALDFYSIHVTKESTHPVKPLAQIAGNRYASTPVGKALSDACMGTIASFLSKYQDIIIEHQKVVKGNQKRLESLRELAGKENLEYPSVTLPPQPHTKEGVDAYNEVIARVRMWVNLNLWQKLKLSRDDAKPLLRLKGFPSFPLVERQANEVDWWDMVCNVKKLINEKKEDGKVFWQNLAGYKRQEALRPYLSSEEDRKKGKKFARYQLGDLLLHLEKKHEGEDWGKVYDEAWERIDKKVEGLSKHIKLEEERRSEDAQSKAALTDWLRAKASFVIEGLKEADKDEFCRCELKLQKWYGDLRGKPFAIEAENSILDISGFSKQYNCAFIWQKDGVKKLNLYLIINYFKGGKLRFKKIKPEAFEANRFYTVINKKSGEIVPMEVNFNFDDPNLIILPLAFGKRQGREFIWNDLLSLETGSLKLANGRVIEKTLYNRRTRQDEPALFVALTFERREVLDSSNIKPMNLIGVDRGENIPAVIALTDPEGCPLSRFKDSLGNPTHILRIGESYKEKQRTIQAKKEVEQRRAGGYSRKYASKAKNLADDMVRNTARDLLYYAVTQDAMLIFENLSRGFGRQGKRTFMAERQYTRMEDWLTAKLAYEGLPSKTYLSKTLAQYTSKTCSNCGFTITSADYDRVLEKLKKTATGWMTTINGKELKVEGQITYYNRYKRQNVVKDLSVELDRLSEESVNNDISSWTKGRSGEALSLLKKRFSHRPVQEKFVCLNCGFETHADEQAALNIARSWLFLRSQEYKKYQTNKTTGNTDKRAFVETWQSFYRKKLKEVWKPAV

SEQ ID NO: 30951 - protein, 979 aa, synthetic construct
  REGION 1..979: note = engineered CasX variant
QEIKRINKIRRRLVKDSNTKKAGKTGPMKTLLVRVMTPDLRERLENLRKKPENIPQPISNTSRANLNKLLTDYTEMKKAILHVYWEEFQKDPVGLMSRVAQPASKKIDQNKLKPEMDEKGNLTTAGFACSQCGQPLFVYKLEQVSEKGKAYTNYFGRCNVAEHEKLILLDQLKPEKDSDEAVTYSLGKFGQRALDFYSIHVTKESTHPVKPLAQIAGNRYASAPVGKALSDACMGTIASFLSKYQDIIIEHQKVVKGNQKRLESLRELAGKENLEYPSVTLPPQPHTKEGVDAYNEVIARVRMWVNLNLWQKLKLSRDDAKPLLRLKGFPSFPLVERQANEVDWWDMVCNVKKLINEKKEDGKVFWQNLAGYKRQEALRPYLSSEEDRKKGKKFARYQLGDLLLHLEKKHEGEDWGKVYDEAWERIDKKVEGLSKHIKLEEERRSEDAQSKAALTDWLRAKASFVIEGLKEADKDEFCRCELKLQKWYGDLRGKPFAIEAENSILDISGFSKQYNCAFIWQKDGVKKLNLYLIINYFKGGKLRFKKIKPEAFEANRFYTVINKKSGEIVPMEVNFNFDDPNLIILPLAFGKRQGREFIWNDLLSLETGSLKLANGRVIEKTLYNRRTRQDEPALFVALTFERREVLDSSNIKPMNLIGVDRGENIPAVIALTDPEGCPLSRFKDSLGNPTHILRIGESYKEKQRTIQAKKEVEQRRAGGYSRKYASKAKNLADDMVRNTARDLLYYAVTQDAMLIFENLSRGFGRQGKRTFMAERQYTRMEDWLTAKLAYEGLPSKTYLSKTLAQYTSKTCSNCGFTITSADYDRVLEKLKKTATGWMTTINGKELKVEGQITYYNRYKRQNVVKDLSVELDRLSEESVNNDISSWTKGRSGEALSLLKKRFSHRPVQEKFVCLNCGFETHADEQAALNIARSWLFLRSQEYKKYQTNKTTGNTDKRAFVETWQSFYRKKLKEVWKPAV

SEQ ID NO: 30952 - protein, 979 aa, synthetic construct
  REGION 1..979: note = engineered CasX variant
QEIKRINKIRRRLVKDSNTKKAGKTGPMKTLLVRVMTPDLRERLENLRKKPENIPQPISNTSRANLNKLLTDYTEMKKAILHVYWEEFQKDPVGLMSRVAQPASKKIDQNKLKPEMDEKGNLTTAGFACSQCGQPLFVYKLEQVSEKGKAYTNYFGRCNVAEHEKLILLDQLKPEKDSDEAVTYSLGKFGQRALDFYSIHVTKESTHPVKPLAQIAGNRYASVPVGKALSDACMGTIASFLSKYQDIIIEHQKVVKGNQKRLESLRELAGKENLEYPSVTLPPQPHTKEGVDAYNEVIARVRMWVNLNLWQKLKLSRDDAKPLLRLKGFPSFPLVERQANEVDWWDMVCNVKKLINEKKEDGKVFWQNLAGYKRQEALRPYLSSEEDRKKGKKFARYQLGDLLLHLEKKHEGEDWGKVYDEAWERIDKKVEGLSKHIKLEEERRSEDAQSKAALTDWLRAKASFVIEGLKEADKDEFCRCELKLQKWYGDLRGKPFAIEAENSILDISGFSKQYNCAFIWQKDGVKKLNLYLIINYFKGGKLRFKKIKPEAFEANRFYTVINKKSGEIVPMEVNFNFDDPNLIILPLAFGKRQGREFIWNDLLSLETGSLKLANGRVIEKTLYNRRTRQDEPALFVALTFERREVLDSSNIKPMNLIGVDRGENIPAVIALTDPEGCPLSRFKDSLGNPTHILRIGESYKEKQRTIQAKKEVEQRRAGGYSRKYASKAKNLADDMVRNTARDLLYYAVTQDAMLIFENLSRGFGRQGKRTFMAERQYTRMEDWLTAKLAYEGLPSKTYLSKTLAQYTSKTCSNCGFTITSADYDRVLEKLKKTATGWMTTINGKELKVEGQITYYNRYKRQNVVKDLSVELDRLSEESVNNDISSWTKGRSGEALSLLKKRFSHRPVQEKFVCLNCGFETHADEQAALNIARSWLFLRSQEYKKYQTNKTTGNTDKRAFVETWQSFYRKKLKEVWKPAV

SEQ ID NO: 30953 - protein, 979 aa, synthetic construct
  REGION 1..979: note = engineered CasX variant
QEIKRINKIRRRLVKDSNTKKAGKTGPMKTLLVRVMTPDLRERLENLRKKPENIPQPISNTSRANLNKLLTDYTEMKKAILHVYWEEFQKDPVGLMSRVAQPASKKIDQNKLKPEMDEKGNLTTAGFACSQCGQPLFVYKLEQVSEKGKAYTNYFGRCNVAEHEKLIKLDQLKPEKDSDEAVTYSLGKFGQRALDFYSIHVTKESTHPVKPLAQIAGNRYASGPVGKALSDACMGTIASFLSKYQDIIIEHQKVVKGNQKRLESLRELAGKENLEYPSVTLPPQPHTKEGVDAYNEVIARVRMWVNLNLWQKLKLSRDDAKPLLRLKGFPSFPLVERQANEVDWWDMVCNVKKLINEKKEDGKVFWQNLAGYKRQEALRPYLSSEEDRKKGKKFARYQLGDLLLHLEKKHEGEDWGKVYDEAWERIDKKVEGLSKHIKLEEERRSEDAQSKAALTDWLRAKASFVIEGLKEADKDEFCRCELKLQKWYGDLRGKPFAIEAENSILDISGFSKQYNCAFIWQKDGVKKLNLYLIINYFKGGKLRFKKIKPEAFEANRFYTVINKKSGEIVPMEVNFNFDDPNLIILPLAFGKRQGREFIWNDLLSLETGSLKLANGRVIEKTLYNRRTRQDEPALFVALTFERREVLDSSNIKPMNLIGVDRGENIPAVIALTDPEGCPLSRFKDSLGNPTHILRIGESYKEKQRTIQAKKEVEQRRAGGYSRKYASKAKNLADDMVRNTARDLLYYAVTQDAMLIFENLSRGFGRQGKRTFMAERQYTRMEDWLTAKLAYEGLPSKTYLSKTLAQYTSKTCSNCGFTITSADYDRVLEKLKKTATGWMTTINGKELKVEGQITYYNRYKRQNVVKDLSVELDRLSEESVNNDISSWTKGRSGEALSLLKKRFSHRPVQEKFVCLNCGFETHADEQAALNIARSWLFLRSQEYKKYQTNKTTGNTDKRAFVETWQSFYRKKLKEVWKPAV

SEQ ID NO: 30954 - protein, 978 aa, synthetic construct
  REGION 1..978: note = engineered CasX variant
QEIKRINKIRRRLVKDSNTKKAGKTGPMKTLLVRVMTPDLRERLENLRKKPENIPQPISNTSRANLNKLLTDYTEMKKAILHVYWEEFQKDPVGLMSRVAQPASKKIDQNKLKPEMDEKGNLTTAGFACSQCGQPLFVYKLEQVSEKGKAYTNYFGRCNVAEHEKLILLDQLKPEKDSDEAVTYSLGKFGQRALDFYSIHVTKESTHPVKPLAQIAGNRYASPVGKALSDACMGTIASFLSKYQDIIIEHQKVVKGNQKRLESLRELAGKENLEYPSVTLPPQPHTKEGVDAYNEVIARVRMWVNLNLWQKLKLSRDDAKPLLRLKGFPSFPLVERQANEVDWWDMVCNVKKLINEKKEDGKVFWQNLAGYKRQEALRPYLSSEEDRKKGKKFARYQLGDLLLHLEKKHEGEDWGKVYDEAWERIDKKVEGLSKHIKLEEERRSEDAQSKAALTDWLRAKASFVIEGLKEADKDEFCRCELKLQKWYGDLRGKPFAIEAENSILDISGFSKQYNCAFIWQKDGVKKLNLYLIINYFKGGKLRFKKIKPEAFEANRFYTVINKKSGEIVPMEVNFNFDDPNLIILPLAFGKRQGREFIWNDLLSLETGSLKLANGRVIEKTLYNRRTRQDEPALFVALTFERREVLDSSNIKPMNLIGVDRGENIPAVIALTDPEGCPLSRFKDSLGNPTHILRIGESYKEKQRTIQAKKEVEQRRAGGYSRKYASKAKNLADDMVRNTARDLLYYAVTQDAMLIFENLSRGFGRQGKRTFMAERQYTRMEDWLTAKLAYEGLPSKTYLSKTLAQYTSKTCSNCGFTITSADYDRVLEKLKKTATGWMTTINGKELKVEGQITYYNRYKRQNVVKDLSVELDRLSEESVNNDISSWTKGRSGEALSLLKKRFSHRPVQEKFVCLNCGFETHADEQAALNIARSWLFLRSQEYKKYQTNKTTGNTDKRAFVETWQSFYRKKLKEVWKPAV

SEQ ID NO: 30955 - protein, 978 aa, synthetic construct
  REGION 1..978: note = engineered CasX variant
QEIKRINKIRRRLVKDSNTKKAGKTGPMKTLLVRVMTPDLRERLENLRKKPENIPQPISNTSRANLNKLLTDYTEMKKAILHVYWEEFQKDPVGLMSRVAQPASKKIDQNKLKPEMDEKGNLTTAGFACSQCGQPLFVYKLEQVSEKGKAYTNYFGRCNVAEHEKLILLDQLKPEKDSDEAVTYSLGKFGQRALDFYSIHVTKESTHPVKPLAQIAGNRYASYPVGKALSDACMGTIASFLSKYQDIIIEHQKVVKGNQKRLESLRELAGKENLEYPSVTLPPQPHTKEGVDAYNEVIARVRMWVNLNLWQKLKLSRDDAKPLLRLKGFPSFPLVERQANEVDWWDMVCNVKKLINEKKEDGKVFWQNLAGYKRQEALRPYLSSEEDRKKGKKFARYQLGDLLLHLEKKHGEDWGKVYDEAWERIDKKVEGLSKHIKLEEERRSEDAQSKAALTDWLRAKASFVIEGLKEADKDEFCRCDLKLQKWYGDLRGKPFAIEAENSILDISGFSKQYNCAFIWQKDGVKKLNLYLIINYFKGGKLRFKKIKPEAFEANRFYTVINKKSGEIVPMEVNFNFDDPNLIILPLAFGKRQGREFIWNDLLSLETGSLKLANGRVIEKTLYNRRTRQDEPALFVALTFERREVLDSSNIKPMNLIGVDRGENIPAVIALTDPEGCPLSRFKDSLGNPTHILRIGESYKEKQRTIQAKKEVEQRRAGGYSRKYASKAKNLADDMVRNTARDLLYYAVTQDAMLIFENLSRGFGRQGKRTFMAERQYTRMEDWLTAKLAYEGLPSKTYLSKTLAQYTSKTCSNCGFTITSADYDRVLEKLKKTATGWMTTINGKELKVEGQITYYNRYKRQNVVKDLSVELDRLSEESVNNDISSWTKGRSGEALSLLKKRFSHRPVQEKFVCLNCGFETHADEQAALNIARSWLFLRSQEYKKYQTNKTTGNTDKRAFVETWQSFYRKKLKEVWKPAV

SEQ ID NO: 30956 - protein, 978 aa, synthetic construct
  REGION 1..978: note = engineered CasX variant
QEIKRINKIRRRLVKDSNTKKAGKTGPMKTLLVRVMTPDLRERLENLRKKPENIPQPISNTSRANLNKLLTDYTEMKKAILHVYWEEFQKDPVGLMSRVAQPASKKIDQNKLKPEMDEKGNLTTAGFACSQCGQPLFVYKLEQVSEKGKAYTNYFGRCNVAEHEKLILLDQLKPEKDSDEAVTYSLGKFGQRALDFYSIHVTKESTHPVKPLAQIAGNRYASHPVGKALSDACMGTIASFLSKYQDIIIEHQKVVKGNQKRLESLRELAGKENLEYPSVTLPPQPHTKEGVDAYNEVIARVRMWVNLNLWQKLKLSRDDAKPLLRLKGFPSFPLVERQANEVDWWDMVCNVKKLINEKKEDGKVFWQNLAGYKRQEALRPYLSSEEDRKKGKKFARYQLGDLLLHLEKKHGEDWGKVYDEAWERIDKKVEGLSKHIKLEEERRSEDAQSKAALTDWLRAKASFVIEGLKEADKDEFCRCDLKLQKWYGDLRGKPFAIEAENSILDISGFSKQYNCAFIWQKDGVKKLNLYLIINYFKGGKLRFKKIKPEAFEANRFYTVINKKSGEIVPMEVNFNFDDPNLIILPLAFGKRQGREFIWNDLLSLETGSLKLANGRVIEKTLYNRRTRQDEPALFVALTFERREVLDSSNIKPMNLIGVDRGENIPAVIALTDPEGCPLSRFKDSLGNPTHILRIGESYKEKQRTIQAKKEVEQRRAGGYSRKYASKAKNLADDMVRNTARDLLYYAVTQDAMLIFENLSRGFGRQGKRTFMAERQYTRMEDWLTAKLAYEGLPSKTYLSKTLAQYTSKTCSNCGFTITSADYDRVLEKLKKTATGWMTTINGKELKVEGQITYYNRYKRQNVVKDLSVELDRLSEESVNNDISSWTKGRSGEALSLLKKRFSHRPVQEKFVCLNCGFETHADEQAALNIARSWLFLRSQEYKKYQTNKTTGNTDKRAFVETWQSFYRKKLKEVWKPAV

SEQ ID NO: 30957 - protein, 978 aa, synthetic construct
  REGION 1..978: note = engineered CasX variant
QEIKRINKIRRRLVKDSNTKKAGKTGPMKTLLVRVMTPDLRERLENLRKKPENIPQPISNTSRANLNKLLTDYTEMKKAILHVYWEEFQKDPVGLMSRVAQPASKKIDQNKLKPEMDEKGNLTTAGFACSQCGQPLFVYKLEQVSEKGKAYTNYFGRCNVAEHEKLILLDQLKPEKDSDEAVTYSLGKFGQRALDFYSIHVTKESTHPVKPLAQIAGNRYASSPVGKALSDACMGTIASFLSKYQDIIIEHQKVVKGNQKRLESLRELAGKENLEYPSVTLPPQPHTKEGVDAYNEVIARVRMWVNLNLWQKLKLSRDDAKPLLRLKGFPSFPLVERQANEVDWWDMVCNVKKLINEKKEDGKVFWQNLAGYKRQEALRPYLSSEEDRKKGKKFARYQLGDLLLHLEKKHGEDWGKVYDEAWERIDKKVEGLSKHIKLEEERRSEDAQSKAALTDWLRAKASFVIEGLKEADKDEFCRCDLKLQKWYGDLRGKPFAIEAENSILDISGFSKQYNCAFIWQKDGVKKLNLYLIINYFKGGKLRFKKIKPEAFEANRFYTVINKKSGEIVPMEVNFNFDDPNLIILPLAFGKRQGREFIWNDLLSLETGSLKLANGRVIEKTLYNRRTRQDEPALFVALTFERREVLDSSNIKPMNLIGVDRGENIPAVIALTDPEGCPLSRFKDSLGNPTHILRIGESYKEKQRTIQAKKEVEQRRAGGYSRKYASKAKNLADDMVRNTARDLLYYAVTQDAMLIFENLSRGFGRQGKRTFMAERQYTRMEDWLTAKLAYEGLPSKTYLSKTLAQYTSKTCSNCGFTITSADYDRVLEKLKKTATGWMTTINGKELKVEGQITYYNRYKRQNVVKDLSVELDRLSEESVNNDISSWTKGRSGEALSLLKKRFSHRPVQEKFVCLNCGFETHADEQAALNIARSWLFLRSQEYKKYQTNKTTGNTDKRAFVETWQSFYRKKLKEVWKPAV

SEQ ID NO: 30958 - protein, 978 aa, synthetic construct
  REGION 1..978: note = engineered CasX variant
QEIKRINKIRRRLVKDSNTKKAGKTGPMKTLLVRVMTPDLRERLENLRKKPENIPQPISNTSRANLNKLLTDYTEMKKAILHVYWEEFQKDPVGLMSRVAQPASKKIDQNKLKPEMDEKGNLTTAGFACSQCGQPLFVYKLEQVSEKGKAYTNYFGRCNVAEHEKLILLDQLKPEKDSDEAVTYSLGKFGQRALDFYSIHVTKESTHPVKPLAQIAGNRYASTPVGKALSDACMGTIASFLSKYQDIIIEHQKVVKGNQKRLESLRELAGKENLEYPSVTLPPQPHTKEGVDAYNEVIARVRMWVNLNLWQKLKLSRDDAKPLLRLKGFPSFPLVERQANEVDWWDMVCNVKKLINEKKEDGKVFWQNLAGYKRQEALRPYLSSEEDRKKGKKFARYQLGDLLLHLEKKHGEDWGKVYDEAWERIDKKVEGLSKHIKLEEERRSEDAQSKAALTDWLRAKASFVIEGLKEADKDEFCRCDLKLQKWYGDLRGKPFAIEAENSILDISGFSKQYNCAFIWQKDGVKKLNLYLIINYFKGGKLRFKKIKPEAFEANRFYTVINKKSGEIVPMEVNFNFDDPNLIILPLAFGKRQGREFIWNDLLSLETGSLKLANGRVIEKTLYNRRTRQDEPALFVALTFERREVLDSSNIKPMNLIGVDRGENIPAVIALTDPEGCPLSRFKDSLGNPTHILRIGESYKEKQRTIQAKKEVEQRRAGGYSRKYASKAKNLADDMVRNTARDLLYYAVTQDAMLIFENLSRGFGRQGKRTFMAERQYTRMEDWLTAKLAYEGLPSKTYLSKTLAQYTSKTCSNCGFTITSADYDRVLEKLKKTATGWMTTINGKELKVEGQITYYNRYKRQNVVKDLSVELDRLSEESVNNDISSWTKGRSGEALSLLKKRFSHRPVQEKFVCLNCGFETHADEQAALNIARSWLFLRSQEYKKYQTNKTTGNTDKRAFVETWQSFYRKKLKEVWKPAV

SEQ ID NO: 30959 - protein, 978 aa, synthetic construct
  REGION 1..978: note = engineered CasX variant
QEIKRINKIRRRLVKDSNTKKAGKTGPMKTLLVRVMTPDLRERLENLRKKPENIPQPISNTSRANLNKLLTDYTEMKKAILHVYWEEFQKDPVGLMSRVAQPASKKIDQNKLKPEMDEKGNLTTAGFACSQCGQPLFVYKLEQVSEKGKAYTNYFGRCNVAEHEKLILLDQLKPEKDSDEAVTYSLGKFGQRALDFYSIHVTKESTHPVKPLAQIAGNRYASAPVGKALSDACMGTIASFLSKYQDIIIEHQKVVKGNQKRLESLRELAGKENLEYPSVTLPPQPHTKEGVDAYNEVIARVRMWVNLNLWQKLKLSRDDAKPLLRLKGFPSFPLVERQANEVDWWDMVCNVKKLINEKKEDGKVFWQNLAGYKRQEALRPYLSSEEDRKKGKKFARYQLGDLLLHLEKKHGEDWGKVYDEAWERIDKKVEGLSKHIKLEEERRSEDAQSKAALTDWLRAKASFVIEGLKEADKDEFCRCDLKLQKWYGDLRGKPFAIEAENSILDISGFSKQYNCAFIWQKDGVKKLNLYLIINYFKGGKLRFKKIKPEAFEANRFYTVINKKSGEIVPMEVNFNFDDPNLIILPLAFGKRQGREFIWNDLLSLETGSLKLANGRVIEKTLYNRRTRQDEPALFVALTFERREVLDSSNIKPMNLIGVDRGENIPAVIALTDPEGCPLSRFKDSLGNPTHILRIGESYKEKQRTIQAKKEVEQRRAGGYSRKYASKAKNLADDMVRNTARDLLYYAVTQDAMLIFENLSRGFGRQGKRTFMAERQYTRMEDWLTAKLAYEGLPSKTYLSKTLAQYTSKTCSNCGFTITSADYDRVLEKLKKTATGWMTTINGKELKVEGQITYYNRYKRQNVVKDLSVELDRLSEESVNNDISSWTKGRSGEALSLLKKRFSHRPVQEKFVCLNCGFETHADEQAALNIARSWLFLRSQEYKKYQTNKTTGNTDKRAFVETWQSFYRKKLKEVWKPAV

SEQ ID NO: 30960 - protein, 978 aa, synthetic construct
  REGION 1..978: note = engineered CasX variant
QEIKRINKIRRRLVKDSNTKKAGKTGPMKTLLVRVMTPDLRERLENLRKKPENIPQPISNTSRANLNKLLTDYTEMKKAILHVYWEEFQKDPVGLMSRVAQPASKKIDQNKLKPEMDEKGNLTTAGFACSQCGQPLFVYKLEQVSEKGKAYTNYFGRCNVAEHEKLILLDQLKPEKDSDEAVTYSLGKFGQRALDFYSIHVTKESTHPVKPLAQIAGNRYASVPVGKALSDACMGTIASFLSKYQDIIIEHQKVVKGNQKRLESLRELAGKENLEYPSVTLPPQPHTKEGVDAYNEVIARVRMWVNLNLWQKLKLSRDDAKPLLRLKGFPSFPLVERQANEVDWWDMVCNVKKLINEKKEDGKVFWQNLAGYKRQEALRPYLSSEEDRKKGKKFARYQLGDLLLHLEKKHGEDWGKVYDEAWERIDKKVEGLSKHIKLEEERRSEDAQSKAALTDWLRAKASFVIEGLKEADKDEFCRCDLKLQKWYGDLRGKPFAIEAENSILDISGFSKQYNCAFIWQKDGVKKLNLYLIINYFKGGKLRFKKIKPEAFEANRFYTVINKKSGEIVPMEVNFNFDDPNLIILPLAFGKRQGREFIWNDLLSLETGSLKLANGRVIEKTLYNRRTRQDEPALFVALTFERREVLDSSNIKPMNLIGVDRGENIPAVIALTDPEGCPLSRFKDSLGNPTHILRIGESYKEKQRTIQAKKEVEQRRAGGYSRKYASKAKNLADDMVRNTARDLLYYAVTQDAMLIFENLSRGFGRQGKRTFMAERQYTRMEDWLTAKLAYEGLPSKTYLSKTLAQYTSKTCSNCGFTITSADYDRVLEKLKKTATGWMTTINGKELKVEGQITYYNRYKRQNVVKDLSVELDRLSEESVNNDISSWTKGRSGEALSLLKKRFSHRPVQEKFVCLNCGFETHADEQAALNIARSWLFLRSQEYKKYQTNKTTGNTDKRAFVETWQSFYRKKLKEVWKPAV

SEQ ID NO: 30961 - protein, 978 aa, synthetic construct
  REGION 1..978: note = engineered CasX variant
QEIKRINKIRRRLVKDSNTKKAGKTGPMKTLLVRVMTPDLRERLENLRKKPENIPQPISNTSRANLNKLLTDYTEMKKAILHVYWEEFQKDPVGLMSRVAQPASKKIDQNKLKPEMDEKGNLTTAGFACSQCGQPLFVYKLEQVSEKGKAYTNYFGRCNVAEHEKLIKLDQLKPEKDSDEAVTYSLGKFGQRALDFYSIHVTKESTHPVKPLAQIAGNRYASGPVGKALSDACMGTIASFLSKYQDIIIEHQKVVKGNQKRLESLRELAGKENLEYPSVTLPPQPHTKEGVDAYNEVIARVRMWVNLNLWQKLKLSRDDAKPLLRLKGFPSFPLVERQANEVDWWDMVCNVKKLINEKKEDGKVFWQNLAGYKRQEALRPYLSSEEDRKKGKKFARYQLGDLLLHLEKKHGEDWGKVYDEAWERIDKKVEGLSKHIKLEEERRSEDAQSKAALTDWLRAKASFVIEGLKEADKDEFCRCDLKLQKWYGDLRGKPFAIEAENSILDISGFSKQYNCAFIWQKDGVKKLNLYLIINYFKGGKLRFKKIKPEAFEANRFYTVINKKSGEIVPMEVNFNFDDPNLIILPLAFGKRQGREFIWNDLLSLETGSLKLANGRVIEKTLYNRRTRQDEPALFVALTFERREVLDSSNIKPMNLIGVDRGENIPAVIALTDPEGCPLSRFKDSLGNPTHILRIGESYKEKQRTIQAKKEVEQRRAGGYSRKYASKAKNLADDMVRNTARDLLYYAVTQDAMLIFENLSRGFGRQGKRTFMAERQYTRMEDWLTAKLAYEGLPSKTYLSKTLAQYTSKTCSNCGFTITSADYDRVLEKLKKTATGWMTTINGKELKVEGQITYYNRYKRQNVVKDLSVELDRLSEESVNNDISSWTKGRSGEALSLLKKRFSHRPVQEKFVCLNCGFETHADEQAALNIARSWLFLRSQEYKKYQTNKTTGNTDKRAFVETWQSFYRKKLKEVWKPAV

SEQ ID NO: 30962 - protein, 977 aa, synthetic construct
  REGION 1..977: note = engineered CasX variant
QEIKRINKIRRRLVKDSNTKKAGKTGPMKTLLVRVMTPDLRERLENLRKKPENIPQPISNTSRANLNKLLTDYTEMKKAILHVYWEEFQKDPVGLMSRVAQPASKKIDQNKLKPEMDEKGNLTTAGFACSQCGQPLFVYKLEQVSEKGKAYTNYFGRCNVAEHEKLILLDQLKPEKDSDEAVTYSLGKFGQRALDFYSIHVTKESTHPVKPLAQIAGNRYASPVGKALSDACMGTIASFLSKYQDIIIEHQKVVKGNQKRLESLRELAGKENLEYPSVTLPPQPHTKEGVDAYNEVIARVRMWVNLNLWQKLKLSRDDAKPLLRLKGFPSFPLVERQANEVDWWDMVCNVKKLINEKKEDGKVFWQNLAGYKRQEALRPYLSSEEDRKKGKKFARYQLGDLLLHLEKKHGEDWGKVYDEAWERIDKKVEGLSKHIKLEEERRSEDAQSKAALTDWLRAKASFVIEGLKEADKDEFCRCDLKLQKWYGDLRGKPFAIEAENSILDISGFSKQYNCAFIWQKDGVKKLNLYLIINYFKGGKLRFKKIKPEAFEANRFYTVINKKSGEIVPMEVNFNFDDPNLIILPLAFGKRQGREFIWNDLLSLETGSLKLANGRVIEKTLYNRRTRQDEPALFVALTFERREVLDSSNIKPMNLIGVDRGENIPAVIALTDPEGCPLSRFKDSLGNPTHILRIGESYKEKQRTIQAKKEVEQRRAGGYSRKYASKAKNLADDMVRNTARDLLYYAVTQDAMLIFENLSRGFGRQGKRTFMAERQYTRMEDWLTAKLAYEGLPSKTYLSKTLAQYTSKTCSNCGFTITSADYDRVLEKLKKTATGWMTTINGKELKVEGQITYYNRYKRQNVVKDLSVELDRLSEESVNNDISSWTKGRSGEALSLLKKRFSHRPVQEKFVCLNCGFETHADEQAALNIARSWLFLRSQEYKKYQTNKTTGNTDKRAFVETWQSFYRKKLKEVWKPAV

SEQ ID NO: 30963 - protein, 978 aa, synthetic construct
  REGION 1..978: note = engineered CasX variant
QEIKRINKIRRRLVKDSNTKKAGKTGPMKTLLVRVMTPDLRERLENLRKKPENIPQPISNTSRANLNKLLTDYTEMKKAILHVYWEEFQKDPVGLMSRVAQPASKKIDQNKLKPEMDEKGNLTTAGFACSQCGQPLFVYKLEQVSEKGKAYTNYFGRCNVAEHEKLILLDQLKPEKDSDEAVTYSLGKFGQRALDFYSIHVTKESTHPVKPLAQIAGNRYASYPVGKALSDACMGTIASFLSKYQDIIIEHQKVVKGNQKRLESLRELAGKENLEYPSVTLPPQPHTKEGVDAYNEVIARVRMWVNLNLWQKLKLSRDDAKPLLRLKGFPSFPLVERQANEVDWWDMVCNVKKLINEKKEDGKVFWQNLAGYKRQEALRPYLSSEEDRKKGKKFARYQLGDLLLHLEKKHGEDWGKVYDEAWERIDKKVEGLSKHIKLEEERRSEDAQSKAALTDWLRAKASFVIEGLKEADKDEFCRCELKLQKWYGDLRGKPFAIEAENSILDISGFSKQYNCAFIWQKDGVKKLNLYLIINYFKGGKLRFKKIKPEAFEANRFYTVINKKSGEIVPMEVNFNFDDPNLIILPLAFGKRFGREFIWNDLLSLETGSLKLANGRVIEKTLYNRRTRQDEPALFVALTFERREVLDSSNIKPMNLIGVDRGENIPAVIALTDPEGCPLSRFKDSLGNPTHILRIGESYKEKQRTIQAKKEVEQRRAGGYSRKYASKAKNLADDMVRNTARDLLYYAVTQDAMLIFENLSRGFGRQGKRTFMAERQYTRMEDWLTAKLAYEGLPSKTYLSKTLAQYTSKTCSNCGFTITSADYDRVLEKLKKTATGWMTTINGKELKVEGQITYYNRYKRQNVVKDLSVELDRLSEESVNNDISSWTKGRSGEALSLLKKRFSHRPVQEKFVCLNCGFETHADEQAALNIARSWLFLRSQEYKKYQTNKTTGNTDKRAFVETWQSFYRKKLKEVWKPAV

SEQ ID NO: 30964 - protein, 978 aa, synthetic construct
  REGION 1..978: note = engineered CasX variant
QEIKRINKIRRRLVKDSNTKKAGKTGPMKTLLVRVMTPDLRERLENLRKKPENIPQPISNTSRANLNKLLTDYTEMKKAILHVYWEEFQKDPVGLMSRVAQPASKKIDQNKLKPEMDEKGNLTTAGFACSQCGQPLFVYKLEQVSEKGKAYTNYFGRCNVAEHEKLILLDQLKPEKDSDEAVTYSLGKFGQRALDFYSIHVTKESTHPVKPLAQIAGNRYASHPVGKALSDACMGTIASFLSKYQDIIIEHQKVVKGNQKRLESLRELAGKENLEYPSVTLPPQPHTKEGVDAYNEVIARVRMWVNLNLWQKLKLSRDDAKPLLRLKGFPSFPLVERQANEVDWWDMVCNVKKLINEKKEDGKVFWQNLAGYKRQEALRPYLSSEEDRKKGKKFARYQLGDLLLHLEKKHGEDWGKVYDEAWERIDKKVEGLSKHIKLEEERRSEDAQSKAALTDWLRAKASFVIEGLKEADKDEFCRCELKLQKWYGDLRGKPFAIEAENSILDISGFSKQYNCAFIWQKDGVKKLNLYLIINYFKGGKLRFKKIKPEAFEANRFYTVINKKSGEIVPMEVNFNFDDPNLIILPLAFGKRFGREFIWNDLLSLETGSLKLANGRVIEKTLYNRRTRQDEPALFVALTFERREVLDSSNIKPMNLIGVDRGENIPAVIALTDPEGCPLSRFKDSLGNPTHILRIGESYKEKQRTIQAKKEVEQRRAGGYSRKYASKAKNLADDMVRNTARDLLYYAVTQDAMLIFENLSRGFGRQGKRTFMAERQYTRMEDWLTAKLAYEGLPSKTYLSKTLAQYTSKTCSNCGFTITSADYDRVLEKLKKTATGWMTTINGKELKVEGQITYYNRYKRQNVVKDLSVELDRLSEESVNNDISSWTKGRSGEALSLLKKRFSHRPVQEKFVCLNCGFETHADEQAALNIARSWLFLRSQEYKKYQTNKTTGNTDKRAFVETWQSFYRKKLKEVWKPAV

SEQ ID NO: 30965 - protein, 978 aa, synthetic construct
  REGION 1..978: note = engineered CasX variant
QEIKRINKIRRRLVKDSNTKKAGKTGPMKTLLVRVMTPDLRERLENLRKKPENIPQPISNTSRANLNKLLTDYTEMKKAILHVYWEEFQKDPVGLMSRVAQPASKKIDQNKLKPEMDEKGNLTTAGFACSQCGQPLFVYKLEQVSEKGKAYTNYFGRCNVAEHEKLILLDQLKPEKDSDEAVTYSLGKFGQRALDFYSIHVTKESTHPVKPLAQIAGNRYASSPVGKALSDACMGTIASFLSKYQDIIIEHQKVVKGNQKRLESLRELAGKENLEYPSVTLPPQPHTKEGVDAYNEVIARVRMWVNLNLWQKLKLSRDDAKPLLRLKGFPSFPLVERQANEVDWWDMVCNVKKLINEKKEDGKVFWQNLAGYKRQEALRPYLSSEEDRKKGKKFARYQLGDLLLHLEKKHGEDWGKVYDEAWERIDKKVEGLSKHIKLEEERRSEDAQSKAALTDWLRAKASFVIEGLKEADKDEFCRCELKLQKWYGDLRGKPFAIEAENSILDISGFSKQYNCAFIWQKDGVKKLNLYLIINYFKGGKLRFKKIKPEAFEANRFYTVINKKSGEIVPMEVNFNFDDPNLIILPLAFGKRFGREFIWNDLLSLETGSLKLANGRVIEKTLYNRRTRQDEPALFVALTFERREVLDSSNIKPMNLIGVDRGENIPAVIALTDPEGCPLSRFKDSLGNPTHILRIGESYKEKQRTIQAKKEVEQRRAGGYSRKYASKAKNLADDMVRNTARDLLYYAVTQDAMLIFENLSRGFGRQGKRTFMAERQYTRMEDWLTAKLAYEGLPSKTYLSKTLAQYTSKTCSNCGFTITSADYDRVLEKLKKTATGWMTTINGKELKVEGQITYYNRYKRQNVVKDLSVELDRLSEESVNNDISSWTKGRSGEALSLLKKRFSHRPVQEKFVCLNCGFETHADEQAALNIARSWLFLRSQEYKKYQTNKTTGNTDKRAFVETWQSFYRKKLKEVWKPAV

SEQ ID NO: 30966 - protein, 978 aa, synthetic construct
  REGION 1..978: note = engineered CasX variant
QEIKRINKIRRRLVKDSNTKKAGKTGPMKTLLVRVMTPDLRERLENLRKKPENIPQPISNTSRANLNKLLTDYTEMKKAILHVYWEEFQKDPVGLMSRVAQPASKKIDQNKLKPEMDEKGNLTTAGFACSQCGQPLFVYKLEQVSEKGKAYTNYFGRCNVAEHEKLILLDQLKPEKDSDEAVTYSLGKFGQRALDFYSIHVTKESTHPVKPLAQIAGNRYASTPVGKALSDACMGTIASFLSKYQDIIIEHQKVVKGNQKRLESLRELAGKENLEYPSVTLPPQPHTKEGVDAYNEVIARVRMWVNLNLWQKLKLSRDDAKPLLRLKGFPSFPLVERQANEVDWWDMVCNVKKLINEKKEDGKVFWQNLAGYKRQEALRPYLSSEEDRKKGKKFARYQLGDLLLHLEKKHGEDWGKVYDEAWERIDKKVEGLSKHIKLEEERRSEDAQSKAALTDWLRAKASFVIEGLKEADKDEFCRCELKLQKWYGDLRGKPFAIEAENSILDISGFSKQYNCAFIWQKDGVKKLNLYLIINYFKGGKLRFKKIKPEAFEANRFYTVINKKSGEIVPMEVNFNFDDPNLIILPLAFGKRFGREFIWNDLLSLETGSLKLANGRVIEKTLYNRRTRQDEPALFVALTFERREVLDSSNIKPMNLIGVDRGENIPAVIALTDPEGCPLSRFKDSLGNPTHILRIGESYKEKQRTIQAKKEVEQRRAGGYSRKYASKAKNLADDMVRNTARDLLYYAVTQDAMLIFENLSRGFGRQGKRTFMAERQYTRMEDWLTAKLAYEGLPSKTYLSKTLAQYTSKTCSNCGFTITSADYDRVLEKLKKTATGWMTTINGKELKVEGQITYYNRYKRQNVVKDLSVELDRLSEESVNNDISSWTKGRSGEALSLLKKRFSHRPVQEKFVCLNCGFETHADEQAALNIARSWLFLRSQEYKKYQTNKTTGNTDKRAFVETWQSFYRKKLKEVWKPAV

SEQ ID NO: 30967 - protein, 978 aa, synthetic construct
  REGION 1..978: note = engineered CasX variant
QEIKRINKIRRRLVKDSNTKKAGKTGPMKTLLVRVMTPDLRERLENLRKKPENIPQPISNTSRANLNKLLTDYTEMKKAILHVYWEEFQKDPVGLMSRVAQPASKKIDQNKLKPEMDEKGNLTTAGFACSQCGQPLFVYKLEQVSEKGKAYTNYFGRCNVAEHEKLILLDQLKPEKDSDEAVTYSLGKFGQRALDFYSIHVTKESTHPVKPLAQIAGNRYASAPVGKALSDACMGTIASFLSKYQDIIIEHQKVVKGNQKRLESLRELAGKENLEYPSVTLPPQPHTKEGVDAYNEVIARVRMWVNLNLWQKLKLSRDDAKPLLRLKGFPSFPLVERQANEVDWWDMVCNVKKLINEKKEDGKVFWQNLAGYKRQEALRPYLSSEEDRKKGKKFARYQLGDLLLHLEKKHGEDWGKVYDEAWERIDKKVEGLSKHIKLEEERRSEDAQSKAALTDWLRAKASFVIEGLKEADKDEFCRCELKLQKWYGDLRGKPFAIEAENSILDISGFSKQYNCAFIWQKDGVKKLNLYLIINYFKGGKLRFKKIKPEAFEANRFYTVINKKSGEIVPMEVNFNFDDPNLIILPLAFGKRFGREFIWNDLLSLETGSLKLANGRVIEKTLYNRRTRQDEPALFVALTFERREVLDSSNIKPMNLIGVDRGENIPAVIALTDPEGCPLSRFKDSLGNPTHILRIGESYKEKQRTIQAKKEVEQRRAGGYSRKYASKAKNLADDMVRNTARDLLYYAVTQDAMLIFENLSRGFGRQGKRTFMAERQYTRMEDWLTAKLAYEGLPSKTYLSKTLAQYTSKTCSNCGFTITSADYDRVLEKLKKTATGWMTTINGKELKVEGQITYYNRYKRQNVVKDLSVELDRLSEESVNNDISSWTKGRSGEALSLLKKRFSHRPVQEKFVCLNCGFETHADEQAALNIARSWLFLRSQEYKKYQTNKTTGNTDKRAFVETWQSFYRKKLKEVWKPAV

SEQ ID NO: 30968 - protein, 978 aa, synthetic construct
  REGION 1..978: note = engineered CasX variant
QEIKRINKIRRRLVKDSNTKKAGKTGPMKTLLVRVMTPDLRERLENLRKKPENIPQPISNTSRANLNKLLTDYTEMKKAILHVYWEEFQKDPVGLMSRVAQPASKKIDQNKLKPEMDEKGNLTTAGFACSQCGQPLFVYKLEQVSEKGKAYTNYFGRCNVAEHEKLILLDQLKPEKDSDEAVTYSLGKFGQRALDFYSIHVTKESTHPVKPLAQIAGNRYASVPVGKALSDACMGTIASFLSKYQDIIIEHQKVVKGNQKRLESLRELAGKENLEYPSVTLPPQPHTKEGVDAYNEVIARVRMWVNLNLWQKLKLSRDDAKPLLRLKGFPSFPLVERQANEVDWWDMVCNVKKLINEKKEDGKVFWQNLAGYKRQEALRPYLSSEEDRKKGKKFARYQLGDLLLHLEKKHGEDWGKVYDEAWERIDKKVEGLSKHIKLEEERRSEDAQSKAALTDWLRAKASFVIEGLKEADKDEFCRCELKLQKWYGDLRGKPFAIEAENSILDISGFSKQYNCAFIWQKDGVKKLNLYLIINYFKGGKLRFKKIKPEAFEANRFYTVINKKSGEIVPMEVNFNFDDPNLIILPLAFGKRFGREFIWNDLLSLETGSLKLANGRVIEKTLYNRRTRQDEPALFVALTFERREVLDSSNIKPMNLIGVDRGENIPAVIALTDPEGCPLSRFKDSLGNPTHILRIGESYKEKQRTIQAKKEVEQRRAGGYSRKYASKAKNLADDMVRNTARDLLYYAVTQDAMLIFENLSRGFGRQGKRTFMAERQYTRMEDWLTAKLAYEGLPSKTYLSKTLAQYTSKTCSNCGFTITSADYDRVLEKLKKTATGWMTTINGKELKVEGQITYYNRYKRQNVVKDLSVELDRLSEESVNNDISSWTKGRSGEALSLLKKRFSHRPVQEKFVCLNCGFETHADEQAALNIARSWLFLRSQEYKKYQTNKTTGNTDKRAFVETWQSFYRKKLKEVWKPAV

SEQ ID NO: 30969 - protein, 978 aa, synthetic construct
  REGION 1..978: note = engineered CasX variant
QEIKRINKIRRRLVKDSNTKKAGKTGPMKTLLVRVMTPDLRERLENLRKKPENIPQPISNTSRANLNKLLTDYTEMKKAILHVYWEEFQKDPVGLMSRVAQPASKKIDQNKLKPEMDEKGNLTTAGFACSQCGQPLFVYKLEQVSEKGKAYTNYFGRCNVAEHEKLIKLDQLKPEKDSDEAVTYSLGKFGQRALDFYSIHVTKESTHPVKPLAQIAGNRYASGPVGKALSDACMGTIASFLSKYQDIIIEHQKVVKGNQKRLESLRELAGKENLEYPSVTLPPQPHTKEGVDAYNEVIARVRMWVNLNLWQKLKLSRDDAKPLLRLKGFPSFPLVERQANEVDWWDMVCNVKKLINEKKEDGKVFWQNLAGYKRQEALRPYLSSEEDRKKGKKFARYQLGDLLLHLEKKHGEDWGKVYDEAWERIDKKVEGLSKHIKLEEERRSEDAQSKAALTDWLRAKASFVIEGLKEADKDEFCRCELKLQKWYGDLRGKPFAIEAENSILDISGFSKQYNCAFIWQKDGVKKLNLYLIINYFKGGKLRFKKIKPEAFEANRFYTVINKKSGEIVPMEVNFNFDDPNLIILPLAFGKRFGREFIWNDLLSLETGSLKLANGRVIEKTLYNRRTRQDEPALFVALTFERREVLDSSNIKPMNLIGVDRGENIPAVIALTDPEGCPLSRFKDSLGNPTHILRIGESYKEKQRTIQAKKEVEQRRAGGYSRKYASKAKNLADDMVRNTARDLLYYAVTQDAMLIFENLSRGFGRQGKRTFMAERQYTRMEDWLTAKLAYEGLPSKTYLSKTLAQYTSKTCSNCGFTITSADYDRVLEKLKKTATGWMTTINGKELKVEGQITYYNRYKRQNVVKDLSVELDRLSEESVNNDISSWTKGRSGEALSLLKKRFSHRPVQEKFVCLNCGFETHADEQAALNIARSWLFLRSQEYKKYQTNKTTGNTDKRAFVETWQSFYRKKLKEVWKPAV

SEQ ID NO: 30970 - protein, 977 aa, synthetic construct
  REGION 1..977: note = engineered CasX variant
QEIKRINKIRRRLVKDSNTKKAGKTGPMKTLLVRVMTPDLRERLENLRKKPENIPQPISNTSRANLNKLLTDYTEMKKAILHVYWEEFQKDPVGLMSRVAQPASKKIDQNKLKPEMDEKGNLTTAGFACSQCGQPLFVYKLEQVSEKGKAYTNYFGRCNVAEHEKLILLDQLKPEKDSDEAVTYSLGKFGQRALDFYSIHVTKESTHPVKPLAQIAGNRYASPVGKALSDACMGTIASFLSKYQDIIIEHQKVVKGNQKRLESLRELAGKENLEYPSVTLPPQPHTKEGVDAYNEVIARVRMWVNLNLWQKLKLSRDDAKPLLRLKGFPSFPLVERQANEVDWWDMVCNVKKLINEKKEDGKVFWQNLAGYKRQEALRPYLSSEEDRKKGKKFARYQLGDLLLHLEKKHGEDWGKVYDEAWERIDKKVEGLSKHIKLEEERRSEDAQSKAALTDWLRAKASFVIEGLKEADKDEFCRCELKLQKWYGDLRGKPFAIEAENSILDISGFSKQYNCAFIWQKDGVKKLNLYLIINYFKGGKLRFKKIKPEAFEANRFYTVINKKSGEIVPMEVNFNFDDPNLIILPLAFGKRFGREFIWNDLLSLETGSLKLANGRVIEKTLYNRRTRQDEPALFVALTFERREVLDSSNIKPMNLIGVDRGENIPAVIALTDPEGCPLSRFKDSLGNPTHILRIGESYKEKQRTIQAKKEVEQRRAGGYSRKYASKAKNLADDMVRNTARDLLYYAVTQDAMLIFENLSRGFGRQGKRTFMAERQYTRMEDWLTAKLAYEGLPSKTYLSKTLAQYTSKTCSNCGFTITSADYDRVLEKLKKTATGWMTTINGKELKVEGQITYYNRYKRQNVVKDLSVELDRLSEESVNNDISSWTKGRSGEALSLLKKRFSHRPVQEKFVCLNCGFETHADEQAALNIARSWLFLRSQEYKKYQTNKTTGNTDKRAFVETWQSFYRKKLKEVWKPAV

SEQ ID NO: 30971 - protein, 978 aa, synthetic construct
  REGION 1..978: note = engineered CasX variant
QEIKRINKIRRRLVKDSNTKKAGKTGPMKTLLVRVMTPDLRERLENLRKKPENIPQPISNTSRANLNKLLTDYTEMKKAILHVYWEEFQKDPVGLMSRVAQPASKKIDQNKLKPEMDEKGNLTTAGFACSQCGQPLFVYKLEQVSEKGKAYTNYFGRCNVAEHEKLILLDQLKPEKDSDEAVTYSLGKFGQRALDFYSIHVTKESTHPVKPLAQIAGNRYASYPVGKALSDACMGTIASFLSKYQDIIIEHQKVVKGNQKRLESLRELAGKENLEYPSVTLPPQPHTKEGVDAYNEVIARVRMWVNLNLWQKLKLSRDDAKPLLRLKGFPSFPLVERQANEVDWWDMVCNVKKLINEKKEDGKVFWQNLAGYKRQEALRPYLSSEEDRKKGKKFARYQLGDLLLHLEKKHGEDWGKVYDEAWERIDKKVEGLSKHIKLEEERRSEDAQSKAALTDWLRAKASFVIEGLKEADKDEFCRCELKLQKWYGDLRGKPFAIEAENSILDISGFSKQYNCAFIWQKDGVKKLNLYLIINYFKGGKLRFKKIKPEAFEANRFYTVINKKSGEIVPMEVNFNFDDPNLIILPLAFGKRVGREFIWNDLLSLETGSLKLANGRVIEKTLYNRRTRQDEPALFVALTFERREVLDSSNIKPMNLIGVDRGENIPAVIALTDPEGCPLSRFKDSLGNPTHILRIGESYKEKQRTIQAKKEVEQRRAGGYSRKYASKAKNLADDMVRNTARDLLYYAVTQDAMLIFENLSRGFGRQGKRTFMAERQYTRMEDWLTAKLAYEGLPSKTYLSKTLAQYTSKTCSNCGFTITSADYDRVLEKLKKTATGWMTTINGKELKVEGQITYYNRYKRQNVVKDLSVELDRLSEESVNNDISSWTKGRSGEALSLLKKRFSHRPVQEKFVCLNCGFETHADEQAALNIARSWLFLRSQEYKKYQTNKTTGNTDKRAFVETWQSFYRKKLKEVWKPAV

SEQ ID NO: 30972 - protein, 978 aa, synthetic construct
  REGION 1..978: note = engineered CasX variant
QEIKRINKIRRRLVKDSNTKKAGKTGPMKTLLVRVMTPDLRERLENLRKKPENIPQPISNTSRANLNKLLTDYTEMKKAILHVYWEEFQKDPVGLMSRVAQPASKKIDQNKLKPEMDEKGNLTTAGFACSQCGQPLFVYKLEQVSEKGKAYTNYFGRCNVAEHEKLILLDQLKPEKDSDEAVTYSLGKFGQRALDFYSIHVTKESTHPVKPLAQIAGNRYASHPVGKALSDACMGTIASFLSKYQDIIIEHQKVVKGNQKRLESLRELAGKENLEYPSVTLPPQPHTKEGVDAYNEVIARVRMWVNLNLWQKLKLSRDDAKPLLRLKGFPSFPLVERQANEVDWWDMVCNVKKLINEKKEDGKVFWQNLAGYKRQEALRPYLSSEEDRKKGKKFARYQLGDLLLHLEKKHGEDWGKVYDEAWERIDKKVEGLSKHIKLEEERRSEDAQSKAALTDWLRAKASFVIEGLKEADKDEFCRCELKLQKWYGDLRGKPFAIEAENSILDISGFSKQYNCAFIWQKDGVKKLNLYLIINYFKGGKLRFKKIKPEAFEANRFYTVINKKSGEIVPMEVNFNFDDPNLIILPLAFGKRVGREFIWNDLLSLETGSLKLANGRVIEKTLYNRRTRQDEPALFVALTFERREVLDSSNIKPMNLIGVDRGENIPAVIALTDPEGCPLSRFKDSLGNPTHILRIGESYKEKQRTIQAKKEVEQRRAGGYSRKYASKAKNLADDMVRNTARDLLYYAVTQDAMLIFENLSRGFGRQGKRTFMAERQYTRMEDWLTAKLAYEGLPSKTYLSKTLAQYTSKTCSNCGFTITSADYDRVLEKLKKTATGWMTTINGKELKVEGQITYYNRYKRQNVVKDLSVELDRLSEESVNNDISSWTKGRSGEALSLLKKRFSHRPVQEKFVCLNCGFETHADEQAALNIARSWLFLRSQEYKKYQTNKTTGNTDKRAFVETWQSFYRKKLKEVWKPAV

SEQ ID NO: 30973 - protein, 978 aa, synthetic construct
  REGION 1..978: note = engineered CasX variant
QEIKRINKIRRRLVKDSNTKKAGKTGPMKTLLVRVMTPDLRERLENLRKKPENIPQPISNTSRANLNKLLTDYTEMKKAILHVYWEEFQKDPVGLMSRVAQPASKKIDQNKLKPEMDEKGNLTTAGFACSQCGQPLFVYKLEQVSEKGKAYTNYFGRCNVAEHEKLILLDQLKPEKDSDEAVTYSLGKFGQRALDFYSIHVTKESTHPVKPLAQIAGNRYASSPVGKALSDACMGTIASFLSKYQDIIIEHQKVVKGNQKRLESLRELAGKENLEYPSVTLPPQPHTKEGVDAYNEVIARVRMWVNLNLWQKLKLSRDDAKPLLRLKGFPSFPLVERQANEVDWWDMVCNVKKLINEKKEDGKVFWQNLAGYKRQEALRPYLSSEEDRKKGKKFARYQLGDLLLHLEKKHGEDWGKVYDEAWERIDKKVEGLSKHIKLEEERRSEDAQSKAALTDWLRAKASFVIEGLKEADKDEFCRCELKLQKWYGDLRGKPFAIEAENSILDISGFSKQYNCAFIWQKDGVKKLNLYLIINYFKGGKLRFKKIKPEAFEANRFYTVINKKSGEIVPMEVNFNFDDPNLIILPLAFGKRVGREFIWNDLLSLETGSLKLANGRVIEKTLYNRRTRQDEPALFVALTFERREVLDSSNIKPMNLIGVDRGENIPAVIALTDPEGCPLSRFKDSLGNPTHILRIGESYKEKQRTIQAKKEVEQRRAGGYSRKYASKAKNLADDMVRNTARDLLYYAVTQDAMLIFENLSRGFGRQGKRTFMAERQYTRMEDWLTAKLAYEGLPSKTYLSKTLAQYTSKTCSNCGFTITSADYDRVLEKLKKTATGWMTTINGKELKVEGQITYYNRYKRQNVVKDLSVELDRLSEESVNNDISSWTKGRSGEALSLLKKRFSHRPVQEKFVCLNCGFETHADEQAALNIARSWLFLRSQEYKKYQTNKTTGNTDKRAFVETWQSFYRKKLKEVWKPAV

SEQ ID NO: 30974 - protein, 978 aa, synthetic construct
  REGION 1..978: note = engineered CasX variant
QEIKRINKIRRRLVKDSNTKKAGKTGPMKTLLVRVMTPDLRERLENLRKKPENIPQPISNTSRANLNKLLTDYTEMKKAILHVYWEEFQKDPVGLMSRVAQPASKKIDQNKLKPEMDEKGNLTTAGFACSQCGQPLFVYKLEQVSEKGKAYTNYFGRCNVAEHEKLILLDQLKPEKDSDEAVTYSLGKFGQRALDFYSIHVTKESTHPVKPLAQIAGNRYASTPVGKALSDACMGTIASFLSKYQDIIIEHQKVVKGNQKRLESLRELAGKENLEYPSVTLPPQPHTKEGVDAYNEVIARVRMWVNLNLWQKLKLSRDDAKPLLRLKGFPSFPLVERQANEVDWWDMVCNVKKLINEKKEDGKVFWQNLAGYKRQEALRPYLSSEEDRKKGKKFARYQLGDLLLHLEKKHGEDWGKVYDEAWERIDKKVEGLSKHIKLEEERRSEDAQSKAALTDWLRAKASFVIEGLKEADKDEFCRCELKLQKWYGDLRGKPFAIEAENSILDISGFSKQYNCAFIWQKDGVKKLNLYLIINYFKGGKLRFKKIKPEAFEANRFYTVINKKSGEIVPMEVNFNFDDPNLIILPLAFGKRVGREFIWNDLLSLETGSLKLANGRVIEKTLYNRRTRQDEPALFVALTFERREVLDSSNIKPMNLIGVDRGENIPAVIALTDPEGCPLSRFKDSLGNPTHILRIGESYKEKQRTIQAKKEVEQRRAGGYSRKYASKAKNLADDMVRNTARDLLYYAVTQDAMLIFENLSRGFGRQGKRTFMAERQYTRMEDWLTAKLAYEGLPSKTYLSKTLAQYTSKTCSNCGFTITSADYDRVLEKLKKTATGWMTTINGKELKVEGQITYYNRYKRQNVVKDLSVELDRLSEESVNNDISSWTKGRSGEALSLLKKRFSHRPVQEKFVCLNCGFETHADEQAALNIARSWLFLRSQEYKKYQTNKTTGNTDKRAFVETWQSFYRKKLKEVWKPAV

SEQ ID NO: 30975 - protein, 978 aa, synthetic construct
  REGION 1..978: note = engineered CasX variant
QEIKRINKIRRRLVKDSNTKKAGKTGPMKTLLVRVMTPDLRERLENLRKKPENIPQPISNTSRANLNKLLTDYTEMKKAILHVYWEEFQKDPVGLMSRVAQPASKKIDQNKLKPEMDEKGNLTTAGFACSQCGQPLFVYKLEQVSEKGKAYTNYFGRCNVAEHEKLILLDQLKPEKDSDEAVTYSLGKFGQRALDFYSIHVTKESTHPVKPLAQIAGNRYASAPVGKALSDACMGTIASFLSKYQDIIIEHQKVVKGNQKRLESLRELAGKENLEYPSVTLPPQPHTKEGVDAYNEVIARVRMWVNLNLWQKLKLSRDDAKPLLRLKGFPSFPLVERQANEVDWWDMVCNVKKLINEKKEDGKVFWQNLAGYKRQEALRPYLSSEEDRKKGKKFARYQLGDLLLHLEKKHGEDWGKVYDEAWERIDKKVEGLSKHIKLEEERRSEDAQSKAALTDWLRAKASFVIEGLKEADKDEFCRCELKLQKWYGDLRGKPFAIEAENSILDISGFSKQYNCAFIWQKDGVKKLNLYLIINYFKGGKLRFKKIKPEAFEANRFYTVINKKSGEIVPMEVNFNFDDPNLIILPLAFGKRVGREFIWNDLLSLETGSLKLANGRVIEKTLYNRRTRQDEPALFVALTFERREVLDSSNIKPMNLIGVDRGENIPAVIALTDPEGCPLSRFKDSLGNPTHILRIGESYKEKQRTIQAKKEVEQRRAGGYSRKYASKAKNLADDMVRNTARDLLYYAVTQDAMLIFENLSRGFGRQGKRTFMAERQYTRMEDWLTAKLAYEGLPSKTYLSKTLAQYTSKTCSNCGFTITSADYDRVLEKLKKTATGWMTTINGKELKVEGQITYYNRYKRQNVVKDLSVELDRLSEESVNNDISSWTKGRSGEALSLLKKRFSHRPVQEKFVCLNCGFETHADEQAALNIARSWLFLRSQEYKKYQTNKTTGNTDKRAFVETWQSFYRKKLKEVWKPAV

SEQ ID NO: 30976 - protein, 978 aa, synthetic construct
  REGION 1..978: note = engineered CasX variant
QEIKRINKIRRRLVKDSNTKKAGKTGPMKTLLVRVMTPDLRERLENLRKKPENIPQPISNTSRANLNKLLTDYTEMKKAILHVYWEEFQKDPVGLMSRVAQPASKKIDQNKLKPEMDEKGNLTTAGFACSQCGQPLFVYKLEQVSEKGKAYTNYFGRCNVAEHEKLILLDQLKPEKDSDEAVTYSLGKFGQRALDFYSIHVTKESTHPVKPLAQIAGNRYASVPVGKALSDACMGTIASFLSKYQDIIIEHQKVVKGNQKRLESLRELAGKENLEYPSVTLPPQPHTKEGVDAYNEVIARVRMWVNLNLWQKLKLSRDDAKPLLRLKGFPSFPLVERQANEVDWWDMVCNVKKLINEKKEDGKVFWQNLAGYKRQEALRPYLSSEEDRKKGKKFARYQLGDLLLHLEKKHGEDWGKVYDEAWERIDKKVEGLSKHIKLEEERRSEDAQSKAALTDWLRAKASFVIEGLKEADKDEFCRCELKLQKWYGDLRGKPFAIEAENSILDISGFSKQYNCAFIWQKDGVKKLNLYLIINYFKGGKLRFKKIKPEAFEANRFYTVINKKSGEIVPMEVNFNFDDPNLIILPLAFGKRVGREFIWNDLLSLETGSLKLANGRVIEKTLYNRRTRQDEPALFVALTFERREVLDSSNIKPMNLIGVDRGENIPAVIALTDPEGCPLSRFKDSLGNPTHILRIGESYKEKQRTIQAKKEVEQRRAGGYSRKYASKAKNLADDMVRNTARDLLYYAVTQDAMLIFENLSRGFGRQGKRTFMAERQYTRMEDWLTAKLAYEGLPSKTYLSKTLAQYTSKTCSNCGFTITSADYDRVLEKLKKTATGWMTTINGKELKVEGQITYYNRYKRQNVVKDLSVELDRLSEESVNNDISSWTKGRSGEALSLLKKRFSHRPVQEKFVCLNCGFETHADEQAALNIARSWLFLRSQEYKKYQTNKTTGNTDKRAFVETWQSFYRKKLKEVWKPAV

SEQ ID NO: 30977 - protein, 978 aa, synthetic construct
  REGION 1..978: note = engineered CasX variant
QEIKRINKIRRRLVKDSNTKKAGKTGPMKTLLVRVMTPDLRERLENLRKKPENIPQPISNTSRANLNKLLTDYTEMKKAILHVYWEEFQKDPVGLMSRVAQPASKKIDQNKLKPEMDEKGNLTTAGFACSQCGQPLFVYKLEQVSEKGKAYTNYFGRCNVAEHEKLIKLDQLKPEKDSDEAVTYSLGKFGQRALDFYSIHVTKESTHPVKPLAQIAGNRYASGPVGKALSDACMGTIASFLSKYQDIIIEHQKVVKGNQKRLESLRELAGKENLEYPSVTLPPQPHTKEGVDAYNEVIARVRMWVNLNLWQKLKLSRDDAKPLLRLKGFPSFPLVERQANEVDWWDMVCNVKKLINEKKEDGKVFWQNLAGYKRQEALRPYLSSEEDRKKGKKFARYQLGDLLLHLEKKHGEDWGKVYDEAWERIDKKVEGLSKHIKLEEERRSEDAQSKAALTDWLRAKASFVIEGLKEADKDEFCRCELKLQKWYGDLRGKPFAIEAENSILDISGFSKQYNCAFIWQKDGVKKLNLYLIINYFKGGKLRFKKIKPEAFEANRFYTVINKKSGEIVPMEVNFNFDDPNLIILPLAFGKRVGREFIWNDLLSLETGSLKLANGRVIEKTLYNRRTRQDEPALFVALTFERREVLDSSNIKPMNLIGVDRGENIPAVIALTDPEGCPLSRFKDSLGNPTHILRIGESYKEKQRTIQAKKEVEQRRAGGYSRKYASKAKNLADDMVRNTARDLLYYAVTQDAMLIFENLSRGFGRQGKRTFMAERQYTRMEDWLTAKLAYEGLPSKTYLSKTLAQYTSKTCSNCGFTITSADYDRVLEKLKKTATGWMTTINGKELKVEGQITYYNRYKRQNVVKDLSVELDRLSEESVNNDISSWTKGRSGEALSLLKKRFSHRPVQEKFVCLNCGFETHADEQAALNIARSWLFLRSQEYKKYQTNKTTGNTDKRAFVETWQSFYRKKLKEVWKPAV

SEQ ID NO: 30978 - protein, 977 aa, synthetic construct
  REGION 1..977: note = engineered CasX variant
QEIKRINKIRRRLVKDSNTKKAGKTGPMKTLLVRVMTPDLRERLENLRKKPENIPQPISNTSRANLNKLLTDYTEMKKAILHVYWEEFQKDPVGLMSRVAQPASKKIDQNKLKPEMDEKGNLTTAGFACSQCGQPLFVYKLEQVSEKGKAYTNYFGRCNVAEHEKLILLDQLKPEKDSDEAVTYSLGKFGQRALDFYSIHVTKESTHPVKPLAQIAGNRYASPVGKALSDACMGTIASFLSKYQDIIIEHQKVVKGNQKRLESLRELAGKENLEYPSVTLPPQPHTKEGVDAYNEVIARVRMWVNLNLWQKLKLSRDDAKPLLRLKGFPSFPLVERQANEVDWWDMVCNVKKLINEKKEDGKVFWQNLAGYKRQEALRPYLSSEEDRKKGKKFARYQLGDLLLHLEKKHGEDWGKVYDEAWERIDKKVEGLSKHIKLEEERRSEDAQSKAALTDWLRAKASFVIEGLKEADKDEFCRCELKLQKWYGDLRGKPFAIEAENSILDISGFSKQYNCAFIWQKDGVKKLNLYLIINYFKGGKLRFKKIKPEAFEANRFYTVINKKSGEIVPMEVNFNFDDPNLIILPLAFGKRVGREFIWNDLLSLETGSLKLANGRVIEKTLYNRRTRQDEPALFVALTFERREVLDSSNIKPMNLIGVDRGENIPAVIALTDPEGCPLSRFKDSLGNPTHILRIGESYKEKQRTIQAKKEVEQRRAGGYSRKYASKAKNLADDMVRNTARDLLYYAVTQDAMLIFENLSRGFGRQGKRTFMAERQYTRMEDWLTAKLAYEGLPSKTYLSKTLAQYTSKTCSNCGFTITSADYDRVLEKLKKTATGWMTTINGKELKVEGQITYYNRYKRQNVVKDLSVELDRLSEESVNNDISSWTKGRSGEALSLLKKRFSHRPVQEKFVCLNCGFETHADEQAALNIARSWLFLRSQEYKKYQTNKTTGNTDKRAFVETWQSFYRKKLKEVWKPAV

SEQ ID NO: 30979 - protein, 979 aa, synthetic construct
  REGION 1..979: note = engineered CasX variant
QEIKRINKIRRRLVKDSNTKKAGKTGPMKTLLVRVMTPDLRERLENLRKKPENIPQPISNTSRANLNKLLTDYTEMKKAILHVYWEEFQKDPVGLMSRVAQPASKKIDQNKLKPEMDEKGNLTTAGFACSQCGQPLFVYKLEQVSEKGKAYTNYFGRCNVAEHEKLILLDQLKPEKDSDEAVTYSLGKFGQRALDFYSIHVTKESTHPVKPLAQIAGNRYASYPVGKALSDACMGTIASFLSKYQDIIIEHQKVVKGNQKRLESLRELAGKENLEYPSVTLPPQPHTKEGVDAYNEVIARVRMWVNLNLWQKLKLSRDDAKPLLRLKGFPSFPLVERQANEVDWWDMVCNVKKLINEKKEDGKVFWQNLAGYKRQEALRPYLSSEEDRKKGKKFARYQLGDLLLHLEKKHGEDWGKVYDEAWERIDKKVEGLSKHIKLEEERRSEDAQSKAALTDWLRAKASFVIEGLKEADKDEFCRCELKLQKWYGDLRGKPFAIEAENSILDISGFSKQYNCAFIWQKDGVKKLNLYLIINYFKGGKLRFKKIKPEAFEANRFYTVINKKSGEIVPMEVNFNFDDPNLIILPLAFGKRQGREFIWNDLLSLETGSLKLANGRVIEKTLYNRRTRQDEPALFVALTFERREVLDSSNIKTPMNLIGVDRGENIPAVIALTDPEGCPLSRFKDSLGNPTHILRIGESYKEKQRTIQAKKEVEQRRAGGYSRKYASKAKNLADDMVRNTARDLLYYAVTQDAMLIFENLSRGFGRQGKRTFMAERQYTRMEDWLTAKLAYEGLPSKTYLSKTLAQYTSKTCSNCGFTITSADYDRVLEKLKKTATGWMTTINGKELKVEGQITYYNRYKRQNVVKDLSVELDRLSEESVNNDISSWTKGRSGEALSLLKKRFSHRPVQEKFVCLNCGFETHADEQAALNIARSWLFLRSQEYKKYQTNKTTGNTDKRAFVETWQSFYRKKLKEVWKPAV

SEQ ID NO: 30980 - protein, 979 aa, synthetic construct
  REGION 1..979: note = engineered CasX variant
QEIKRINKIRRRLVKDSNTKKAGKTGPMKTLLVRVMTPDLRERLENLRKKPENIPQPISNTSRANLNKLLTDYTEMKKAILHVYWEEFQKDPVGLMSRVAQPASKKIDQNKLKPEMDEKGNLTTAGFACSQCGQPLFVYKLEQVSEKGKAYTNYFGRCNVAEHEKLILLDQLKPEKDSDEAVTYSLGKFGQRALDFYSIHVTKESTHPVKPLAQIAGNRYASHPVGKALSDACMGTIASFLSKYQDIIIEHQKVVKGNQKRLESLRELAGKENLEYPSVTLPPQPHTKEGVDAYNEVIARVRMWVNLNLWQKLKLSRDDAKPLLRLKGFPSFPLVERQANEVDWWDMVCNVKKLINEKKEDGKVFWQNLAGYKRQEALRPYLSSEEDRKKGKKFARYQLGDLLLHLEKKHGEDWGKVYDEAWERIDKKVEGLSKHIKLEEERRSEDAQSKAALTDWLRAKASFVIEGLKEADKDEFCRCELKLQKWYGDLRGKPFAIEAENSILDISGFSKQYNCAFIWQKDGVKKLNLYLIINYFKGGKLRFKKIKPEAFEANRFYTVINKKSGEIVPMEVNFNFDDPNLIILPLAFGKRQGREFIWNDLLSLETGSLKLANGRVIEKTLYNRRTRQDEPALFVALTFERREVLDSSNIKTPMNLIGVDRGENIPAVIALTDPEGCPLSRFKDSLGNPTHILRIGESYKEKQRTIQAKKEVEQRRAGGYSRKYASKAKNLADDMVRNTARDLLYYAVTQDAMLIFENLSRGFGRQGKRTFMAERQYTRMEDWLTAKLAYEGLPSKTYLSKTLAQYTSKTCSNCGFTITSADYDRVLEKLKKTATGWMTTINGKELKVEGQITYYNRYKRQNVVKDLSVELDRLSEESVNNDISSWTKGRSGEALSLLKKRFSHRPVQEKFVCLNCGFETHADEQAALNIARSWLFLRSQEYKKYQTNKTTGNTDKRAFVETWQSFYRKKLKEVWKPAV

SEQ ID NO: 30981 - protein, 979 aa, synthetic construct
  REGION 1..979: note = engineered CasX variant
QEIKRINKIRRRLVKDSNTKKAGKTGPMKTLLVRVMTPDLRERLENLRKKPENIPQPISNTSRANLNKLLTDYTEMKKAILHVYWEEFQKDPVGLMSRVAQPASKKIDQNKLKPEMDEKGNLTTAGFACSQCGQPLFVYKLEQVSEKGKAYTNYFGRCNVAEHEKLILLDQLKPEKDSDEAVTYSLGKFGQRALDFYSIHVTKESTHPVKPLAQIAGNRYASSPVGKALSDACMGTIASFLSKYQDIIIEHQKVVKGNQKRLESLRELAGKENLEYPSVTLPPQPHTKEGVDAYNEVIARVRMWVNLNLWQKLKLSRDDAKPLLRLKGFPSFPLVERQANEVDWWDMVCNVKKLINEKKEDGKVFWQNLAGYKRQEALRPYLSSEEDRKKGKKFARYQLGDLLLHLEKKHGEDWGKVYDEAWERIDKKVEGLSKHIKLEEERRSEDAQSKAALTDWLRAKASFVIEGLKEADKDEFCRCELKLQKWYGDLRGKPFAIEAENSILDISGFSKQYNCAFIWQKDGVKKLNLYLIINYFKGGKLRFKKIKPEAFEANRFYTVINKKSGEIVPMEVNFNFDDPNLIILPLAFGKRQGREFIWNDLLSLETGSLKLANGRVIEKTLYNRRTRQDEPALFVALTFERREVLDSSNIKTPMNLIGVDRGENIPAVIALTDPEGCPLSRFKDSLGNPTHILRIGESYKEKQRTIQAKKEVEQRRAGGYSRKYASKAKNLADDMVRNTARDLLYYAVTQDAMLIFENLSRGFGRQGKRTFMAERQYTRMEDWLTAKLAYEGLPSKTYLSKTLAQYTSKTCSNCGFTITSADYDRVLEKLKKTATGWMTTINGKELKVEGQITYYNRYKRQNVVKDLSVELDRLSEESVNNDISSWTKGRSGEALSLLKKRFSHRPVQEKFVCLNCGFETHADEQAALNIARSWLFLRSQEYKKYQTNKTTGNTDKRAFVETWQSFYRKKLKEVWKPAV

SEQ ID NO: 30982 - protein, 979 aa, synthetic construct
  REGION 1..979: note = engineered CasX variant
QEIKRINKIRRRLVKDSNTKKAGKTGPMKTLLVRVMTPDLRERLENLRKKPENIPQPISNTSRANLNKLLTDYTEMKKAILHVYWEEFQKDPVGLMSRVAQPASKKIDQNKLKPEMDEKGNLTTAGFACSQCGQPLFVYKLEQVSEKGKAYTNYFGRCNVAEHEKLILLDQLKPEKDSDEAVTYSLGKFGQRALDFYSIHVTKESTHPVKPLAQIAGNRYASTPVGKALSDACMGTIASFLSKYQDIIIEHQKVVKGNQKRLESLRELAGKENLEYPSVTLPPQPHTKEGVDAYNEVIARVRMWVNLNLWQKLKLSRDDAKPLLRLKGFPSFPLVERQANEVDWWDMVCNVKKLINEKKEDGKVFWQNLAGYKRQEALRPYLSSEEDRKKGKKFARYQLGDLLLHLEKKHGEDWGKVYDEAWERIDKKVEGLSKHIKLEEERRSEDAQSKAALTDWLRAKASFVIEGLKEADKDEFCRCELKLQKWYGDLRGKPFAIEAENSILDISGFSKQYNCAFIWQKDGVKKLNLYLIINYFKGGKLRFKKIKPEAFEANRFYTVINKKSGEIVPMEVNFNFDDPNLIILPLAFGKRQGREFIWNDLLSLETGSLKLANGRVIEKTLYNRRTRQDEPALFVALTFERREVLDSSNIKTPMNLIGVDRGENIPAVIALTDPEGCPLSRFKDSLGNPTHILRIGESYKEKQRTIQAKKEVEQRRAGGYSRKYASKAKNLADDMVRNTARDLLYYAVTQDAMLIFENLSRGFGRQGKRTFMAERQYTRMEDWLTAKLAYEGLPSKTYLSKTLAQYTSKTCSNCGFTITSADYDRVLEKLKKTATGWMTTINGKELKVEGQITYYNRYKRQNVVKDLSVELDRLSEESVNNDISSWTKGRSGEALSLLKKRFSHRPVQEKFVCLNCGFETHADEQAALNIARSWLFLRSQEYKKYQTNKTTGNTDKRAFVETWQSFYRKKLKEVWKPAV

SEQ ID NO: 30983 - protein, 979 aa, synthetic construct
  REGION 1..979: note = engineered CasX variant
QEIKRINKIRRRLVKDSNTKKAGKTGPMKTLLVRVMTPDLRERLENLRKKPENIPQPISNTSRANLNKLLTDYTEMKKAILHVYWEEFQKDPVGLMSRVAQPASKKIDQNKLKPEMDEKGNLTTAGFACSQCGQPLFVYKLEQVSEKGKAYTNYFGRCNVAEHEKLILLDQLKPEKDSDEAVTYSLGKFGQRALDFYSIHVTKESTHPVKPLAQIAGNRYASAPVGKALSDACMGTIASFLSKYQDIIIEHQKVVKGNQKRLESLRELAGKENLEYPSVTLPPQPHTKEGVDAYNEVIARVRMWVNLNLWQKLKLSRDDAKPLLRLKGFPSFPLVERQANEVDWWDMVCNVKKLINEKKEDGKVFWQNLAGYKRQEALRPYLSSEEDRKKGKKFARYQLGDLLLHLEKKHGEDWGKVYDEAWERIDKKVEGLSKHIKLEEERRSEDAQSKAALTDWLRAKASFVIEGLKEADKDEFCRCELKLQKWYGDLRGKPFAIEAENSILDISGFSKQYNCAFIWQKDGVKKLNLYLIINYFKGGKLRFKKIKPEAFEANRFYTVINKKSGEIVPMEVNFNFDDPNLIILPLAFGKRQGREFIWNDLLSLETGSLKLANGRVIEKTLYNRRTRQDEPALFVALTFERREVLDSSNIKTPMNLIGVDRGENIPAVIALTDPEGCPLSRFKDSLGNPTHILRIGESYKEKQRTIQAKKEVEQRRAGGYSRKYASKAKNLADDMVRNTARDLLYYAVTQDAMLIFENLSRGFGRQGKRTFMAERQYTRMEDWLTAKLAYEGLPSKTYLSKTLAQYTSKTCSNCGFTITSADYDRVLEKLKKTATGWMTTINGKELKVEGQITYYNRYKRQNVVKDLSVELDRLSEESVNNDISSWTKGRSGEALSLLKKRFSHRPVQEKFVCLNCGFETHADEQAALNIARSWLFLRSQEYKKYQTNKTTGNTDKRAFVETWQSFYRKKLKEVWKPAV

SEQ ID NO: 30984 - protein, 979 aa, synthetic construct
  REGION 1..979: note = engineered CasX variant
QEIKRINKIRRRLVKDSNTKKAGKTGPMKTLLVRVMTPDLRERLENLRKKPENIPQPISNTSRANLNKLLTDYTEMKKAILHVYWEEFQKDPVGLMSRVAQPASKKIDQNKLKPEMDEKGNLTTAGFACSQCGQPLFVYKLEQVSEKGKAYTNYFGRCNVAEHEKLILLDQLKPEKDSDEAVTYSLGKFGQRALDFYSIHVTKESTHPVKPLAQIAGNRYASVPVGKALSDACMGTIASFLSKYQDIIIEHQKVVKGNQKRLESLRELAGKENLEYPSVTLPPQPHTKEGVDAYNEVIARVRMWVNLNLWQKLKLSRDDAKPLLRLKGFPSFPLVERQANEVDWWDMVCNVKKLINEKKEDGKVFWQNLAGYKRQEALRPYLSSEEDRKKGKKFARYQLGDLLLHLEKKHGEDWGKVYDEAWERIDKKVEGLSKHIKLEEERRSEDAQSKAALTDWLRAKASFVIEGLKEADKDEFCRCELKLQKWYGDLRGKPFAIEAENSILDISGFSKQYNCAFIWQKDGVKKLNLYLIINYFKGGKLRFKKIKPEAFEANRFYTVINKKSGEIVPMEVNFNFDDPNLIILPLAFGKRQGREFIWNDLLSLETGSLKLANGRVIEKTLYNRRTRQDEPALFVALTFERREVLDSSNIKTPMNLIGVDRGENIPAVIALTDPEGCPLSRFKDSLGNPTHILRIGESYKEKQRTIQAKKEVEQRRAGGYSRKYASKAKNLADDMVRNTARDLLYYAVTQDAMLIFENLSRGFGRQGKRTFMAERQYTRMEDWLTAKLAYEGLPSKTYLSKTLAQYTSKTCSNCGFTITSADYDRVLEKLKKTATGWMTTINGKELKVEGQITYYNRYKRQNVVKDLSVELDRLSEESVNNDISSWTKGRSGEALSLLKKRFSHRPVQEKFVCLNCGFETHADEQAALNIARSWLFLRSQEYKKYQTNKTTGNTDKRAFVETWQSFYRKKLKEVWKPAV

SEQ ID NO: 30985 - protein, 979 aa, synthetic construct
  REGION 1..979: note = engineered CasX variant
QEIKRINKIRRRLVKDSNTKKAGKTGPMKTLLVRVMTPDLRERLENLRKKPENIPQPISNTSRANLNKLLTDYTEMKKAILHVYWEEFQKDPVGLMSRVAQPASKKIDQNKLKPEMDEKGNLTTAGFACSQCGQPLFVYKLEQVSEKGKAYTNYFGRCNVAEHEKLIKLDQLKPEKDSDEAVTYSLGKFGQRALDFYSIHVTKESTHPVKPLAQIAGNRYASGPVGKALSDACMGTIASFLSKYQDIIIEHQKVVKGNQKRLESLRELAGKENLEYPSVTLPPQPHTKEGVDAYNEVIARVRMWVNLNLWQKLKLSRDDAKPLLRLKGFPSFPLVERQANEVDWWDMVCNVKKLINEKKEDGKVFWQNLAGYKRQEALRPYLSSEEDRKKGKKFARYQLGDLLLHLEKKHGEDWGKVYDEAWERIDKKVEGLSKHIKLEEERRSEDAQSKAALTDWLRAKASFVIEGLKEADKDEFCRCELKLQKWYGDLRGKPFAIEAENSILDISGFSKQYNCAFIWQKDGVKKLNLYLIINYFKGGKLRFKKIKPEAFEANRFYTVINKKSGEIVPMEVNFNFDDPNLIILPLAFGKRQGREFIWNDLLSLETGSLKLANGRVIEKTLYNRRTRQDEPALFVALTFERREVLDSSNIKTPMNLIGVDRGENIPAVIALTDPEGCPLSRFKDSLGNPTHILRIGESYKEKQRTIQAKKEVEQRRAGGYSRKYASKAKNLADDMVRNTARDLLYYAVTQDAMLIFENLSRGFGRQGKRTFMAERQYTRMEDWLTAKLAYEGLPSKTYLSKTLAQYTSKTCSNCGFTITSADYDRVLEKLKKTATGWMTTINGKELKVEGQITYYNRYKRQNVVKDLSVELDRLSEESVNNDISSWTKGRSGEALSLLKKRFSHRPVQEKFVCLNCGFETHADEQAALNIARSWLFLRSQEYKKYQTNKTTGNTDKRAFVETWQSFYRKKLKEVWKPAV

SEQ ID NO: 30986 - protein, 978 aa, synthetic construct
  REGION 1..978: note = engineered CasX variant
QEIKRINKIRRRLVKDSNTKKAGKTGPMKTLLVRVMTPDLRERLENLRKKPENIPQPISNTSRANLNKLLTDYTEMKKAILHVYWEEFQKDPVGLMSRVAQPASKKIDQNKLKPEMDEKGNLTTAGFACSQCGQPLFVYKLEQVSEKGKAYTNYFGRCNVAEHEKLILLDQLKPEKDSDEAVTYSLGKFGQRALDFYSIHVTKESTHPVKPLAQIAGNRYASPVGKALSDACMGTIASFLSKYQDIIIEHQKVVKGNQKRLESLRELAGKENLEYPSVTLPPQPHTKEGVDAYNEVIARVRMWVNLNLWQKLKLSRDDAKPLLRLKGFPSFPLVERQANEVDWWDMVCNVKKLINEKKEDGKVFWQNLAGYKRQEALRPYLSSEEDRKKGKKFARYQLGDLLLHLEKKHGEDWGKVYDEAWERIDKKVEGLSKHIKLEEERRSEDAQSKAALTDWLRAKASFVIEGLKEADKDEFCRCELKLQKWYGDLRGKPFAIEAENSILDISGFSKQYNCAFIWQKDGVKKLNLYLIINYFKGGKLRFKKIKPEAFEANRFYTVINKKSGEIVPMEVNFNFDDPNLIILPLAFGKRQGREFIWNDLLSLETGSLKLANGRVIEKTLYNRRTRQDEPALFVALTFERREVLDSSNIKTPMNLIGVDRGENIPAVIALTDPEGCPLSRFKDSLGNPTHILRIGESYKEKQRTIQAKKEVEQRRAGGYSRKYASKAKNLADDMVRNTARDLLYYAVTQDAMLIFENLSRGFGRQGKRTFMAERQYTRMEDWLTAKLAYEGLPSKTYLSKTLAQYTSKTCSNCGFTITSADYDRVLEKLKKTATGWMTTINGKELKVEGQITYYNRYKRQNVVKDLSVELDRLSEESVNNDISSWTKGRSGEALSLLKKRFSHRPVQEKFVCLNCGFETHADEQAALNIARSWLFLRSQEYKKYQTNKTTGNTDKRAFVETWQSFYRKKLKEVWKPAV

SEQ ID NO: 30987 - protein, 979 aa, synthetic construct
  REGION 1..979: note = engineered CasX variant
QEIKRINKIRRRLVKDSNTKKAGKTGPMKTLLVRVMTPDLRERLENLRKKPENIPQPISNTSRANLNKLLTDYTEMKKAILHVYWEEFQKDPVGLMSRVAQPASKKIDQNKLKPEMDEKGNLTTAGFACSQCGQPLFVYKLEQVSEKGKAYTNYFGRCNVAEHEKLILLDQLKPEKDSDEAVTYSLGKFGQRALDFYSIHVTKESTHPVKPLAQIAGNRYASYPVGKALSDACMGTIASFLSKYQDIIIEHQKVVKGNQKRLESLRELAGKENLEYPSVTLPPQPHTKEGVDAYNEVIARVRMWVNLNLWQKLKLSRDDAKPLLRLKGFPSFPLVERQANEVDWWDMVCNVKKLINEKKEDGKVFWQNLAGYKRQEALRPYLSSEEDRKKGKKFARYQLGDLLLHLEKKHGEDWGKVYDEAWERIDKKVEGLSKHIKLEEERRSEDAQSKAALTDWLRAKASFVIEGLKEADKDEFCRCELKLQKWYGDLRGKPFAIEAENSILDISGFSKQYNCAFIWQKDGVKKLNLYLIINYFKGGKLRFKKIKPEAFEANRFYTVINKKSGEIVPMEVNFNFDDPNLIILPLAFGKRQGREFIWNDLLSLETGSLKLANGRVIEKTLYNRRTRQDEPALFVALTFERREVLDSSNIKPMSNLIGVDRGENIPAVIALTDPEGCPLSRFKDSLGNPTHILRIGESYKEKQRTIQAKKEVEQRRAGGYSRKYASKAKNLADDMVRNTARDLLYYAVTQDAMLIFENLSRGFGRQGKRTFMAERQYTRMEDWLTAKLAYEGLPSKTYLSKTLAQYTSKTCSNCGFTITSADYDRVLEKLKKTATGWMTTINGKELKVEGQITYYNRYKRQNVVKDLSVELDRLSEESVNNDISSWTKGRSGEALSLLKKRFSHRPVQEKFVCLNCGFETHADEQAALNIARSWLFLRSQEYKKYQTNKTTGNTDKRAFVETWQSFYRKKLKEVWKPAV

SEQ ID NO: 30988 - protein, 979 aa, synthetic construct
  REGION 1..979: note = engineered CasX variant
QEIKRINKIRRRLVKDSNTKKAGKTGPMKTLLVRVMTPDLRERLENLRKKPENIPQPISNTSRANLNKLLTDYTEMKKAILHVYWEEFQKDPVGLMSRVAQPASKKIDQNKLKPEMDEKGNLTTAGFACSQCGQPLFVYKLEQVSEKGKAYTNYFGRCNVAEHEKLILLDQLKPEKDSDEAVTYSLGKFGQRALDFYSIHVTKESTHPVKPLAQIAGNRYASHPVGKALSDACMGTIASFLSKYQDIIIEHQKVVKGNQKRLESLRELAGKENLEYPSVTLPPQPHTKEGVDAYNEVIARVRMWVNLNLWQKLKLSRDDAKPLLRLKGFPSFPLVERQANEVDWWDMVCNVKKLINEKKEDGKVFWQNLAGYKRQEALRPYLSSEEDRKKGKKFARYQLGDLLLHLEKKHGEDWGKVYDEAWERIDKKVEGLSKHIKLEEERRSEDAQSKAALTDWLRAKASFVIEGLKEADKDEFCRCELKLQKWYGDLRGKPFAIEAENSILDISGFSKQYNCAFIWQKDGVKKLNLYLIINYFKGGKLRFKKIKPEAFEANRFYTVINKKSGEIVPMEVNFNFDDPNLIILPLAFGKRQGREFIWNDLLSLETGSLKLANGRVIEKTLYNRRTRQDEPALFVALTFERREVLDSSNIKPMSNLIGVDRGENIPAVIALTDPEGCPLSRFKDSLGNPTHILRIGESYKEKQRTIQAKKEVEQRRAGGYSRKYASKAKNLADDMVRNTARDLLYYAVTQDAMLIFENLSRGFGRQGKRTFMAERQYTRMEDWLTAKLAYEGLPSKTYLSKTLAQYTSKTCSNCGFTITSADYDRVLEKLKKTATGWMTTINGKELKVEGQITYYNRYKRQNVVKDLSVELDRLSEESVNNDISSWTKGRSGEALSLLKKRFSHRPVQEKFVCLNCGFETHADEQAALNIARSWLFLRSQEYKKYQTNKTTGNTDKRAFVETWQSFYRKKLKEVWKPAV

SEQ ID NO: 30989 - protein, 979 aa, synthetic construct
  REGION 1..979: note = engineered CasX variant
QEIKRINKIRRRLVKDSNTKKAGKTGPMKTLLVRVMTPDLRERLENLRKKPENIPQPISNTSRANLNKLLTDYTEMKKAILHVYWEEFQKDPVGLMSRVAQPASKKIDQNKLKPEMDEKGNLTTAGFACSQCGQPLFVYKLEQVSEKGKAYTNYFGRCNVAEHEKLILLDQLKPEKDSDEAVTYSLGKFGQRALDFYSIHVTKESTHPVKPLAQIAGNRYASSPVGKALSDACMGTIASFLSKYQDIIIEHQKVVKGNQKRLESLRELAGKENLEYPSVTLPPQPHTKEGVDAYNEVIARVRMWVNLNLWQKLKLSRDDAKPLLRLKGFPSFPLVERQANEVDWWDMVCNVKKLINEKKEDGKVFWQNLAGYKRQEALRPYLSSEEDRKKGKKFARYQLGDLLLHLEKKHGEDWGKVYDEAWERIDKKVEGLSKHIKLEEERRSEDAQSKAALTDWLRAKASFVIEGLKEADKDEFCRCELKLQKWYGDLRGKPFAIEAENSILDISGFSKQYNCAFIWQKDGVKKLNLYLIINYFKGGKLRFKKIKPEAFEANRFYTVINKKSGEIVPMEVNFNFDDPNLIILPLAFGKRQGREFIWNDLLSLETGSLKLANGRVIEKTLYNRRTRQDEPALFVALTFERREVLDSSNIKPMSNLIGVDRGENIPAVIALTDPEGCPLSRFKDSLGNPTHILRIGESYKEKQRTIQAKKEVEQRRAGGYSRKYASKAKNLADDMVRNTARDLLYYAVTQDAMLIFENLSRGFGRQGKRTFMAERQYTRMEDWLTAKLAYEGLPSKTYLSKTLAQYTSKTCSNCGFTITSADYDRVLEKLKKTATGWMTTINGKELKVEGQITYYNRYKRQNVVKDLSVELDRLSEESVNNDISSWTKGRSGEALSLLKKRFSHRPVQEKFVCLNCGFETHADEQAALNIARSWLFLRSQEYKKYQTNKTTGNTDKRAFVETWQSFYRKKLKEVWKPAV

SEQ ID NO: 30990 - protein, 979 aa, synthetic construct
  REGION 1..979: note = engineered CasX variant
QEIKRINKIRRRLVKDSNTKKAGKTGPMKTLLVRVMTPDLRERLENLRKKPENIPQPISNTSRANLNKLLTDYTEMKKAILHVYWEEFQKDPVGLMSRVAQPASKKIDQNKLKPEMDEKGNLTTAGFACSQCGQPLFVYKLEQVSEKGKAYTNYFGRCNVAEHEKLILLDQLKPEKDSDEAVTYSLGKFGQRALDFYSIHVTKESTHPVKPLAQIAGNRYASTPVGKALSDACMGTIASFLSKYQDIIIEHQKVVKGNQKRLESLRELAGKENLEYPSVTLPPQPHTKEGVDAYNEVIARVRMWVNLNLWQKLKLSRDDAKPLLRLKGFPSFPLVERQANEVDWWDMVCNVKKLINEKKEDGKVFWQNLAGYKRQEALRPYLSSEEDRKKGKKFARYQLGDLLLHLEKKHGEDWGKVYDEAWERIDKKVEGLSKHIKLEEERRSEDAQSKAALTDWLRAKASFVIEGLKEADKDEFCRCELKLQKWYGDLRGKPFAIEAENSILDISGFSKQYNCAFIWQKDGVKKLNLYLIINYFKGGKLRFKKIKPEAFEANRFYTVINKKSGEIVPMEVNFNFDDPNLIILPLAFGKRQGREFIWNDLLSLETGSLKLANGRVIEKTLYNRRTRQDEPALFVALTFERREVLDSSNIKPMSNLIGVDRGENIPAVIALTDPEGCPLSRFKDSLGNPTHILRIGESYKEKQRTIQAKKEVEQRRAGGYSRKYASKAKNLADDMVRNTARDLLYYAVTQDAMLIFENLSRGFGRQGKRTFMAERQYTRMEDWLTAKLAYEGLPSKTYLSKTLAQYTSKTCSNCGFTITSADYDRVLEKLKKTATGWMTTINGKELKVEGQITYYNRYKRQNVVKDLSVELDRLSEESVNNDISSWTKGRSGEALSLLKKRFSHRPVQEKFVCLNCGFETHADEQAALNIARSWLFLRSQEYKKYQTNKTTGNTDKRAFVETWQSFYRKKLKEVWKPAV

SEQ ID NO: 30991 - protein, 979 aa, synthetic construct
  REGION 1..979: note = engineered CasX variant
QEIKRINKIRRRLVKDSNTKKAGKTGPMKTLLVRVMTPDLRERLENLRKKPENIPQPISNTSRANLNKLLTDYTEMKKAILHVYWEEFQKDPVGLMSRVAQPASKKIDQNKLKPEMDEKGNLTTAGFACSQCGQPLFVYKLEQVSEKGKAYTNYFGRCNVAEHEKLILLDQLKPEKDSDEAVTYSLGKFGQRALDFYSIHVTKESTHPVKPLAQIAGNRYASAPVGKALSDACMGTIASFLSKYQDIIIEHQKVVKGNQKRLESLRELAGKENLEYPSVTLPPQPHTKEGVDAYNEVIARVRMWVNLNLWQKLKLSRDDAKPLLRLKGFPSFPLVERQANEVDWWDMVCNVKKLINEKKEDGKVFWQNLAGYKRQEALRPYLSSEEDRKKGKKFARYQLGDLLLHLEKKHGEDWGKVYDEAWERIDKKVEGLSKHIKLEEERRSEDAQSKAALTDWLRAKASFVIEGLKEADKDEFCRCELKLQKWYGDLRGKPFAIEAENSILDISGFSKQYNCAFIWQKDGVKKLNLYLIINYFKGGKLRFKKIKPEAFEANRFYTVINKKSGEIVPMEVNFNFDDPNLIILPLAFGKRQGREFIWNDLLSLETGSLKLANGRVIEKTLYNRRTRQDEPALFVALTFERREVLDSSNIKPMSNLIGVDRGENIPAVIALTDPEGCPLSRFKDSLGNPTHILRIGESYKEKQRTIQAKKEVEQRRAGGYSRKYASKAKNLADDMVRNTARDLLYYAVTQDAMLIFENLSRGFGRQGKRTFMAERQYTRMEDWLTAKLAYEGLPSKTYLSKTLAQYTSKTCSNCGFTITSADYDRVLEKLKKTATGWMTTINGKELKVEGQITYYNRYKRQNVVKDLSVELDRLSEESVNNDISSWTKGRSGEALSLLKKRFSHRPVQEKFVCLNCGFETHADEQAALNIARSWLFLRSQEYKKYQTNKTTGNTDKRAFVETWQSFYRKKLKEVWKPAV

SEQ ID NO: 30992 - protein, 979 aa, synthetic construct
  REGION 1..979: note = engineered CasX variant
QEIKRINKIRRRLVKDSNTKKAGKTGPMKTLLVRVMTPDLRERLENLRKKPENIPQPISNTSRANLNKLLTDYTEMKKAILHVYWEEFQKDPVGLMSRVAQPASKKIDQNKLKPEMDEKGNLTTAGFACSQCGQPLFVYKLEQVSEKGKAYTNYFGRCNVAEHEKLILLDQLKPEKDSDEAVTYSLGKFGQRALDFYSIHVTKESTHPVKPLAQIAGNRYASVPVGKALSDACMGTIASFLSKYQDIIIEHQKVVKGNQKRLESLRELAGKENLEYPSVTLPPQPHTKEGVDAYNEVIARVRMWVNLNLWQKLKLSRDDAKPLLRLKGFPSFPLVERQANEVDWWDMVCNVKKLINEKKEDGKVFWQNLAGYKRQEALRPYLSSEEDRKKGKKFARYQLGDLLLHLEKKHGEDWGKVYDEAWERIDKKVEGLSKHIKLEEERRSEDAQSKAALTDWLRAKASFVIEGLKEADKDEFCRCELKLQKWYGDLRGKPFAIEAENSILDISGFSKQYNCAFIWQKDGVKKLNLYLIINYFKGGKLRFKKIKPEAFEANRFYTVINKKSGEIVPMEVNFNFDDPNLIILPLAFGKRQGREFIWNDLLSLETGSLKLANGRVIEKTLYNRRTRQDEPALFVALTFERREVLDSSNIKPMSNLIGVDRGENIPAVIALTDPEGCPLSRFKDSLGNPTHILRIGESYKEKQRTIQAKKEVEQRRAGGYSRKYASKAKNLADDMVRNTARDLLYYAVTQDAMLIFENLSRGFGRQGKRTFMAERQYTRMEDWLTAKLAYEGLPSKTYLSKTLAQYTSKTCSNCGFTITSADYDRVLEKLKKTATGWMTTINGKELKVEGQITYYNRYKRQNVVKDLSVELDRLSEESVNNDISSWTKGRSGEALSLLKKRFSHRPVQEKFVCLNCGFETHADEQAALNIARSWLFLRSQEYKKYQTNKTTGNTDKRAFVETWQSFYRKKLKEVWKPAV

SEQ ID NO: 30993 - protein, 979 aa, synthetic construct
  REGION 1..979: note = engineered CasX variant
QEIKRINKIRRRLVKDSNTKKAGKTGPMKTLLVRVMTPDLRERLENLRKKPENIPQPISNTSRANLNKLLTDYTEMKKAILHVYWEEFQKDPVGLMSRVAQPASKKIDQNKLKPEMDEKGNLTTAGFACSQCGQPLFVYKLEQVSEKGKAYTNYFGRCNVAEHEKLIKLDQLKPEKDSDEAVTYSLGKFGQRALDFYSIHVTKESTHPVKPLAQIAGNRYASGPVGKALSDACMGTIASFLSKYQDIIIEHQKVVKGNQKRLESLRELAGKENLEYPSVTLPPQPHTKEGVDAYNEVIARVRMWVNLNLWQKLKLSRDDAKPLLRLKGFPSFPLVERQANEVDWWDMVCNVKKLINEKKEDGKVFWQNLAGYKRQEALRPYLSSEEDRKKGKKFARYQLGDLLLHLEKKHGEDWGKVYDEAWERIDKKVEGLSKHIKLEEERRSEDAQSKAALTDWLRAKASFVIEGLKEADKDEFCRCELKLQKWYGDLRGKPFAIEAENSILDISGFSKQYNCAFIWQKDGVKKLNLYLIINYFKGGKLRFKKIKPEAFEANRFYTVINKKSGEIVPMEVNFNFDDPNLIILPLAFGKRQGREFIWNDLLSLETGSLKLANGRVIEKTLYNRRTRQDEPALFVALTFERREVLDSSNIKPMSNLIGVDRGENIPAVIALTDPEGCPLSRFKDSLGNPTHILRIGESYKEKQRTIQAKKEVEQRRAGGYSRKYASKAKNLADDMVRNTARDLLYYAVTQDAMLIFENLSRGFGRQGKRTFMAERQYTRMEDWLTAKLAYEGLPSKTYLSKTLAQYTSKTCSNCGFTITSADYDRVLEKLKKTATGWMTTINGKELKVEGQITYYNRYKRQNVVKDLSVELDRLSEESVNNDISSWTKGRSGEALSLLKKRFSHRPVQEKFVCLNCGFETHADEQAALNIARSWLFLRSQEYKKYQTNKTTGNTDKRAFVETWQSFYRKKLKEVWKPAV

SEQ ID NO: 30994 - protein, 978 aa, synthetic construct
  REGION 1..978: note = engineered CasX variant
QEIKRINKIRRRLVKDSNTKKAGKTGPMKTLLVRVMTPDLRERLENLRKKPENIPQPISNTSRANLNKLLTDYTEMKKAILHVYWEEFQKDPVGLMSRVAQPASKKIDQNKLKPEMDEKGNLTTAGFACSQCGQPLFVYKLEQVSEKGKAYTNYFGRCNVAEHEKLILLDQLKPEKDSDEAVTYSLGKFGQRALDFYSIHVTKESTHPVKPLAQIAGNRYASPVGKALSDACMGTIASFLSKYQDIIIEHQKVVKGNQKRLESLRELAGKENLEYPSVTLPPQPHTKEGVDAYNEVIARVRMWVNLNLWQKLKLSRDDAKPLLRLKGFPSFPLVERQANEVDWWDMVCNVKKLINEKKEDGKVFWQNLAGYKRQEALRPYLSSEEDRKKGKKFARYQLGDLLLHLEKKHGEDWGKVYDEAWERIDKKVEGLSKHIKLEEERRSEDAQSKAALTDWLRAKASFVIEGLKEADKDEFCRCELKLQKWYGDLRGKPFAIEAENSILDISGFSKQYNCAFIWQKDGVKKLNLYLIINYFKGGKLRFKKIKPEAFEANRFYTVINKKSGEIVPMEVNFNFDDPNLIILPLAFGKRQGREFIWNDLLSLETGSLKLANGRVIEKTLYNRRTRQDEPALFVALTFERREVLDSSNIKPMSNLIGVDRGENIPAVIALTDPEGCPLSRFKDSLGNPTHILRIGESYKEKQRTIQAKKEVEQRRAGGYSRKYASKAKNLADDMVRNTARDLLYYAVTQDAMLIFENLSRGFGRQGKRTFMAERQYTRMEDWLTAKLAYEGLPSKTYLSKTLAQYTSKTCSNCGFTITSADYDRVLEKLKKTATGWMTTINGKELKVEGQITYYNRYKRQNVVKDLSVELDRLSEESVNNDISSWTKGRSGEALSLLKKRFSHRPVQEKFVCLNCGFETHADEQAALNIARSWLFLRSQEYKKYQTNKTTGNTDKRAFVETWQSFYRKKLKEVWKPAV

SEQ ID NO: 30995 - protein, 978 aa, synthetic construct
  REGION 1..978: note = engineered CasX variant
QEIKRINKIRRRLVKDSNTKKAGKTGPMKTLLVRVMTPDLRERLENLRKKPENIPQPISNTSRANLNKLLTDYTEMKKAILHVYWEEFQKDPVGLMSRVAQPASKKIDQNKLKPEMDEKGNLTTAGFACSQCGQPLFVYKLEQVSEKGKAYTNYFGRCNVAEHEKLILLDQLKPEKDSDEAVTYSLGKFGQRALDFYSIHVTKESTHPVKPLAQIAGNRYASYPVGKALSDACMGTIASFLSKYQDIIIEHQKVVKGNQKRLESLRELAGKENLEYPSVTLPPQPHTKEGVDAYNEVIARVRMWVNLNLWQKLKLSRDDAKPLLRLKGFPSFPLVERQANEVDWWDMVCNVKKLINEKKEDGKVFWQNLAGYKRQEALRPYLSSEEDRKKGKKFARYQLGDLLLHLEKKHGEDWGKVYDEAWERIDKKVEGLSKHIKLEEERRSEDAQSKAALTDWLRAKASFVIEGLKEADKDEFCRCELKLQKWYGDLRGKPFAIEAENSILDISGFSKQYNCAFIWQKDGVKKLNLYLIINYFKGGKLRFKKIKPEAFEANRFYTVINKKSGEIVPMEVNFNFDDPNLIILPLAFGKRQGREFIWNDLLSLETGSLKLANGRVIEKTLYNRRTRQDEPALFVALTFERREVLDSSNIKPMNLIGVDRGENIPAVIALTDPEGCPLSRFKDSLGNPTHILRIRESYKEKQRTIQAKKEVEQRRAGGYSRKYASKAKNLADDMVRNTARDLLYYAVTQDAMLIFENLSRGFGRQGKRTFMAERQYTRMEDWLTAKLAYEGLPSKTYLSKTLAQYTSKTCSNCGFTITSADYDRVLEKLKKTATGWMTTINGKELKVEGQITYYNRYKRQNVVKDLSVELDRLSEESVNNDISSWTKGRSGEALSLLKKRFSHRPVQEKFVCLNCGFETHADEQAALNIARSWLFLRSQEYKKYQTNKTTGNTDKRAFVETWQSFYRKKLKEVWKPAV

SEQ ID NO: 30996 - protein, 978 aa, synthetic construct
  REGION 1..978: note = engineered CasX variant
QEIKRINKIRRRLVKDSNTKKAGKTGPMKTLLVRVMTPDLRERLENLRKKPENIPQPISNTSRANLNKLLTDYTEMKKAILHVYWEEFQKDPVGLMSRVAQPASKKIDQNKLKPEMDEKGNLTTAGFACSQCGQPLFVYKLEQVSEKGKAYTNYFGRCNVAEHEKLILLDQLKPEKDSDEAVTYSLGKFGQRALDFYSIHVTKESTHPVKPLAQIAGNRYASHPVGKALSDACMGTIASFLSKYQDIIIEHQKVVKGNQKRLESLRELAGKENLEYPSVTLPPQPHTKEGVDAYNEVIARVRMWVNLNLWQKLKLSRDDAKPLLRLKGFPSFPLVERQANEVDWWDMVCNVKKLINEKKEDGKVFWQNLAGYKRQEALRPYLSSEEDRKKGKKFARYQLGDLLLHLEKKHGEDWGKVYDEAWERIDKKVEGLSKHIKLEEERRSEDAQSKAALTDWLRAKASFVIEGLKEADKDEFCRCELKLQKWYGDLRGKPFAIEAENSILDISGFSKQYNCAFIWQKDGVKKLNLYLIINYFKGGKLRFKKIKPEAFEANRFYTVINKKSGEIVPMEVNFNFDDPNLIILPLAFGKRQGREFIWNDLLSLETGSLKLANGRVIEKTLYNRRTRQDEPALFVALTFERREVLDSSNIKPMNLIGVDRGENIPAVIALTDPEGCPLSRFKDSLGNPTHILRIRESYKEKQRTIQAKKEVEQRRAGGYSRKYASKAKNLADDMVRNTARDLLYYAVTQDAMLIFENLSRGFGRQGKRTFMAERQYTRMEDWLTAKLAYEGLPSKTYLSKTLAQYTSKTCSNCGFTITSADYDRVLEKLKKTATGWMTTINGKELKVEGQITYYNRYKRQNVVKDLSVELDRLSEESVNNDISSWTKGRSGEALSLLKKRFSHRPVQEKFVCLNCGFETHADEQAALNIARSWLFLRSQEYKKYQTNKTTGNTDKRAFVETWQSFYRKKLKEVWKPAV

SEQ ID NO: 30997 - protein, 978 aa, synthetic construct
  REGION 1..978: note = engineered CasX variant
QEIKRINKIRRRLVKDSNTKKAGKTGPMKTLLVRVMTPDLRERLENLRKKPENIPQPISNTSRANLNKLLTDYTEMKKAILHVYWEEFQKDPVGLMSRVAQPASKKIDQNKLKPEMDEKGNLTTAGFACSQCGQPLFVYKLEQVSEKGKAYTNYFGRCNVAEHEKLILLDQLKPEKDSDEAVTYSLGKFGQRALDFYSIHVTKESTHPVKPLAQIAGNRYASSPVGKALSDACMGTIASFLSKYQDIIIEHQKVVKGNQKRLESLRELAGKENLEYPSVTLPPQPHTKEGVDAYNEVIARVRMWVNLNLWQKLKLSRDDAKPLLRLKGFPSFPLVERQANEVDWWDMVCNVKKLINEKKEDGKVFWQNLAGYKRQEALRPYLSSEEDRKKGKKFARYQLGDLLLHLEKKHGEDWGKVYDEAWERIDKKVEGLSKHIKLEEERRSEDAQSKAALTDWLRAKASFVIEGLKEADKDEFCRCELKLQKWYGDLRGKPFAIEAENSILDISGFSKQYNCAFIWQKDGVKKLNLYLIINYFKGGKLRFKKIKPEAFEANRFYTVINKKSGEIVPMEVNFNFDDPNLIILPLAFGKRQGREFIWNDLLSLETGSLKLANGRVIEKTLYNRRTRQDEPALFVALTFERREVLDSSNIKPMNLIGVDRGENIPAVIALTDPEGCPLSRFKDSLGNPTHILRIRESYKEKQRTIQAKKEVEQRRAGGYSRKYASKAKNLADDMVRNTARDLLYYAVTQDAMLIFENLSRGFGRQGKRTFMAERQYTRMEDWLTAKLAYEGLPSKTYLSKTLAQYTSKTCSNCGFTITSADYDRVLEKLKKTATGWMTTINGKELKVEGQITYYNRYKRQNVVKDLSVELDRLSEESVNNDISSWTKGRSGEALSLLKKRFSHRPVQEKFVCLNCGFETHADEQAALNIARSWLFLRSQEYKKYQTNKTTGNTDKRAFVETWQSFYRKKLKEVWKPAV

SEQ ID NO: 30998 - protein, 978 aa, synthetic construct
  REGION 1..978: note = engineered CasX variant
QEIKRINKIRRRLVKDSNTKKAGKTGPMKTLLVRVMTPDLRERLENLRKKPENIPQPISNTSRANLNKLLTDYTEMKKAILHVYWEEFQKDPVGLMSRVAQPASKKIDQNKLKPEMDEKGNLTTAGFACSQCGQPLFVYKLEQVSEKGKAYTNYFGRCNVAEHEKLILLDQLKPEKDSDEAVTYSLGKFGQRALDFYSIHVTKESTHPVKPLAQIAGNRYASTPVGKALSDACMGTIASFLSKYQDIIIEHQKVVKGNQKRLESLRELAGKENLEYPSVTLPPQPHTKEGVDAYNEVIARVRMWVNLNLWQKLKLSRDDAKPLLRLKGFPSFPLVERQANEVDWWDMVCNVKKLINEKKEDGKVFWQNLAGYKRQEALRPYLSSEEDRKKGKKFARYQLGDLLLHLEKKHGEDWGKVYDEAWERIDKKVEGLSKHIKLEEERRSEDAQSKAALTDWLRAKASFVIEGLKEADKDEFCRCELKLQKWYGDLRGKPFAIEAENSILDISGFSKQYNCAFIWQKDGVKKLNLYLIINYFKGGKLRFKKIKPEAFEANRFYTVINKKSGEIVPMEVNFNFDDPNLIILPLAFGKRQGREFIWNDLLSLETGSLKLANGRVIEKTLYNRRTRQDEPALFVALTFERREVLDSSNIKPMNLIGVDRGENIPAVIALTDPEGCPLSRFKDSLGNPTHILRIRESYKEKQRTIQAKKEVEQRRAGGYSRKYASKAKNLADDMVRNTARDLLYYAVTQDAMLIFENLSRGFGRQGKRTFMAERQYTRMEDWLTAKLAYEGLPSKTYLSKTLAQYTSKTCSNCGFTITSADYDRVLEKLKKTATGWMTTINGKELKVEGQITYYNRYKRQNVVKDLSVELDRLSEESVNNDISSWTKGRSGEALSLLKKRFSHRPVQEKFVCLNCGFETHADEQAALNIARSWLFLRSQEYKKYQTNKTTGNTDKRAFVETWQSFYRKKLKEVWKPAV

SEQ ID NO: 30999 - protein, 978 aa, synthetic construct
  REGION 1..978: note = engineered CasX variant
QEIKRINKIRRRLVKDSNTKKAGKTGPMKTLLVRVMTPDLRERLENLRKKPENIPQPISNTSRANLNKLLTDYTEMKKAILHVYWEEFQKDPVGLMSRVAQPASKKIDQNKLKPEMDEKGNLTTAGFACSQCGQPLFVYKLEQVSEKGKAYTNYFGRCNVAEHEKLILLDQLKPEKDSDEAVTYSLGKFGQRALDFYSIHVTKESTHPVKPLAQIAGNRYASAPVGKALSDACMGTIASFLSKYQDIIIEHQKVVKGNQKRLESLRELAGKENLEYPSVTLPPQPHTKEGVDAYNEVIARVRMWVNLNLWQKLKLSRDDAKPLLRLKGFPSFPLVERQANEVDWWDMVCNVKKLINEKKEDGKVFWQNLAGYKRQEALRPYLSSEEDRKKGKKFARYQLGDLLLHLEKKHGEDWGKVYDEAWERIDKKVEGLSKHIKLEEERRSEDAQSKAALTDWLRAKASFVIEGLKEADKDEFCRCELKLQKWYGDLRGKPFAIEAENSILDISGFSKQYNCAFIWQKDGVKKLNLYLIINYFKGGKLRFKKIKPEAFEANRFYTVINKKSGEIVPMEVNFNFDDPNLIILPLAFGKRQGREFIWNDLLSLETGSLKLANGRVIEKTLYNRRTRQDEPALFVALTFERREVLDSSNIKPMNLIGVDRGENIPAVIALTDPEGCPLSRFKDSLGNPTHILRIRESYKEKQRTIQAKKEVEQRRAGGYSRKYASKAKNLADDMVRNTARDLLYYAVTQDAMLIFENLSRGFGRQGKRTFMAERQYTRMEDWLTAKLAYEGLPSKTYLSKTLAQYTSKTCSNCGFTITSADYDRVLEKLKKTATGWMTTINGKELKVEGQITYYNRYKRQNVVKDLSVELDRLSEESVNNDISSWTKGRSGEALSLLKKRFSHRPVQEKFVCLNCGFETHADEQAALNIARSWLFLRSQEYKKYQTNKTTGNTDKRAFVETWQSFYRKKLKEVWKPAV

SEQ ID NO: 31000 - protein, 978 aa, synthetic construct
  REGION 1..978: note = engineered CasX variant
QEIKRINKIRRRLVKDSNTKKAGKTGPMKTLLVRVMTPDLRERLENLRKKPENIPQPISNTSRANLNKLLTDYTEMKKAILHVYWEEFQKDPVGLMSRVAQPASKKIDQNKLKPEMDEKGNLTTAGFACSQCGQPLFVYKLEQVSEKGKAYTNYFGRCNVAEHEKLILLDQLKPEKDSDEAVTYSLGKFGQRALDFYSIHVTKESTHPVKPLAQIAGNRYASVPVGKALSDACMGTIASFLSKYQDIIIEHQKVVKGNQKRLESLRELAGKENLEYPSVTLPPQPHTKEGVDAYNEVIARVRMWVNLNLWQKLKLSRDDAKPLLRLKGFPSFPLVERQANEVDWWDMVCNVKKLINEKKEDGKVFWQNLAGYKRQEALRPYLSSEEDRKKGKKFARYQLGDLLLHLEKKHGEDWGKVYDEAWERIDKKVEGLSKHIKLEEERRSEDAQSKAALTDWLRAKASFVIEGLKEADKDEFCRCELKLQKWYGDLRGKPFAIEAENSILDISGFSKQYNCAFIWQKDGVKKLNLYLIINYFKGGKLRFKKIKPEAFEANRFYTVINKKSGEIVPMEVNFNFDDPNLIILPLAFGKRQGREFIWNDLLSLETGSLKLANGRVIEKTLYNRRTRQDEPALFVALTFERREVLDSSNIKPMNLIGVDRGENIPAVIALTDPEGCPLSRFKDSLGNPTHILRIRESYKEKQRTIQAKKEVEQRRAGGYSRKYASKAKNLADDMVRNTARDLLYYAVTQDAMLIFENLSRGFGRQGKRTFMAERQYTRMEDWLTAKLAYEGLPSKTYLSKTLAQYTSKTCSNCGFTITSADYDRVLEKLKKTATGWMTTINGKELKVEGQITYYNRYKRQNVVKDLSVELDRLSEESVNNDISSWTKGRSGEALSLLKKRFSHRPVQEKFVCLNCGFETHADEQAALNIARSWLFLRSQEYKKYQTNKTTGNTDKRAFVETWQSFYRKKLKEVWKPAV

SEQ ID NO: 31001 - protein, 978 aa, synthetic construct
  REGION 1..978: note = engineered CasX variant
QEIKRINKIRRRLVKDSNTKKAGKTGPMKTLLVRVMTPDLRERLENLRKKPENIPQPISNTSRANLNKLLTDYTEMKKAILHVYWEEFQKDPVGLMSRVAQPASKKIDQNKLKPEMDEKGNLTTAGFACSQCGQPLFVYKLEQVSEKGKAYTNYFGRCNVAEHEKLIKLDQLKPEKDSDEAVTYSLGKFGQRALDFYSIHVTKESTHPVKPLAQIAGNRYASGPVGKALSDACMGTIASFLSKYQDIIIEHQKVVKGNQKRLESLRELAGKENLEYPSVTLPPQPHTKEGVDAYNEVIARVRMWVNLNLWQKLKLSRDDAKPLLRLKGFPSFPLVERQANEVDWWDMVCNVKKLINEKKEDGKVFWQNLAGYKRQEALRPYLSSEEDRKKGKKFARYQLGDLLLHLEKKHGEDWGKVYDEAWERIDKKVEGLSKHIKLEEERRSEDAQSKAALTDWLRAKASFVIEGLKEADKDEFCRCELKLQKWYGDLRGKPFAIEAENSILDISGFSKQYNCAFIWQKDGVKKLNLYLIINYFKGGKLRFKKIKPEAFEANRFYTVINKKSGEIVPMEVNFNFDDPNLIILPLAFGKRQGREFIWNDLLSLETGSLKLANGRVIEKTLYNRRTRQDEPALFVALTFERREVLDSSNIKPMNLIGVDRGENIPAVIALTDPEGCPLSRFKDSLGNPTHILRIRESYKEKQRTIQAKKEVEQRRAGGYSRKYASKAKNLADDMVRNTARDLLYYAVTQDAMLIFENLSRGFGRQGKRTFMAERQYTRMEDWLTAKLAYEGLPSKTYLSKTLAQYTSKTCSNCGFTITSADYDRVLEKLKKTATGWMTTINGKELKVEGQITYYNRYKRQNVVKDLSVELDRLSEESVNNDISSWTKGRSGEALSLLKKRFSHRPVQEKFVCLNCGFETHADEQAALNIARSWLFLRSQEYKKYQTNKTTGNTDKRAFVETWQSFYRKKLKEVWKPAV

SEQ ID NO: 31002 - protein, 977 aa, synthetic construct
  REGION 1..977: note = engineered CasX variant
QEIKRINKIRRRLVKDSNTKKAGKTGPMKTLLVRVMTPDLRERLENLRKKPENIPQPISNTSRANLNKLLTDYTEMKKAILHVYWEEFQKDPVGLMSRVAQPASKKIDQNKLKPEMDEKGNLTTAGFACSQCGQPLFVYKLEQVSEKGKAYTNYFGRCNVAEHEKLILLDQLKPEKDSDEAVTYSLGKFGQRALDFYSIHVTKESTHPVKPLAQIAGNRYASPVGKALSDACMGTIASFLSKYQDIIIEHQKVVKGNQKRLESLRELAGKENLEYPSVTLPPQPHTKEGVDAYNEVIARVRMWVNLNLWQKLKLSRDDAKPLLRLKGFPSFPLVERQANEVDWWDMVCNVKKLINEKKEDGKVFWQNLAGYKRQEALRPYLSSEEDRKKGKKFARYQLGDLLLHLEKKHGEDWGKVYDEAWERIDKKVEGLSKHIKLEEERRSEDAQSKAALTDWLRAKASFVIEGLKEADKDEFCRCELKLQKWYGDLRGKPFAIEAENSILDISGFSKQYNCAFIWQKDGVKKLNLYLIINYFKGGKLRFKKIKPEAFEANRFYTVINKKSGEIVPMEVNFNFDDPNLIILPLAFGKRQGREFIWNDLLSLETGSLKLANGRVIEKTLYNRRTRQDEPALFVALTFERREVLDSSNIKPMNLIGVDRGENIPAVIALTDPEGCPLSRFKDSLGNPTHILRIRESYKEKQRTIQAKKEVEQRRAGGYSRKYASKAKNLADDMVRNTARDLLYYAVTQDAMLIFENLSRGFGRQGKRTFMAERQYTRMEDWLTAKLAYEGLPSKTYLSKTLAQYTSKTCSNCGFTITSADYDRVLEKLKKTATGWMTTINGKELKVEGQITYYNRYKRQNVVKDLSVELDRLSEESVNNDISSWTKGRSGEALSLLKKRFSHRPVQEKFVCLNCGFETHADEQAALNIARSWLFLRSQEYKKYQTNKTTGNTDKRAFVETWQSFYRKKLKEVWKPAV

SEQ ID NO: 31003 - protein, 978 aa, synthetic construct
  REGION 1..978: note = engineered CasX variant
QEIKRINKIRRRLVKDSNTKKAGKTGPMKTLLVRVMTPDLRERLENLRKKPENIPQPISNTSRANLNKLLTDYTEMKKAILHVYWEEFQKDPVGLMSRVAQPASKKIDQNKLKPEMDEKGNLTTAGFACSQCGQPLFVYKLEQVSEKGKAYTNYFGRCNVAEHEKLILLDQLKPEKDSDEAVTYSLGKFGQRALDFYSIHVTKESTHPVKPLAQIAGNRYASYPVGKALSDACMGTIASFLSKYQDIIIEHQKVVKGNQKRLESLRELAGKENLEYPSVTLPPQPHTKEGVDAYNEVIARVRMWVNLNLWQKLKLSRDDAKPLLRLKGFPSFPLVERQANEVDWWDMVCNVKKLINEKKEDGKVFWQNLAGYKRQEALRPYLSSEEDRKKGKKFARYQLGDLLLHLEKKHGEDWGKVYDEAWERIDKKVEGLSKHIKLEEERRSEDAQSKAALTDWLRAKASFVIEGLKEADKDEFCRCELKLQKWYGDLRGKPFAIEAENSILDISGFSKQYNCAFIWQKDGVKKLNLYLIINYFKGGKLRFKKIKPEAFEANRFYTVINKKSGEIVPMEVNFNFDDPNLIILPLAFGKRQGREFIWNDLLSLETGSLKLANGRVIEKTLYNRRTRQDEPALFVALTFERREVLDSSNIKPMNLIGVDRGENIPAVIALTDPEGCPLSRFKDSLGNPTHILRIGESYKEKQRTIQAKKEVEQRRAGGYSRKYASKAKNLADDMVRNTARDLLYYAVTQDAMLIFENLSRGFGRQGKRTFSAERQYTRMEDWLTAKLAYEGLPSKTYLSKTLAQYTSKTCSNCGFTITSADYDRVLEKLKKTATGWMTTINGKELKVEGQITYYNRYKRQNVVKDLSVELDRLSEESVNNDISSWTKGRSGEALSLLKKRFSHRPVQEKFVCLNCGFETHADEQAALNIARSWLFLRSQEYKKYQTNKTTGNTDKRAFVETWQSFYRKKLKEVWKPAV

SEQ ID NO: 31004 - protein, 978 aa, synthetic construct
  REGION 1..978: note = engineered CasX variant
QEIKRINKIRRRLVKDSNTKKAGKTGPMKTLLVRVMTPDLRERLENLRKKPENIPQPISNTSRANLNKLLTDYTEMKKAILHVYWEEFQKDPVGLMSRVAQPASKKIDQNKLKPEMDEKGNLTTAGFACSQCGQPLFVYKLEQVSEKGKAYTNYFGRCNVAEHEKLILLDQLKPEKDSDEAVTYSLGKFGQRALDFYSIHVTKESTHPVKPLAQIAGNRYASHPVGKALSDACMGTIASFLSKYQDIIIEHQKVVKGNQKRLESLRELAGKENLEYPSVTLPPQPHTKEGVDAYNEVIARVRMWVNLNLWQKLKLSRDDAKPLLRLKGFPSFPLVERQANEVDWWDMVCNVKKLINEKKEDGKVFWQNLAGYKRQEALRPYLSSEEDRKKGKKFARYQLGDLLLHLEKKHGEDWGKVYDEAWERIDKKVEGLSKHIKLEEERRSEDAQSKAALTDWLRAKASFVIEGLKEADKDEFCRCELKLQKWYGDLRGKPFAIEAENSILDISGFSKQYNCAFIWQKDGVKKLNLYLIINYFKGGKLRFKKIKPEAFEANRFYTVINKKSGEIVPMEVNFNFDDPNLIILPLAFGKRQGREFIWNDLLSLETGSLKLANGRVIEKTLYNRRTRQDEPALFVALTFERREVLDSSNIKPMNLIGVDRGENIPAVIALTDPEGCPLSRFKDSLGNPTHILRIGESYKEKQRTIQAKKEVEQRRAGGYSRKYASKAKNLADDMVRNTARDLLYYAVTQDAMLIFENLSRGFGRQGKRTFSAERQYTRMEDWLTAKLAYEGLPSKTYLSKTLAQYTSKTCSNCGFTITSADYDRVLEKLKKTATGWMTTINGKELKVEGQITYYNRYKRQNVVKDLSVELDRLSEESVNNDISSWTKGRSGEALSLLKKRFSHRPVQEKFVCLNCGFETHADEQAALNIARSWLFLRSQEYKKYQTNKTTGNTDKRAFVETWQSFYRKKLKEVWKPAV

SEQ ID NO: 31005 - protein, 978 aa, synthetic construct
  REGION 1..978: note = engineered CasX variant
QEIKRINKIRRRLVKDSNTKKAGKTGPMKTLLVRVMTPDLRERLENLRKKPENIPQPISNTSRANLNKLLTDYTEMKKAILHVYWEEFQKDPVGLMSRVAQPASKKIDQNKLKPEMDEKGNLTTAGFACSQCGQPLFVYKLEQVSEKGKAYTNYFGRCNVAEHEKLILLDQLKPEKDSDEAVTYSLGKFGQRALDFYSIHVTKESTHPVKPLAQIAGNRYASSPVGKALSDACMGTIASFLSKYQDIIIEHQKVVKGNQKRLESLRELAGKENLEYPSVTLPPQPHTKEGVDAYNEVIARVRMWVNLNLWQKLKLSRDDAKPLLRLKGFPSFPLVERQANEVDWWDMVCNVKKLINEKKEDGKVFWQNLAGYKRQEALRPYLSSEEDRKKGKKFARYQLGDLLLHLEKKHGEDWGKVYDEAWERIDKKVEGLSKHIKLEEERRSEDAQSKAALTDWLRAKASFVIEGLKEADKDEFCRCELKLQKWYGDLRGKPFAIEAENSILDISGFSKQYNCAFIWQKDGVKKLNLYLIINYFKGGKLRFKKIKPEAFEANRFYTVINKKSGEIVPMEVNFNFDDPNLIILPLAFGKRQGREFIWNDLLSLETGSLKLANGRVIEKTLYNRRTRQDEPALFVALTFERREVLDSSNIKPMNLIGVDRGENIPAVIALTDPEGCPLSRFKDSLGNPTHILRIGESYKEKQRTIQAKKEVEQRRAGGYSRKYASKAKNLADDMVRNTARDLLYYAVTQDAMLIFENLSRGFGRQGKRTFSAERQYTRMEDWLTAKLAYEGLPSKTYLSKTLAQYTSKTCSNCGFTITSADYDRVLEKLKKTATGWMTTINGKELKVEGQITYYNRYKRQNVVKDLSVELDRLSEESVNNDISSWTKGRSGEALSLLKKRFSHRPVQEKFVCLNCGFETHADEQAALNIARSWLFLRSQEYKKYQTNKTTGNTDKRAFVETWQSFYRKKLKEVWKPAV

SEQ ID NO: 31006 - protein, 978 aa, synthetic construct
  REGION 1..978: note = engineered CasX variant
QEIKRINKIRRRLVKDSNTKKAGKTGPMKTLLVRVMTPDLRERLENLRKKPENIPQPISNTSRANLNKLLTDYTEMKKAILHVYWEEFQKDPVGLMSRVAQPASKKIDQNKLKPEMDEKGNLTTAGFACSQCGQPLFVYKLEQVSEKGKAYTNYFGRCNVAEHEKLILLDQLKPEKDSDEAVTYSLGKFGQRALDFYSIHVTKESTHPVKPLAQIAGNRYASTPVGKALSDACMGTIASFLSKYQDIIIEHQKVVKGNQKRLESLRELAGKENLEYPSVTLPPQPHTKEGVDAYNEVIARVRMWVNLNLWQKLKLSRDDAKPLLRLKGFPSFPLVERQANEVDWWDMVCNVKKLINEKKEDGKVFWQNLAGYKRQEALRPYLSSEEDRKKGKKFARYQLGDLLLHLEKKHGEDWGKVYDEAWERIDKKVEGLSKHIKLEEERRSEDAQSKAALTDWLRAKASFVIEGLKEADKDEFCRCELKLQKWYGDLRGKPFAIEAENSILDISGFSKQYNCAFIWQKDGVKKLNLYLIINYFKGGKLRFKKIKPEAFEANRFYTVINKKSGEIVPMEVNFNFDDPNLIILPLAFGKRQGREFIWNDLLSLETGSLKLANGRVIEKTLYNRRTRQDEPALFVALTFERREVLDSSNIKPMNLIGVDRGENIPAVIALTDPEGCPLSRFKDSLGNPTHILRIGESYKEKQRTIQAKKEVEQRRAGGYSRKYASKAKNLADDMVRNTARDLLYYAVTQDAMLIFENLSRGFGRQGKRTFSAERQYTRMEDWLTAKLAYEGLPSKTYLSKTLAQYTSKTCSNCGFTITSADYDRVLEKLKKTATGWMTTINGKELKVEGQITYYNRYKRQNVVKDLSVELDRLSEESVNNDISSWTKGRSGEALSLLKKRFSHRPVQEKFVCLNCGFETHADEQAALNIARSWLFLRSQEYKKYQTNKTTGNTDKRAFVETWQSFYRKKLKEVWKPAV

SEQ ID NO: 31007 - protein, 978 aa, synthetic construct
  REGION 1..978: note = engineered CasX variant
QEIKRINKIRRRLVKDSNTKKAGKTGPMKTLLVRVMTPDLRERLENLRKKPENIPQPISNTSRANLNKLLTDYTEMKKAILHVYWEEFQKDPVGLMSRVAQPASKKIDQNKLKPEMDEKGNLTTAGFACSQCGQPLFVYKLEQVSEKGKAYTNYFGRCNVAEHEKLILLDQLKPEKDSDEAVTYSLGKFGQRALDFYSIHVTKESTHPVKPLAQIAGNRYASAPVGKALSDACMGTIASFLSKYQDIIIEHQKVVKGNQKRLESLRELAGKENLEYPSVTLPPQPHTKEGVDAYNEVIARVRMWVNLNLWQKLKLSRDDAKPLLRLKGFPSFPLVERQANEVDWWDMVCNVKKLINEKKEDGKVFWQNLAGYKRQEALRPYLSSEEDRKKGKKFARYQLGDLLLHLEKKHGEDWGKVYDEAWERIDKKVEGLSKHIKLEEERRSEDAQSKAALTDWLRAKASFVIEGLKEADKDEFCRCELKLQKWYGDLRGKPFAIEAENSILDISGFSKQYNCAFIWQKDGVKKLNLYLIINYFKGGKLRFKKIKPEAFEANRFYTVINKKSGEIVPMEVNFNFDDPNLIILPLAFGKRQGREFIWNDLLSLETGSLKLANGRVIEKTLYNRRTRQDEPALFVALTFERREVLDSSNIKPMNLIGVDRGENIPAVIALTDPEGCPLSRFKDSLGNPTHILRIGESYKEKQRTIQAKKEVEQRRAGGYSRKYASKAKNLADDMVRNTARDLLYYAVTQDAMLIFENLSRGFGRQGKRTFSAERQYTRMEDWLTAKLAYEGLPSKTYLSKTLAQYTSKTCSNCGFTITSADYDRVLEKLKKTATGWMTTINGKELKVEGQITYYNRYKRQNVVKDLSVELDRLSEESVNNDISSWTKGRSGEALSLLKKRFSHRPVQEKFVCLNCGFETHADEQAALNIARSWLFLRSQEYKKYQTNKTTGNTDKRAFVETWQSFYRKKLKEVWKPAV

SEQ ID NO: 31008 - protein, 978 aa, synthetic construct
  REGION 1..978: note = engineered CasX variant
QEIKRINKIRRRLVKDSNTKKAGKTGPMKTLLVRVMTPDLRERLENLRKKPENIPQPISNTSRANLNKLLTDYTEMKKAILHVYWEEFQKDPVGLMSRVAQPASKKIDQNKLKPEMDEKGNLTTAGFACSQCGQPLFVYKLEQVSEKGKAYTNYFGRCNVAEHEKLILLDQLKPEKDSDEAVTYSLGKFGQRALDFYSIHVTKESTHPVKPLAQIAGNRYASVPVGKALSDACMGTIASFLSKYQDIIIEHQKVVKGNQKRLESLRELAGKENLEYPSVTLPPQPHTKEGVDAYNEVIARVRMWVNLNLWQKLKLSRDDAKPLLRLKGFPSFPLVERQANEVDWWDMVCNVKKLINEKKEDGKVFWQNLAGYKRQEALRPYLSSEEDRKKGKKFARYQLGDLLLHLEKKHGEDWGKVYDEAWERIDKKVEGLSKHIKLEEERRSEDAQSKAALTDWLRAKASFVIEGLKEADKDEFCRCELKLQKWYGDLRGKPFAIEAENSILDISGFSKQYNCAFIWQKDGVKKLNLYLIINYFKGGKLRFKKIKPEAFEANRFYTVINKKSGEIVPMEVNFNFDDPNLIILPLAFGKRQGREFIWNDLLSLETGSLKLANGRVIEKTLYNRRTRQDEPALFVALTFERREVLDSSNIKPMNLIGVDRGENIPAVIALTDPEGCPLSRFKDSLGNPTHILRIGESYKEKQRTIQAKKEVEQRRAGGYSRKYASKAKNLADDMVRNTARDLLYYAVTQDAMLIFENLSRGFGRQGKRTFSAERQYTRMEDWLTAKLAYEGLPSKTYLSKTLAQYTSKTCSNCGFTITSADYDRVLEKLKKTATGWMTTINGKELKVEGQITYYNRYKRQNVVKDLSVELDRLSEESVNNDISSWTKGRSGEALSLLKKRFSHRPVQEKFVCLNCGFETHADEQAALNIARSWLFLRSQEYKKYQTNKTTGNTDKRAFVETWQSFYRKKLKEVWKPAV

SEQ ID NO: 31009 - protein, 978 aa, synthetic construct
  REGION 1..978: note = engineered CasX variant
QEIKRINKIRRRLVKDSNTKKAGKTGPMKTLLVRVMTPDLRERLENLRKKPENIPQPISNTSRANLNKLLTDYTEMKKAILHVYWEEFQKDPVGLMSRVAQPASKKIDQNKLKPEMDEKGNLTTAGFACSQCGQPLFVYKLEQVSEKGKAYTNYFGRCNVAEHEKLIKLDQLKPEKDSDEAVTYSLGKFGQRALDFYSIHVTKESTHPVKPLAQIAGNRYASGPVGKALSDACMGTIASFLSKYQDIIIEHQKVVKGNQKRLESLRELAGKENLEYPSVTLPPQPHTKEGVDAYNEVIARVRMWVNLNLWQKLKLSRDDAKPLLRLKGFPSFPLVERQANEVDWWDMVCNVKKLINEKKEDGKVFWQNLAGYKRQEALRPYLSSEEDRKKGKKFARYQLGDLLLHLEKKHGEDWGKVYDEAWERIDKKVEGLSKHIKLEEERRSEDAQSKAALTDWLRAKASFVIEGLKEADKDEFCRCELKLQKWYGDLRGKPFAIEAENSILDISGFSKQYNCAFIWQKDGVKKLNLYLIINYFKGGKLRFKKIKPEAFEANRFYTVINKKSGEIVPMEVNFNFDDPNLIILPLAFGKRQGREFIWNDLLSLETGSLKLANGRVIEKTLYNRRTRQDEPALFVALTFERREVLDSSNIKPMNLIGVDRGENIPAVIALTDPEGCPLSRFKDSLGNPTHILRIGESYKEKQRTIQAKKEVEQRRAGGYSRKYASKAKNLADDMVRNTARDLLYYAVTQDAMLIFENLSRGFGRQGKRTFSAERQYTRMEDWLTAKLAYEGLPSKTYLSKTLAQYTSKTCSNCGFTITSADYDRVLEKLKKTATGWMTTINGKELKVEGQITYYNRYKRQNVVKDLSVELDRLSEESVNNDISSWTKGRSGEALSLLKKRFSHRPVQEKFVCLNCGFETHADEQAALNIARSWLFLRSQEYKKYQTNKTTGNTDKRAFVETWQSFYRKKLKEVWKPAV

SEQ ID NO: 31010 - protein, 977 aa, synthetic construct
  REGION 1..977: note = engineered CasX variant
QEIKRINKIRRRLVKDSNTKKAGKTGPMKTLLVRVMTPDLRERLENLRKKPENIPQPISNTSRANLNKLLTDYTEMKKAILHVYWEEFQKDPVGLMSRVAQPASKKIDQNKLKPEMDEKGNLTTAGFACSQCGQPLFVYKLEQVSEKGKAYTNYFGRCNVAEHEKLILLDQLKPEKDSDEAVTYSLGKFGQRALDFYSIHVTKESTHPVKPLAQIAGNRYASPVGKALSDACMGTIASFLSKYQDIIIEHQKVVKGNQKRLESLRELAGKENLEYPSVTLPPQPHTKEGVDAYNEVIARVRMWVNLNLWQKLKLSRDDAKPLLRLKGFPSFPLVERQANEVDWWDMVCNVKKLINEKKEDGKVFWQNLAGYKRQEALRPYLSSEEDRKKGKKFARYQLGDLLLHLEKKHGEDWGKVYDEAWERIDKKVEGLSKHIKLEEERRSEDAQSKAALTDWLRAKASFVIEGLKEADKDEFCRCELKLQKWYGDLRGKPFAIEAENSILDISGFSKQYNCAFIWQKDGVKKLNLYLIINYFKGGKLRFKKIKPEAFEANRFYTVINKKSGEIVPMEVNFNFDDPNLIILPLAFGKRQGREFIWNDLLSLETGSLKLANGRVIEKTLYNRRTRQDEPALFVALTFERREVLDSSNIKPMNLIGVDRGENIPAVIALTDPEGCPLSRFKDSLGNPTHILRIGESYKEKQRTIQAKKEVEQRRAGGYSRKYASKAKNLADDMVRNTARDLLYYAVTQDAMLIFENLSRGFGRQGKRTFSAERQYTRMEDWLTAKLAYEGLPSKTYLSKTLAQYTSKTCSNCGFTITSADYDRVLEKLKKTATGWMTTINGKELKVEGQITYYNRYKRQNVVKDLSVELDRLSEESVNNDISSWTKGRSGEALSLLKKRFSHRPVQEKFVCLNCGFETHADEQAALNIARSWLFLRSQEYKKYQTNKTTGNTDKRAFVETWQSFYRKKLKEVWKPAV

SEQ ID NO: 31011 - protein, 978 aa, synthetic construct
  REGION 1..978: note = engineered CasX variant
QEIKRINKIRRRLVKDSNTKKAGKTGPMKTLLVRVMTPDLRERLENLRKKPENIPQPISNTSRANLNKLLTDYTEMKKAILHVYWEEFQKDPVGLMSRVAQPASKKIDQNKLKPEMDEKGNLTTAGFACSQCGQPLFVYKLEQVSEKGKAYTNYFGRCNVAEHEKLILLDQLKPEKDSDEAVTYSLGKFGQRALDFYSIHVTKESTHPVKPLAQIAGNRYASYPVGKALSDACMGTIASFLSKYQDIIIEHQKVVKGNQKRLESLRELAGKENLEYPSVTLPPQPHTKEGVDAYNEVIARVRMWVNLNLWQKLKLSRDDAKPLLRLKGFPSFPLVERQANEVDWWDMVCNVKKLINEKKEDGKVFWQNLAGYKRQEALRPYLSSEEDRKKGKKFARYQLGDLLLHLEKKHGEDWGKVYDEAWERIDKKVEGLSKHIKLEEERRSEDAQSKAALTDWLRAKASFVIEGLKEADKDEFCRCELKLQKWYGDLRGKPFAIEAENSILDISGFSKQYNCAFIWQKDGVKKLNLYLIINYFKGGKLRFKKIKPEAFEANRFYTVINKKSGEIVPMEVNFNFDDPNLIILPLAFGKRQGREFIWNDLLSLETGSLKLANGRVIEKTLYNRRTRQDEPALFVALTFERREVLDSSNIKPMNLIGVDRGENIPAVIALTDPEGCPLSRFKDSLGNPTHILRIGESYKEKQRTIQAKKEVEQRRAGGYSRKYASKAKNLADDMVRNTARDLLYYAVTQDAMLIFENLSRGFGRQGKRTFMAERQYTRMEDWLTAKLAYEGLPSKTYLSKTLAQYTSKTCSNCGFTITSADYDRVLEKLKKTATGWMTTINGKELKVEGQITYYNRYKRQNVVKDLSVELDRLSEESVNNDISSWDKGRSGEALSLLKKRFSHRPVQEKFVCLNCGFETHADEQAALNIARSWLFLRSQEYKKYQTNKTTGNTDKRAFVETWQSFYRKKLKEVWKPAV

SEQ ID NO: 31012 - protein, 978 aa, synthetic construct
  REGION 1..978: note = engineered CasX variant
QEIKRINKIRRRLVKDSNTKKAGKTGPMKTLLVRVMTPDLRERLENLRKKPENIPQPISNTSRANLNKLLTDYTEMKKAILHVYWEEFQKDPVGLMSRVAQPASKKIDQNKLKPEMDEKGNLTTAGFACSQCGQPLFVYKLEQVSEKGKAYTNYFGRCNVAEHEKLILLDQLKPEKDSDEAVTYSLGKFGQRALDFYSIHVTKESTHPVKPLAQIAGNRYASHPVGKALSDACMGTIASFLSKYQDIIIEHQKVVKGNQKRLESLRELAGKENLEYPSVTLPPQPHTKEGVDAYNEVIARVRMWVNLNLWQKLKLSRDDAKPLLRLKGFPSFPLVERQANEVDWWDMVCNVKKLINEKKEDGKVFWQNLAGYKRQEALRPYLSSEEDRKKGKKFARYQLGDLLLHLEKKHGEDWGKVYDEAWERIDKKVEGLSKHIKLEEERRSEDAQSKAALTDWLRAKASFVIEGLKEADKDEFCRCELKLQKWYGDLRGKPFAIEAENSILDISGFSKQYNCAFIWQKDGVKKLNLYLIINYFKGGKLRFKKIKPEAFEANRFYTVINKKSGEIVPMEVNFNFDDPNLIILPLAFGKRQGREFIWNDLLSLETGSLKLANGRVIEKTLYNRRTRQDEPALFVALTFERREVLDSSNIKPMNLIGVDRGENIPAVIALTDPEGCPLSRFKDSLGNPTHILRIGESYKEKQRTIQAKKEVEQRRAGGYSRKYASKAKNLADDMVRNTARDLLYYAVTQDAMLIFENLSRGFGRQGKRTFMAERQYTRMEDWLTAKLAYEGLPSKTYLSKTLAQYTSKTCSNCGFTITSADYDRVLEKLKKTATGWMTTINGKELKVEGQITYYNRYKRQNVVKDLSVELDRLSEESVNNDISSWDKGRSGEALSLLKKRFSHRPVQEKFVCLNCGFETHADEQAALNIARSWLFLRSQEYKKYQTNKTTGNTDKRAFVETWQSFYRKKLKEVWKPAV

SEQ ID NO: 31013 - protein, 978 aa, synthetic construct
  REGION 1..978: note = engineered CasX variant
QEIKRINKIRRRLVKDSNTKKAGKTGPMKTLLVRVMTPDLRERLENLRKKPENIPQPISNTSRANLNKLLTDYTEMKKAILHVYWEEFQKDPVGLMSRVAQPASKKIDQNKLKPEMDEKGNLTTAGFACSQCGQPLFVYKLEQVSEKGKAYTNYFGRCNVAEHEKLILLDQLKPEKDSDEAVTYSLGKFGQRALDFYSIHVTKESTHPVKPLAQIAGNRYASSPVGKALSDACMGTIASFLSKYQDIIIEHQKVVKGNQKRLESLRELAGKENLEYPSVTLPPQPHTKEGVDAYNEVIARVRMWVNLNLWQKLKLSRDDAKPLLRLKGFPSFPLVERQANEVDWWDMVCNVKKLINEKKEDGKVFWQNLAGYKRQEALRPYLSSEEDRKKGKKFARYQLGDLLLHLEKKHGEDWGKVYDEAWERIDKKVEGLSKHIKLEEERRSEDAQSKAALTDWLRAKASFVIEGLKEADKDEFCRCELKLQKWYGDLRGKPFAIEAENSILDISGFSKQYNCAFIWQKDGVKKLNLYLIINYFKGGKLRFKKIKPEAFEANRFYTVINKKSGEIVPMEVNFNFDDPNLIILPLAFGKRQGREFIWNDLLSLETGSLKLANGRVIEKTLYNRRTRQDEPALFVALTFERREVLDSSNIKPMNLIGVDRGENIPAVIALTDPEGCPLSRFKDSLGNPTHILRIGESYKEKQRTIQAKKEVEQRRAGGYSRKYASKAKNLADDMVRNTARDLLYYAVTQDAMLIFENLSRGFGRQGKRTFMAERQYTRMEDWLTAKLAYEGLPSKTYLSKTLAQYTSKTCSNCGFTITSADYDRVLEKLKKTATGWMTTINGKELKVEGQITYYNRYKRQNVVKDLSVELDRLSEESVNNDISSWDKGRSGEALSLLKKRFSHRPVQEKFVCLNCGFETHADEQAALNIARSWLFLRSQEYKKYQTNKTTGNTDKRAFVETWQSFYRKKLKEVWKPAV

SEQ ID NO: 31014 - protein, 978 aa, synthetic construct
  REGION 1..978: note = engineered CasX variant
QEIKRINKIRRRLVKDSNTKKAGKTGPMKTLLVRVMTPDLRERLENLRKKPENIPQPISNTSRANLNKLLTDYTEMKKAILHVYWEEFQKDPVGLMSRVAQPASKKIDQNKLKPEMDEKGNLTTAGFACSQCGQPLFVYKLEQVSEKGKAYTNYFGRCNVAEHEKLILLDQLKPEKDSDEAVTYSLGKFGQRALDFYSIHVTKESTHPVKPLAQIAGNRYASTPVGKALSDACMGTIASFLSKYQDIIIEHQKVVKGNQKRLESLRELAGKENLEYPSVTLPPQPHTKEGVDAYNEVIARVRMWVNLNLWQKLKLSRDDAKPLLRLKGFPSFPLVERQANEVDWWDMVCNVKKLINEKKEDGKVFWQNLAGYKRQEALRPYLSSEEDRKKGKKFARYQLGDLLLHLEKKHGEDWGKVYDEAWERIDKKVEGLSKHIKLEEERRSEDAQSKAALTDWLRAKASFVIEGLKEADKDEFCRCELKLQKWYGDLRGKPFAIEAENSILDISGFSKQYNCAFIWQKDGVKKLNLYLIINYFKGGKLRFKKIKPEAFEANRFYTVINKKSGEIVPMEVNFNFDDPNLIILPLAFGKRQGREFIWNDLLSLETGSLKLANGRVIEKTLYNRRTRQDEPALFVALTFERREVLDSSNIKPMNLIGVDRGENIPAVIALTDPEGCPLSRFKDSLGNPTHILRIGESYKEKQRTIQAKKEVEQRRAGGYSRKYASKAKNLADDMVRNTARDLLYYAVTQDAMLIFENLSRGFGRQGKRTFMAERQYTRMEDWLTAKLAYEGLPSKTYLSKTLAQYTSKTCSNCGFTITSADYDRVLEKLKKTATGWMTTINGKELKVEGQITYYNRYKRQNVVKDLSVELDRLSEESVNNDISSWDKGRSGEALSLLKKRFSHRPVQEKFVCLNCGFETHADEQAALNIARSWLFLRSQEYKKYQTNKTTGNTDKRAFVETWQSFYRKKLKEVWKPAV

SEQ ID NO: 31015 - protein, 978 aa, synthetic construct
  REGION 1..978: note = engineered CasX variant
QEIKRINKIRRRLVKDSNTKKAGKTGPMKTLLVRVMTPDLRERLENLRKKPENIPQPISNTSRANLNKLLTDYTEMKKAILHVYWEEFQKDPVGLMSRVAQPASKKIDQNKLKPEMDEKGNLTTAGFACSQCGQPLFVYKLEQVSEKGKAYTNYFGRCNVAEHEKLILLDQLKPEKDSDEAVTYSLGKFGQRALDFYSIHVTKESTHPVKPLAQIAGNRYASAPVGKALSDACMGTIASFLSKYQDIIIEHQKVVKGNQKRLESLRELAGKENLEYPSVTLPPQPHTKEGVDAYNEVIARVRMWVNLNLWQKLKLSRDDAKPLLRLKGFPSFPLVERQANEVDWWDMVCNVKKLINEKKEDGKVFWQNLAGYKRQEALRPYLSSEEDRKKGKKFARYQLGDLLLHLEKKHGEDWGKVYDEAWERIDKKVEGLSKHIKLEEERRSEDAQSKAALTDWLRAKASFVIEGLKEADKDEFCRCELKLQKWYGDLRGKPFAIEAENSILDISGFSKQYNCAFIWQKDGVKKLNLYLIINYFKGGKLRFKKIKPEAFEANRFYTVINKKSGEIVPMEVNFNFDDPNLIILPLAFGKRQGREFIWNDLLSLETGSLKLANGRVIEKTLYNRRTRQDEPALFVALTFERREVLDSSNIKPMNLIGVDRGENIPAVIALTDPEGCPLSRFKDSLGNPTHILRIGESYKEKQRTIQAKKEVEQRRAGGYSRKYASKAKNLADDMVRNTARDLLYYAVTQDAMLIFENLSRGFGRQGKRTFMAERQYTRMEDWLTAKLAYEGLPSKTYLSKTLAQYTSKTCSNCGFTITSADYDRVLEKLKKTATGWMTTINGKELKVEGQITYYNRYKRQNVVKDLSVELDRLSEESVNNDISSWDKGRSGEALSLLKKRFSHRPVQEKFVCLNCGFETHADEQAALNIARSWLFLRSQEYKKYQTNKTTGNTDKRAFVETWQSFYRKKLKEVWKPAV

SEQ ID NO: 31016 - protein, 978 aa, synthetic construct
  REGION 1..978: note = engineered CasX variant
QEIKRINKIRRRLVKDSNTKKAGKTGPMKTLLVRVMTPDLRERLENLRKKPENIPQPISNTSRANLNKLLTDYTEMKKAILHVYWEEFQKDPVGLMSRVAQPASKKIDQNKLKPEMDEKGNLTTAGFACSQCGQPLFVYKLEQVSEKGKAYTNYFGRCNVAEHEKLILLDQLKPEKDSDEAVTYSLGKFGQRALDFYSIHVTKESTHPVKPLAQIAGNRYASVPVGKALSDACMGTIASFLSKYQDIIIEHQKVVKGNQKRLESLRELAGKENLEYPSVTLPPQPHTKEGVDAYNEVIARVRMWVNLNLWQKLKLSRDDAKPLLRLKGFPSFPLVERQANEVDWWDMVCNVKKLINEKKEDGKVFWQNLAGYKRQEALRPYLSSEEDRKKGKKFARYQLGDLLLHLEKKHGEDWGKVYDEAWERIDKKVEGLSKHIKLEEERRSEDAQSKAALTDWLRAKASFVIEGLKEADKDEFCRCELKLQKWYGDLRGKPFAIEAENSILDISGFSKQYNCAFIWQKDGVKKLNLYLIINYFKGGKLRFKKIKPEAFEANRFYTVINKKSGEIVPMEVNFNFDDPNLIILPLAFGKRQGREFIWNDLLSLETGSLKLANGRVIEKTLYNRRTRQDEPALFVALTFERREVLDSSNIKPMNLIGVDRGENIPAVIALTDPEGCPLSRFKDSLGNPTHILRIGESYKEKQRTIQAKKEVEQRRAGGYSRKYASKAKNLADDMVRNTARDLLYYAVTQDAMLIFENLSRGFGRQGKRTFMAERQYTRMEDWLTAKLAYEGLPSKTYLSKTLAQYTSKTCSNCGFTITSADYDRVLEKLKKTATGWMTTINGKELKVEGQITYYNRYKRQNVVKDLSVELDRLSEESVNNDISSWDKGRSGEALSLLKKRFSHRPVQEKFVCLNCGFETHADEQAALNIARSWLFLRSQEYKKYQTNKTTGNTDKRAFVETWQSFYRKKLKEVWKPAV

SEQ ID NO: 31017 - protein, 978 aa, synthetic construct
  REGION 1..978: note = engineered CasX variant
QEIKRINKIRRRLVKDSNTKKAGKTGPMKTLLVRVMTPDLRERLENLRKKPENIPQPISNTSRANLNKLLTDYTEMKKAILHVYWEEFQKDPVGLMSRVAQPASKKIDQNKLKPEMDEKGNLTTAGFACSQCGQPLFVYKLEQVSEKGKAYTNYFGRCNVAEHEKLIKLDQLKPEKDSDEAVTYSLGKFGQRALDFYSIHVTKESTHPVKPLAQIAGNRYASGPVGKALSDACMGTIASFLSKYQDIIIEHQKVVKGNQKRLESLRELAGKENLEYPSVTLPPQPHTKEGVDAYNEVIARVRMWVNLNLWQKLKLSRDDAKPLLRLKGFPSFPLVERQANEVDWWDMVCNVKKLINEKKEDGKVFWQNLAGYKRQEALRPYLSSEEDRKKGKKFARYQLGDLLLHLEKKHGEDWGKVYDEAWERIDKKVEGLSKHIKLEEERRSEDAQSKAALTDWLRAKASFVIEGLKEADKDEFCRCELKLQKWYGDLRGKPFAIEAENSILDISGFSKQYNCAFIWQKDGVKKLNLYLIINYFKGGKLRFKKIKPEAFEANRFYTVINKKSGEIVPMEVNFNFDDPNLIILPLAFGKRQGREFIWNDLLSLETGSLKLANGRVIEKTLYNRRTRQDEPALFVALTFERREVLDSSNIKPMNLIGVDRGENIPAVIALTDPEGCPLSRFKDSLGNPTHILRIGESYKEKQRTIQAKKEVEQRRAGGYSRKYASKAKNLADDMVRNTARDLLYYAVTQDAMLIFENLSRGFGRQGKRTFMAERQYTRMEDWLTAKLAYEGLPSKTYLSKTLAQYTSKTCSNCGFTITSADYDRVLEKLKKTATGWMTTINGKELKVEGQITYYNRYKRQNVVKDLSVELDRLSEESVNNDISSWDKGRSGEALSLLKKRFSHRPVQEKFVCLNCGFETHADEQAALNIARSWLFLRSQEYKKYQTNKTTGNTDKRAFVETWQSFYRKKLKEVWKPAV

SEQ ID NO: 31018 - protein, 977 aa, synthetic construct
  REGION 1..977: note = engineered CasX variant
QEIKRINKIRRRLVKDSNTKKAGKTGPMKTLLVRVMTPDLRERLENLRKKPENIPQPISNTSRANLNKLLTDYTEMKKAILHVYWEEFQKDPVGLMSRVAQPASKKIDQNKLKPEMDEKGNLTTAGFACSQCGQPLFVYKLEQVSEKGKAYTNYFGRCNVAEHEKLILLDQLKPEKDSDEAVTYSLGKFGQRALDFYSIHVTKESTHPVKPLAQIAGNRYASPVGKALSDACMGTIASFLSKYQDIIIEHQKVVKGNQKRLESLRELAGKENLEYPSVTLPPQPHTKEGVDAYNEVIARVRMWVNLNLWQKLKLSRDDAKPLLRLKGFPSFPLVERQANEVDWWDMVCNVKKLINEKKEDGKVFWQNLAGYKRQEALRPYLSSEEDRKKGKKFARYQLGDLLLHLEKKHGEDWGKVYDEAWERIDKKVEGLSKHIKLEEERRSEDAQSKAALTDWLRAKASFVIEGLKEADKDEFCRCELKLQKWYGDLRGKPFAIEAENSILDISGFSKQYNCAFIWQKDGVKKLNLYLIINYFKGGKLRFKKIKPEAFEANRFYTVINKKSGEIVPMEVNFNFDDPNLIILPLAFGKRQGREFIWNDLLSLETGSLKLANGRVIEKTLYNRRTRQDEPALFVALTFERREVLDSSNIKPMNLIGVDRGENIPAVIALTDPEGCPLSRFKDSLGNPTHILRIGESYKEKQRTIQAKKEVEQRRAGGYSRKYASKAKNLADDMVRNTARDLLYYAVTQDAMLIFENLSRGFGRQGKRTFMAERQYTRMEDWLTAKLAYEGLPSKTYLSKTLAQYTSKTCSNCGFTITSADYDRVLEKLKKTATGWMTTINGKELKVEGQITYYNRYKRQNVVKDLSVELDRLSEESVNNDISSWDKGRSGEALSLLKKRFSHRPVQEKFVCLNCGFETHADEQAALNIARSWLFLRSQEYKKYQTNKTTGNTDKRAFVETWQSFYRKKLKEVWKPAV

SEQ ID NO: 31019 - protein, 978 aa, synthetic construct
  REGION 1..978: note = engineered CasX variant
QEIKRINKIRRRLVKDSNTKKAGKTGPMKTLLVRVMTPDLRERLENLRKKPENIPQPISNTSRANLNKLLTDYTEMKKAILHVYWEEFQVDPVGLMSRVAQPASKKIDQNKLKPEMDEKGNLTTAGFACSQCGQPLFVYKLEQVSEKGKAYTNYFGRCNVAEHEKLILLDQLKPEKDSDEAVTYSLGKFGQRALDFYSIHVTKESTHPVKPLAQIAGNRYASYPVGKALSDACMGTIASFLSKYQDIIIEHQKVVKGNQKRLESLRELAGKENLEYPSVTLPPQPHTKEGVDAYNEVIARVRMWVNLNLWQKLKLSRDDAKPLLRLKGFPSFPLVERQANEVDWWDMVCNVKKLINEKKEDGKVFWQNLAGYKRQEALRPYLSSEEDRKKGKKFARYQLGDLLLHLEKKHGEDWGKVYDEAWERIDKKVEGLSKHIKLEEERRSEDAQSKAALTDWLRAKASFVIEGLKEADKDEFCRCELKLQKWYGDLRGKPFAIEAENSILDISGFSKQYNCAFIWQKDGVKKLNLYLIINYFKGGKLRFKKIKPEAFEANRFYTVINKKSGEIVPMEVNFNFDDPNLIILPLAFGKRQGREFIWNDLLSLETGSLKLANGRVIEKTLYNRRTRQDEPALFVALTFERREVLDSSNIKPMNLIGVDRGENIPAVIALTDPEGCPLSRFKDSLGNPTHILRIGESYKEKQRTIQAKKEVEQRRAGGYSRKYASKAKNLADDMVRNTARDLLYYAVTQDAMLIFENLSRGFGRQGKRTFMAERQYTRMEDWLTAKLAYEGLPSKTYLSKTLAQYTSKTCSNCGFTITSADYDRVLEKLKKTATGWMTTINGKELKVEGQITYYNRYKRQNVVKDLSVELDRLSEESVNNDISSWTKGRSGEALSLLKKRFSHRPVQEKFVCLNCGFETHADEQAALNIARSWLFLRSQEYKKYQTNKTTGNTDKRAFVETWQSFYRKKLKEVWKPAV

SEQ ID NO: 31020 - protein, 978 aa, synthetic construct
  REGION 1..978: note = engineered CasX variant
QEIKRINKIRRRLVKDSNTKKAGKTGPMKTLLVRVMTPDLRERLENLRKKPENIPQPISNTSRANLNKLLTDYTEMKKAILHVYWEEFQVDPVGLMSRVAQPASKKIDQNKLKPEMDEKGNLTTAGFACSQCGQPLFVYKLEQVSEKGKAYTNYFGRCNVAEHEKLILLDQLKPEKDSDEAVTYSLGKFGQRALDFYSIHVTKESTHPVKPLAQIAGNRYASHPVGKALSDACMGTIASFLSKYQDIIIEHQKVVKGNQKRLESLRELAGKENLEYPSVTLPPQPHTKEGVDAYNEVIARVRMWVNLNLWQKLKLSRDDAKPLLRLKGFPSFPLVERQANEVDWWDMVCNVKKLINEKKEDGKVFWQNLAGYKRQEALRPYLSSEEDRKKGKKFARYQLGDLLLHLEKKHGEDWGKVYDEAWERIDKKVEGLSKHIKLEEERRSEDAQSKAALTDWLRAKASFVIEGLKEADKDEFCRCELKLQKWYGDLRGKPFAIEAENSILDISGFSKQYNCAFIWQKDGVKKLNLYLIINYFKGGKLRFKKIKPEAFEANRFYTVINKKSGEIVPMEVNFNFDDPNLIILPLAFGKRQGREFIWNDLLSLETGSLKLANGRVIEKTLYNRRTRQDEPALFVALTFERREVLDSSNIKPMNLIGVDRGENIPAVIALTDPEGCPLSRFKDSLGNPTHILRIGESYKEKQRTIQAKKEVEQRRAGGYSRKYASKAKNLADDMVRNTARDLLYYAVTQDAMLIFENLSRGFGRQGKRTFMAERQYTRMEDWLTAKLAYEGLPSKTYLSKTLAQYTSKTCSNCGFTITSADYDRVLEKLKKTATGWMTTINGKELKVEGQITYYNRYKRQNVVKDLSVELDRLSEESVNNDISSWTKGRSGEALSLLKKRFSHRPVQEKFVCLNCGFETHADEQAALNIARSWLFLRSQEYKKYQTNKTTGNTDKRAFVETWQSFYRKKLKEVWKPAV

SEQ ID NO: 31021 - protein, 978 aa, synthetic construct
  REGION 1..978: note = engineered CasX variant
QEIKRINKIRRRLVKDSNTKKAGKTGPMKTLLVRVMTPDLRERLENLRKKPENIPQPISNTSRANLNKLLTDYTEMKKAILHVYWEEFQVDPVGLMSRVAQPASKKIDQNKLKPEMDEKGNLTTAGFACSQCGQPLFVYKLEQVSEKGKAYTNYFGRCNVAEHEKLILLDQLKPEKDSDEAVTYSLGKFGQRALDFYSIHVTKESTHPVKPLAQIAGNRYASSPVGKALSDACMGTIASFLSKYQDIIIEHQKVVKGNQKRLESLRELAGKENLEYPSVTLPPQPHTKEGVDAYNEVIARVRMWVNLNLWQKLKLSRDDAKPLLRLKGFPSFPLVERQANEVDWWDMVCNVKKLINEKKEDGKVFWQNLAGYKRQEALRPYLSSEEDRKKGKKFARYQLGDLLLHLEKKHGEDWGKVYDEAWERIDKKVEGLSKHIKLEEERRSEDAQSKAALTDWLRAKASFVIEGLKEADKDEFCRCELKLQKWYGDLRGKPFAIEAENSILDISGFSKQYNCAFIWQKDGVKKLNLYLIINYFKGGKLRFKKIKPEAFEANRFYTVINKKSGEIVPMEVNFNFDDPNLIILPLAFGKRQGREFIWNDLLSLETGSLKLANGRVIEKTLYNRRTRQDEPALFVALTFERREVLDSSNIKPMNLIGVDRGENIPAVIALTDPEGCPLSRFKDSLGNPTHILRIGESYKEKQRTIQAKKEVEQRRAGGYSRKYASKAKNLADDMVRNTARDLLYYAVTQDAMLIFENLSRGFGRQGKRTFMAERQYTRMEDWLTAKLAYEGLPSKTYLSKTLAQYTSKTCSNCGFTITSADYDRVLEKLKKTATGWMTTINGKELKVEGQITYYNRYKRQNVVKDLSVELDRLSEESVNNDISSWTKGRSGEALSLLKKRFSHRPVQEKFVCLNCGFETHADEQAALNIARSWLFLRSQEYKKYQTNKTTGNTDKRAFVETWQSFYRKKLKEVWKPAV

SEQ ID NO: 31022 - protein, 978 aa, synthetic construct
  REGION 1..978: note = engineered CasX variant
QEIKRINKIRRRLVKDSNTKKAGKTGPMKTLLVRVMTPDLRERLENLRKKPENIPQPISNTSRANLNKLLTDYTEMKKAILHVYWEEFQVDPVGLMSRVAQPASKKIDQNKLKPEMDEKGNLTTAGFACSQCGQPLFVYKLEQVSEKGKAYTNYFGRCNVAEHEKLILLDQLKPEKDSDEAVTYSLGKFGQRALDFYSIHVTKESTHPVKPLAQIAGNRYASTPVGKALSDACMGTIASFLSKYQDIIIEHQKVVKGNQKRLESLRELAGKENLEYPSVTLPPQPHTKEGVDAYNEVIARVRMWVNLNLWQKLKLSRDDAKPLLRLKGFPSFPLVERQANEVDWWDMVCNVKKLINEKKEDGKVFWQNLAGYKRQEALRPYLSSEEDRKKGKKFARYQLGDLLLHLEKKHGEDWGKVYDEAWERIDKKVEGLSKHIKLEEERRSEDAQSKAALTDWLRAKASFVIEGLKEADKDEFCRCELKLQKWYGDLRGKPFAIEAENSILDISGFSKQYNCAFIWQKDGVKKLNLYLIINYFKGGKLRFKKIKPEAFEANRFYTVINKKSGEIVPMEVNFNFDDPNLIILPLAFGKRQGREFIWNDLLSLETGSLKLANGRVIEKTLYNRRTRQDEPALFVALTFERREVLDSSNIKPMNLIGVDRGENIPAVIALTDPEGCPLSRFKDSLGNPTHILRIGESYKEKQRTIQAKKEVEQRRAGGYSRKYASKAKNLADDMVRNTARDLLYYAVTQDAMLIFENLSRGFGRQGKRTFMAERQYTRMEDWLTAKLAYEGLPSKTYLSKTLAQYTSKTCSNCGFTITSADYDRVLEKLKKTATGWMTTINGKELKVEGQITYYNRYKRQNVVKDLSVELDRLSEESVNNDISSWTKGRSGEALSLLKKRFSHRPVQEKFVCLNCGFETHADEQAALNIARSWLFLRSQEYKKYQTNKTTGNTDKRAFVETWQSFYRKKLKEVWKPAV

SEQ ID NO: 31023 - protein, 978 aa, synthetic construct
  REGION 1..978: note = engineered CasX variant
QEIKRINKIRRRLVKDSNTKKAGKTGPMKTLLVRVMTPDLRERLENLRKKPENIPQPISNTSRANLNKLLTDYTEMKKAILHVYWEEFQVDPVGLMSRVAQPASKKIDQNKLKPEMDEKGNLTTAGFACSQCGQPLFVYKLEQVSEKGKAYTNYFGRCNVAEHEKLILLDQLKPEKDSDEAVTYSLGKFGQRALDFYSIHVTKESTHPVKPLAQIAGNRYASAPVGKALSDACMGTIASFLSKYQDIIIEHQKVVKGNQKRLESLRELAGKENLEYPSVTLPPQPHTKEGVDAYNEVIARVRMWVNLNLWQKLKLSRDDAKPLLRLKGFPSFPLVERQANEVDWWDMVCNVKKLINEKKEDGKVFWQNLAGYKRQEALRPYLSSEEDRKKGKKFARYQLGDLLLHLEKKHGEDWGKVYDEAWERIDKKVEGLSKHIKLEEERRSEDAQSKAALTDWLRAKASFVIEGLKEADKDEFCRCELKLQKWYGDLRGKPFAIEAENSILDISGFSKQYNCAFIWQKDGVKKLNLYLIINYFKGGKLRFKKIKPEAFEANRFYTVINKKSGEIVPMEVNFNFDDPNLIILPLAFGKRQGREFIWNDLLSLETGSLKLANGRVIEKTLYNRRTRQDEPALFVALTFERREVLDSSNIKPMNLIGVDRGENIPAVIALTDPEGCPLSRFKDSLGNPTHILRIGESYKEKQRTIQAKKEVEQRRAGGYSRKYASKAKNLADDMVRNTARDLLYYAVTQDAMLIFENLSRGFGRQGKRTFMAERQYTRMEDWLTAKLAYEGLPSKTYLSKTLAQYTSKTCSNCGFTITSADYDRVLEKLKKTATGWMTTINGKELKVEGQITYYNRYKRQNVVKDLSVELDRLSEESVNNDISSWTKGRSGEALSLLKKRFSHRPVQEKFVCLNCGFETHADEQAALNIARSWLFLRSQEYKKYQTNKTTGNTDKRAFVETWQSFYRKKLKEVWKPAV

SEQ ID NO: 31024 - protein, 978 aa, synthetic construct
  REGION 1..978: note = engineered CasX variant
QEIKRINKIRRRLVKDSNTKKAGKTGPMKTLLVRVMTPDLRERLENLRKKPENIPQPISNTSRANLNKLLTDYTEMKKAILHVYWEEFQVDPVGLMSRVAQPASKKIDQNKLKPEMDEKGNLTTAGFACSQCGQPLFVYKLEQVSEKGKAYTNYFGRCNVAEHEKLILLDQLKPEKDSDEAVTYSLGKFGQRALDFYSIHVTKESTHPVKPLAQIAGNRYASVPVGKALSDACMGTIASFLSKYQDIIIEHQKVVKGNQKRLESLRELAGKENLEYPSVTLPPQPHTKEGVDAYNEVIARVRMWVNLNLWQKLKLSRDDAKPLLRLKGFPSFPLVERQANEVDWWDMVCNVKKLINEKKEDGKVFWQNLAGYKRQEALRPYLSSEEDRKKGKKFARYQLGDLLLHLEKKHGEDWGKVYDEAWERIDKKVEGLSKHIKLEEERRSEDAQSKAALTDWLRAKASFVIEGLKEADKDEFCRCELKLQKWYGDLRGKPFAIEAENSILDISGFSKQYNCAFIWQKDGVKKLNLYLIINYFKGGKLRFKKIKPEAFEANRFYTVINKKSGEIVPMEVNFNFDDPNLIILPLAFGKRQGREFIWNDLLSLETGSLKLANGRVIEKTLYNRRTRQDEPALFVALTFERREVLDSSNIKPMNLIGVDRGENIPAVIALTDPEGCPLSRFKDSLGNPTHILRIGESYKEKQRTIQAKKEVEQRRAGGYSRKYASKAKNLADDMVRNTARDLLYYAVTQDAMLIFENLSRGFGRQGKRTFMAERQYTRMEDWLTAKLAYEGLPSKTYLSKTLAQYTSKTCSNCGFTITSADYDRVLEKLKKTATGWMTTINGKELKVEGQITYYNRYKRQNVVKDLSVELDRLSEESVNNDISSWTKGRSGEALSLLKKRFSHRPVQEKFVCLNCGFETHADEQAALNIARSWLFLRSQEYKKYQTNKTTGNTDKRAFVETWQSFYRKKLKEVWKPAV

SEQ ID NO: 31025 - protein, 978 aa, synthetic construct
  REGION 1..978: note = engineered CasX variant
QEIKRINKIRRRLVKDSNTKKAGKTGPMKTLLVRVMTPDLRERLENLRKKPENIPQPISNTSRANLNKLLTDYTEMKKAILHVYWEEFQVDPVGLMSRVAQPASKKIDQNKLKPEMDEKGNLTTAGFACSQCGQPLFVYKLEQVSEKGKAYTNYFGRCNVAEHEKLIKLDQLKPEKDSDEAVTYSLGKFGQRALDFYSIHVTKESTHPVKPLAQIAGNRYASGPVGKALSDACMGTIASFLSKYQDIIIEHQKVVKGNQKRLESLRELAGKENLEYPSVTLPPQPHTKEGVDAYNEVIARVRMWVNLNLWQKLKLSRDDAKPLLRLKGFPSFPLVERQANEVDWWDMVCNVKKLINEKKEDGKVFWQNLAGYKRQEALRPYLSSEEDRKKGKKFARYQLGDLLLHLEKKHGEDWGKVYDEAWERIDKKVEGLSKHIKLEEERRSEDAQSKAALTDWLRAKASFVIEGLKEADKDEFCRCELKLQKWYGDLRGKPFAIEAENSILDISGFSKQYNCAFIWQKDGVKKLNLYLIINYFKGGKLRFKKIKPEAFEANRFYTVINKKSGEIVPMEVNFNFDDPNLIILPLAFGKRQGREFIWNDLLSLETGSLKLANGRVIEKTLYNRRTRQDEPALFVALTFERREVLDSSNIKPMNLIGVDRGENIPAVIALTDPEGCPLSRFKDSLGNPTHILRIGESYKEKQRTIQAKKEVEQRRAGGYSRKYASKAKNLADDMVRNTARDLLYYAVTQDAMLIFENLSRGFGRQGKRTFMAERQYTRMEDWLTAKLAYEGLPSKTYLSKTLAQYTSKTCSNCGFTITSADYDRVLEKLKKTATGWMTTINGKELKVEGQITYYNRYKRQNVVKDLSVELDRLSEESVNNDISSWTKGRSGEALSLLKKRFSHRPVQEKFVCLNCGFETHADEQAALNIARSWLFLRSQEYKKYQTNKTTGNTDKRAFVETWQSFYRKKLKEVWKPAV

SEQ ID NO: 31026 - protein, 977 aa, synthetic construct
  REGION 1..977: note = engineered CasX variant
QEIKRINKIRRRLVKDSNTKKAGKTGPMKTLLVRVMTPDLRERLENLRKKPENIPQPISNTSRANLNKLLTDYTEMKKAILHVYWEEFQVDPVGLMSRVAQPASKKIDQNKLKPEMDEKGNLTTAGFACSQCGQPLFVYKLEQVSEKGKAYTNYFGRCNVAEHEKLILLDQLKPEKDSDEAVTYSLGKFGQRALDFYSIHVTKESTHPVKPLAQIAGNRYASPVGKALSDACMGTIASFLSKYQDIIIEHQKVVKGNQKRLESLRELAGKENLEYPSVTLPPQPHTKEGVDAYNEVIARVRMWVNLNLWQKLKLSRDDAKPLLRLKGFPSFPLVERQANEVDWWDMVCNVKKLINEKKEDGKVFWQNLAGYKRQEALRPYLSSEEDRKKGKKFARYQLGDLLLHLEKKHGEDWGKVYDEAWERIDKKVEGLSKHIKLEEERRSEDAQSKAALTDWLRAKASFVIEGLKEADKDEFCRCELKLQKWYGDLRGKPFAIEAENSILDISGFSKQYNCAFIWQKDGVKKLNLYLIINYFKGGKLRFKKIKPEAFEANRFYTVINKKSGEIVPMEVNFNFDDPNLIILPLAFGKRQGREFIWNDLLSLETGSLKLANGRVIEKTLYNRRTRQDEPALFVALTFERREVLDSSNIKPMNLIGVDRGENIPAVIALTDPEGCPLSRFKDSLGNPTHILRIGESYKEKQRTIQAKKEVEQRRAGGYSRKYASKAKNLADDMVRNTARDLLYYAVTQDAMLIFENLSRGFGRQGKRTFMAERQYTRMEDWLTAKLAYEGLPSKTYLSKTLAQYTSKTCSNCGFTITSADYDRVLEKLKKTATGWMTTINGKELKVEGQITYYNRYKRQNVVKDLSVELDRLSEESVNNDISSWTKGRSGEALSLLKKRFSHRPVQEKFVCLNCGFETHADEQAALNIARSWLFLRSQEYKKYQTNKTTGNTDKRAFVETWQSFYRKKLKEVWKPAV

SEQ ID NO: 31027 - protein, 978 aa, synthetic construct
  REGION 1..978: note = engineered CasX variant
QEIKRLNKIRRRLVKDSNTKKAGKTGPMKTLLVRVMTPDLRERLENLRKKPENIPQPISNTSRANLNKLLTDYTEMKKAILHVYWEEFQKDPVGLMSRVAQPASKKIDQNKLKPEMDEKGNLTTAGFACSQCGQPLFVYKLEQVSEKGKAYTNYFGRCNVAEHEKLILLDQLKPEKDSDEAVTYSLGKFGQRALDFYSIHVTKESTHPVKPLAQIAGNRYASYPVGKALSDACMGTIASFLSKYQDIIIEHQKVVKGNQKRLESLRELAGKENLEYPSVTLPPQPHTKEGVDAYNEVIARVRMWVNLNLWQKLKLSRDDAKPLLRLKGFPSFPLVERQANEVDWWDMVCNVKKLINEKKEDGKVFWQNLAGYKRQEALRPYLSSEEDRKKGKKFARYQLGDLLLHLEKKHGEDWGKVYDEAWERIDKKVEGLSKHIKLEEERRSEDAQSKAALTDWLRAKASFVIEGLKEADKDEFCRCELKLQKWYGDLRGKPFAIEAENSILDISGFSKQYNCAFIWQKDGVKKLNLYLIINYFKGGKLRFKKIKPEAFEANRFYTVINKKSGEIVPMEVNFNFDDPNLIILPLAFGKRQGREFIWNDLLSLETGSLKLANGRVIEKTLYNRRTRQDEPALFVALTFERREVLDSSNIKPMNLIGVDRGENIPAVIALTDPEGCPLSRFKDSLGNPTHILRIGESYKEKQRTIQAKKEVEQRRAGGYSRKYASKAKNLADDMVRNTARDLLYYAVTQDAMLIFENLSRGFGRQGKRTFMAERQYTRMEDWLTAKLAYEGLPSKTYLSKTLAQYTSKTCSNCGFTITSADYDRVLEKLKKTATGWMTTINGKELKVEGQITYYNRYKRQNVVKDLSVELDRLSEESVNNDISSWTKGRSGEALSLLKKRFSHRPVQEKFVCLNCGFETHADEQAALNIARSWLFLRSQEYKKYQTNKTTGNTDKRAFVETWQSFYRKKLKEVWKPAV

SEQ ID NO: 31028 - protein, 978 aa, synthetic construct
  REGION 1..978: note = engineered CasX variant
QEIKRLNKIRRRLVKDSNTKKAGKTGPMKTLLVRVMTPDLRERLENLRKKPENIPQPISNTSRANLNKLLTDYTEMKKAILHVYWEEFQKDPVGLMSRVAQPASKKIDQNKLKPEMDEKGNLTTAGFACSQCGQPLFVYKLEQVSEKGKAYTNYFGRCNVAEHEKLILLDQLKPEKDSDEAVTYSLGKFGQRALDFYSIHVTKESTHPVKPLAQIAGNRYASHPVGKALSDACMGTIASFLSKYQDIIIEHQKVVKGNQKRLESLRELAGKENLEYPSVTLPPQPHTKEGVDAYNEVIARVRMWVNLNLWQKLKLSRDDAKPLLRLKGFPSFPLVERQANEVDWWDMVCNVKKLINEKKEDGKVFWQNLAGYKRQEALRPYLSSEEDRKKGKKFARYQLGDLLLHLEKKHGEDWGKVYDEAWERIDKKVEGLSKHIKLEEERRSEDAQSKAALTDWLRAKASFVIEGLKEADKDEFCRCELKLQKWYGDLRGKPFAIEAENSILDISGFSKQYNCAFIWQKDGVKKLNLYLIINYFKGGKLRFKKIKPEAFEANRFYTVINKKSGEIVPMEVNFNFDDPNLIILPLAFGKRQGREFIWNDLLSLETGSLKLANGRVIEKTLYNRRTRQDEPALFVALTFERREVLDSSNIKPMNLIGVDRGENIPAVIALTDPEGCPLSRFKDSLGNPTHILRIGESYKEKQRTIQAKKEVEQRRAGGYSRKYASKAKNLADDMVRNTARDLLYYAVTQDAMLIFENLSRGFGRQGKRTFMAERQYTRMEDWLTAKLAYEGLPSKTYLSKTLAQYTSKTCSNCGFTITSADYDRVLEKLKKTATGWMTTINGKELKVEGQITYYNRYKRQNVVKDLSVELDRLSEESVNNDISSWTKGRSGEALSLLKKRFSHRPVQEKFVCLNCGFETHADEQAALNIARSWLFLRSQEYKKYQTNKTTGNTDKRAFVETWQSFYRKKLKEVWKPAV

SEQ ID NO: 31029 - protein, 978 aa, synthetic construct
  REGION 1..978: note = engineered CasX variant
QEIKRLNKIRRRLVKDSNTKKAGKTGPMKTLLVRVMTPDLRERLENLRKKPENIPQPISNTSRANLNKLLTDYTEMKKAILHVYWEEFQKDPVGLMSRVAQPASKKIDQNKLKPEMDEKGNLTTAGFACSQCGQPLFVYKLEQVSEKGKAYTNYFGRCNVAEHEKLILLDQLKPEKDSDEAVTYSLGKFGQRALDFYSIHVTKESTHPVKPLAQIAGNRYASSPVGKALSDACMGTIASFLSKYQDIIIEHQKVVKGNQKRLESLRELAGKENLEYPSVTLPPQPHTKEGVDAYNEVIARVRMWVNLNLWQKLKLSRDDAKPLLRLKGFPSFPLVERQANEVDWWDMVCNVKKLINEKKEDGKVFWQNLAGYKRQEALRPYLSSEEDRKKGKKFARYQLGDLLLHLEKKHGEDWGKVYDEAWERIDKKVEGLSKHIKLEEERRSEDAQSKAALTDWLRAKASFVIEGLKEADKDEFCRCELKLQKWYGDLRGKPFAIEAENSILDISGFSKQYNCAFIWQKDGVKKLNLYLIINYFKGGKLRFKKIKPEAFEANRFYTVINKKSGEIVPMEVNFNFDDPNLIILPLAFGKRQGREFIWNDLLSLETGSLKLANGRVIEKTLYNRRTRQDEPALFVALTFERREVLDSSNIKPMNLIGVDRGENIPAVIALTDPEGCPLSRFKDSLGNPTHILRIGESYKEKQRTIQAKKEVEQRRAGGYSRKYASKAKNLADDMVRNTARDLLYYAVTQDAMLIFENLSRGFGRQGKRTFMAERQYTRMEDWLTAKLAYEGLPSKTYLSKTLAQYTSKTCSNCGFTITSADYDRVLEKLKKTATGWMTTINGKELKVEGQITYYNRYKRQNVVKDLSVELDRLSEESVNNDISSWTKGRSGEALSLLKKRFSHRPVQEKFVCLNCGFETHADEQAALNIARSWLFLRSQEYKKYQTNKTTGNTDKRAFVETWQSFYRKKLKEVWKPAV

SEQ ID NO: 31030 - protein, 978 aa, synthetic construct
  REGION 1..978: note = engineered CasX variant
QEIKRLNKIRRRLVKDSNTKKAGKTGPMKTLLVRVMTPDLRERLENLRKKPENIPQPISNTSRANLNKLLTDYTEMKKAILHVYWEEFQKDPVGLMSRVAQPASKKIDQNKLKPEMDEKGNLTTAGFACSQCGQPLFVYKLEQVSEKGKAYTNYFGRCNVAEHEKLILLDQLKPEKDSDEAVTYSLGKFGQRALDFYSIHVTKESTHPVKPLAQIAGNRYASTPVGKALSDACMGTIASFLSKYQDIIIEHQKVVKGNQKRLESLRELAGKENLEYPSVTLPPQPHTKEGVDAYNEVIARVRMWVNLNLWQKLKLSRDDAKPLLRLKGFPSFPLVERQANEVDWWDMVCNVKKLINEKKEDGKVFWQNLAGYKRQEALRPYLSSEEDRKKGKKFARYQLGDLLLHLEKKHGEDWGKVYDEAWERIDKKVEGLSKHIKLEEERRSEDAQSKAALTDWLRAKASFVIEGLKEADKDEFCRCELKLQKWYGDLRGKPFAIEAENSILDISGFSKQYNCAFIWQKDGVKKLNLYLIINYFKGGKLRFKKIKPEAFEANRFYTVINKKSGEIVPMEVNFNFDDPNLIILPLAFGKRQGREFIWNDLLSLETGSLKLANGRVIEKTLYNRRTRQDEPALFVALTFERREVLDSSNIKPMNLIGVDRGENIPAVIALTDPEGCPLSRFKDSLGNPTHILRIGESYKEKQRTIQAKKEVEQRRAGGYSRKYASKAKNLADDMVRNTARDLLYYAVTQDAMLIFENLSRGFGRQGKRTFMAERQYTRMEDWLTAKLAYEGLPSKTYLSKTLAQYTSKTCSNCGFTITSADYDRVLEKLKKTATGWMTTINGKELKVEGQITYYNRYKRQNVVKDLSVELDRLSEESVNNDISSWTKGRSGEALSLLKKRFSHRPVQEKFVCLNCGFETHADEQAALNIARSWLFLRSQEYKKYQTNKTTGNTDKRAFVETWQSFYRKKLKEVWKPAV

SEQ ID NO: 31031 - protein, 978 aa, synthetic construct
  REGION 1..978: note = engineered CasX variant
QEIKRLNKIRRRLVKDSNTKKAGKTGPMKTLLVRVMTPDLRERLENLRKKPENIPQPISNTSRANLNKLLTDYTEMKKAILHVYWEEFQKDPVGLMSRVAQPASKKIDQNKLKPEMDEKGNLTTAGFACSQCGQPLFVYKLEQVSEKGKAYTNYFGRCNVAEHEKLILLDQLKPEKDSDEAVTYSLGKFGQRALDFYSIHVTKESTHPVKPLAQIAGNRYASAPVGKALSDACMGTIASFLSKYQDIIIEHQKVVKGNQKRLESLRELAGKENLEYPSVTLPPQPHTKEGVDAYNEVIARVRMWVNLNLWQKLKLSRDDAKPLLRLKGFPSFPLVERQANEVDWWDMVCNVKKLINEKKEDGKVFWQNLAGYKRQEALRPYLSSEEDRKKGKKFARYQLGDLLLHLEKKHGEDWGKVYDEAWERIDKKVEGLSKHIKLEEERRSEDAQSKAALTDWLRAKASFVIEGLKEADKDEFCRCELKLQKWYGDLRGKPFAIEAENSILDISGFSKQYNCAFIWQKDGVKKLNLYLIINYFKGGKLRFKKIKPEAFEANRFYTVINKKSGEIVPMEVNFNFDDPNLIILPLAFGKRQGREFIWNDLLSLETGSLKLANGRVIEKTLYNRRTRQDEPALFVALTFERREVLDSSNIKPMNLIGVDRGENIPAVIALTDPEGCPLSRFKDSLGNPTHILRIGESYKEKQRTIQAKKEVEQRRAGGYSRKYASKAKNLADDMVRNTARDLLYYAVTQDAMLIFENLSRGFGRQGKRTFMAERQYTRMEDWLTAKLAYEGLPSKTYLSKTLAQYTSKTCSNCGFTITSADYDRVLEKLKKTATGWMTTINGKELKVEGQITYYNRYKRQNVVKDLSVELDRLSEESVNNDISSWTKGRSGEALSLLKKRFSHRPVQEKFVCLNCGFETHADEQAALNIARSWLFLRSQEYKKYQTNKTTGNTDKRAFVETWQSFYRKKLKEVWKPAV

SEQ ID NO: 31032 - protein, 978 aa, synthetic construct
  REGION 1..978: note = engineered CasX variant
QEIKRLNKIRRRLVKDSNTKKAGKTGPMKTLLVRVMTPDLRERLENLRKKPENIPQPISNTSRANLNKLLTDYTEMKKAILHVYWEEFQKDPVGLMSRVAQPASKKIDQNKLKPEMDEKGNLTTAGFACSQCGQPLFVYKLEQVSEKGKAYTNYFGRCNVAEHEKLILLDQLKPEKDSDEAVTYSLGKFGQRALDFYSIHVTKESTHPVKPLAQIAGNRYASVPVGKALSDACMGTIASFLSKYQDIIIEHQKVVKGNQKRLESLRELAGKENLEYPSVTLPPQPHTKEGVDAYNEVIARVRMWVNLNLWQKLKLSRDDAKPLLRLKGFPSFPLVERQANEVDWWDMVCNVKKLINEKKEDGKVFWQNLAGYKRQEALRPYLSSEEDRKKGKKFARYQLGDLLLHLEKKHGEDWGKVYDEAWERIDKKVEGLSKHIKLEEERRSEDAQSKAALTDWLRAKASFVIEGLKEADKDEFCRCELKLQKWYGDLRGKPFAIEAENSILDISGFSKQYNCAFIWQKDGVKKLNLYLIINYFKGGKLRFKKIKPEAFEANRFYTVINKKSGEIVPMEVNFNFDDPNLIILPLAFGKRQGREFIWNDLLSLETGSLKLANGRVIEKTLYNRRTRQDEPALFVALTFERREVLDSSNIKPMNLIGVDRGENIPAVIALTDPEGCPLSRFKDSLGNPTHILRIGESYKEKQRTIQAKKEVEQRRAGGYSRKYASKAKNLADDMVRNTARDLLYYAVTQDAMLIFENLSRGFGRQGKRTFMAERQYTRMEDWLTAKLAYEGLPSKTYLSKTLAQYTSKTCSNCGFTITSADYDRVLEKLKKTATGWMTTINGKELKVEGQITYYNRYKRQNVVKDLSVELDRLSEESVNNDISSWTKGRSGEALSLLKKRFSHRPVQEKFVCLNCGFETHADEQAALNIARSWLFLRSQEYKKYQTNKTTGNTDKRAFVETWQSFYRKKLKEVWKPAV

SEQ ID NO: 31033 - protein, 978 aa, synthetic construct
  REGION 1..978: note = engineered CasX variant
QEIKRLNKIRRRLVKDSNTKKAGKTGPMKTLLVRVMTPDLRERLENLRKKPENIPQPISNTSRANLNKLLTDYTEMKKAILHVYWEEFQKDPVGLMSRVAQPASKKIDQNKLKPEMDEKGNLTTAGFACSQCGQPLFVYKLEQVSEKGKAYTNYFGRCNVAEHEKLIKLDQLKPEKDSDEAVTYSLGKFGQRALDFYSIHVTKESTHPVKPLAQIAGNRYASGPVGKALSDACMGTIASFLSKYQDIIIEHQKVVKGNQKRLESLRELAGKENLEYPSVTLPPQPHTKEGVDAYNEVIARVRMWVNLNLWQKLKLSRDDAKPLLRLKGFPSFPLVERQANEVDWWDMVCNVKKLINEKKEDGKVFWQNLAGYKRQEALRPYLSSEEDRKKGKKFARYQLGDLLLHLEKKHGEDWGKVYDEAWERIDKKVEGLSKHIKLEEERRSEDAQSKAALTDWLRAKASFVIEGLKEADKDEFCRCELKLQKWYGDLRGKPFAIEAENSILDISGFSKQYNCAFIWQKDGVKKLNLYLIINYFKGGKLRFKKIKPEAFEANRFYTVINKKSGEIVPMEVNFNFDDPNLIILPLAFGKRQGREFIWNDLLSLETGSLKLANGRVIEKTLYNRRTRQDEPALFVALTFERREVLDSSNIKPMNLIGVDRGENIPAVIALTDPEGCPLSRFKDSLGNPTHILRIGESYKEKQRTIQAKKEVEQRRAGGYSRKYASKAKNLADDMVRNTARDLLYYAVTQDAMLIFENLSRGFGRQGKRTFMAERQYTRMEDWLTAKLAYEGLPSKTYLSKTLAQYTSKTCSNCGFTITSADYDRVLEKLKKTATGWMTTINGKELKVEGQITYYNRYKRQNVVKDLSVELDRLSEESVNNDISSWTKGRSGEALSLLKKRFSHRPVQEKFVCLNCGFETHADEQAALNIARSWLFLRSQEYKKYQTNKTTGNTDKRAFVETWQSFYRKKLKEVWKPAV

SEQ ID NO: 31034 - protein, 977 aa, synthetic construct
  REGION 1..977: note = engineered CasX variant
QEIKRLNKIRRRLVKDSNTKKAGKTGPMKTLLVRVMTPDLRERLENLRKKPENIPQPISNTSRANLNKLLTDYTEMKKAILHVYWEEFQKDPVGLMSRVAQPASKKIDQNKLKPEMDEKGNLTTAGFACSQCGQPLFVYKLEQVSEKGKAYTNYFGRCNVAEHEKLILLDQLKPEKDSDEAVTYSLGKFGQRALDFYSIHVTKESTHPVKPLAQIAGNRYASPVGKALSDACMGTIASFLSKYQDIIIEHQKVVKGNQKRLESLRELAGKENLEYPSVTLPPQPHTKEGVDAYNEVIARVRMWVNLNLWQKLKLSRDDAKPLLRLKGFPSFPLVERQANEVDWWDMVCNVKKLINEKKEDGKVFWQNLAGYKRQEALRPYLSSEEDRKKGKKFARYQLGDLLLHLEKKHGEDWGKVYDEAWERIDKKVEGLSKHIKLEEERRSEDAQSKAALTDWLRAKASFVIEGLKEADKDEFCRCELKLQKWYGDLRGKPFAIEAENSILDISGFSKQYNCAFIWQKDGVKKLNLYLIINYFKGGKLRFKKIKPEAFEANRFYTVINKKSGEIVPMEVNFNFDDPNLIILPLAFGKRQGREFIWNDLLSLETGSLKLANGRVIEKTLYNRRTRQDEPALFVALTFERREVLDSSNIKPMNLIGVDRGENIPAVIALTDPEGCPLSRFKDSLGNPTHILRIGESYKEKQRTIQAKKEVEQRRAGGYSRKYASKAKNLADDMVRNTARDLLYYAVTQDAMLIFENLSRGFGRQGKRTFMAERQYTRMEDWLTAKLAYEGLPSKTYLSKTLAQYTSKTCSNCGFTITSADYDRVLEKLKKTATGWMTTINGKELKVEGQITYYNRYKRQNVVKDLSVELDRLSEESVNNDISSWTKGRSGEALSLLKKRFSHRPVQEKFVCLNCGFETHADEQAALNIARSWLFLRSQEYKKYQTNKTTGNTDKRAFVETWQSFYRKKLKEVWKPAV

SEQ ID NO: 31035 - protein, 978 aa, synthetic construct
  REGION 1..978: note = engineered CasX variant
QEIKRINKIRRRLVKDSNTKKAGKTGPMKTLLVRVMTPDLRERLENLRKKPENIPQPISNTSRANLNKLLTDYTEMKKAILHVYWEEFQKDPVGLMSRVAQPASKKIDQNKLKPEMDEKGNLTTAGFACSQCGQPLFVYKLEQVSEKGKAYTNYVGRCNVAEHEKLILLDQLKPEKDSDEAVTYSLGKFGQRALDFYSIHVTKESTHPVKPLAQIAGNRYASYPVGKALSDACMGTIASFLSKYQDIIIEHQKVVKGNQKRLESLRELAGKENLEYPSVTLPPQPHTKEGVDAYNEVIARVRMWVNLNLWQKLKLSRDDAKPLLRLKGFPSFPLVERQANEVDWWDMVCNVKKLINEKKEDGKVFWQNLAGYKRQEALRPYLSSEEDRKKGKKFARYQLGDLLLHLEKKHGEDWGKVYDEAWERIDKKVEGLSKHIKLEEERRSEDAQSKAALTDWLRAKASFVIEGLKEADKDEFCRCELKLQKWYGDLRGKPFAIEAENSILDISGFSKQYNCAFIWQKDGVKKLNLYLIINYFKGGKLRFKKIKPEAFEANRFYTVINKKSGEIVPMEVNFNFDDPNLIILPLAFGKRQGREFIWNDLLSLETGSLKLANGRVIEKTLYNRRTRQDEPALFVALTFERREVLDSSNIKPMNLIGVDRGENIPAVIALTDPEGCPLSRFKDSLGNPTHILRIGESYKEKQRTIQAKKEVEQRRAGGYSRKYASKAKNLADDMVRNTARDLLYYAVTQDAMLIFENLSRGFGRQGKRTFMAERQYTRMEDWLTAKLAYEGLPSKTYLSKTLAQYTSKTCSNCGFTITSADYDRVLEKLKKTATGWMTTINGKELKVEGQITYYNRYKRQNVVKDLSVELDRLSEESVNNDISSWTKGRSGEALSLLKKRFSHRPVQEKFVCLNCGFETHADEQAALNIARSWLFLRSQEYKKYQTNKTTGNTDKRAFVETWQSFYRKKLKEVWKPAV

SEQ ID NO: 31036 - protein, 978 aa, synthetic construct
  REGION 1..978: note = engineered CasX variant
QEIKRINKIRRRLVKDSNTKKAGKTGPMKTLLVRVMTPDLRERLENLRKKPENIPQPISNTSRANLNKLLTDYTEMKKAILHVYWEEFQKDPVGLMSRVAQPASKKIDQNKLKPEMDEKGNLTTAGFACSQCGQPLFVYKLEQVSEKGKAYTNYVGRCNVAEHEKLILLDQLKPEKDSDEAVTYSLGKFGQRALDFYSIHVTKESTHPVKPLAQIAGNRYASHPVGKALSDACMGTIASFLSKYQDIIIEHQKVVKGNQKRLESLRELAGKENLEYPSVTLPPQPHTKEGVDAYNEVIARVRMWVNLNLWQKLKLSRDDAKPLLRLKGFPSFPLVERQANEVDWWDMVCNVKKLINEKKEDGKVFWQNLAGYKRQEALRPYLSSEEDRKKGKKFARYQLGDLLLHLEKKHGEDWGKVYDEAWERIDKKVEGLSKHIKLEEERRSEDAQSKAALTDWLRAKASFVIEGLKEADKDEFCRCELKLQKWYGDLRGKPFAIEAENSILDISGFSKQYNCAFIWQKDGVKKLNLYLIINYFKGGKLRFKKIKPEAFEANRFYTVINKKSGEIVPMEVNFNFDDPNLIILPLAFGKRQGREFIWNDLLSLETGSLKLANGRVIEKTLYNRRTRQDEPALFVALTFERREVLDSSNIKPMNLIGVDRGENIPAVIALTDPEGCPLSRFKDSLGNPTHILRIGESYKEKQRTIQAKKEVEQRRAGGYSRKYASKAKNLADDMVRNTARDLLYYAVTQDAMLIFENLSRGFGRQGKRTFMAERQYTRMEDWLTAKLAYEGLPSKTYLSKTLAQYTSKTCSNCGFTITSADYDRVLEKLKKTATGWMTTINGKELKVEGQITYYNRYKRQNVVKDLSVELDRLSEESVNNDISSWTKGRSGEALSLLKKRFSHRPVQEKFVCLNCGFETHADEQAALNIARSWLFLRSQEYKKYQTNKTTGNTDKRAFVETWQSFYRKKLKEVWKPAV

SEQ ID NO: 31037 - protein, 978 aa, synthetic construct
  REGION 1..978: note = engineered CasX variant
QEIKRINKIRRRLVKDSNTKKAGKTGPMKTLLVRVMTPDLRERLENLRKKPENIPQPISNTSRANLNKLLTDYTEMKKAILHVYWEEFQKDPVGLMSRVAQPASKKIDQNKLKPEMDEKGNLTTAGFACSQCGQPLFVYKLEQVSEKGKAYTNYVGRCNVAEHEKLILLDQLKPEKDSDEAVTYSLGKFGQRALDFYSIHVTKESTHPVKPLAQIAGNRYASSPVGKALSDACMGTIASFLSKYQDIIIEHQKVVKGNQKRLESLRELAGKENLEYPSVTLPPQPHTKEGVDAYNEVIARVRMWVNLNLWQKLKLSRDDAKPLLRLKGFPSFPLVERQANEVDWWDMVCNVKKLINEKKEDGKVFWQNLAGYKRQEALRPYLSSEEDRKKGKKFARYQLGDLLLHLEKKHGEDWGKVYDEAWERIDKKVEGLSKHIKLEEERRSEDAQSKAALTDWLRAKASFVIEGLKEADKDEFCRCELKLQKWYGDLRGKPFAIEAENSILDISGFSKQYNCAFIWQKDGVKKLNLYLIINYFKGGKLRFKKIKPEAFEANRFYTVINKKSGEIVPMEVNFNFDDPNLIILPLAFGKRQGREFIWNDLLSLETGSLKLANGRVIEKTLYNRRTRQDEPALFVALTFERREVLDSSNIKPMNLIGVDRGENIPAVIALTDPEGCPLSRFKDSLGNPTHILRIGESYKEKQRTIQAKKEVEQRRAGGYSRKYASKAKNLADDMVRNTARDLLYYAVTQDAMLIFENLSRGFGRQGKRTFMAERQYTRMEDWLTAKLAYEGLPSKTYLSKTLAQYTSKTCSNCGFTITSADYDRVLEKLKKTATGWMTTINGKELKVEGQITYYNRYKRQNVVKDLSVELDRLSEESVNNDISSWTKGRSGEALSLLKKRFSHRPVQEKFVCLNCGFETHADEQAALNIARSWLFLRSQEYKKYQTNKTTGNTDKRAFVETWQSFYRKKLKEVWKPAV

SEQ ID NO: 31038 - protein, 978 aa, synthetic construct
  REGION 1..978: note = engineered CasX variant
QEIKRINKIRRRLVKDSNTKKAGKTGPMKTLLVRVMTPDLRERLENLRKKPENIPQPISNTSRANLNKLLTDYTEMKKAILHVYWEEFQKDPVGLMSRVAQPASKKIDQNKLKPEMDEKGNLTTAGFACSQCGQPLFVYKLEQVSEKGKAYTNYVGRCNVAEHEKLILLDQLKPEKDSDEAVTYSLGKFGQRALDFYSIHVTKESTHPVKPLAQIAGNRYASTPVGKALSDACMGTIASFLSKYQDIIIEHQKVVKGNQKRLESLRELAGKENLEYPSVTLPPQPHTKEGVDAYNEVIARVRMWVNLNLWQKLKLSRDDAKPLLRLKGFPSFPLVERQANEVDWWDMVCNVKKLINEKKEDGKVFWQNLAGYKRQEALRPYLSSEEDRKKGKKFARYQLGDLLLHLEKKHGEDWGKVYDEAWERIDKKVEGLSKHIKLEEERRSEDAQSKAALTDWLRAKASFVIEGLKEADKDEFCRCELKLQKWYGDLRGKPFAIEAENSILDISGFSKQYNCAFIWQKDGVKKLNLYLIINYFKGGKLRFKKIKPEAFEANRFYTVINKKSGEIVPMEVNFNFDDPNLIILPLAFGKRQGREFIWNDLLSLETGSLKLANGRVIEKTLYNRRTRQDEPALFVALTFERREVLDSSNIKPMNLIGVDRGENIPAVIALTDPEGCPLSRFKDSLGNPTHILRIGESYKEKQRTIQAKKEVEQRRAGGYSRKYASKAKNLADDMVRNTARDLLYYAVTQDAMLIFENLSRGFGRQGKRTFMAERQYTRMEDWLTAKLAYEGLPSKTYLSKTLAQYTSKTCSNCGFTITSADYDRVLEKLKKTATGWMTTINGKELKVEGQITYYNRYKRQNVVKDLSVELDRLSEESVNNDISSWTKGRSGEALSLLKKRFSHRPVQEKFVCLNCGFETHADEQAALNIARSWLFLRSQEYKKYQTNKTTGNTDKRAFVETWQSFYRKKLKEVWKPAV

SEQ ID NO: 31039 - protein, 978 aa, synthetic construct
  REGION 1..978: note = engineered CasX variant
QEIKRINKIRRRLVKDSNTKKAGKTGPMKTLLVRVMTPDLRERLENLRKKPENIPQPISNTSRANLNKLLTDYTEMKKAILHVYWEEFQKDPVGLMSRVAQPASKKIDQNKLKPEMDEKGNLTTAGFACSQCGQPLFVYKLEQVSEKGKAYTNYVGRCNVAEHEKLILLDQLKPEKDSDEAVTYSLGKFGQRALDFYSIHVTKESTHPVKPLAQIAGNRYASAPVGKALSDACMGTIASFLSKYQDIIIEHQKVVKGNQKRLESLRELAGKENLEYPSVTLPPQPHTKEGVDAYNEVIARVRMWVNLNLWQKLKLSRDDAKPLLRLKGFPSFPLVERQANEVDWWDMVCNVKKLINEKKEDGKVFWQNLAGYKRQEALRPYLSSEEDRKKGKKFARYQLGDLLLHLEKKHGEDWGKVYDEAWERIDKKVEGLSKHIKLEEERRSEDAQSKAALTDWLRAKASFVIEGLKEADKDEFCRCELKLQKWYGDLRGKPFAIEAENSILDISGFSKQYNCAFIWQKDGVKKLNLYLIINYFKGGKLRFKKIKPEAFEANRFYTVINKKSGEIVPMEVNFNFDDPNLIILPLAFGKRQGREFIWNDLLSLETGSLKLANGRVIEKTLYNRRTRQDEPALFVALTFERREVLDSSNIKPMNLIGVDRGENIPAVIALTDPEGCPLSRFKDSLGNPTHILRIGESYKEKQRTIQAKKEVEQRRAGGYSRKYASKAKNLADDMVRNTARDLLYYAVTQDAMLIFENLSRGFGRQGKRTFMAERQYTRMEDWLTAKLAYEGLPSKTYLSKTLAQYTSKTCSNCGFTITSADYDRVLEKLKKTATGWMTTINGKELKVEGQITYYNRYKRQNVVKDLSVELDRLSEESVNNDISSWTKGRSGEALSLLKKRFSHRPVQEKFVCLNCGFETHADEQAALNIARSWLFLRSQEYKKYQTNKTTGNTDKRAFVETWQSFYRKKLKEVWKPAV

SEQ ID NO: 31040 - protein, 978 aa, synthetic construct
  REGION 1..978: note = engineered CasX variant
QEIKRINKIRRRLVKDSNTKKAGKTGPMKTLLVRVMTPDLRERLENLRKKPENIPQPISNTSRANLNKLLTDYTEMKKAILHVYWEEFQKDPVGLMSRVAQPASKKIDQNKLKPEMDEKGNLTTAGFACSQCGQPLFVYKLEQVSEKGKAYTNYVGRCNVAEHEKLILLDQLKPEKDSDEAVTYSLGKFGQRALDFYSIHVTKESTHPVKPLAQIAGNRYASVPVGKALSDACMGTIASFLSKYQDIIIEHQKVVKGNQKRLESLRELAGKENLEYPSVTLPPQPHTKEGVDAYNEVIARVRMWVNLNLWQKLKLSRDDAKPLLRLKGFPSFPLVERQANEVDWWDMVCNVKKLINEKKEDGKVFWQNLAGYKRQEALRPYLSSEEDRKKGKKFARYQLGDLLLHLEKKHGEDWGKVYDEAWERIDKKVEGLSKHIKLEEERRSEDAQSKAALTDWLRAKASFVIEGLKEADKDEFCRCELKLQKWYGDLRGKPFAIEAENSILDISGFSKQYNCAFIWQKDGVKKLNLYLIINYFKGGKLRFKKIKPEAFEANRFYTVINKKSGEIVPMEVNFNFDDPNLIILPLAFGKRQGREFIWNDLLSLETGSLKLANGRVIEKTLYNRRTRQDEPALFVALTFERREVLDSSNIKPMNLIGVDRGENIPAVIALTDPEGCPLSRFKDSLGNPTHILRIGESYKEKQRTIQAKKEVEQRRAGGYSRKYASKAKNLADDMVRNTARDLLYYAVTQDAMLIFENLSRGFGRQGKRTFMAERQYTRMEDWLTAKLAYEGLPSKTYLSKTLAQYTSKTCSNCGFTITSADYDRVLEKLKKTATGWMTTINGKELKVEGQITYYNRYKRQNVVKDLSVELDRLSEESVNNDISSWTKGRSGEALSLLKKRFSHRPVQEKFVCLNCGFETHADEQAALNIARSWLFLRSQEYKKYQTNKTTGNTDKRAFVETWQSFYRKKLKEVWKPAV

SEQ ID NO: 31041 - protein, 978 aa, synthetic construct
  REGION 1..978: note = engineered CasX variant
QEIKRINKIRRRLVKDSNTKKAGKTGPMKTLLVRVMTPDLRERLENLRKKPENIPQPISNTSRANLNKLLTDYTEMKKAILHVYWEEFQKDPVGLMSRVAQPASKKIDQNKLKPEMDEKGNLTTAGFACSQCGQPLFVYKLEQVSEKGKAYTNYVGRCNVAEHEKLIKLDQLKPEKDSDEAVTYSLGKFGQRALDFYSIHVTKESTHPVKPLAQIAGNRYASGPVGKALSDACMGTIASFLSKYQDIIIEHQKVVKGNQKRLESLRELAGKENLEYPSVTLPPQPHTKEGVDAYNEVIARVRMWVNLNLWQKLKLSRDDAKPLLRLKGFPSFPLVERQANEVDWWDMVCNVKKLINEKKEDGKVFWQNLAGYKRQEALRPYLSSEEDRKKGKKFARYQLGDLLLHLEKKHGEDWGKVYDEAWERIDKKVEGLSKHIKLEEERRSEDAQSKAALTDWLRAKASFVIEGLKEADKDEFCRCELKLQKWYGDLRGKPFAIEAENSILDISGFSKQYNCAFIWQKDGVKKLNLYLIINYFKGGKLRFKKIKPEAFEANRFYTVINKKSGEIVPMEVNFNFDDPNLIILPLAFGKRQGREFIWNDLLSLETGSLKLANGRVIEKTLYNRRTRQDEPALFVALTFERREVLDSSNIKPMNLIGVDRGENIPAVIALTDPEGCPLSRFKDSLGNPTHILRIGESYKEKQRTIQAKKEVEQRRAGGYSRKYASKAKNLADDMVRNTARDLLYYAVTQDAMLIFENLSRGFGRQGKRTFMAERQYTRMEDWLTAKLAYEGLPSKTYLSKTLAQYTSKTCSNCGFTITSADYDRVLEKLKKTATGWMTTINGKELKVEGQITYYNRYKRQNVVKDLSVELDRLSEESVNNDISSWTKGRSGEALSLLKKRFSHRPVQEKFVCLNCGFETHADEQAALNIARSWLFLRSQEYKKYQTNKTTGNTDKRAFVETWQSFYRKKLKEVWKPAV

SEQ ID NO: 31042 - protein, 977 aa, synthetic construct
  REGION 1..977: note = engineered CasX variant
QEIKRINKIRRRLVKDSNTKKAGKTGPMKTLLVRVMTPDLRERLENLRKKPENIPQPISNTSRANLNKLLTDYTEMKKAILHVYWEEFQKDPVGLMSRVAQPASKKIDQNKLKPEMDEKGNLTTAGFACSQCGQPLFVYKLEQVSEKGKAYTNYVGRCNVAEHEKLILLDQLKPEKDSDEAVTYSLGKFGQRALDFYSIHVTKESTHPVKPLAQIAGNRYASPVGKALSDACMGTIASFLSKYQDIIIEHQKVVKGNQKRLESLRELAGKENLEYPSVTLPPQPHTKEGVDAYNEVIARVRMWVNLNLWQKLKLSRDDAKPLLRLKGFPSFPLVERQANEVDWWDMVCNVKKLINEKKEDGKVFWQNLAGYKRQEALRPYLSSEEDRKKGKKFARYQLGDLLLHLEKKHGEDWGKVYDEAWERIDKKVEGLSKHIKLEEERRSEDAQSKAALTDWLRAKASFVIEGLKEADKDEFCRCELKLQKWYGDLRGKPFAIEAENSILDISGFSKQYNCAFIWQKDGVKKLNLYLIINYFKGGKLRFKKIKPEAFEANRFYTVINKKSGEIVPMEVNFNFDDPNLIILPLAFGKRQGREFIWNDLLSLETGSLKLANGRVIEKTLYNRRTRQDEPALFVALTFERREVLDSSNIKPMNLIGVDRGENIPAVIALTDPEGCPLSRFKDSLGNPTHILRIGESYKEKQRTIQAKKEVEQRRAGGYSRKYASKAKNLADDMVRNTARDLLYYAVTQDAMLIFENLSRGFGRQGKRTFMAERQYTRMEDWLTAKLAYEGLPSKTYLSKTLAQYTSKTCSNCGFTITSADYDRVLEKLKKTATGWMTTINGKELKVEGQITYYNRYKRQNVVKDLSVELDRLSEESVNNDISSWTKGRSGEALSLLKKRFSHRPVQEKFVCLNCGFETHADEQAALNIARSWLFLRSQEYKKYQTNKTTGNTDKRAFVETWQSFYRKKLKEVWKPAV

SEQ ID NO: 31043 - protein, 978 aa, synthetic construct
  REGION 1..978: note = engineered CasX variant
QEIKRINKIRRRLVKDSNTKKAGKTGPMKTLLVRVMTPDLRERLENLRKKPENIPQPISNTSRANLNKLLTDYTEMKKAILHVYWEEFQKDPVGLMSRVAQPASKKIDQNKLKPEMDEKGNLTTAGFACSQCGQPLFVYKLEQVSEKGKAYTNYFGRCNVAEHEKLILLDQLKPEKDSDEAVTYSLGKFGQRALDFYSIHVTKESTHPVKPLAQIAGNRYASYPVGKALSDACMGTIASFLSKYQDIIIEHQKVVKGNQKRLESLRELAGKENLEYPSVTLPPQPHTKEGVDAYNEVIARVRMWVNLNLWQKLKLSRDDAKPLLRLKGFPSFPLVERQANEVDWWDMVCNVKKLINEKKEDGKVFWQNLAGYKRQEALRPYLSSEEDRKKGKKFARYQLGDLLLHLEKKHGEDWGKVYDEAWERIDKKVEGLSKHIKLEEERRSEDAQSKAALTDWLRAKASFVIEGLKEADKDEFCRCELKLQKWYGDLRGKPFAIEAENSILDISGFSKQYNCAFIWQKDGVKKLNLYLIINYFKGGKLRFKKIKPEAFEANRFYTVINKKSGEIVPMEVNFNFDDPNLIILPLAFGKRQGREFIWNDLLSLETGSLKLANGRVIEKTLYNRRTRQDEPALFVALTFERREVLDSSNIKPMNLIGVDRGENIPAVIALTDPEGCPLSRFKDSLGNPTHILRIGESYKEKQRTIQAKKEVEQRRAGGYSRKYASKAKNLADDMVRNTARDLLYYAVTQDAMLIFENLSRGFGRQGKRTFMAERQYTRMEDWLTAKLAYEGLASKTYLSKTLAQYTSKTCSNCGFTITSADYDRVLEKLKKTATGWMTTINGKELKVEGQITYYNRYKRQNVVKDLSVELDRLSEESVNNDISSWTKGRSGEALSLLKKRFSHRPVQEKFVCLNCGFETHADEQAALNIARSWLFLRSQEYKKYQTNKTTGNTDKRAFVETWQSFYRKKLKEVWKPAV

SEQ ID NO: 31044 - protein, 978 aa, synthetic construct
  REGION 1..978: note = engineered CasX variant
QEIKRINKIRRRLVKDSNTKKAGKTGPMKTLLVRVMTPDLRERLENLRKKPENIPQPISNTSRANLNKLLTDYTEMKKAILHVYWEEFQKDPVGLMSRVAQPASKKIDQNKLKPEMDEKGNLTTAGFACSQCGQPLFVYKLEQVSEKGKAYTNYFGRCNVAEHEKLILLDQLKPEKDSDEAVTYSLGKFGQRALDFYSIHVTKESTHPVKPLAQIAGNRYASHPVGKALSDACMGTIASFLSKYQDIIIEHQKVVKGNQKRLESLRELAGKENLEYPSVTLPPQPHTKEGVDAYNEVIARVRMWVNLNLWQKLKLSRDDAKPLLRLKGFPSFPLVERQANEVDWWDMVCNVKKLINEKKEDGKVFWQNLAGYKRQEALRPYLSSEEDRKKGKKFARYQLGDLLLHLEKKHGEDWGKVYDEAWERIDKKVEGLSKHIKLEEERRSEDAQSKAALTDWLRAKASFVIEGLKEADKDEFCRCELKLQKWYGDLRGKPFAIEAENSILDISGFSKQYNCAFIWQKDGVKKLNLYLIINYFKGGKLRFKKIKPEAFEANRFYTVINKKSGEIVPMEVNFNFDDPNLIILPLAFGKRQGREFIWNDLLSLETGSLKLANGRVIEKTLYNRRTRQDEPALFVALTFERREVLDSSNIKPMNLIGVDRGENIPAVIALTDPEGCPLSRFKDSLGNPTHILRIGESYKEKQRTIQAKKEVEQRRAGGYSRKYASKAKNLADDMVRNTARDLLYYAVTQDAMLIFENLSRGFGRQGKRTFMAERQYTRMEDWLTAKLAYEGLASKTYLSKTLAQYTSKTCSNCGFTITSADYDRVLEKLKKTATGWMTTINGKELKVEGQITYYNRYKRQNVVKDLSVELDRLSEESVNNDISSWTKGRSGEALSLLKKRFSHRPVQEKFVCLNCGFETHADEQAALNIARSWLFLRSQEYKKYQTNKTTGNTDKRAFVETWQSFYRKKLKEVWKPAV

SEQ ID NO: 31045 - protein, 978 aa, synthetic construct
  REGION 1..978: note = engineered CasX variant
QEIKRINKIRRRLVKDSNTKKAGKTGPMKTLLVRVMTPDLRERLENLRKKPENIPQPISNTSRANLNKLLTDYTEMKKAILHVYWEEFQKDPVGLMSRVAQPASKKIDQNKLKPEMDEKGNLTTAGFACSQCGQPLFVYKLEQVSEKGKAYTNYFGRCNVAEHEKLILLDQLKPEKDSDEAVTYSLGKFGQRALDFYSIHVTKESTHPVKPLAQIAGNRYASSPVGKALSDACMGTIASFLSKYQDIIIEHQKVVKGNQKRLESLRELAGKENLEYPSVTLPPQPHTKEGVDAYNEVIARVRMWVNLNLWQKLKLSRDDAKPLLRLKGFPSFPLVERQANEVDWWDMVCNVKKLINEKKEDGKVFWQNLAGYKRQEALRPYLSSEEDRKKGKKFARYQLGDLLLHLEKKHGEDWGKVYDEAWERIDKKVEGLSKHIKLEEERRSEDAQSKAALTDWLRAKASFVIEGLKEADKDEFCRCELKLQKWYGDLRGKPFAIEAENSILDISGFSKQYNCAFIWQKDGVKKLNLYLIINYFKGGKLRFKKIKPEAFEANRFYTVINKKSGEIVPMEVNFNFDDPNLIILPLAFGKRQGREFIWNDLLSLETGSLKLANGRVIEKTLYNRRTRQDEPALFVALTFERREVLDSSNIKPMNLIGVDRGENIPAVIALTDPEGCPLSRFKDSLGNPTHILRIGESYKEKQRTIQAKKEVEQRRAGGYSRKYASKAKNLADDMVRNTARDLLYYAVTQDAMLIFENLSRGFGRQGKRTFMAERQYTRMEDWLTAKLAYEGLASKTYLSKTLAQYTSKTCSNCGFTITSADYDRVLEKLKKTATGWMTTINGKELKVEGQITYYNRYKRQNVVKDLSVELDRLSEESVNNDISSWTKGRSGEALSLLKKRFSHRPVQEKFVCLNCGFETHADEQAALNIARSWLFLRSQEYKKYQTNKTTGNTDKRAFVETWQSFYRKKLKEVWKPAV

SEQ ID NO: 31046 - protein, 978 aa, synthetic construct
  REGION 1..978: note = engineered CasX variant
QEIKRINKIRRRLVKDSNTKKAGKTGPMKTLLVRVMTPDLRERLENLRKKPENIPQPISNTSRANLNKLLTDYTEMKKAILHVYWEEFQKDPVGLMSRVAQPASKKIDQNKLKPEMDEKGNLTTAGFACSQCGQPLFVYKLEQVSEKGKAYTNYFGRCNVAEHEKLILLDQLKPEKDSDEAVTYSLGKFGQRALDFYSIHVTKESTHPVKPLAQIAGNRYASTPVGKALSDACMGTIASFLSKYQDIIIEHQKVVKGNQKRLESLRELAGKENLEYPSVTLPPQPHTKEGVDAYNEVIARVRMWVNLNLWQKLKLSRDDAKPLLRLKGFPSFPLVERQANEVDWWDMVCNVKKLINEKKEDGKVFWQNLAGYKRQEALRPYLSSEEDRKKGKKFARYQLGDLLLHLEKKHGEDWGKVYDEAWERIDKKVEGLSKHIKLEEERRSEDAQSKAALTDWLRAKASFVIEGLKEADKDEFCRCELKLQKWYGDLRGKPFAIEAENSILDISGFSKQYNCAFIWQKDGVKKLNLYLIINYFKGGKLRFKKIKPEAFEANRFYTVINKKSGEIVPMEVNFNFDDPNLIILPLAFGKRQGREFIWNDLLSLETGSLKLANGRVIEKTLYNRRTRQDEPALFVALTFERREVLDSSNIKPMNLIGVDRGENIPAVIALTDPEGCPLSRFKDSLGNPTHILRIGESYKEKQRTIQAKKEVEQRRAGGYSRKYASKAKNLADDMVRNTARDLLYYAVTQDAMLIFENLSRGFGRQGKRTFMAERQYTRMEDWLTAKLAYEGLASKTYLSKTLAQYTSKTCSNCGFTITSADYDRVLEKLKKTATGWMTTINGKELKVEGQITYYNRYKRQNVVKDLSVELDRLSEESVNNDISSWTKGRSGEALSLLKKRFSHRPVQEKFVCLNCGFETHADEQAALNIARSWLFLRSQEYKKYQTNKTTGNTDKRAFVETWQSFYRKKLKEVWKPAV

SEQ ID NO: 31047 - protein, 978 aa, synthetic construct
  REGION 1..978: note = engineered CasX variant
QEIKRINKIRRRLVKDSNTKKAGKTGPMKTLLVRVMTPDLRERLENLRKKPENIPQPISNTSRANLNKLLTDYTEMKKAILHVYWEEFQKDPVGLMSRVAQPASKKIDQNKLKPEMDEKGNLTTAGFACSQCGQPLFVYKLEQVSEKGKAYTNYFGRCNVAEHEKLILLDQLKPEKDSDEAVTYSLGKFGQRALDFYSIHVTKESTHPVKPLAQIAGNRYASAPVGKALSDACMGTIASFLSKYQDIIIEHQKVVKGNQKRLESLRELAGKENLEYPSVTLPPQPHTKEGVDAYNEVIARVRMWVNLNLWQKLKLSRDDAKPLLRLKGFPSFPLVERQANEVDWWDMVCNVKKLINEKKEDGKVFWQNLAGYKRQEALRPYLSSEEDRKKGKKFARYQLGDLLLHLEKKHGEDWGKVYDEAWERIDKKVEGLSKHIKLEEERRSEDAQSKAALTDWLRAKASFVIEGLKEADKDEFCRCELKLQKWYGDLRGKPFAIEAENSILDISGFSKQYNCAFIWQKDGVKKLNLYLIINYFKGGKLRFKKIKPEAFEANRFYTVINKKSGEIVPMEVNFNFDDPNLIILPLAFGKRQGREFIWNDLLSLETGSLKLANGRVIEKTLYNRRTRQDEPALFVALTFERREVLDSSNIKPMNLIGVDRGENIPAVIALTDPEGCPLSRFKDSLGNPTHILRIGESYKEKQRTIQAKKEVEQRRAGGYSRKYASKAKNLADDMVRNTARDLLYYAVTQDAMLIFENLSRGFGRQGKRTFMAERQYTRMEDWLTAKLAYEGLASKTYLSKTLAQYTSKTCSNCGFTITSADYDRVLEKLKKTATGWMTTINGKELKVEGQITYYNRYKRQNVVKDLSVELDRLSEESVNNDISSWTKGRSGEALSLLKKRFSHRPVQEKFVCLNCGFETHADEQAALNIARSWLFLRSQEYKKYQTNKTTGNTDKRAFVETWQSFYRKKLKEVWKPAV

SEQ ID NO: 31048 - protein, 978 aa, synthetic construct
  REGION 1..978: note = engineered CasX variant
QEIKRINKIRRRLVKDSNTKKAGKTGPMKTLLVRVMTPDLRERLENLRKKPENIPQPISNTSRANLNKLLTDYTEMKKAILHVYWEEFQKDPVGLMSRVAQPASKKIDQNKLKPEMDEKGNLTTAGFACSQCGQPLFVYKLEQVSEKGKAYTNYFGRCNVAEHEKLILLDQLKPEKDSDEAVTYSLGKFGQRALDFYSIHVTKESTHPVKPLAQIAGNRYASVPVGKALSDACMGTIASFLSKYQDIIIEHQKVVKGNQKRLESLRELAGKENLEYPSVTLPPQPHTKEGVDAYNEVIARVRMWVNLNLWQKLKLSRDDAKPLLRLKGFPSFPLVERQANEVDWWDMVCNVKKLINEKKEDGKVFWQNLAGYKRQEALRPYLSSEEDRKKGKKFARYQLGDLLLHLEKKHGEDWGKVYDEAWERIDKKVEGLSKHIKLEEERRSEDAQSKAALTDWLRAKASFVIEGLKEADKDEFCRCELKLQKWYGDLRGKPFAIEAENSILDISGFSKQYNCAFIWQKDGVKKLNLYLIINYFKGGKLRFKKIKPEAFEANRFYTVINKKSGEIVPMEVNFNFDDPNLIILPLAFGKRQGREFIWNDLLSLETGSLKLANGRVIEKTLYNRRTRQDEPALFVALTFERREVLDSSNIKPMNLIGVDRGENIPAVIALTDPEGCPLSRFKDSLGNPTHILRIGESYKEKQRTIQAKKEVEQRRAGGYSRKYASKAKNLADDMVRNTARDLLYYAVTQDAMLIFENLSRGFGRQGKRTFMAERQYTRMEDWLTAKLAYEGLASKTYLSKTLAQYTSKTCSNCGFTITSADYDRVLEKLKKTATGWMTTINGKELKVEGQITYYNRYKRQNVVKDLSVELDRLSEESVNNDISSWTKGRSGEALSLLKKRFSHRPVQEKFVCLNCGFETHADEQAALNIARSWLFLRSQEYKKYQTNKTTGNTDKRAFVETWQSFYRKKLKEVWKPAV

SEQ ID NO: 31049 - protein, 978 aa, synthetic construct
  REGION 1..978: note = engineered CasX variant
QEIKRINKIRRRLVKDSNTKKAGKTGPMKTLLVRVMTPDLRERLENLRKKPENIPQPISNTSRANLNKLLTDYTEMKKAILHVYWEEFQKDPVGLMSRVAQPASKKIDQNKLKPEMDEKGNLTTAGFACSQCGQPLFVYKLEQVSEKGKAYTNYFGRCNVAEHEKLIKLDQLKPEKDSDEAVTYSLGKFGQRALDFYSIHVTKESTHPVKPLAQIAGNRYASGPVGKALSDACMGTIASFLSKYQDIIIEHQKVVKGNQKRLESLRELAGKENLEYPSVTLPPQPHTKEGVDAYNEVIARVRMWVNLNLWQKLKLSRDDAKPLLRLKGFPSFPLVERQANEVDWWDMVCNVKKLINEKKEDGKVFWQNLAGYKRQEALRPYLSSEEDRKKGKKFARYQLGDLLLHLEKKHGEDWGKVYDEAWERIDKKVEGLSKHIKLEEERRSEDAQSKAALTDWLRAKASFVIEGLKEADKDEFCRCELKLQKWYGDLRGKPFAIEAENSILDISGFSKQYNCAFIWQKDGVKKLNLYLIINYFKGGKLRFKKIKPEAFEANRFYTVINKKSGEIVPMEVNFNFDDPNLIILPLAFGKRQGREFIWNDLLSLETGSLKLANGRVIEKTLYNRRTRQDEPALFVALTFERREVLDSSNIKPMNLIGVDRGENIPAVIALTDPEGCPLSRFKDSLGNPTHILRIGESYKEKQRTIQAKKEVEQRRAGGYSRKYASKAKNLADDMVRNTARDLLYYAVTQDAMLIFENLSRGFGRQGKRTFMAERQYTRMEDWLTAKLAYEGLASKTYLSKTLAQYTSKTCSNCGFTITSADYDRVLEKLKKTATGWMTTINGKELKVEGQITYYNRYKRQNVVKDLSVELDRLSEESVNNDISSWTKGRSGEALSLLKKRFSHRPVQEKFVCLNCGFETHADEQAALNIARSWLFLRSQEYKKYQTNKTTGNTDKRAFVETWQSFYRKKLKEVWKPAV

SEQ ID NO: 31050 - protein, 977 aa, synthetic construct
  REGION 1..977: note = engineered CasX variant
QEIKRINKIRRRLVKDSNTKKAGKTGPMKTLLVRVMTPDLRERLENLRKKPENIPQPISNTSRANLNKLLTDYTEMKKAILHVYWEEFQKDPVGLMSRVAQPASKKIDQNKLKPEMDEKGNLTTAGFACSQCGQPLFVYKLEQVSEKGKAYTNYFGRCNVAEHEKLILLDQLKPEKDSDEAVTYSLGKFGQRALDFYSIHVTKESTHPVKPLAQIAGNRYASPVGKALSDACMGTIASFLSKYQDIIIEHQKVVKGNQKRLESLRELAGKENLEYPSVTLPPQPHTKEGVDAYNEVIARVRMWVNLNLWQKLKLSRDDAKPLLRLKGFPSFPLVERQANEVDWWDMVCNVKKLINEKKEDGKVFWQNLAGYKRQEALRPYLSSEEDRKKGKKFARYQLGDLLLHLEKKHGEDWGKVYDEAWERIDKKVEGLSKHIKLEEERRSEDAQSKAALTDWLRAKASFVIEGLKEADKDEFCRCELKLQKWYGDLRGKPFAIEAENSILDISGFSKQYNCAFIWQKDGVKKLNLYLIINYFKGGKLRFKKIKPEAFEANRFYTVINKKSGEIVPMEVNFNFDDPNLIILPLAFGKRQGREFIWNDLLSLETGSLKLANGRVIEKTLYNRRTRQDEPALFVALTFERREVLDSSNIKPMNLIGVDRGENIPAVIALTDPEGCPLSRFKDSLGNPTHILRIGESYKEKQRTIQAKKEVEQRRAGGYSRKYASKAKNLADDMVRNTARDLLYYAVTQDAMLIFENLSRGFGRQGKRTFMAERQYTRMEDWLTAKLAYEGLASKTYLSKTLAQYTSKTCSNCGFTITSADYDRVLEKLKKTATGWMTTINGKELKVEGQITYYNRYKRQNVVKDLSVELDRLSEESVNNDISSWTKGRSGEALSLLKKRFSHRPVQEKFVCLNCGFETHADEQAALNIARSWLFLRSQEYKKYQTNKTTGNTDKRAFVETWQSFYRKKLKEVWKPAV

SEQ ID NO: 31051 - protein, 978 aa, synthetic construct
  REGION 1..978: note = engineered CasX variant
QEIKRINKIRRRLVKDSNTKKAGKTGPMKTLLVRVMTPDLRERLENLRKKPENIPQPISNTSRANLNKLLTDYTEMKKAILHVYWEEFQKDPVGLMSRVAQPASKKIDQNKLKPEMDEKGNLTTAGFACSQCGQPLFVYKLEQVSEKGKAYTNYFGRCNVAEHEKLILLDQLKPEKDSDEAVTYSLGKFGQRALDFYSIHVTKESTHPVKPLAQIAGNRYASYPVGKALSDACMGTIASFLSKYQDIIIEHQKVVKGNQKRLESLRELAGKENLEYPSVTLPPQPHTKEGVDAYNEVIARVRMWVNLNLWQKLKLSRDDAKPLLRLKGFPSFPLVERQANEVDWWDMVCNVKKLINEKKEDGKVFWQNLAGYKRQEALRPYLSSEEDRKKGKKFARYQLGDLLLHLEKKHGEDWGKVYDEAWERIDKKVEGLSKHIKLEEERRSEDAQSKAALTDWLRAKASFVIEGLKEADKDEFCRCELKLQKWYGDLRGKPFAIEAENSILDISGFSKQYNCAFIWQKDGVKKLNLYLIINYFKGGKLRFKKIKPEAFEANRFYTVINKKSGEIVPMEVNFNFDDPNLIILPLAFGKRQGREFIWNDLLSLETGSLKLANGRVIEKTLYNRRTRQDEPALFVALTFERREVLDSSNIKPMNLIGVDRGENIPAVIALTDPEGCPLSRFKDSLGNPTHILRIGESYKEKQRTIQAKKEVEQRRAGGYSRKYASKAKNLADDMVRNTARDLLYYAVTQDAMLIFENLSRGFGRQGKRTFMAERQYTRMEDWLTAKLAYEGLPSKVYLSKTLAQYTSKTCSNCGFTITSADYDRVLEKLKKTATGWMTTINGKELKVEGQITYYNRYKRQNVVKDLSVELDRLSEESVNNDISSWTKGRSGEALSLLKKRFSHRPVQEKFVCLNCGFETHADEQAALNIARSWLFLRSQEYKKYQTNKTTGNTDKRAFVETWQSFYRKKLKEVWKPAV

SEQ ID NO: 31052 - protein, 978 aa, synthetic construct
  REGION 1..978: note = engineered CasX variant
QEIKRINKIRRRLVKDSNTKKAGKTGPMKTLLVRVMTPDLRERLENLRKKPENIPQPISNTSRANLNKLLTDYTEMKKAILHVYWEEFQKDPVGLMSRVAQPASKKIDQNKLKPEMDEKGNLTTAGFACSQCGQPLFVYKLEQVSEKGKAYTNYFGRCNVAEHEKLILLDQLKPEKDSDEAVTYSLGKFGQRALDFYSIHVTKESTHPVKPLAQIAGNRYASHPVGKALSDACMGTIASFLSKYQDIIIEHQKVVKGNQKRLESLRELAGKENLEYPSVTLPPQPHTKEGVDAYNEVIARVRMWVNLNLWQKLKLSRDDAKPLLRLKGFPSFPLVERQANEVDWWDMVCNVKKLINEKKEDGKVFWQNLAGYKRQEALRPYLSSEEDRKKGKKFARYQLGDLLLHLEKKHGEDWGKVYDEAWERIDKKVEGLSKHIKLEEERRSEDAQSKAALTDWLRAKASFVIEGLKEADKDEFCRCELKLQKWYGDLRGKPFAIEAENSILDISGFSKQYNCAFIWQKDGVKKLNLYLIINYFKGGKLRFKKIKPEAFEANRFYTVINKKSGEIVPMEVNFNFDDPNLIILPLAFGKRQGREFIWNDLLSLETGSLKLANGRVIEKTLYNRRTRQDEPALFVALTFERREVLDSSNIKPMNLIGVDRGENIPAVIALTDPEGCPLSRFKDSLGNPTHILRIGESYKEKQRTIQAKKEVEQRRAGGYSRKYASKAKNLADDMVRNTARDLLYYAVTQDAMLIFENLSRGFGRQGKRTFMAERQYTRMEDWLTAKLAYEGLPSKVYLSKTLAQYTSKTCSNCGFTITSADYDRVLEKLKKTATGWMTTINGKELKVEGQITYYNRYKRQNVVKDLSVELDRLSEESVNNDISSWTKGRSGEALSLLKKRFSHRPVQEKFVCLNCGFETHADEQAALNIARSWLFLRSQEYKKYQTNKTTGNTDKRAFVETWQSFYRKKLKEVWKPAV

SEQ ID NO: 31053 - protein, 978 aa, synthetic construct
  REGION 1..978: note = engineered CasX variant
QEIKRINKIRRRLVKDSNTKKAGKTGPMKTLLVRVMTPDLRERLENLRKKPENIPQPISNTSRANLNKLLTDYTEMKKAILHVYWEEFQKDPVGLMSRVAQPASKKIDQNKLKPEMDEKGNLTTAGFACSQCGQPLFVYKLEQVSEKGKAYTNYFGRCNVAEHEKLILLDQLKPEKDSDEAVTYSLGKFGQRALDFYSIHVTKESTHPVKPLAQIAGNRYASSPVGKALSDACMGTIASFLSKYQDIIIEHQKVVKGNQKRLESLRELAGKENLEYPSVTLPPQPHTKEGVDAYNEVIARVRMWVNLNLWQKLKLSRDDAKPLLRLKGFPSFPLVERQANEVDWWDMVCNVKKLINEKKEDGKVFWQNLAGYKRQEALRPYLSSEEDRKKGKKFARYQLGDLLLHLEKKHGEDWGKVYDEAWERIDKKVEGLSKHIKLEEERRSEDAQSKAALTDWLRAKASFVIEGLKEADKDEFCRCELKLQKWYGDLRGKPFAIEAENSILDISGFSKQYNCAFIWQKDGVKKLNLYLIINYFKGGKLRFKKIKPEAFEANRFYTVINKKSGEIVPMEVNFNFDDPNLIILPLAFGKRQGREFIWNDLLSLETGSLKLANGRVIEKTLYNRRTRQDEPALFVALTFERREVLDSSNIKPMNLIGVDRGENIPAVIALTDPEGCPLSRFKDSLGNPTHILRIGESYKEKQRTIQAKKEVEQRRAGGYSRKYASKAKNLADDMVRNTARDLLYYAVTQDAMLIFENLSRGFGRQGKRTFMAERQYTRMEDWLTAKLAYEGLPSKVYLSKTLAQYTSKTCSNCGFTITSADYDRVLEKLKKTATGWMTTINGKELKVEGQITYYNRYKRQNVVKDLSVELDRLSEESVNNDISSWTKGRSGEALSLLKKRFSHRPVQEKFVCLNCGFETHADEQAALNIARSWLFLRSQEYKKYQTNKTTGNTDKRAFVETWQSFYRKKLKEVWKPAV

SEQ ID NO: 31054 - protein, 978 aa, synthetic construct
  REGION 1..978: note = engineered CasX variant
QEIKRINKIRRRLVKDSNTKKAGKTGPMKTLLVRVMTPDLRERLENLRKKPENIPQPISNTSRANLNKLLTDYTEMKKAILHVYWEEFQKDPVGLMSRVAQPASKKIDQNKLKPEMDEKGNLTTAGFACSQCGQPLFVYKLEQVSEKGKAYTNYFGRCNVAEHEKLILLDQLKPEKDSDEAVTYSLGKFGQRALDFYSIHVTKESTHPVKPLAQIAGNRYASTPVGKALSDACMGTIASFLSKYQDIIIEHQKVVKGNQKRLESLRELAGKENLEYPSVTLPPQPHTKEGVDAYNEVIARVRMWVNLNLWQKLKLSRDDAKPLLRLKGFPSFPLVERQANEVDWWDMVCNVKKLINEKKEDGKVFWQNLAGYKRQEALRPYLSSEEDRKKGKKFARYQLGDLLLHLEKKHGEDWGKVYDEAWERIDKKVEGLSKHIKLEEERRSEDAQSKAALTDWLRAKASFVIEGLKEADKDEFCRCELKLQKWYGDLRGKPFAIEAENSILDISGFSKQYNCAFIWQKDGVKKLNLYLIINYFKGGKLRFKKIKPEAFEANRFYTVINKKSGEIVPMEVNFNFDDPNLIILPLAFGKRQGREFIWNDLLSLETGSLKLANGRVIEKTLYNRRTRQDEPALFVALTFERREVLDSSNIKPMNLIGVDRGENIPAVIALTDPEGCPLSRFKDSLGNPTHILRIGESYKEKQRTIQAKKEVEQRRAGGYSRKYASKAKNLADDMVRNTARDLLYYAVTQDAMLIFENLSRGFGRQGKRTFMAERQYTRMEDWLTAKLAYEGLPSKVYLSKTLAQYTSKTCSNCGFTITSADYDRVLEKLKKTATGWMTTINGKELKVEGQITYYNRYKRQNVVKDLSVELDRLSEESVNNDISSWTKGRSGEALSLLKKRFSHRPVQEKFVCLNCGFETHADEQAALNIARSWLFLRSQEYKKYQTNKTTGNTDKRAFVETWQSFYRKKLKEVWKPAV

SEQ ID NO: 31055 - protein, 978 aa, synthetic construct
  REGION 1..978: note = engineered CasX variant
QEIKRINKIRRRLVKDSNTKKAGKTGPMKTLLVRVMTPDLRERLENLRKKPENIPQPISNTSRANLNKLLTDYTEMKKAILHVYWEEFQKDPVGLMSRVAQPASKKIDQNKLKPEMDEKGNLTTAGFACSQCGQPLFVYKLEQVSEKGKAYTNYFGRCNVAEHEKLILLDQLKPEKDSDEAVTYSLGKFGQRALDFYSIHVTKESTHPVKPLAQIAGNRYASAPVGKALSDACMGTIASFLSKYQDIIIEHQKVVKGNQKRLESLRELAGKENLEYPSVTLPPQPHTKEGVDAYNEVIARVRMWVNLNLWQKLKLSRDDAKPLLRLKGFPSFPLVERQANEVDWWDMVCNVKKLINEKKEDGKVFWQNLAGYKRQEALRPYLSSEEDRKKGKKFARYQLGDLLLHLEKKHGEDWGKVYDEAWERIDKKVEGLSKHIKLEEERRSEDAQSKAALTDWLRAKASFVIEGLKEADKDEFCRCELKLQKWYGDLRGKPFAIEAENSILDISGFSKQYNCAFIWQKDGVKKLNLYLIINYFKGGKLRFKKIKPEAFEANRFYTVINKKSGEIVPMEVNFNFDDPNLIILPLAFGKRQGREFIWNDLLSLETGSLKLANGRVIEKTLYNRRTRQDEPALFVALTFERREVLDSSNIKPMNLIGVDRGENIPAVIALTDPEGCPLSRFKDSLGNPTHILRIGESYKEKQRTIQAKKEVEQRRAGGYSRKYASKAKNLADDMVRNTARDLLYYAVTQDAMLIFENLSRGFGRQGKRTFMAERQYTRMEDWLTAKLAYEGLPSKVYLSKTLAQYTSKTCSNCGFTITSADYDRVLEKLKKTATGWMTTINGKELKVEGQITYYNRYKRQNVVKDLSVELDRLSEESVNNDISSWTKGRSGEALSLLKKRFSHRPVQEKFVCLNCGFETHADEQAALNIARSWLFLRSQEYKKYQTNKTTGNTDKRAFVETWQSFYRKKLKEVWKPAV

SEQ ID NO: 31056 - protein, 978 aa, synthetic construct
  REGION 1..978: note = engineered CasX variant
QEIKRINKIRRRLVKDSNTKKAGKTGPMKTLLVRVMTPDLRERLENLRKKPENIPQPISNTSRANLNKLLTDYTEMKKAILHVYWEEFQKDPVGLMSRVAQPASKKIDQNKLKPEMDEKGNLTTAGFACSQCGQPLFVYKLEQVSEKGKAYTNYFGRCNVAEHEKLILLDQLKPEKDSDEAVTYSLGKFGQRALDFYSIHVTKESTHPVKPLAQIAGNRYASVPVGKALSDACMGTIASFLSKYQDIIIEHQKVVKGNQKRLESLRELAGKENLEYPSVTLPPQPHTKEGVDAYNEVIARVRMWVNLNLWQKLKLSRDDAKPLLRLKGFPSFPLVERQANEVDWWDMVCNVKKLINEKKEDGKVFWQNLAGYKRQEALRPYLSSEEDRKKGKKFARYQLGDLLLHLEKKHGEDWGKVYDEAWERIDKKVEGLSKHIKLEEERRSEDAQSKAALTDWLRAKASFVIEGLKEADKDEFCRCELKLQKWYGDLRGKPFAIEAENSILDISGFSKQYNCAFIWQKDGVKKLNLYLIINYFKGGKLRFKKIKPEAFEANRFYTVINKKSGEIVPMEVNFNFDDPNLIILPLAFGKRQGREFIWNDLLSLETGSLKLANGRVIEKTLYNRRTRQDEPALFVALTFERREVLDSSNIKPMNLIGVDRGENIPAVIALTDPEGCPLSRFKDSLGNPTHILRIGESYKEKQRTIQAKKEVEQRRAGGYSRKYASKAKNLADDMVRNTARDLLYYAVTQDAMLIFENLSRGFGRQGKRTFMAERQYTRMEDWLTAKLAYEGLPSKVYLSKTLAQYTSKTCSNCGFTITSADYDRVLEKLKKTATGWMTTINGKELKVEGQITYYNRYKRQNVVKDLSVELDRLSEESVNNDISSWTKGRSGEALSLLKKRFSHRPVQEKFVCLNCGFETHADEQAALNIARSWLFLRSQEYKKYQTNKTTGNTDKRAFVETWQSFYRKKLKEVWKPAV

SEQ ID NO: 31057 - protein, 978 aa, synthetic construct
  REGION 1..978: note = engineered CasX variant
QEIKRINKIRRRLVKDSNTKKAGKTGPMKTLLVRVMTPDLRERLENLRKKPENIPQPISNTSRANLNKLLTDYTEMKKAILHVYWEEFQKDPVGLMSRVAQPASKKIDQNKLKPEMDEKGNLTTAGFACSQCGQPLFVYKLEQVSEKGKAYTNYFGRCNVAEHEKLIKLDQLKPEKDSDEAVTYSLGKFGQRALDFYSIHVTKESTHPVKPLAQIAGNRYASGPVGKALSDACMGTIASFLSKYQDIIIEHQKVVKGNQKRLESLRELAGKENLEYPSVTLPPQPHTKEGVDAYNEVIARVRMWVNLNLWQKLKLSRDDAKPLLRLKGFPSFPLVERQANEVDWWDMVCNVKKLINEKKEDGKVFWQNLAGYKRQEALRPYLSSEEDRKKGKKFARYQLGDLLLHLEKKHGEDWGKVYDEAWERIDKKVEGLSKHIKLEEERRSEDAQSKAALTDWLRAKASFVIEGLKEADKDEFCRCELKLQKWYGDLRGKPFAIEAENSILDISGFSKQYNCAFIWQKDGVKKLNLYLIINYFKGGKLRFKKIKPEAFEANRFYTVINKKSGEIVPMEVNFNFDDPNLIILPLAFGKRQGREFIWNDLLSLETGSLKLANGRVIEKTLYNRRTRQDEPALFVALTFERREVLDSSNIKPMNLIGVDRGENIPAVIALTDPEGCPLSRFKDSLGNPTHILRIGESYKEKQRTIQAKKEVEQRRAGGYSRKYASKAKNLADDMVRNTARDLLYYAVTQDAMLIFENLSRGFGRQGKRTFMAERQYTRMEDWLTAKLAYEGLPSKVYLSKTLAQYTSKTCSNCGFTITSADYDRVLEKLKKTATGWMTTINGKELKVEGQITYYNRYKRQNVVKDLSVELDRLSEESVNNDISSWTKGRSGEALSLLKKRFSHRPVQEKFVCLNCGFETHADEQAALNIARSWLFLRSQEYKKYQTNKTTGNTDKRAFVETWQSFYRKKLKEVWKPAV

SEQ ID NO: 31058 - protein, 977 aa, synthetic construct
  REGION 1..977: note = engineered CasX variant
QEIKRINKIRRRLVKDSNTKKAGKTGPMKTLLVRVMTPDLRERLENLRKKPENIPQPISNTSRANLNKLLTDYTEMKKAILHVYWEEFQKDPVGLMSRVAQPASKKIDQNKLKPEMDEKGNLTTAGFACSQCGQPLFVYKLEQVSEKGKAYTNYFGRCNVAEHEKLILLDQLKPEKDSDEAVTYSLGKFGQRALDFYSIHVTKESTHPVKPLAQIAGNRYASPVGKALSDACMGTIASFLSKYQDIIIEHQKVVKGNQKRLESLRELAGKENLEYPSVTLPPQPHTKEGVDAYNEVIARVRMWVNLNLWQKLKLSRDDAKPLLRLKGFPSFPLVERQANEVDWWDMVCNVKKLINEKKEDGKVFWQNLAGYKRQEALRPYLSSEEDRKKGKKFARYQLGDLLLHLEKKHGEDWGKVYDEAWERIDKKVEGLSKHIKLEEERRSEDAQSKAALTDWLRAKASFVIEGLKEADKDEFCRCELKLQKWYGDLRGKPFAIEAENSILDISGFSKQYNCAFIWQKDGVKKLNLYLIINYFKGGKLRFKKIKPEAFEANRFYTVINKKSGEIVPMEVNFNFDDPNLIILPLAFGKRQGREFIWNDLLSLETGSLKLANGRVIEKTLYNRRTRQDEPALFVALTFERREVLDSSNIKPMNLIGVDRGENIPAVIALTDPEGCPLSRFKDSLGNPTHILRIGESYKEKQRTIQAKKEVEQRRAGGYSRKYASKAKNLADDMVRNTARDLLYYAVTQDAMLIFENLSRGFGRQGKRTFMAERQYTRMEDWLTAKLAYEGLPSKVYLSKTLAQYTSKTCSNCGFTITSADYDRVLEKLKKTATGWMTTINGKELKVEGQITYYNRYKRQNVVKDLSVELDRLSEESVNNDISSWTKGRSGEALSLLKKRFSHRPVQEKFVCLNCGFETHADEQAALNIARSWLFLRSQEYKKYQTNKTTGNTDKRAFVETWQSFYRKKLKEVWKPAV

SEQ ID NO: 31059 - protein, 979 aa, synthetic construct
  REGION 1..979: note = engineered CasX variant
QEIKRINKIRRRLVKDSNTKKAGKTGPMKTLLVRVMTPDLRERLENLRKKPENIPQPISNTSRANLNKLLTDYTEMKKAILHVYWEEFQKDPVGLMSRVAQPASKKIDQNKLKPEMDEKGNLTTAGFACSQCGQPLFVYKLEQVSEKGKAYTNYFGRCNVAEHEKLILLDQLKPEKDSDEAVTYSLGKFGQRALDFYSIHVTKESTHPVKPLAQIAGNRYASYPVGKALSDACMGTIASFLSKYQDIIIEHQKVVKGNQKRLESLRELAGKENLEYPSVTLPPQPHTKEGVDAYNEVIARVRMWVNLNLWQKLKLSRDDAKPLLRLKGFPSFPLVERQANEVDWWDMVCNVKKLINEKKEDGKVFWQNLAGYKRQEALRPYLSSEEDRKKGKKFARYQLGDLLLHLEKKHGEDWGKVYDEAWERIDKKVEGLSKHIKLEEERRSEDAQSKAALTDWLRAKASFVIEGLKEADKDEFCRCELKLQKWYGDLRGKPFAIEAENSILDISGFSKQYNCAFIWQKDGVKKLNLYLIINYFKGGKLRFKKIKPEAFEANRFYTVINKKSGEIVPMEVNFNFDDPNLIILPLAFGKRQGREFIWNDLLSLETGSLKLANGRVIEKTLYNRRTRQDEPALFVALTFERREVLDSSNIKPMNLIGVDRGENIPAVIALTDPEGCPLSRFKDSLGNPTHILRIGESYKEKQRTIQAKKEVEQRRAGGYSRKYASKAKNLADDMVRNTARDLLYYAVTQDAMLIFENLSRGFGRQGKRTFMAERQYTRMEDWLTAKLAYEGPLPSKTYLSKTLAQYTSKTCSNCGFTITSADYDRVLEKLKKTATGWMTTINGKELKVEGQITYYNRYKRQNVVKDLSVELDRLSEESVNNDISSWTKGRSGEALSLLKKRFSHRPVQEKFVCLNCGFETHADEQAALNIARSWLFLRSQEYKKYQTNKTTGNTDKRAFVETWQSFYRKKLKEVWKPAV

SEQ ID NO: 31060 - protein, 979 aa, synthetic construct
  REGION 1..979: note = engineered CasX variant
QEIKRINKIRRRLVKDSNTKKAGKTGPMKTLLVRVMTPDLRERLENLRKKPENIPQPISNTSRANLNKLLTDYTEMKKAILHVYWEEFQKDPVGLMSRVAQPASKKIDQNKLKPEMDEKGNLTTAGFACSQCGQPLFVYKLEQVSEKGKAYTNYFGRCNVAEHEKLILLDQLKPEKDSDEAVTYSLGKFGQRALDFYSIHVTKESTHPVKPLAQIAGNRYASHPVGKALSDACMGTIASFLSKYQDIIIEHQKVVKGNQKRLESLRELAGKENLEYPSVTLPPQPHTKEGVDAYNEVIARVRMWVNLNLWQKLKLSRDDAKPLLRLKGFPSFPLVERQANEVDWWDMVCNVKKLINEKKEDGKVFWQNLAGYKRQEALRPYLSSEEDRKKGKKFARYQLGDLLLHLEKKHGEDWGKVYDEAWERIDKKVEGLSKHIKLEEERRSEDAQSKAALTDWLRAKASFVIEGLKEADKDEFCRCELKLQKWYGDLRGKPFAIEAENSILDISGFSKQYNCAFIWQKDGVKKLNLYLIINYFKGGKLRFKKIKPEAFEANRFYTVINKKSGEIVPMEVNFNFDDPNLIILPLAFGKRQGREFIWNDLLSLETGSLKLANGRVIEKTLYNRRTRQDEPALFVALTFERREVLDSSNIKPMNLIGVDRGENIPAVIALTDPEGCPLSRFKDSLGNPTHILRIGESYKEKQRTIQAKKEVEQRRAGGYSRKYASKAKNLADDMVRNTARDLLYYAVTQDAMLIFENLSRGFGRQGKRTFMAERQYTRMEDWLTAKLAYEGPLPSKTYLSKTLAQYTSKTCSNCGFTITSADYDRVLEKLKKTATGWMTTINGKELKVEGQITYYNRYKRQNVVKDLSVELDRLSEESVNNDISSWTKGRSGEALSLLKKRFSHRPVQEKFVCLNCGFETHADEQAALNIARSWLFLRSQEYKKYQTNKTTGNTDKRAFVETWQSFYRKKLKEVWKPAV

SEQ ID NO: 31061 - protein, 979 aa, synthetic construct
  REGION 1..979: note = engineered CasX variant
QEIKRINKIRRRLVKDSNTKKAGKTGPMKTLLVRVMTPDLRERLENLRKKPENIPQPISNTSRANLNKLLTDYTEMKKAILHVYWEEFQKDPVGLMSRVAQPASKKIDQNKLKPEMDEKGNLTTAGFACSQCGQPLFVYKLEQVSEKGKAYTNYFGRCNVAEHEKLILLDQLKPEKDSDEAVTYSLGKFGQRALDFYSIHVTKESTHPVKPLAQIAGNRYASSPVGKALSDACMGTIASFLSKYQDIIIEHQKVVKGNQKRLESLRELAGKENLEYPSVTLPPQPHTKEGVDAYNEVIARVRMWVNLNLWQKLKLSRDDAKPLLRLKGFPSFPLVERQANEVDWWDMVCNVKKLINEKKEDGKVFWQNLAGYKRQEALRPYLSSEEDRKKGKKFARYQLGDLLLHLEKKHGEDWGKVYDEAWERIDKKVEGLSKHIKLEEERRSEDAQSKAALTDWLRAKASFVIEGLKEADKDEFCRCELKLQKWYGDLRGKPFAIEAENSILDISGFSKQYNCAFIWQKDGVKKLNLYLIINYFKGGKLRFKKIKPEAFEANRFYTVINKKSGEIVPMEVNFNFDDPNLIILPLAFGKRQGREFIWNDLLSLETGSLKLANGRVIEKTLYNRRTRQDEPALFVALTFERREVLDSSNIKPMNLIGVDRGENIPAVIALTDPEGCPLSRFKDSLGNPTHILRIGESYKEKQRTIQAKKEVEQRRAGGYSRKYASKAKNLADDMVRNTARDLLYYAVTQDAMLIFENLSRGFGRQGKRTFMAERQYTRMEDWLTAKLAYEGPLPSKTYLSKTLAQYTSKTCSNCGFTITSADYDRVLEKLKKTATGWMTTINGKELKVEGQITYYNRYKRQNVVKDLSVELDRLSEESVNNDISSWTKGRSGEALSLLKKRFSHRPVQEKFVCLNCGFETHADEQAALNIARSWLFLRSQEYKKYQTNKTTGNTDKRAFVETWQSFYRKKLKEVWKPAV

SEQ ID NO: 31062 - protein, 979 aa, synthetic construct
  REGION 1..979: note = engineered CasX variant
QEIKRINKIRRRLVKDSNTKKAGKTGPMKTLLVRVMTPDLRERLENLRKKPENIPQPISNTSRANLNKLLTDYTEMKKAILHVYWEEFQKDPVGLMSRVAQPASKKIDQNKLKPEMDEKGNLTTAGFACSQCGQPLFVYKLEQVSEKGKAYTNYFGRCNVAEHEKLILLDQLKPEKDSDEAVTYSLGKFGQRALDFYSIHVTKESTHPVKPLAQIAGNRYASTPVGKALSDACMGTIASFLSKYQDIIIEHQKVVKGNQKRLESLRELAGKENLEYPSVTLPPQPHTKEGVDAYNEVIARVRMWVNLNLWQKLKLSRDDAKPLLRLKGFPSFPLVERQANEVDWWDMVCNVKKLINEKKEDGKVFWQNLAGYKRQEALRPYLSSEEDRKKGKKFARYQLGDLLLHLEKKHGEDWGKVYDEAWERIDKKVEGLSKHIKLEEERRSEDAQSKAALTDWLRAKASFVIEGLKEADKDEFCRCELKLQKWYGDLRGKPFAIEAENSILDISGFSKQYNCAFIWQKDGVKKLNLYLIINYFKGGKLRFKKIKPEAFEANRFYTVINKKSGEIVPMEVNFNFDDPNLIILPLAFGKRQGREFIWNDLLSLETGSLKLANGRVIEKTLYNRRTRQDEPALFVALTFERREVLDSSNIKPMNLIGVDRGENIPAVIALTDPEGCPLSRFKDSLGNPTHILRIGESYKEKQRTIQAKKEVEQRRAGGYSRKYASKAKNLADDMVRNTARDLLYYAVTQDAMLIFENLSRGFGRQGKRTFMAERQYTRMEDWLTAKLAYEGPLPSKTYLSKTLAQYTSKTCSNCGFTITSADYDRVLEKLKKTATGWMTTINGKELKVEGQITYYNRYKRQNVVKDLSVELDRLSEESVNNDISSWTKGRSGEALSLLKKRFSHRPVQEKFVCLNCGFETHADEQAALNIARSWLFLRSQEYKKYQTNKTTGNTDKRAFVETWQSFYRKKLKEVWKPAV

SEQ ID NO: 31063 - protein, 979 aa, synthetic construct
  REGION 1..979: note = engineered CasX variant
QEIKRINKIRRRLVKDSNTKKAGKTGPMKTLLVRVMTPDLRERLENLRKKPENIPQPISNTSRANLNKLLTDYTEMKKAILHVYWEEFQKDPVGLMSRVAQPASKKIDQNKLKPEMDEKGNLTTAGFACSQCGQPLFVYKLEQVSEKGKAYTNYFGRCNVAEHEKLILLDQLKPEKDSDEAVTYSLGKFGQRALDFYSIHVTKESTHPVKPLAQIAGNRYASAPVGKALSDACMGTIASFLSKYQDIIIEHQKVVKGNQKRLESLRELAGKENLEYPSVTLPPQPHTKEGVDAYNEVIARVRMWVNLNLWQKLKLSRDDAKPLLRLKGFPSFPLVERQANEVDWWDMVCNVKKLINEKKEDGKVFWQNLAGYKRQEALRPYLSSEEDRKKGKKFARYQLGDLLLHLEKKHGEDWGKVYDEAWERIDKKVEGLSKHIKLEEERRSEDAQSKAALTDWLRAKASFVIEGLKEADKDEFCRCELKLQKWYGDLRGKPFAIEAENSILDISGFSKQYNCAFIWQKDGVKKLNLYLIINYFKGGKLRFKKIKPEAFEANRFYTVINKKSGEIVPMEVNFNFDDPNLIILPLAFGKRQGREFIWNDLLSLETGSLKLANGRVIEKTLYNRRTRQDEPALFVALTFERREVLDSSNIKPMNLIGVDRGENIPAVIALTDPEGCPLSRFKDSLGNPTHILRIGESYKEKQRTIQAKKEVEQRRAGGYSRKYASKAKNLADDMVRNTARDLLYYAVTQDAMLIFENLSRGFGRQGKRTFMAERQYTRMEDWLTAKLAYEGPLPSKTYLSKTLAQYTSKTCSNCGFTITSADYDRVLEKLKKTATGWMTTINGKELKVEGQITYYNRYKRQNVVKDLSVELDRLSEESVNNDISSWTKGRSGEALSLLKKRFSHRPVQEKFVCLNCGFETHADEQAALNIARSWLFLRSQEYKKYQTNKTTGNTDKRAFVETWQSFYRKKLKEVWKPAV

SEQ ID NO: 31064 - protein, 979 aa, synthetic construct
  REGION 1..979: note = engineered CasX variant
QEIKRINKIRRRLVKDSNTKKAGKTGPMKTLLVRVMTPDLRERLENLRKKPENIPQPISNTSRANLNKLLTDYTEMKKAILHVYWEEFQKDPVGLMSRVAQPASKKIDQNKLKPEMDEKGNLTTAGFACSQCGQPLFVYKLEQVSEKGKAYTNYFGRCNVAEHEKLILLDQLKPEKDSDEAVTYSLGKFGQRALDFYSIHVTKESTHPVKPLAQIAGNRYASVPVGKALSDACMGTIASFLSKYQDIIIEHQKVVKGNQKRLESLRELAGKENLEYPSVTLPPQPHTKEGVDAYNEVIARVRMWVNLNLWQKLKLSRDDAKPLLRLKGFPSFPLVERQANEVDWWDMVCNVKKLINEKKEDGKVFWQNLAGYKRQEALRPYLSSEEDRKKGKKFARYQLGDLLLHLEKKHGEDWGKVYDEAWERIDKKVEGLSKHIKLEEERRSEDAQSKAALTDWLRAKASFVIEGLKEADKDEFCRCELKLQKWYGDLRGKPFAIEAENSILDISGFSKQYNCAFIWQKDGVKKLNLYLIINYFKGGKLRFKKIKPEAFEANRFYTVINKKSGEIVPMEVNFNFDDPNLIILPLAFGKRQGREFIWNDLLSLETGSLKLANGRVIEKTLYNRRTRQDEPALFVALTFERREVLDSSNIKPMNLIGVDRGENIPAVIALTDPEGCPLSRFKDSLGNPTHILRIGESYKEKQRTIQAKKEVEQRRAGGYSRKYASKAKNLADDMVRNTARDLLYYAVTQDAMLIFENLSRGFGRQGKRTFMAERQYTRMEDWLTAKLAYEGPLPSKTYLSKTLAQYTSKTCSNCGFTITSADYDRVLEKLKKTATGWMTTINGKELKVEGQITYYNRYKRQNVVKDLSVELDRLSEESVNNDISSWTKGRSGEALSLLKKRFSHRPVQEKFVCLNCGFETHADEQAALNIARSWLFLRSQEYKKYQTNKTTGNTDKRAFVETWQSFYRKKLKEVWKPAV

SEQ ID NO: 31065 - protein, 979 aa, synthetic construct
  REGION 1..979: note = engineered CasX variant
QEIKRINKIRRRLVKDSNTKKAGKTGPMKTLLVRVMTPDLRERLENLRKKPENIPQPISNTSRANLNKLLTDYTEMKKAILHVYWEEFQKDPVGLMSRVAQPASKKIDQNKLKPEMDEKGNLTTAGFACSQCGQPLFVYKLEQVSEKGKAYTNYFGRCNVAEHEKLIKLDQLKPEKDSDEAVTYSLGKFGQRALDFYSIHVTKESTHPVKPLAQIAGNRYASGPVGKALSDACMGTIASFLSKYQDIIIEHQKVVKGNQKRLESLRELAGKENLEYPSVTLPPQPHTKEGVDAYNEVIARVRMWVNLNLWQKLKLSRDDAKPLLRLKGFPSFPLVERQANEVDWWDMVCNVKKLINEKKEDGKVFWQNLAGYKRQEALRPYLSSEEDRKKGKKFARYQLGDLLLHLEKKHGEDWGKVYDEAWERIDKKVEGLSKHIKLEEERRSEDAQSKAALTDWLRAKASFVIEGLKEADKDEFCRCELKLQKWYGDLRGKPFAIEAENSILDISGFSKQYNCAFIWQKDGVKKLNLYLIINYFKGGKLRFKKIKPEAFEANRFYTVINKKSGEIVPMEVNFNFDDPNLIILPLAFGKRQGREFIWNDLLSLETGSLKLANGRVIEKTLYNRRTRQDEPALFVALTFERREVLDSSNIKPMNLIGVDRGENIPAVIALTDPEGCPLSRFKDSLGNPTHILRIGESYKEKQRTIQAKKEVEQRRAGGYSRKYASKAKNLADDMVRNTARDLLYYAVTQDAMLIFENLSRGFGRQGKRTFMAERQYTRMEDWLTAKLAYEGPLPSKTYLSKTLAQYTSKTCSNCGFTITSADYDRVLEKLKKTATGWMTTINGKELKVEGQITYYNRYKRQNVVKDLSVELDRLSEESVNNDISSWTKGRSGEALSLLKKRFSHRPVQEKFVCLNCGFETHADEQAALNIARSWLFLRSQEYKKYQTNKTTGNTDKRAFVETWQSFYRKKLKEVWKPAV

SEQ ID NO: 31066 - protein, 978 aa, synthetic construct
  REGION 1..978: note = engineered CasX variant
QEIKRINKIRRRLVKDSNTKKAGKTGPMKTLLVRVMTPDLRERLENLRKKPENIPQPISNTSRANLNKLLTDYTEMKKAILHVYWEEFQKDPVGLMSRVAQPASKKIDQNKLKPEMDEKGNLTTAGFACSQCGQPLFVYKLEQVSEKGKAYTNYFGRCNVAEHEKLILLDQLKPEKDSDEAVTYSLGKFGQRALDFYSIHVTKESTHPVKPLAQIAGNRYASPVGKALSDACMGTIASFLSKYQDIIIEHQKVVKGNQKRLESLRELAGKENLEYPSVTLPPQPHTKEGVDAYNEVIARVRMWVNLNLWQKLKLSRDDAKPLLRLKGFPSFPLVERQANEVDWWDMVCNVKKLINEKKEDGKVFWQNLAGYKRQEALRPYLSSEEDRKKGKKFARYQLGDLLLHLEKKHGEDWGKVYDEAWERIDKKVEGLSKHIKLEEERRSEDAQSKAALTDWLRAKASFVIEGLKEADKDEFCRCELKLQKWYGDLRGKPFAIEAENSILDISGFSKQYNCAFIWQKDGVKKLNLYLIINYFKGGKLRFKKIKPEAFEANRFYTVINKKSGEIVPMEVNFNFDDPNLIILPLAFGKRQGREFIWNDLLSLETGSLKLANGRVIEKTLYNRRTRQDEPALFVALTFERREVLDSSNIKPMNLIGVDRGENIPAVIALTDPEGCPLSRFKDSLGNPTHILRIGESYKEKQRTIQAKKEVEQRRAGGYSRKYASKAKNLADDMVRNTARDLLYYAVTQDAMLIFENLSRGFGRQGKRTFMAERQYTRMEDWLTAKLAYEGPLPSKTYLSKTLAQYTSKTCSNCGFTITSADYDRVLEKLKKTATGWMTTINGKELKVEGQITYYNRYKRQNVVKDLSVELDRLSEESVNNDISSWTKGRSGEALSLLKKRFSHRPVQEKFVCLNCGFETHADEQAALNIARSWLFLRSQEYKKYQTNKTTGNTDKRAFVETWQSFYRKKLKEVWKPAV

SEQ ID NO: 31067 - protein, 979 aa, synthetic construct
  REGION 1..979: note = engineered CasX variant
QEIKRINKIRRRLVKDSNTKKAGKTGPMKTLLVRVMTPDLRERLENLRKKPENIPQPISNTSRANLNKLLTDYTEMKKAILHVYWEEFQKDPVGLMSRVAQPASKKIDQNKLKPEMDEKGNLTTAGFACSQCGQPLFVYKLEQVSEKGKAYTNYFGRCNVAEHEKLILLDQLKPEKDSDEAVTYSLGKFGQRALDFYSIHVTKESTHPVKPLAQIAGNRYASYPVGKALSDACMGTIASFLSKYQDIIIEHQKVVKGNQKRLESLRELAGKENLEYPSVTLPPQPHTKEGVDAYNEVIARVRMWVNLNLWQKLKLSRDDAKPLLRLKGFPSFPLVERQANEVDWWDMVCNVKKLINEKKEDGKVFWQNLAGYKRQEALRPYLSSEEDVRKKGKKFARYQLGDLLLHLEKKHGEDWGKVYDEAWERIDKKVEGLSKHIKLEEERRSEDAQSKAALTDWLRAKASFVIEGLKEADKDEFCRCELKLQKWYGDLRGKPFAIEAENSILDISGFSKQYNCAFIWQKDGVKKLNLYLIINYFKGGKLRFKKIKPEAFEANRFYTVINKKSGEIVPMEVNFNFDDPNLIILPLAFGKRQGREFIWNDLLSLETGSLKLANGRVIEKTLYNRRTRQDEPALFVALTFERREVLDSSNIKPMNLIGVDRGENIPAVIALTDPEGCPLSRFKDSLGNPTHILRIGESYKEKQRTIQAKKEVEQRRAGGYSRKYASKAKNLADDMVRNTARDLLYYAVTQDAMLIFENLSRGFGRQGKRTFMAERQYTRMEDWLTAKLAYEGLPSKTYLSKTLAQYTSKTCSNCGFTITSADYDRVLEKLKKTATGWMTTINGKELKVEGQITYYNRYKRQNVVKDLSVELDRLSEESVNNDISSWTKGRSGEALSLLKKRFSHRPVQEKFVCLNCGFETHADEQAALNIARSWLFLRSQEYKKYQTNKTTGNTDKRAFVETWQSFYRKKLKEVWKPAV

SEQ ID NO: 31068 - protein, 979 aa, synthetic construct
  REGION 1..979: note = engineered CasX variant
QEIKRINKIRRRLVKDSNTKKAGKTGPMKTLLVRVMTPDLRERLENLRKKPENIPQPISNTSRANLNKLLTDYTEMKKAILHVYWEEFQKDPVGLMSRVAQPASKKIDQNKLKPEMDEKGNLTTAGFACSQCGQPLFVYKLEQVSEKGKAYTNYFGRCNVAEHEKLILLDQLKPEKDSDEAVTYSLGKFGQRALDFYSIHVTKESTHPVKPLAQIAGNRYASHPVGKALSDACMGTIASFLSKYQDIIIEHQKVVKGNQKRLESLRELAGKENLEYPSVTLPPQPHTKEGVDAYNEVIARVRMWVNLNLWQKLKLSRDDAKPLLRLKGFPSFPLVERQANEVDWWDMVCNVKKLINEKKEDGKVFWQNLAGYKRQEALRPYLSSEEDVRKKGKKFARYQLGDLLLHLEKKHGEDWGKVYDEAWERIDKKVEGLSKHIKLEEERRSEDAQSKAALTDWLRAKASFVIEGLKEADKDEFCRCELKLQKWYGDLRGKPFAIEAENSILDISGFSKQYNCAFIWQKDGVKKLNLYLIINYFKGGKLRFKKIKPEAFEANRFYTVINKKSGEIVPMEVNFNFDDPNLIILPLAFGKRQGREFIWNDLLSLETGSLKLANGRVIEKTLYNRRTRQDEPALFVALTFERREVLDSSNIKPMNLIGVDRGENIPAVIALTDPEGCPLSRFKDSLGNPTHILRIGESYKEKQRTIQAKKEVEQRRAGGYSRKYASKAKNLADDMVRNTARDLLYYAVTQDAMLIFENLSRGFGRQGKRTFMAERQYTRMEDWLTAKLAYEGLPSKTYLSKTLAQYTSKTCSNCGFTITSADYDRVLEKLKKTATGWMTTINGKELKVEGQITYYNRYKRQNVVKDLSVELDRLSEESVNNDISSWTKGRSGEALSLLKKRFSHRPVQEKFVCLNCGFETHADEQAALNIARSWLFLRSQEYKKYQTNKTTGNTDKRAFVETWQSFYRKKLKEVWKPAV

SEQ ID NO: 31069 - protein, 979 aa, synthetic construct
  REGION 1..979: note = engineered CasX variant
QEIKRINKIRRRLVKDSNTKKAGKTGPMKTLLVRVMTPDLRERLENLRKKPENIPQPISNTSRANLNKLLTDYTEMKKAILHVYWEEFQKDPVGLMSRVAQPASKKIDQNKLKPEMDEKGNLTTAGFACSQCGQPLFVYKLEQVSEKGKAYTNYFGRCNVAEHEKLILLDQLKPEKDSDEAVTYSLGKFGQRALDFYSIHVTKESTHPVKPLAQIAGNRYASSPVGKALSDACMGTIASFLSKYQDIIIEHQKVVKGNQKRLESLRELAGKENLEYPSVTLPPQPHTKEGVDAYNEVIARVRMWVNLNLWQKLKLSRDDAKPLLRLKGFPSFPLVERQANEVDWWDMVCNVKKLINEKKEDGKVFWQNLAGYKRQEALRPYLSSEEDVRKKGKKFARYQLGDLLLHLEKKHGEDWGKVYDEAWERIDKKVEGLSKHIKLEEERRSEDAQSKAALTDWLRAKASFVIEGLKEADKDEFCRCELKLQKWYGDLRGKPFAIEAENSILDISGFSKQYNCAFIWQKDGVKKLNLYLIINYFKGGKLRFKKIKPEAFEANRFYTVINKKSGEIVPMEVNFNFDDPNLIILPLAFGKRQGREFIWNDLLSLETGSLKLANGRVIEKTLYNRRTRQDEPALFVALTFERREVLDSSNIKPMNLIGVDRGENIPAVIALTDPEGCPLSRFKDSLGNPTHILRIGESYKEKQRTIQAKKEVEQRRAGGYSRKYASKAKNLADDMVRNTARDLLYYAVTQDAMLIFENLSRGFGRQGKRTFMAERQYTRMEDWLTAKLAYEGLPSKTYLSKTLAQYTSKTCSNCGFTITSADYDRVLEKLKKTATGWMTTINGKELKVEGQITYYNRYKRQNVVKDLSVELDRLSEESVNNDISSWTKGRSGEALSLLKKRFSHRPVQEKFVCLNCGFETHADEQAALNIARSWLFLRSQEYKKYQTNKTTGNTDKRAFVETWQSFYRKKLKEVWKPAV

SEQ ID NO: 31070 - protein, 979 aa, synthetic construct
  REGION 1..979: note = engineered CasX variant
QEIKRINKIRRRLVKDSNTKKAGKTGPMKTLLVRVMTPDLRERLENLRKKPENIPQPISNTSRANLNKLLTDYTEMKKAILHVYWEEFQKDPVGLMSRVAQPASKKIDQNKLKPEMDEKGNLTTAGFACSQCGQPLFVYKLEQVSEKGKAYTNYFGRCNVAEHEKLILLDQLKPEKDSDEAVTYSLGKFGQRALDFYSIHVTKESTHPVKPLAQIAGNRYASTPVGKALSDACMGTIASFLSKYQDIIIEHQKVVKGNQKRLESLRELAGKENLEYPSVTLPPQPHTKEGVDAYNEVIARVRMWVNLNLWQKLKLSRDDAKPLLRLKGFPSFPLVERQANEVDWWDMVCNVKKLINEKKEDGKVFWQNLAGYKRQEALRPYLSSEEDVRKKGKKFARYQLGDLLLHLEKKHGEDWGKVYDEAWERIDKKVEGLSKHIKLEEERRSEDAQSKAALTDWLRAKASFVIEGLKEADKDEFCRCELKLQKWYGDLRGKPFAIEAENSILDISGFSKQYNCAFIWQKDGVKKLNLYLIINYFKGGKLRFKKIKPEAFEANRFYTVINKKSGEIVPMEVNFNFDDPNLIILPLAFGKRQGREFIWNDLLSLETGSLKLANGRVIEKTLYNRRTRQDEPALFVALTFERREVLDSSNIKPMNLIGVDRGENIPAVIALTDPEGCPLSRFKDSLGNPTHILRIGESYKEKQRTIQAKKEVEQRRAGGYSRKYASKAKNLADDMVRNTARDLLYYAVTQDAMLIFENLSRGFGRQGKRTFMAERQYTRMEDWLTAKLAYEGLPSKTYLSKTLAQYTSKTCSNCGFTITSADYDRVLEKLKKTATGWMTTINGKELKVEGQITYYNRYKRQNVVKDLSVELDRLSEESVNNDISSWTKGRSGEALSLLKKRFSHRPVQEKFVCLNCGFETHADEQAALNIARSWLFLRSQEYKKYQTNKTTGNTDKRAFVETWQSFYRKKLKEVWKPAV

SEQ ID NO: 31071 - protein, 979 aa, synthetic construct
  REGION 1..979: note = engineered CasX variant
QEIKRINKIRRRLVKDSNTKKAGKTGPMKTLLVRVMTPDLRERLENLRKKPENIPQPISNTSRANLNKLLTDYTEMKKAILHVYWEEFQKDPVGLMSRVAQPASKKIDQNKLKPEMDEKGNLTTAGFACSQCGQPLFVYKLEQVSEKGKAYTNYFGRCNVAEHEKLILLDQLKPEKDSDEAVTYSLGKFGQRALDFYSIHVTKESTHPVKPLAQIAGNRYASAPVGKALSDACMGTIASFLSKYQDIIIEHQKVVKGNQKRLESLRELAGKENLEYPSVTLPPQPHTKEGVDAYNEVIARVRMWVNLNLWQKLKLSRDDAKPLLRLKGFPSFPLVERQANEVDWWDMVCNVKKLINEKKEDGKVFWQNLAGYKRQEALRPYLSSEEDVRKKGKKFARYQLGDLLLHLEKKHGEDWGKVYDEAWERIDKKVEGLSKHIKLEEERRSEDAQSKAALTDWLRAKASFVIEGLKEADKDEFCRCELKLQKWYGDLRGKPFAIEAENSILDISGFSKQYNCAFIWQKDGVKKLNLYLIINYFKGGKLRFKKIKPEAFEANRFYTVINKKSGEIVPMEVNFNFDDPNLIILPLAFGKRQGREFIWNDLLSLETGSLKLANGRVIEKTLYNRRTRQDEPALFVALTFERREVLDSSNIKPMNLIGVDRGENIPAVIALTDPEGCPLSRFKDSLGNPTHILRIGESYKEKQRTIQAKKEVEQRRAGGYSRKYASKAKNLADDMVRNTARDLLYYAVTQDAMLIFENLSRGFGRQGKRTFMAERQYTRMEDWLTAKLAYEGLPSKTYLSKTLAQYTSKTCSNCGFTITSADYDRVLEKLKKTATGWMTTINGKELKVEGQITYYNRYKRQNVVKDLSVELDRLSEESVNNDISSWTKGRSGEALSLLKKRFSHRPVQEKFVCLNCGFETHADEQAALNIARSWLFLRSQEYKKYQTNKTTGNTDKRAFVETWQSFYRKKLKEVWKPAV

SEQ ID NO: 31072 - protein, 979 aa, synthetic construct
  REGION 1..979: note = engineered CasX variant
QEIKRINKIRRRLVKDSNTKKAGKTGPMKTLLVRVMTPDLRERLENLRKKPENIPQPISNTSRANLNKLLTDYTEMKKAILHVYWEEFQKDPVGLMSRVAQPASKKIDQNKLKPEMDEKGNLTTAGFACSQCGQPLFVYKLEQVSEKGKAYTNYFGRCNVAEHEKLILLDQLKPEKDSDEAVTYSLGKFGQRALDFYSIHVTKESTHPVKPLAQIAGNRYASVPVGKALSDACMGTIASFLSKYQDIIIEHQKVVKGNQKRLESLRELAGKENLEYPSVTLPPQPHTKEGVDAYNEVIARVRMWVNLNLWQKLKLSRDDAKPLLRLKGFPSFPLVERQANEVDWWDMVCNVKKLINEKKEDGKVFWQNLAGYKRQEALRPYLSSEEDVRKKGKKFARYQLGDLLLHLEKKHGEDWGKVYDEAWERIDKKVEGLSKHIKLEEERRSEDAQSKAALTDWLRAKASFVIEGLKEADKDEFCRCELKLQKWYGDLRGKPFAIEAENSILDISGFSKQYNCAFIWQKDGVKKLNLYLIINYFKGGKLRFKKIKPEAFEANRFYTVINKKSGEIVPMEVNFNFDDPNLIILPLAFGKRQGREFIWNDLLSLETGSLKLANGRVIEKTLYNRRTRQDEPALFVALTFERREVLDSSNIKPMNLIGVDRGENIPAVIALTDPEGCPLSRFKDSLGNPTHILRIGESYKEKQRTIQAKKEVEQRRAGGYSRKYASKAKNLADDMVRNTARDLLYYAVTQDAMLIFENLSRGFGRQGKRTFMAERQYTRMEDWLTAKLAYEGLPSKTYLSKTLAQYTSKTCSNCGFTITSADYDRVLEKLKKTATGWMTTINGKELKVEGQITYYNRYKRQNVVKDLSVELDRLSEESVNNDISSWTKGRSGEALSLLKKRFSHRPVQEKFVCLNCGFETHADEQAALNIARSWLFLRSQEYKKYQTNKTTGNTDKRAFVETWQSFYRKKLKEVWKPAV

SEQ ID NO: 31073 - protein, 979 aa, synthetic construct
  REGION 1..979: note = engineered CasX variant
QEIKRINKIRRRLVKDSNTKKAGKTGPMKTLLVRVMTPDLRERLENLRKKPENIPQPISNTSRANLNKLLTDYTEMKKAILHVYWEEFQKDPVGLMSRVAQPASKKIDQNKLKPEMDEKGNLTTAGFACSQCGQPLFVYKLEQVSEKGKAYTNYFGRCNVAEHEKLIKLDQLKPEKDSDEAVTYSLGKFGQRALDFYSIHVTKESTHPVKPLAQIAGNRYASGPVGKALSDACMGTIASFLSKYQDIIIEHQKVVKGNQKRLESLRELAGKENLEYPSVTLPPQPHTKEGVDAYNEVIARVRMWVNLNLWQKLKLSRDDAKPLLRLKGFPSFPLVERQANEVDWWDMVCNVKKLINEKKEDGKVFWQNLAGYKRQEALRPYLSSEEDVRKKGKKFARYQLGDLLLHLEKKHGEDWGKVYDEAWERIDKKVEGLSKHIKLEEERRSEDAQSKAALTDWLRAKASFVIEGLKEADKDEFCRCELKLQKWYGDLRGKPFAIEAENSILDISGFSKQYNCAFIWQKDGVKKLNLYLIINYFKGGKLRFKKIKPEAFEANRFYTVINKKSGEIVPMEVNFNFDDPNLIILPLAFGKRQGREFIWNDLLSLETGSLKLANGRVIEKTLYNRRTRQDEPALFVALTFERREVLDSSNIKPMNLIGVDRGENIPAVIALTDPEGCPLSRFKDSLGNPTHILRIGESYKEKQRTIQAKKEVEQRRAGGYSRKYASKAKNLADDMVRNTARDLLYYAVTQDAMLIFENLSRGFGRQGKRTFMAERQYTRMEDWLTAKLAYEGLPSKTYLSKTLAQYTSKTCSNCGFTITSADYDRVLEKLKKTATGWMTTINGKELKVEGQITYYNRYKRQNVVKDLSVELDRLSEESVNNDISSWTKGRSGEALSLLKKRFSHRPVQEKFVCLNCGFETHADEQAALNIARSWLFLRSQEYKKYQTNKTTGNTDKRAFVETWQSFYRKKLKEVWKPAV

SEQ ID NO: 31074 - protein, 978 aa, synthetic construct
  REGION 1..978: note = engineered CasX variant
QEIKRINKIRRRLVKDSNTKKAGKTGPMKTLLVRVMTPDLRERLENLRKKPENIPQPISNTSRANLNKLLTDYTEMKKAILHVYWEEFQKDPVGLMSRVAQPASKKIDQNKLKPEMDEKGNLTTAGFACSQCGQPLFVYKLEQVSEKGKAYTNYFGRCNVAEHEKLILLDQLKPEKDSDEAVTYSLGKFGQRALDFYSIHVTKESTHPVKPLAQIAGNRYASPVGKALSDACMGTIASFLSKYQDIIIEHQKVVKGNQKRLESLRELAGKENLEYPSVTLPPQPHTKEGVDAYNEVIARVRMWVNLNLWQKLKLSRDDAKPLLRLKGFPSFPLVERQANEVDWWDMVCNVKKLINEKKEDGKVFWQNLAGYKRQEALRPYLSSEEDVRKKGKKFARYQLGDLLLHLEKKHGEDWGKVYDEAWERIDKKVEGLSKHIKLEEERRSEDAQSKAALTDWLRAKASFVIEGLKEADKDEFCRCELKLQKWYGDLRGKPFAIEAENSILDISGFSKQYNCAFIWQKDGVKKLNLYLIINYFKGGKLRFKKIKPEAFEANRFYTVINKKSGEIVPMEVNFNFDDPNLIILPLAFGKRQGREFIWNDLLSLETGSLKLANGRVIEKTLYNRRTRQDEPALFVALTFERREVLDSSNIKPMNLIGVDRGENIPAVIALTDPEGCPLSRFKDSLGNPTHILRIGESYKEKQRTIQAKKEVEQRRAGGYSRKYASKAKNLADDMVRNTARDLLYYAVTQDAMLIFENLSRGFGRQGKRTFMAERQYTRMEDWLTAKLAYEGLPSKTYLSKTLAQYTSKTCSNCGFTITSADYDRVLEKLKKTATGWMTTINGKELKVEGQITYYNRYKRQNVVKDLSVELDRLSEESVNNDISSWTKGRSGEALSLLKKRFSHRPVQEKFVCLNCGFETHADEQAALNIARSWLFLRSQEYKKYQTNKTTGNTDKRAFVETWQSFYRKKLKEVWKPAV

SEQ ID NO: 31075 - protein, 978 aa, synthetic construct
  REGION 1..978: note = engineered CasX variant
QEIKRINKIRRRLVKDSNTKKAGKTGPMKTLLVRVMTPDLRERLENLRKKPENIPQPISNTSRANLNKLLTDYTEMKKAILHVYWEEFQKDPVGLMSRVAQPASKKIDQNKLKPEMDEKGNLTTAGFACSQCGQPLFVYKLEQVSEKGKAYTNYFGRCNVAEHEKLILLDQLKPEKDSDEAVTYSLGKFGQRALDFYSIHVTKESTHPVKPLAQIAGNRYASYPVGKALSDACMGTIASFLSKYQDIIIEHQKVVKGNQKRLESLRELAGKENLEYPSVTLPPQPHTKEGVDAYNEVIARVRMWVNLNLWQKLKLSRDDAKPLLRLKGFPSFPLVERQANEVDWWDMVCNVKKLINEKKEDGKVFWQNLAGYKRQEALRPYLSSEEDRKKGKKFARYQLGDLLLHLEKKHGEDWGKVYDEAWERIDKKVEGLSKHIKLEEERRSEDAQSKAALTDWLRAKASFVIEGLKEADKDEFCRCELKLQKWYGDLRGKPFAIEAENSILDISGFSKQYNCAFIWQKDGVKKLNLYLIINYFKGGKLRFKKIKPEAFEANRFYTVINKKSGEIVPMEVNFNFDDPNLIILPLAFGKRQGREFIWNDLLSLETGSLKLANGRVIEKTLYNRRTRQDEPALFVALTFERREVLDSSNIKPMNLIGVDRGENIPAVIALTDPEGCPLSRFKDSLGNPTHILRIGESYKEKQRTIQAKKEVEQRRAGGYSRKYASKAKNLADDMVRNTARDLLYYAVTQDAMLIFENLSRGFGRQGKRTFMAERQYTRMEDWLTAKLAYEGLPSKTYLSKTLAQYTSKTCSNCGFTITSADYDRMLEKLKKTATGWMTTINGKELKVEGQITYYNRYKRQNVVKDLSVELDRLSEESVNNDISSWTKGRSGEALSLLKKRFSHRPVQEKFVCLNCGFETHADEQAALNIARSWLFLRSQEYKKYQTNKTTGNTDKRAFVETWQSFYRKKLKEVWKPAV

SEQ ID NO: 31076 - protein, 978 aa, synthetic construct
  REGION 1..978: note = engineered CasX variant
QEIKRINKIRRRLVKDSNTKKAGKTGPMKTLLVRVMTPDLRERLENLRKKPENIPQPISNTSRANLNKLLTDYTEMKKAILHVYWEEFQKDPVGLMSRVAQPASKKIDQNKLKPEMDEKGNLTTAGFACSQCGQPLFVYKLEQVSEKGKAYTNYFGRCNVAEHEKLILLDQLKPEKDSDEAVTYSLGKFGQRALDFYSIHVTKESTHPVKPLAQIAGNRYASHPVGKALSDACMGTIASFLSKYQDIIIEHQKVVKGNQKRLESLRELAGKENLEYPSVTLPPQPHTKEGVDAYNEVIARVRMWVNLNLWQKLKLSRDDAKPLLRLKGFPSFPLVERQANEVDWWDMVCNVKKLINEKKEDGKVFWQNLAGYKRQEALRPYLSSEEDRKKGKKFARYQLGDLLLHLEKKHGEDWGKVYDEAWERIDKKVEGLSKHIKLEEERRSEDAQSKAALTDWLRAKASFVIEGLKEADKDEFCRCELKLQKWYGDLRGKPFAIEAENSILDISGFSKQYNCAFIWQKDGVKKLNLYLIINYFKGGKLRFKKIKPEAFEANRFYTVINKKSGEIVPMEVNFNFDDPNLIILPLAFGKRQGREFIWNDLLSLETGSLKLANGRVIEKTLYNRRTRQDEPALFVALTFERREVLDSSNIKPMNLIGVDRGENIPAVIALTDPEGCPLSRFKDSLGNPTHILRIGESYKEKQRTIQAKKEVEQRRAGGYSRKYASKAKNLADDMVRNTARDLLYYAVTQDAMLIFENLSRGFGRQGKRTFMAERQYTRMEDWLTAKLAYEGLPSKTYLSKTLAQYTSKTCSNCGFTITSADYDRMLEKLKKTATGWMTTINGKELKVEGQITYYNRYKRQNVVKDLSVELDRLSEESVNNDISSWTKGRSGEALSLLKKRFSHRPVQEKFVCLNCGFETHADEQAALNIARSWLFLRSQEYKKYQTNKTTGNTDKRAFVETWQSFYRKKLKEVWKPAV

SEQ ID NO: 31077 - protein, 978 aa, synthetic construct
  REGION 1..978: note = engineered CasX variant
QEIKRINKIRRRLVKDSNTKKAGKTGPMKTLLVRVMTPDLRERLENLRKKPENIPQPISNTSRANLNKLLTDYTEMKKAILHVYWEEFQKDPVGLMSRVAQPASKKIDQNKLKPEMDEKGNLTTAGFACSQCGQPLFVYKLEQVSEKGKAYTNYFGRCNVAEHEKLILLDQLKPEKDSDEAVTYSLGKFGQRALDFYSIHVTKESTHPVKPLAQIAGNRYASSPVGKALSDACMGTIASFLSKYQDIIIEHQKVVKGNQKRLESLRELAGKENLEYPSVTLPPQPHTKEGVDAYNEVIARVRMWVNLNLWQKLKLSRDDAKPLLRLKGFPSFPLVERQANEVDWWDMVCNVKKLINEKKEDGKVFWQNLAGYKRQEALRPYLSSEEDRKKGKKFARYQLGDLLLHLEKKHGEDWGKVYDEAWERIDKKVEGLSKHIKLEEERRSEDAQSKAALTDWLRAKASFVIEGLKEADKDEFCRCELKLQKWYGDLRGKPFAIEAENSILDISGFSKQYNCAFIWQKDGVKKLNLYLIINYFKGGKLRFKKIKPEAFEANRFYTVINKKSGEIVPMEVNFNFDDPNLIILPLAFGKRQGREFIWNDLLSLETGSLKLANGRVIEKTLYNRRTRQDEPALFVALTFERREVLDSSNIKPMNLIGVDRGENIPAVIALTDPEGCPLSRFKDSLGNPTHILRIGESYKEKQRTIQAKKEVEQRRAGGYSRKYASKAKNLADDMVRNTARDLLYYAVTQDAMLIFENLSRGFGRQGKRTFMAERQYTRMEDWLTAKLAYEGLPSKTYLSKTLAQYTSKTCSNCGFTITSADYDRMLEKLKKTATGWMTTINGKELKVEGQITYYNRYKRQNVVKDLSVELDRLSEESVNNDISSWTKGRSGEALSLLKKRFSHRPVQEKFVCLNCGFETHADEQAALNIARSWLFLRSQEYKKYQTNKTTGNTDKRAFVETWQSFYRKKLKEVWKPAV

SEQ ID NO: 31078 - protein, 978 aa, synthetic construct
  REGION 1..978: note = engineered CasX variant
QEIKRINKIRRRLVKDSNTKKAGKTGPMKTLLVRVMTPDLRERLENLRKKPENIPQPISNTSRANLNKLLTDYTEMKKAILHVYWEEFQKDPVGLMSRVAQPASKKIDQNKLKPEMDEKGNLTTAGFACSQCGQPLFVYKLEQVSEKGKAYTNYFGRCNVAEHEKLILLDQLKPEKDSDEAVTYSLGKFGQRALDFYSIHVTKESTHPVKPLAQIAGNRYASTPVGKALSDACMGTIASFLSKYQDIIIEHQKVVKGNQKRLESLRELAGKENLEYPSVTLPPQPHTKEGVDAYNEVIARVRMWVNLNLWQKLKLSRDDAKPLLRLKGFPSFPLVERQANEVDWWDMVCNVKKLINEKKEDGKVFWQNLAGYKRQEALRPYLSSEEDRKKGKKFARYQLGDLLLHLEKKHGEDWGKVYDEAWERIDKKVEGLSKHIKLEEERRSEDAQSKAALTDWLRAKASFVIEGLKEADKDEFCRCELKLQKWYGDLRGKPFAIEAENSILDISGFSKQYNCAFIWQKDGVKKLNLYLIINYFKGGKLRFKKIKPEAFEANRFYTVINKKSGEIVPMEVNFNFDDPNLIILPLAFGKRQGREFIWNDLLSLETGSLKLANGRVIEKTLYNRRTRQDEPALFVALTFERREVLDSSNIKPMNLIGVDRGENIPAVIALTDPEGCPLSRFKDSLGNPTHILRIGESYKEKQRTIQAKKEVEQRRAGGYSRKYASKAKNLADDMVRNTARDLLYYAVTQDAMLIFENLSRGFGRQGKRTFMAERQYTRMEDWLTAKLAYEGLPSKTYLSKTLAQYTSKTCSNCGFTITSADYDRMLEKLKKTATGWMTTINGKELKVEGQITYYNRYKRQNVVKDLSVELDRLSEESVNNDISSWTKGRSGEALSLLKKRFSHRPVQEKFVCLNCGFETHADEQAALNIARSWLFLRSQEYKKYQTNKTTGNTDKRAFVETWQSFYRKKLKEVWKPAV

SEQ ID NO: 31079 - protein, 978 aa, synthetic construct
  REGION 1..978: note = engineered CasX variant
QEIKRINKIRRRLVKDSNTKKAGKTGPMKTLLVRVMTPDLRERLENLRKKPENIPQPISNTSRANLNKLLTDYTEMKKAILHVYWEEFQKDPVGLMSRVAQPASKKIDQNKLKPEMDEKGNLTTAGFACSQCGQPLFVYKLEQVSEKGKAYTNYFGRCNVAEHEKLILLDQLKPEKDSDEAVTYSLGKFGQRALDFYSIHVTKESTHPVKPLAQIAGNRYASAPVGKALSDACMGTIASFLSKYQDIIIEHQKVVKGNQKRLESLRELAGKENLEYPSVTLPPQPHTKEGVDAYNEVIARVRMWVNLNLWQKLKLSRDDAKPLLRLKGFPSFPLVERQANEVDWWDMVCNVKKLINEKKEDGKVFWQNLAGYKRQEALRPYLSSEEDRKKGKKFARYQLGDLLLHLEKKHGEDWGKVYDEAWERIDKKVEGLSKHIKLEEERRSEDAQSKAALTDWLRAKASFVIEGLKEADKDEFCRCELKLQKWYGDLRGKPFAIEAENSILDISGFSKQYNCAFIWQKDGVKKLNLYLIINYFKGGKLRFKKIKPEAFEANRFYTVINKKSGEIVPMEVNFNFDDPNLIILPLAFGKRQGREFIWNDLLSLETGSLKLANGRVIEKTLYNRRTRQDEPALFVALTFERREVLDSSNIKPMNLIGVDRGENIPAVIALTDPEGCPLSRFKDSLGNPTHILRIGESYKEKQRTIQAKKEVEQRRAGGYSRKYASKAKNLADDMVRNTARDLLYYAVTQDAMLIFENLSRGFGRQGKRTFMAERQYTRMEDWLTAKLAYEGLPSKTYLSKTLAQYTSKTCSNCGFTITSADYDRMLEKLKKTATGWMTTINGKELKVEGQITYYNRYKRQNVVKDLSVELDRLSEESVNNDISSWTKGRSGEALSLLKKRFSHRPVQEKFVCLNCGFETHADEQAALNIARSWLFLRSQEYKKYQTNKTTGNTDKRAFVETWQSFYRKKLKEVWKPAV

SEQ ID NO: 31080 - protein, 978 aa, synthetic construct
  REGION 1..978: note = engineered CasX variant
QEIKRINKIRRRLVKDSNTKKAGKTGPMKTLLVRVMTPDLRERLENLRKKPENIPQPISNTSRANLNKLLTDYTEMKKAILHVYWEEFQKDPVGLMSRVAQPASKKIDQNKLKPEMDEKGNLTTAGFACSQCGQPLFVYKLEQVSEKGKAYTNYFGRCNVAEHEKLILLDQLKPEKDSDEAVTYSLGKFGQRALDFYSIHVTKESTHPVKPLAQIAGNRYASVPVGKALSDACMGTIASFLSKYQDIIIEHQKVVKGNQKRLESLRELAGKENLEYPSVTLPPQPHTKEGVDAYNEVIARVRMWVNLNLWQKLKLSRDDAKPLLRLKGFPSFPLVERQANEVDWWDMVCNVKKLINEKKEDGKVFWQNLAGYKRQEALRPYLSSEEDRKKGKKFARYQLGDLLLHLEKKHGEDWGKVYDEAWERIDKKVEGLSKHIKLEEERRSEDAQSKAALTDWLRAKASFVIEGLKEADKDEFCRCELKLQKWYGDLRGKPFAIEAENSILDISGFSKQYNCAFIWQKDGVKKLNLYLIINYFKGGKLRFKKIKPEAFEANRFYTVINKKSGEIVPMEVNFNFDDPNLIILPLAFGKRQGREFIWNDLLSLETGSLKLANGRVIEKTLYNRRTRQDEPALFVALTFERREVLDSSNIKPMNLIGVDRGENIPAVIALTDPEGCPLSRFKDSLGNPTHILRIGESYKEKQRTIQAKKEVEQRRAGGYSRKYASKAKNLADDMVRNTARDLLYYAVTQDAMLIFENLSRGFGRQGKRTFMAERQYTRMEDWLTAKLAYEGLPSKTYLSKTLAQYTSKTCSNCGFTITSADYDRMLEKLKKTATGWMTTINGKELKVEGQITYYNRYKRQNVVKDLSVELDRLSEESVNNDISSWTKGRSGEALSLLKKRFSHRPVQEKFVCLNCGFETHADEQAALNIARSWLFLRSQEYKKYQTNKTTGNTDKRAFVETWQSFYRKKLKEVWKPAV

SEQ ID NO: 31081 - protein, 978 aa, synthetic construct
  REGION 1..978: note = engineered CasX variant
QEIKRINKIRRRLVKDSNTKKAGKTGPMKTLLVRVMTPDLRERLENLRKKPENIPQPISNTSRANLNKLLTDYTEMKKAILHVYWEEFQKDPVGLMSRVAQPASKKIDQNKLKPEMDEKGNLTTAGFACSQCGQPLFVYKLEQVSEKGKAYTNYFGRCNVAEHEKLIKLDQLKPEKDSDEAVTYSLGKFGQRALDFYSIHVTKESTHPVKPLAQIAGNRYASGPVGKALSDACMGTIASFLSKYQDIIIEHQKVVKGNQKRLESLRELAGKENLEYPSVTLPPQPHTKEGVDAYNEVIARVRMWVNLNLWQKLKLSRDDAKPLLRLKGFPSFPLVERQANEVDWWDMVCNVKKLINEKKEDGKVFWQNLAGYKRQEALRPYLSSEEDRKKGKKFARYQLGDLLLHLEKKHGEDWGKVYDEAWERIDKKVEGLSKHIKLEEERRSEDAQSKAALTDWLRAKASFVIEGLKEADKDEFCRCELKLQKWYGDLRGKPFAIEAENSILDISGFSKQYNCAFIWQKDGVKKLNLYLIINYFKGGKLRFKKIKPEAFEANRFYTVINKKSGEIVPMEVNFNFDDPNLIILPLAFGKRQGREFIWNDLLSLETGSLKLANGRVIEKTLYNRRTRQDEPALFVALTFERREVLDSSNIKPMNLIGVDRGENIPAVIALTDPEGCPLSRFKDSLGNPTHILRIGESYKEKQRTIQAKKEVEQRRAGGYSRKYASKAKNLADDMVRNTARDLLYYAVTQDAMLIFENLSRGFGRQGKRTFMAERQYTRMEDWLTAKLAYEGLPSKTYLSKTLAQYTSKTCSNCGFTITSADYDRMLEKLKKTATGWMTTINGKELKVEGQITYYNRYKRQNVVKDLSVELDRLSEESVNNDISSWTKGRSGEALSLLKKRFSHRPVQEKFVCLNCGFETHADEQAALNIARSWLFLRSQEYKKYQTNKTTGNTDKRAFVETWQSFYRKKLKEVWKPAV

SEQ ID NO: 31082 - protein, 977 aa, synthetic construct
  REGION 1..977: note = engineered CasX variant
QEIKRINKIRRRLVKDSNTKKAGKTGPMKTLLVRVMTPDLRERLENLRKKPENIPQPISNTSRANLNKLLTDYTEMKKAILHVYWEEFQKDPVGLMSRVAQPASKKIDQNKLKPEMDEKGNLTTAGFACSQCGQPLFVYKLEQVSEKGKAYTNYFGRCNVAEHEKLILLDQLKPEKDSDEAVTYSLGKFGQRALDFYSIHVTKESTHPVKPLAQIAGNRYASPVGKALSDACMGTIASFLSKYQDIIIEHQKVVKGNQKRLESLRELAGKENLEYPSVTLPPQPHTKEGVDAYNEVIARVRMWVNLNLWQKLKLSRDDAKPLLRLKGFPSFPLVERQANEVDWWDMVCNVKKLINEKKEDGKVFWQNLAGYKRQEALRPYLSSEEDRKKGKKFARYQLGDLLLHLEKKHGEDWGKVYDEAWERIDKKVEGLSKHIKLEEERRSEDAQSKAALTDWLRAKASFVIEGLKEADKDEFCRCELKLQKWYGDLRGKPFAIEAENSILDISGFSKQYNCAFIWQKDGVKKLNLYLIINYFKGGKLRFKKIKPEAFEANRFYTVINKKSGEIVPMEVNFNFDDPNLIILPLAFGKRQGREFIWNDLLSLETGSLKLANGRVIEKTLYNRRTRQDEPALFVALTFERREVLDSSNIKPMNLIGVDRGENIPAVIALTDPEGCPLSRFKDSLGNPTHILRIGESYKEKQRTIQAKKEVEQRRAGGYSRKYASKAKNLADDMVRNTARDLLYYAVTQDAMLIFENLSRGFGRQGKRTFMAERQYTRMEDWLTAKLAYEGLPSKTYLSKTLAQYTSKTCSNCGFTITSADYDRMLEKLKKTATGWMTTINGKELKVEGQITYYNRYKRQNVVKDLSVELDRLSEESVNNDISSWTKGRSGEALSLLKKRFSHRPVQEKFVCLNCGFETHADEQAALNIARSWLFLRSQEYKKYQTNKTTGNTDKRAFVETWQSFYRKKLKEVWKPAV

SEQ ID NO: 31083 - protein, 978 aa, synthetic construct
  REGION 1..978: note = engineered CasX variant
QEIKRINKIRRRLVKDSNTKKAGKTGPMKTLLVRVMTPDLRERLENLRKKPENIPQPISNTSRANLNKLLTDYTEMKKAILHVYWEEFQKDPVGLMSRVAQPASKKIDQNKLKPEMDEKGNLTTAGFACSQCGQPLFVYKLEQVSEKGKAYTNYFGRCNVAEHEKLILLDQLKPEKDSDEAVTYSLGKFGQRALDFYSIHVTKESTHPVKPLAQIAGNRYASYPVGKALSDACMGTIASFLSKYQDIIIEHQKVVKGNQKRLESLRELAGKENLEYPSVTLPPQPHTKEGVDAYNEVIARVRMWVNLNLWQKLKLSRDDAKPLLRLKGFPSFPLVERQANEVDWWDMVCNVKKLINEKKEDGKVFWQNLAGYKRQEALRPYLSSEEDRKKGKKFARYQLGDLLLHLEKKHGEDWGKVYDEAWERIDKKVEGLSKHIKLEEERRSEDAQSKAALTDWLRAKASFVIEGLKEADKDEFCRCELKLQKWYGDLRGKPFAIEAENSILDISGFSKQYNCAFIWQKDGVKKLNLYLIINYFKGGKLRFKKIKPEAFEANRFYTVINKKSGEIVPMEVNFNFDDPNLIILPLAFGKRQGREFIWNDLLSLETGSLKLANGRVIEKTLYNRRTRQDEPALFVALTFERREVLDSSNIKPMNLIGVDRGENIPAVIALTDPEGCPLSRFKDSLGNPTHILRIGESYKEKQRTIQAKKEVEQRRAGGYSRKYASKAKNLADDMVRNTARDLLYYAVTQDAMLIFENLSRGFGRQGKRTFMAERQYTRMEDWLTAKLAYEGLPSKTYLSKTLAQYTSKTCSNCGFTITSADYDRVLEKLKKTATGWMTTINGKELKVEGQITYYNRYKRQNVVKDLSVELDRLSEESVNNDISSWTKGRQGEALSLLKKRFSHRPVQEKFVCLNCGFETHADEQAALNIARSWLFLRSQEYKKYQTNKTTGNTDKRAFVETWQSFYRKKLKEVWKPAV

SEQ ID NO: 31084 - protein, 978 aa, synthetic construct
  REGION 1..978: note = engineered CasX variant
QEIKRINKIRRRLVKDSNTKKAGKTGPMKTLLVRVMTPDLRERLENLRKKPENIPQPISNTSRANLNKLLTDYTEMKKAILHVYWEEFQKDPVGLMSRVAQPASKKIDQNKLKPEMDEKGNLTTAGFACSQCGQPLFVYKLEQVSEKGKAYTNYFGRCNVAEHEKLILLDQLKPEKDSDEAVTYSLGKFGQRALDFYSIHVTKESTHPVKPLAQIAGNRYASHPVGKALSDACMGTIASFLSKYQDIIIEHQKVVKGNQKRLESLRELAGKENLEYPSVTLPPQPHTKEGVDAYNEVIARVRMWVNLNLWQKLKLSRDDAKPLLRLKGFPSFPLVERQANEVDWWDMVCNVKKLINEKKEDGKVFWQNLAGYKRQEALRPYLSSEEDRKKGKKFARYQLGDLLLHLEKKHGEDWGKVYDEAWERIDKKVEGLSKHIKLEEERRSEDAQSKAALTDWLRAKASFVIEGLKEADKDEFCRCELKLQKWYGDLRGKPFAIEAENSILDISGFSKQYNCAFIWQKDGVKKLNLYLIINYFKGGKLRFKKIKPEAFEANRFYTVINKKSGEIVPMEVNFNFDDPNLIILPLAFGKRQGREFIWNDLLSLETGSLKLANGRVIEKTLYNRRTRQDEPALFVALTFERREVLDSSNIKPMNLIGVDRGENIPAVIALTDPEGCPLSRFKDSLGNPTHILRIGESYKEKQRTIQAKKEVEQRRAGGYSRKYASKAKNLADDMVRNTARDLLYYAVTQDAMLIFENLSRGFGRQGKRTFMAERQYTRMEDWLTAKLAYEGLPSKTYLSKTLAQYTSKTCSNCGFTITSADYDRVLEKLKKTATGWMTTINGKELKVEGQITYYNRYKRQNVVKDLSVELDRLSEESVNNDISSWTKGRQGEALSLLKKRFSHRPVQEKFVCLNCGFETHADEQAALNIARSWLFLRSQEYKKYQTNKTTGNTDKRAFVETWQSFYRKKLKEVWKPAV

SEQ ID NO: 31085 - protein, 978 aa, synthetic construct
  REGION 1..978: note = engineered CasX variant
QEIKRINKIRRRLVKDSNTKKAGKTGPMKTLLVRVMTPDLRERLENLRKKPENIPQPISNTSRANLNKLLTDYTEMKKAILHVYWEEFQKDPVGLMSRVAQPASKKIDQNKLKPEMDEKGNLTTAGFACSQCGQPLFVYKLEQVSEKGKAYTNYFGRCNVAEHEKLILLDQLKPEKDSDEAVTYSLGKFGQRALDFYSIHVTKESTHPVKPLAQIAGNRYASSPVGKALSDACMGTIASFLSKYQDIIIEHQKVVKGNQKRLESLRELAGKENLEYPSVTLPPQPHTKEGVDAYNEVIARVRMWVNLNLWQKLKLSRDDAKPLLRLKGFPSFPLVERQANEVDWWDMVCNVKKLINEKKEDGKVFWQNLAGYKRQEALRPYLSSEEDRKKGKKFARYQLGDLLLHLEKKHGEDWGKVYDEAWERIDKKVEGLSKHIKLEEERRSEDAQSKAALTDWLRAKASFVIEGLKEADKDEFCRCELKLQKWYGDLRGKPFAIEAENSILDISGFSKQYNCAFIWQKDGVKKLNLYLIINYFKGGKLRFKKIKPEAFEANRFYTVINKKSGEIVPMEVNFNFDDPNLIILPLAFGKRQGREFIWNDLLSLETGSLKLANGRVIEKTLYNRRTRQDEPALFVALTFERREVLDSSNIKPMNLIGVDRGENIPAVIALTDPEGCPLSRFKDSLGNPTHILRIGESYKEKQRTIQAKKEVEQRRAGGYSRKYASKAKNLADDMVRNTARDLLYYAVTQDAMLIFENLSRGFGRQGKRTFMAERQYTRMEDWLTAKLAYEGLPSKTYLSKTLAQYTSKTCSNCGFTITSADYDRVLEKLKKTATGWMTTINGKELKVEGQITYYNRYKRQNVVKDLSVELDRLSEESVNNDISSWTKGRQGEALSLLKKRFSHRPVQEKFVCLNCGFETHADEQAALNIARSWLFLRSQEYKKYQTNKTTGNTDKRAFVETWQSFYRKKLKEVWKPAV

SEQ ID NO: 31086 - protein, 978 aa, synthetic construct
  REGION 1..978: note = engineered CasX variant
QEIKRINKIRRRLVKDSNTKKAGKTGPMKTLLVRVMTPDLRERLENLRKKPENIPQPISNTSRANLNKLLTDYTEMKKAILHVYWEEFQKDPVGLMSRVAQPASKKIDQNKLKPEMDEKGNLTTAGFACSQCGQPLFVYKLEQVSEKGKAYTNYFGRCNVAEHEKLILLDQLKPEKDSDEAVTYSLGKFGQRALDFYSIHVTKESTHPVKPLAQIAGNRYASTPVGKALSDACMGTIASFLSKYQDIIIEHQKVVKGNQKRLESLRELAGKENLEYPSVTLPPQPHTKEGVDAYNEVIARVRMWVNLNLWQKLKLSRDDAKPLLRLKGFPSFPLVERQANEVDWWDMVCNVKKLINEKKEDGKVFWQNLAGYKRQEALRPYLSSEEDRKKGKKFARYQLGDLLLHLEKKHGEDWGKVYDEAWERIDKKVEGLSKHIKLEEERRSEDAQSKAALTDWLRAKASFVIEGLKEADKDEFCRCELKLQKWYGDLRGKPFAIEAENSILDISGFSKQYNCAFIWQKDGVKKLNLYLIINYFKGGKLRFKKIKPEAFEANRFYTVINKKSGEIVPMEVNFNFDDPNLIILPLAFGKRQGREFIWNDLLSLETGSLKLANGRVIEKTLYNRRTRQDEPALFVALTFERREVLDSSNIKPMNLIGVDRGENIPAVIALTDPEGCPLSRFKDSLGNPTHILRIGESYKEKQRTIQAKKEVEQRRAGGYSRKYASKAKNLADDMVRNTARDLLYYAVTQDAMLIFENLSRGFGRQGKRTFMAERQYTRMEDWLTAKLAYEGLPSKTYLSKTLAQYTSKTCSNCGFTITSADYDRVLEKLKKTATGWMTTINGKELKVEGQITYYNRYKRQNVVKDLSVELDRLSEESVNNDISSWTKGRQGEALSLLKKRFSHRPVQEKFVCLNCGFETHADEQAALNIARSWLFLRSQEYKKYQTNKTTGNTDKRAFVETWQSFYRKKLKEVWKPAV

SEQ ID NO: 31087 - protein, 978 aa, synthetic construct
  REGION 1..978: note = engineered CasX variant
QEIKRINKIRRRLVKDSNTKKAGKTGPMKTLLVRVMTPDLRERLENLRKKPENIPQPISNTSRANLNKLLTDYTEMKKAILHVYWEEFQKDPVGLMSRVAQPASKKIDQNKLKPEMDEKGNLTTAGFACSQCGQPLFVYKLEQVSEKGKAYTNYFGRCNVAEHEKLILLDQLKPEKDSDEAVTYSLGKFGQRALDFYSIHVTKESTHPVKPLAQIAGNRYASAPVGKALSDACMGTIASFLSKYQDIIIEHQKVVKGNQKRLESLRELAGKENLEYPSVTLPPQPHTKEGVDAYNEVIARVRMWVNLNLWQKLKLSRDDAKPLLRLKGFPSFPLVERQANEVDWWDMVCNVKKLINEKKEDGKVFWQNLAGYKRQEALRPYLSSEEDRKKGKKFARYQLGDLLLHLEKKHGEDWGKVYDEAWERIDKKVEGLSKHIKLEEERRSEDAQSKAALTDWLRAKASFVIEGLKEADKDEFCRCELKLQKWYGDLRGKPFAIEAENSILDISGFSKQYNCAFIWQKDGVKKLNLYLIINYFKGGKLRFKKIKPEAFEANRFYTVINKKSGEIVPMEVNFNFDDPNLIILPLAFGKRQGREFIWNDLLSLETGSLKLANGRVIEKTLYNRRTRQDEPALFVALTFERREVLDSSNIKPMNLIGVDRGENIPAVIALTDPEGCPLSRFKDSLGNPTHILRIGESYKEKQRTIQAKKEVEQRRAGGYSRKYASKAKNLADDMVRNTARDLLYYAVTQDAMLIFENLSRGFGRQGKRTFMAERQYTRMEDWLTAKLAYEGLPSKTYLSKTLAQYTSKTCSNCGFTITSADYDRVLEKLKKTATGWMTTINGKELKVEGQITYYNRYKRQNVVKDLSVELDRLSEESVNNDISSWTKGRQGEALSLLKKRFSHRPVQEKFVCLNCGFETHADEQAALNIARSWLFLRSQEYKKYQTNKTTGNTDKRAFVETWQSFYRKKLKEVWKPAV

SEQ ID NO: 31088 - protein, 978 aa, synthetic construct
  REGION 1..978: note = engineered CasX variant
QEIKRINKIRRRLVKDSNTKKAGKTGPMKTLLVRVMTPDLRERLENLRKKPENIPQPISNTSRANLNKLLTDYTEMKKAILHVYWEEFQKDPVGLMSRVAQPASKKIDQNKLKPEMDEKGNLTTAGFACSQCGQPLFVYKLEQVSEKGKAYTNYFGRCNVAEHEKLILLDQLKPEKDSDEAVTYSLGKFGQRALDFYSIHVTKESTHPVKPLAQIAGNRYASVPVGKALSDACMGTIASFLSKYQDIIIEHQKVVKGNQKRLESLRELAGKENLEYPSVTLPPQPHTKEGVDAYNEVIARVRMWVNLNLWQKLKLSRDDAKPLLRLKGFPSFPLVERQANEVDWWDMVCNVKKLINEKKEDGKVFWQNLAGYKRQEALRPYLSSEEDRKKGKKFARYQLGDLLLHLEKKHGEDWGKVYDEAWERIDKKVEGLSKHIKLEEERRSEDAQSKAALTDWLRAKASFVIEGLKEADKDEFCRCELKLQKWYGDLRGKPFAIEAENSILDISGFSKQYNCAFIWQKDGVKKLNLYLIINYFKGGKLRFKKIKPEAFEANRFYTVINKKSGEIVPMEVNFNFDDPNLIILPLAFGKRQGREFIWNDLLSLETGSLKLANGRVIEKTLYNRRTRQDEPALFVALTFERREVLDSSNIKPMNLIGVDRGENIPAVIALTDPEGCPLSRFKDSLGNPTHILRIGESYKEKQRTIQAKKEVEQRRAGGYSRKYASKAKNLADDMVRNTARDLLYYAVTQDAMLIFENLSRGFGRQGKRTFMAERQYTRMEDWLTAKLAYEGLPSKTYLSKTLAQYTSKTCSNCGFTITSADYDRVLEKLKKTATGWMTTINGKELKVEGQITYYNRYKRQNVVKDLSVELDRLSEESVNNDISSWTKGRQGEALSLLKKRFSHRPVQEKFVCLNCGFETHADEQAALNIARSWLFLRSQEYKKYQTNKTTGNTDKRAFVETWQSFYRKKLKEVWKPAV

SEQ ID NO: 31089 - protein, 978 aa, synthetic construct
  REGION 1..978: note = engineered CasX variant
QEIKRINKIRRRLVKDSNTKKAGKTGPMKTLLVRVMTPDLRERLENLRKKPENIPQPISNTSRANLNKLLTDYTEMKKAILHVYWEEFQKDPVGLMSRVAQPASKKIDQNKLKPEMDEKGNLTTAGFACSQCGQPLFVYKLEQVSEKGKAYTNYFGRCNVAEHEKLIKLDQLKPEKDSDEAVTYSLGKFGQRALDFYSIHVTKESTHPVKPLAQIAGNRYASGPVGKALSDACMGTIASFLSKYQDIIIEHQKVVKGNQKRLESLRELAGKENLEYPSVTLPPQPHTKEGVDAYNEVIARVRMWVNLNLWQKLKLSRDDAKPLLRLKGFPSFPLVERQANEVDWWDMVCNVKKLINEKKEDGKVFWQNLAGYKRQEALRPYLSSEEDRKKGKKFARYQLGDLLLHLEKKHGEDWGKVYDEAWERIDKKVEGLSKHIKLEEERRSEDAQSKAALTDWLRAKASFVIEGLKEADKDEFCRCELKLQKWYGDLRGKPFAIEAENSILDISGFSKQYNCAFIWQKDGVKKLNLYLIINYFKGGKLRFKKIKPEAFEANRFYTVINKKSGEIVPMEVNFNFDDPNLIILPLAFGKRQGREFIWNDLLSLETGSLKLANGRVIEKTLYNRRTRQDEPALFVALTFERREVLDSSNIKPMNLIGVDRGENIPAVIALTDPEGCPLSRFKDSLGNPTHILRIGESYKEKQRTIQAKKEVEQRRAGGYSRKYASKAKNLADDMVRNTARDLLYYAVTQDAMLIFENLSRGFGRQGKRTFMAERQYTRMEDWLTAKLAYEGLPSKTYLSKTLAQYTSKTCSNCGFTITSADYDRVLEKLKKTATGWMTTINGKELKVEGQITYYNRYKRQNVVKDLSVELDRLSEESVNNDISSWTKGRQGEALSLLKKRFSHRPVQEKFVCLNCGFETHADEQAALNIARSWLFLRSQEYKKYQTNKTTGNTDKRAFVETWQSFYRKKLKEVWKPAV

SEQ ID NO: 31090 - protein, 977 aa, synthetic construct
  REGION 1..977: note = engineered CasX variant
QEIKRINKIRRRLVKDSNTKKAGKTGPMKTLLVRVMTPDLRERLENLRKKPENIPQPISNTSRANLNKLLTDYTEMKKAILHVYWEEFQKDPVGLMSRVAQPASKKIDQNKLKPEMDEKGNLTTAGFACSQCGQPLFVYKLEQVSEKGKAYTNYFGRCNVAEHEKLILLDQLKPEKDSDEAVTYSLGKFGQRALDFYSIHVTKESTHPVKPLAQIAGNRYASPVGKALSDACMGTIASFLSKYQDIIIEHQKVVKGNQKRLESLRELAGKENLEYPSVTLPPQPHTKEGVDAYNEVIARVRMWVNLNLWQKLKLSRDDAKPLLRLKGFPSFPLVERQANEVDWWDMVCNVKKLINEKKEDGKVFWQNLAGYKRQEALRPYLSSEEDRKKGKKFARYQLGDLLLHLEKKHGEDWGKVYDEAWERIDKKVEGLSKHIKLEEERRSEDAQSKAALTDWLRAKASFVIEGLKEADKDEFCRCELKLQKWYGDLRGKPFAIEAENSILDISGFSKQYNCAFIWQKDGVKKLNLYLIINYFKGGKLRFKKIKPEAFEANRFYTVINKKSGEIVPMEVNFNFDDPNLIILPLAFGKRQGREFIWNDLLSLETGSLKLANGRVIEKTLYNRRTRQDEPALFVALTFERREVLDSSNIKPMNLIGVDRGENIPAVIALTDPEGCPLSRFKDSLGNPTHILRIGESYKEKQRTIQAKKEVEQRRAGGYSRKYASKAKNLADDMVRNTARDLLYYAVTQDAMLIFENLSRGFGRQGKRTFMAERQYTRMEDWLTAKLAYEGLPSKTYLSKTLAQYTSKTCSNCGFTITSADYDRVLEKLKKTATGWMTTINGKELKVEGQITYYNRYKRQNVVKDLSVELDRLSEESVNNDISSWTKGRQGEALSLLKKRFSHRPVQEKFVCLNCGFETHADEQAALNIARSWLFLRSQEYKKYQTNKTTGNTDKRAFVETWQSFYRKKLKEVWKPAV

SEQ ID NO: 31091 - protein, 978 aa, synthetic construct
  REGION 1..978: note = engineered CasX variant
QEIKRINKIRRRLVKDSNTKKAGKTGPMKTLLVRVMTPDLRERLENLRKKPENIPQPISNTSRANLNKLLTDYTEMKKAILHVYWEEFQKDPVGLMSRVAQPASKKIDQNKLKPEMDEKGNLTTAGFACSQCGQPLFVYKLEQVSEKGKAYTNYFGRCNVAEHEKLILLDQLKPEKDSDEAVTYSLGKFGQRALDFYSIHVTKESTHPVKPLAQIAGNRYASYPVGKALSDACMGTIASFLSKYQDIIIEHQKVVKGNQKRLESLRELAGKENLEYPSVTLPPQPHTKEGVDAYNEVIARVRMWVNLNLWQKLKLSRDDAKPLLRLKGFPSFPLVERQANEVDWWDMVCNVKKLINEKKEDGKVFWQNLAGYKRQEALRPYLSSEEDRKKGKKFARYQLGDLLLHLEKKHGEDWGKVYDEAWERIDKKVEGLSKHIKLEEERRSEDAQSKAALTDWLRAKASFVIEGLKEADKDEFCRCELKLQKWYGDLRGKPFAIEAENSILDISGFSKQYNCAFIWQKDGVKKLNLYLIINYFKGGKLRFKKIKPEAFEANRFYTVINKKSGEIVPMEVNFNFDDPNLIILPLAFGKRQGREFIWNDLLSLETGSLKLANGRVIEKTLYNRRTRQDEPALFVALTFERREVLDSSNIKPMNLIGVDRGENIPAVIALTDPEGCPLSRFKDSLGNPTHILRIGESYKEKQRTIQAKKEVEQRRAGGYSRKYASKAKNLADDMVRNTARDLLYYAVTQDAMLIFENLSRGFGRQGKRTFMAERQYTRMEDWLTAKLAYEGLPSKTYLSKTLAQYTSKTCSNCGFTITSADYDRVLEKLKKTATGWMTTINGKELKVEGQITYYNRYKRQNVVKDLSVELDRLSEESVNNDISSWTKGRSGEALSLLKKRFSHRPVQEKFVCLNCEFETHADEQAALNIARSWLFLRSQEYKKYQTNKTTGNTDKRAFVETWQSFYRKKLKEVWKPAV

SEQ ID NO: 31092 - protein, 978 aa, synthetic construct
  REGION 1..978: note = engineered CasX variant
QEIKRINKIRRRLVKDSNTKKAGKTGPMKTLLVRVMTPDLRERLENLRKKPENIPQPISNTSRANLNKLLTDYTEMKKAILHVYWEEFQKDPVGLMSRVAQPASKKIDQNKLKPEMDEKGNLTTAGFACSQCGQPLFVYKLEQVSEKGKAYTNYFGRCNVAEHEKLILLDQLKPEKDSDEAVTYSLGKFGQRALDFYSIHVTKESTHPVKPLAQIAGNRYASHPVGKALSDACMGTIASFLSKYQDIIIEHQKVVKGNQKRLESLRELAGKENLEYPSVTLPPQPHTKEGVDAYNEVIARVRMWVNLNLWQKLKLSRDDAKPLLRLKGFPSFPLVERQANEVDWWDMVCNVKKLINEKKEDGKVFWQNLAGYKRQEALRPYLSSEEDRKKGKKFARYQLGDLLLHLEKKHGEDWGKVYDEAWERIDKKVEGLSKHIKLEEERRSEDAQSKAALTDWLRAKASFVIEGLKEADKDEFCRCELKLQKWYGDLRGKPFAIEAENSILDISGFSKQYNCAFIWQKDGVKKLNLYLIINYFKGGKLRFKKIKPEAFEANRFYTVINKKSGEIVPMEVNFNFDDPNLIILPLAFGKRQGREFIWNDLLSLETGSLKLANGRVIEKTLYNRRTRQDEPALFVALTFERREVLDSSNIKPMNLIGVDRGENIPAVIALTDPEGCPLSRFKDSLGNPTHILRIGESYKEKQRTIQAKKEVEQRRAGGYSRKYASKAKNLADDMVRNTARDLLYYAVTQDAMLIFENLSRGFGRQGKRTFMAERQYTRMEDWLTAKLAYEGLPSKTYLSKTLAQYTSKTCSNCGFTITSADYDRVLEKLKKTATGWMTTINGKELKVEGQITYYNRYKRQNVVKDLSVELDRLSEESVNNDISSWTKGRSGEALSLLKKRFSHRPVQEKFVCLNCEFETHADEQAALNIARSWLFLRSQEYKKYQTNKTTGNTDKRAFVETWQSFYRKKLKEVWKPAV

SEQ ID NO: 31093 - protein, 978 aa, synthetic construct
  REGION 1..978: note = engineered CasX variant
QEIKRINKIRRRLVKDSNTKKAGKTGPMKTLLVRVMTPDLRERLENLRKKPENIPQPISNTSRANLNKLLTDYTEMKKAILHVYWEEFQKDPVGLMSRVAQPASKKIDQNKLKPEMDEKGNLTTAGFACSQCGQPLFVYKLEQVSEKGKAYTNYFGRCNVAEHEKLILLDQLKPEKDSDEAVTYSLGKFGQRALDFYSIHVTKESTHPVKPLAQIAGNRYASSPVGKALSDACMGTIASFLSKYQDIIIEHQKVVKGNQKRLESLRELAGKENLEYPSVTLPPQPHTKEGVDAYNEVIARVRMWVNLNLWQKLKLSRDDAKPLLRLKGFPSFPLVERQANEVDWWDMVCNVKKLINEKKEDGKVFWQNLAGYKRQEALRPYLSSEEDRKKGKKFARYQLGDLLLHLEKKHGEDWGKVYDEAWERIDKKVEGLSKHIKLEEERRSEDAQSKAALTDWLRAKASFVIEGLKEADKDEFCRCELKLQKWYGDLRGKPFAIEAENSILDISGFSKQYNCAFIWQKDGVKKLNLYLIINYFKGGKLRFKKIKPEAFEANRFYTVINKKSGEIVPMEVNFNFDDPNLIILPLAFGKRQGREFIWNDLLSLETGSLKLANGRVIEKTLYNRRTRQDEPALFVALTFERREVLDSSNIKPMNLIGVDRGENIPAVIALTDPEGCPLSRFKDSLGNPTHILRIGESYKEKQRTIQAKKEVEQRRAGGYSRKYASKAKNLADDMVRNTARDLLYYAVTQDAMLIFENLSRGFGRQGKRTFMAERQYTRMEDWLTAKLAYEGLPSKTYLSKTLAQYTSKTCSNCGFTITSADYDRVLEKLKKTATGWMTTINGKELKVEGQITYYNRYKRQNVVKDLSVELDRLSEESVNNDISSWTKGRSGEALSLLKKRFSHRPVQEKFVCLNCEFETHADEQAALNIARSWLFLRSQEYKKYQTNKTTGNTDKRAFVETWQSFYRKKLKEVWKPAV

SEQ ID NO: 31094 - protein, 978 aa, synthetic construct
  REGION 1..978: note = engineered CasX variant
QEIKRINKIRRRLVKDSNTKKAGKTGPMKTLLVRVMTPDLRERLENLRKKPENIPQPISNTSRANLNKLLTDYTEMKKAILHVYWEEFQKDPVGLMSRVAQPASKKIDQNKLKPEMDEKGNLTTAGFACSQCGQPLFVYKLEQVSEKGKAYTNYFGRCNVAEHEKLILLDQLKPEKDSDEAVTYSLGKFGQRALDFYSIHVTKESTHPVKPLAQIAGNRYASTPVGKALSDACMGTIASFLSKYQDIIIEHQKVVKGNQKRLESLRELAGKENLEYPSVTLPPQPHTKEGVDAYNEVIARVRMWVNLNLWQKLKLSRDDAKPLLRLKGFPSFPLVERQANEVDWWDMVCNVKKLINEKKEDGKVFWQNLAGYKRQEALRPYLSSEEDRKKGKKFARYQLGDLLLHLEKKHGEDWGKVYDEAWERIDKKVEGLSKHIKLEEERRSEDAQSKAALTDWLRAKASFVIEGLKEADKDEFCRCELKLQKWYGDLRGKPFAIEAENSILDISGFSKQYNCAFIWQKDGVKKLNLYLIINYFKGGKLRFKKIKPEAFEANRFYTVINKKSGEIVPMEVNFNFDDPNLIILPLAFGKRQGREFIWNDLLSLETGSLKLANGRVIEKTLYNRRTRQDEPALFVALTFERREVLDSSNIKPMNLIGVDRGENIPAVIALTDPEGCPLSRFKDSLGNPTHILRIGESYKEKQRTIQAKKEVEQRRAGGYSRKYASKAKNLADDMVRNTARDLLYYAVTQDAMLIFENLSRGFGRQGKRTFMAERQYTRMEDWLTAKLAYEGLPSKTYLSKTLAQYTSKTCSNCGFTITSADYDRVLEKLKKTATGWMTTINGKELKVEGQITYYNRYKRQNVVKDLSVELDRLSEESVNNDISSWTKGRSGEALSLLKKRFSHRPVQEKFVCLNCEFETHADEQAALNIARSWLFLRSQEYKKYQTNKTTGNTDKRAFVETWQSFYRKKLKEVWKPAV

SEQ ID NO: 31095 - protein, 978 aa, synthetic construct
  REGION 1..978: note = engineered CasX variant
QEIKRINKIRRRLVKDSNTKKAGKTGPMKTLLVRVMTPDLRERLENLRKKPENIPQPISNTSRANLNKLLTDYTEMKKAILHVYWEEFQKDPVGLMSRVAQPASKKIDQNKLKPEMDEKGNLTTAGFACSQCGQPLFVYKLEQVSEKGKAYTNYFGRCNVAEHEKLILLDQLKPEKDSDEAVTYSLGKFGQRALDFYSIHVTKESTHPVKPLAQIAGNRYASAPVGKALSDACMGTIASFLSKYQDIIIEHQKVVKGNQKRLESLRELAGKENLEYPSVTLPPQPHTKEGVDAYNEVIARVRMWVNLNLWQKLKLSRDDAKPLLRLKGFPSFPLVERQANEVDWWDMVCNVKKLINEKKEDGKVFWQNLAGYKRQEALRPYLSSEEDRKKGKKFARYQLGDLLLHLEKKHGEDWGKVYDEAWERIDKKVEGLSKHIKLEEERRSEDAQSKAALTDWLRAKASFVIEGLKEADKDEFCRCELKLQKWYGDLRGKPFAIEAENSILDISGFSKQYNCAFIWQKDGVKKLNLYLIINYFKGGKLRFKKIKPEAFEANRFYTVINKKSGEIVPMEVNFNFDDPNLIILPLAFGKRQGREFIWNDLLSLETGSLKLANGRVIEKTLYNRRTRQDEPALFVALTFERREVLDSSNIKPMNLIGVDRGENIPAVIALTDPEGCPLSRFKDSLGNPTHILRIGESYKEKQRTIQAKKEVEQRRAGGYSRKYASKAKNLADDMVRNTARDLLYYAVTQDAMLIFENLSRGFGRQGKRTFMAERQYTRMEDWLTAKLAYEGLPSKTYLSKTLAQYTSKTCSNCGFTITSADYDRVLEKLKKTATGWMTTINGKELKVEGQITYYNRYKRQNVVKDLSVELDRLSEESVNNDISSWTKGRSGEALSLLKKRFSHRPVQEKFVCLNCEFETHADEQAALNIARSWLFLRSQEYKKYQTNKTTGNTDKRAFVETWQSFYRKKLKEVWKPAV

SEQ ID NO: 31096 - protein, 978 aa, synthetic construct
  REGION 1..978: note = engineered CasX variant
QEIKRINKIRRRLVKDSNTKKAGKTGPMKTLLVRVMTPDLRERLENLRKKPENIPQPISNTSRANLNKLLTDYTEMKKAILHVYWEEFQKDPVGLMSRVAQPASKKIDQNKLKPEMDEKGNLTTAGFACSQCGQPLFVYKLEQVSEKGKAYTNYFGRCNVAEHEKLILLDQLKPEKDSDEAVTYSLGKFGQRALDFYSIHVTKESTHPVKPLAQIAGNRYASVPVGKALSDACMGTIASFLSKYQDIIIEHQKVVKGNQKRLESLRELAGKENLEYPSVTLPPQPHTKEGVDAYNEVIARVRMWVNLNLWQKLKLSRDDAKPLLRLKGFPSFPLVERQANEVDWWDMVCNVKKLINEKKEDGKVFWQNLAGYKRQEALRPYLSSEEDRKKGKKFARYQLGDLLLHLEKKHGEDWGKVYDEAWERIDKKVEGLSKHIKLEEERRSEDAQSKAALTDWLRAKASFVIEGLKEADKDEFCRCELKLQKWYGDLRGKPFAIEAENSILDISGFSKQYNCAFIWQKDGVKKLNLYLIINYFKGGKLRFKKIKPEAFEANRFYTVINKKSGEIVPMEVNFNFDDPNLIILPLAFGKRQGREFIWNDLLSLETGSLKLANGRVIEKTLYNRRTRQDEPALFVALTFERREVLDSSNIKPMNLIGVDRGENIPAVIALTDPEGCPLSRFKDSLGNPTHILRIGESYKEKQRTIQAKKEVEQRRAGGYSRKYASKAKNLADDMVRNTARDLLYYAVTQDAMLIFENLSRGFGRQGKRTFMAERQYTRMEDWLTAKLAYEGLPSKTYLSKTLAQYTSKTCSNCGFTITSADYDRVLEKLKKTATGWMTTINGKELKVEGQITYYNRYKRQNVVKDLSVELDRLSEESVNNDISSWTKGRSGEALSLLKKRFSHRPVQEKFVCLNCEFETHADEQAALNIARSWLFLRSQEYKKYQTNKTTGNTDKRAFVETWQSFYRKKLKEVWKPAV

SEQ ID NO: 31097 - protein, 978 aa, synthetic construct
  REGION 1..978: note = engineered CasX variant
QEIKRINKIRRRLVKDSNTKKAGKTGPMKTLLVRVMTPDLRERLENLRKKPENIPQPISNTSRANLNKLLTDYTEMKKAILHVYWEEFQKDPVGLMSRVAQPASKKIDQNKLKPEMDEKGNLTTAGFACSQCGQPLFVYKLEQVSEKGKAYTNYFGRCNVAEHEKLIKLDQLKPEKDSDEAVTYSLGKFGQRALDFYSIHVTKESTHPVKPLAQIAGNRYASGPVGKALSDACMGTIASFLSKYQDIIIEHQKVVKGNQKRLESLRELAGKENLEYPSVTLPPQPHTKEGVDAYNEVIARVRMWVNLNLWQKLKLSRDDAKPLLRLKGFPSFPLVERQANEVDWWDMVCNVKKLINEKKEDGKVFWQNLAGYKRQEALRPYLSSEEDRKKGKKFARYQLGDLLLHLEKKHGEDWGKVYDEAWERIDKKVEGLSKHIKLEEERRSEDAQSKAALTDWLRAKASFVIEGLKEADKDEFCRCELKLQKWYGDLRGKPFAIEAENSILDISGFSKQYNCAFIWQKDGVKKLNLYLIINYFKGGKLRFKKIKPEAFEANRFYTVINKKSGEIVPMEVNFNFDDPNLIILPLAFGKRQGREFIWNDLLSLETGSLKLANGRVIEKTLYNRRTRQDEPALFVALTFERREVLDSSNIKPMNLIGVDRGENIPAVIALTDPEGCPLSRFKDSLGNPTHILRIGESYKEKQRTIQAKKEVEQRRAGGYSRKYASKAKNLADDMVRNTARDLLYYAVTQDAMLIFENLSRGFGRQGKRTFMAERQYTRMEDWLTAKLAYEGLPSKTYLSKTLAQYTSKTCSNCGFTITSADYDRVLEKLKKTATGWMTTINGKELKVEGQITYYNRYKRQNVVKDLSVELDRLSEESVNNDISSWTKGRSGEALSLLKKRFSHRPVQEKFVCLNCEFETHADEQAALNIARSWLFLRSQEYKKYQTNKTTGNTDKRAFVETWQSFYRKKLKEVWKPAV

SEQ ID NO: 31098 - protein, 977 aa, synthetic construct
  REGION 1..977: note = engineered CasX variant
QEIKRINKIRRRLVKDSNTKKAGKTGPMKTLLVRVMTPDLRERLENLRKKPENIPQPISNTSRANLNKLLTDYTEMKKAILHVYWEEFQKDPVGLMSRVAQPASKKIDQNKLKPEMDEKGNLTTAGFACSQCGQPLFVYKLEQVSEKGKAYTNYFGRCNVAEHEKLILLDQLKPEKDSDEAVTYSLGKFGQRALDFYSIHVTKESTHPVKPLAQIAGNRYASPVGKALSDACMGTIASFLSKYQDIIIEHQKVVKGNQKRLESLRELAGKENLEYPSVTLPPQPHTKEGVDAYNEVIARVRMWVNLNLWQKLKLSRDDAKPLLRLKGFPSFPLVERQANEVDWWDMVCNVKKLINEKKEDGKVFWQNLAGYKRQEALRPYLSSEEDRKKGKKFARYQLGDLLLHLEKKHGEDWGKVYDEAWERIDKKVEGLSKHIKLEEERRSEDAQSKAALTDWLRAKASFVIEGLKEADKDEFCRCELKLQKWYGDLRGKPFAIEAENSILDISGFSKQYNCAFIWQKDGVKKLNLYLIINYFKGGKLRFKKIKPEAFEANRFYTVINKKSGEIVPMEVNFNFDDPNLIILPLAFGKRQGREFIWNDLLSLETGSLKLANGRVIEKTLYNRRTRQDEPALFVALTFERREVLDSSNIKPMNLIGVDRGENIPAVIALTDPEGCPLSRFKDSLGNPTHILRIGESYKEKQRTIQAKKEVEQRRAGGYSRKYASKAKNLADDMVRNTARDLLYYAVTQDAMLIFENLSRGFGRQGKRTFMAERQYTRMEDWLTAKLAYEGLPSKTYLSKTLAQYTSKTCSNCGFTITSADYDRVLEKLKKTATGWMTTINGKELKVEGQITYYNRYKRQNVVKDLSVELDRLSEESVNNDISSWTKGRSGEALSLLKKRFSHRPVQEKFVCLNCEFETHADEQAALNIARSWLFLRSQEYKKYQTNKTTGNTDKRAFVETWQSFYRKKLKEVWKPAV

SEQ ID NO: 31099 - protein, 979 aa, synthetic construct
  REGION 1..979: note = engineered CasX variant
QEIKRINKIRRRLVKDSNTKKAGKTGPMKTLLVRVMTPDLRERLENLRKKPENIPQPISNTSRANLNKLLTDYTEMKKAILHVYWEEFQKDPVGLMSRVAQPASKKIDQNKLKPEMDEKGNLTTAGFACSQCGQPLFVYKLEQVSEKGKAYTNYFGRCNVAEHEKLILLDQLKPEKDSDEAVTYSLGKFGQRALDFYSIHVTKESTHPVKPLAQIAGNRYASYPVGKALSDACMGTIASFLSKYQDIIIEHQKVVKGNQKRLESLRELAGKENLEYPSVTLPPQPHTKEGVDAYNEVIARVRMWVNLNLWQKLKLSRDDAKPLLRLKGFPSFPLVERQANEVDWWDMVCNVKKLINEKKEDGKVFWQNLAGYKRQEALRPYLSSEEDRKKGKKFARYQLGDLLLHLEKKHGEDWGKVYDEAWERIDKKVEGLSKHIKLEEERRSEDAQSKAALTDWLRAKASFVIEGLKEADKDEFCRCELKLQKWYGDLRGKPFAIEAENSILDISGFSKQYNCAFIWQKDGVKKLNLYLIINYFKGGKLRFKKIKPEAFEANRFYTVINKKSGEIVPMEVNFNFDDPNLIILPLAFGKRQGREFIWNDLLSLETGSLKLANGRVIEKTLYNRRTRQDEPALFVALTFERREVLDSSNIKPMNLIGVDRGENIPAVIALTDPEGCPLSRFKDSLGNPTHILRIGESYKEKQRTIQAKKEVEQRRAGGYSRKYASKAKNLADDMVRNTARDLLYYAVTQDAMLIFENLSRGFGRQGKRTFMAERQYTRMEDWLTAKLAYEGLPSKTYLSKTLAQYTSKTCSNCGFTITSADYDRVLEKLKKTATGWMTTINGKELKVEGQITYYNRYKRQNVVKDLSVELDRLSEESVNNDISSWTKGRSGEALSLLKKRFSHRPVQEKFVCLNCGFETHADEQAALNIARSWLFLRSQEYKKYQTNKTSTGNTDKRAFVETWQSFYRKKLKEVWKPAV

SEQ ID NO: 31100 - protein, 979 aa, synthetic construct
  REGION 1..979: note = engineered CasX variant
QEIKRINKIRRRLVKDSNTKKAGKTGPMKTLLVRVMTPDLRERLENLRKKPENIPQPISNTSRANLNKLLTDYTEMKKAILHVYWEEFQKDPVGLMSRVAQPASKKIDQNKLKPEMDEKGNLTTAGFACSQCGQPLFVYKLEQVSEKGKAYTNYFGRCNVAEHEKLILLDQLKPEKDSDEAVTYSLGKFGQRALDFYSIHVTKESTHPVKPLAQIAGNRYASHPVGKALSDACMGTIASFLSKYQDIIIEHQKVVKGNQKRLESLRELAGKENLEYPSVTLPPQPHTKEGVDAYNEVIARVRMWVNLNLWQKLKLSRDDAKPLLRLKGFPSFPLVERQANEVDWWDMVCNVKKLINEKKEDGKVFWQNLAGYKRQEALRPYLSSEEDRKKGKKFARYQLGDLLLHLEKKHGEDWGKVYDEAWERIDKKVEGLSKHIKLEEERRSEDAQSKAALTDWLRAKASFVIEGLKEADKDEFCRCELKLQKWYGDLRGKPFAIEAENSILDISGFSKQYNCAFIWQKDGVKKLNLYLIINYFKGGKLRFKKIKPEAFEANRFYTVINKKSGEIVPMEVNFNFDDPNLIILPLAFGKRQGREFIWNDLLSLETGSLKLANGRVIEKTLYNRRTRQDEPALFVALTFERREVLDSSNIKPMNLIGVDRGENIPAVIALTDPEGCPLSRFKDSLGNPTHILRIGESYKEKQRTIQAKKEVEQRRAGGYSRKYASKAKNLADDMVRNTARDLLYYAVTQDAMLIFENLSRGFGRQGKRTFMAERQYTRMEDWLTAKLAYEGLPSKTYLSKTLAQYTSKTCSNCGFTITSADYDRVLEKLKKTATGWMTTINGKELKVEGQITYYNRYKRQNVVKDLSVELDRLSEESVNNDISSWTKGRSGEALSLLKKRFSHRPVQEKFVCLNCGFETHADEQAALNIARSWLFLRSQEYKKYQTNKTSTGNTDKRAFVETWQSFYRKKLKEVWKPAV

SEQ ID NO: 31101 - protein, 979 aa, synthetic construct
  REGION 1..979: note = engineered CasX variant
QEIKRINKIRRRLVKDSNTKKAGKTGPMKTLLVRVMTPDLRERLENLRKKPENIPQPISNTSRANLNKLLTDYTEMKKAILHVYWEEFQKDPVGLMSRVAQPASKKIDQNKLKPEMDEKGNLTTAGFACSQCGQPLFVYKLEQVSEKGKAYTNYFGRCNVAEHEKLILLDQLKPEKDSDEAVTYSLGKFGQRALDFYSIHVTKESTHPVKPLAQIAGNRYASSPVGKALSDACMGTIASFLSKYQDIIIEHQKVVKGNQKRLESLRELAGKENLEYPSVTLPPQPHTKEGVDAYNEVIARVRMWVNLNLWQKLKLSRDDAKPLLRLKGFPSFPLVERQANEVDWWDMVCNVKKLINEKKEDGKVFWQNLAGYKRQEALRPYLSSEEDRKKGKKFARYQLGDLLLHLEKKHGEDWGKVYDEAWERIDKKVEGLSKHIKLEEERRSEDAQSKAALTDWLRAKASFVIEGLKEADKDEFCRCELKLQKWYGDLRGKPFAIEAENSILDISGFSKQYNCAFIWQKDGVKKLNLYLIINYFKGGKLRFKKIKPEAFEANRFYTVINKKSGEIVPMEVNFNFDDPNLIILPLAFGKRQGREFIWNDLLSLETGSLKLANGRVIEKTLYNRRTRQDEPALFVALTFERREVLDSSNIKPMNLIGVDRGENIPAVIALTDPEGCPLSRFKDSLGNPTHILRIGESYKEKQRTIQAKKEVEQRRAGGYSRKYASKAKNLADDMVRNTARDLLYYAVTQDAMLIFENLSRGFGRQGKRTFMAERQYTRMEDWLTAKLAYEGLPSKTYLSKTLAQYTSKTCSNCGFTITSADYDRVLEKLKKTATGWMTTINGKELKVEGQITYYNRYKRQNVVKDLSVELDRLSEESVNNDISSWTKGRSGEALSLLKKRFSHRPVQEKFVCLNCGFETHADEQAALNIARSWLFLRSQEYKKYQTNKTSTGNTDKRAFVETWQSFYRKKLKEVWKPAV

SEQ ID NO: 31102 - protein, 979 aa, synthetic construct
  REGION 1..979: note = engineered CasX variant
QEIKRINKIRRRLVKDSNTKKAGKTGPMKTLLVRVMTPDLRERLENLRKKPENIPQPISNTSRANLNKLLTDYTEMKKAILHVYWEEFQKDPVGLMSRVAQPASKKIDQNKLKPEMDEKGNLTTAGFACSQCGQPLFVYKLEQVSEKGKAYTNYFGRCNVAEHEKLILLDQLKPEKDSDEAVTYSLGKFGQRALDFYSIHVTKESTHPVKPLAQIAGNRYASTPVGKALSDACMGTIASFLSKYQDIIIEHQKVVKGNQKRLESLRELAGKENLEYPSVTLPPQPHTKEGVDAYNEVIARVRMWVNLNLWQKLKLSRDDAKPLLRLKGFPSFPLVERQANEVDWWDMVCNVKKLINEKKEDGKVFWQNLAGYKRQEALRPYLSSEEDRKKGKKFARYQLGDLLLHLEKKHGEDWGKVYDEAWERIDKKVEGLSKHIKLEEERRSEDAQSKAALTDWLRAKASFVIEGLKEADKDEFCRCELKLQKWYGDLRGKPFAIEAENSILDISGFSKQYNCAFIWQKDGVKKLNLYLIINYFKGGKLRFKKIKPEAFEANRFYTVINKKSGEIVPMEVNFNFDDPNLIILPLAFGKRQGREFIWNDLLSLETGSLKLANGRVIEKTLYNRRTRQDEPALFVALTFERREVLDSSNIKPMNLIGVDRGENIPAVIALTDPEGCPLSRFKDSLGNPTHILRIGESYKEKQRTIQAKKEVEQRRAGGYSRKYASKAKNLADDMVRNTARDLLYYAVTQDAMLIFENLSRGFGRQGKRTFMAERQYTRMEDWLTAKLAYEGLPSKTYLSKTLAQYTSKTCSNCGFTITSADYDRVLEKLKKTATGWMTTINGKELKVEGQITYYNRYKRQNVVKDLSVELDRLSEESVNNDISSWTKGRSGEALSLLKKRFSHRPVQEKFVCLNCGFETHADEQAALNIARSWLFLRSQEYKKYQTNKTSTGNTDKRAFVETWQSFYRKKLKEVWKPAV

SEQ ID NO: 31103 - protein, 979 aa, synthetic construct
  REGION 1..979: note = engineered CasX variant
QEIKRINKIRRRLVKDSNTKKAGKTGPMKTLLVRVMTPDLRERLENLRKKPENIPQPISNTSRANLNKLLTDYTEMKKAILHVYWEEFQKDPVGLMSRVAQPASKKIDQNKLKPEMDEKGNLTTAGFACSQCGQPLFVYKLEQVSEKGKAYTNYFGRCNVAEHEKLILLDQLKPEKDSDEAVTYSLGKFGQRALDFYSIHVTKESTHPVKPLAQIAGNRYASAPVGKALSDACMGTIASFLSKYQDIIIEHQKVVKGNQKRLESLRELAGKENLEYPSVTLPPQPHTKEGVDAYNEVIARVRMWVNLNLWQKLKLSRDDAKPLLRLKGFPSFPLVERQANEVDWWDMVCNVKKLINEKKEDGKVFWQNLAGYKRQEALRPYLSSEEDRKKGKKFARYQLGDLLLHLEKKHGEDWGKVYDEAWERIDKKVEGLSKHIKLEEERRSEDAQSKAALTDWLRAKASFVIEGLKEADKDEFCRCELKLQKWYGDLRGKPFAIEAENSILDISGFSKQYNCAFIWQKDGVKKLNLYLIINYFKGGKLRFKKIKPEAFEANRFYTVINKKSGEIVPMEVNFNFDDPNLIILPLAFGKRQGREFIWNDLLSLETGSLKLANGRVIEKTLYNRRTRQDEPALFVALTFERREVLDSSNIKPMNLIGVDRGENIPAVIALTDPEGCPLSRFKDSLGNPTHILRIGESYKEKQRTIQAKKEVEQRRAGGYSRKYASKAKNLADDMVRNTARDLLYYAVTQDAMLIFENLSRGFGRQGKRTFMAERQYTRMEDWLTAKLAYEGLPSKTYLSKTLAQYTSKTCSNCGFTITSADYDRVLEKLKKTATGWMTTINGKELKVEGQITYYNRYKRQNVVKDLSVELDRLSEESVNNDISSWTKGRSGEALSLLKKRFSHRPVQEKFVCLNCGFETHADEQAALNIARSWLFLRSQEYKKYQTNKTSTGNTDKRAFVETWQSFYRKKLKEVWKPAV

SEQ ID NO: 31104 - protein, 979 aa, synthetic construct
  REGION 1..979: note = engineered CasX variant
QEIKRINKIRRRLVKDSNTKKAGKTGPMKTLLVRVMTPDLRERLENLRKKPENIPQPISNTSRANLNKLLTDYTEMKKAILHVYWEEFQKDPVGLMSRVAQPASKKIDQNKLKPEMDEKGNLTTAGFACSQCGQPLFVYKLEQVSEKGKAYTNYFGRCNVAEHEKLILLDQLKPEKDSDEAVTYSLGKFGQRALDFYSIHVTKESTHPVKPLAQIAGNRYASVPVGKALSDACMGTIASFLSKYQDIIIEHQKVVKGNQKRLESLRELAGKENLEYPSVTLPPQPHTKEGVDAYNEVIARVRMWVNLNLWQKLKLSRDDAKPLLRLKGFPSFPLVERQANEVDWWDMVCNVKKLINEKKEDGKVFWQNLAGYKRQEALRPYLSSEEDRKKGKKFARYQLGDLLLHLEKKHGEDWGKVYDEAWERIDKKVEGLSKHIKLEEERRSEDAQSKAALTDWLRAKASFVIEGLKEADKDEFCRCELKLQKWYGDLRGKPFAIEAENSILDISGFSKQYNCAFIWQKDGVKKLNLYLIINYFKGGKLRFKKIKPEAFEANRFYTVINKKSGEIVPMEVNFNFDDPNLIILPLAFGKRQGREFIWNDLLSLETGSLKLANGRVIEKTLYNRRTRQDEPALFVALTFERREVLDSSNIKPMNLIGVDRGENIPAVIALTDPEGCPLSRFKDSLGNPTHILRIGESYKEKQRTIQAKKEVEQRRAGGYSRKYASKAKNLADDMVRNTARDLLYYAVTQDAMLIFENLSRGFGRQGKRTFMAERQYTRMEDWLTAKLAYEGLPSKTYLSKTLAQYTSKTCSNCGFTITSADYDRVLEKLKKTATGWMTTINGKELKVEGQITYYNRYKRQNVVKDLSVELDRLSEESVNNDISSWTKGRSGEALSLLKKRFSHRPVQEKFVCLNCGFETHADEQAALNIARSWLFLRSQEYKKYQTNKTSTGNTDKRAFVETWQSFYRKKLKEVWKPAV

SEQ ID NO: 31105 - protein, 979 aa, synthetic construct
  REGION 1..979: note = engineered CasX variant
QEIKRINKIRRRLVKDSNTKKAGKTGPMKTLLVRVMTPDLRERLENLRKKPENIPQPISNTSRANLNKLLTDYTEMKKAILHVYWEEFQKDPVGLMSRVAQPASKKIDQNKLKPEMDEKGNLTTAGFACSQCGQPLFVYKLEQVSEKGKAYTNYFGRCNVAEHEKLIKLDQLKPEKDSDEAVTYSLGKFGQRALDFYSIHVTKESTHPVKPLAQIAGNRYASGPVGKALSDACMGTIASFLSKYQDIIIEHQKVVKGNQKRLESLRELAGKENLEYPSVTLPPQPHTKEGVDAYNEVIARVRMWVNLNLWQKLKLSRDDAKPLLRLKGFPSFPLVERQANEVDWWDMVCNVKKLINEKKEDGKVFWQNLAGYKRQEALRPYLSSEEDRKKGKKFARYQLGDLLLHLEKKHGEDWGKVYDEAWERIDKKVEGLSKHIKLEEERRSEDAQSKAALTDWLRAKASFVIEGLKEADKDEFCRCELKLQKWYGDLRGKPFAIEAENSILDISGFSKQYNCAFIWQKDGVKKLNLYLIINYFKGGKLRFKKIKPEAFEANRFYTVINKKSGEIVPMEVNFNFDDPNLIILPLAFGKRQGREFIWNDLLSLETGSLKLANGRVIEKTLYNRRTRQDEPALFVALTFERREVLDSSNIKPMNLIGVDRGENIPAVIALTDPEGCPLSRFKDSLGNPTHILRIGESYKEKQRTIQAKKEVEQRRAGGYSRKYASKAKNLADDMVRNTARDLLYYAVTQDAMLIFENLSRGFGRQGKRTFMAERQYTRMEDWLTAKLAYEGLPSKTYLSKTLAQYTSKTCSNCGFTITSADYDRVLEKLKKTATGWMTTINGKELKVEGQITYYNRYKRQNVVKDLSVELDRLSEESVNNDISSWTKGRSGEALSLLKKRFSHRPVQEKFVCLNCGFETHADEQAALNIARSWLFLRSQEYKKYQTNKTSTGNTDKRAFVETWQSFYRKKLKEVWKPAV

SEQ ID NO: 31106 - protein, 978 aa, synthetic construct
  REGION 1..978: note = engineered CasX variant
QEIKRINKIRRRLVKDSNTKKAGKTGPMKTLLVRVMTPDLRERLENLRKKPENIPQPISNTSRANLNKLLTDYTEMKKAILHVYWEEFQKDPVGLMSRVAQPASKKIDQNKLKPEMDEKGNLTTAGFACSQCGQPLFVYKLEQVSEKGKAYTNYFGRCNVAEHEKLILLDQLKPEKDSDEAVTYSLGKFGQRALDFYSIHVTKESTHPVKPLAQIAGNRYASPVGKALSDACMGTIASFLSKYQDIIIEHQKVVKGNQKRLESLRELAGKENLEYPSVTLPPQPHTKEGVDAYNEVIARVRMWVNLNLWQKLKLSRDDAKPLLRLKGFPSFPLVERQANEVDWWDMVCNVKKLINEKKEDGKVFWQNLAGYKRQEALRPYLSSEEDRKKGKKFARYQLGDLLLHLEKKHGEDWGKVYDEAWERIDKKVEGLSKHIKLEEERRSEDAQSKAALTDWLRAKASFVIEGLKEADKDEFCRCELKLQKWYGDLRGKPFAIEAENSILDISGFSKQYNCAFIWQKDGVKKLNLYLIINYFKGGKLRFKKIKPEAFEANRFYTVINKKSGEIVPMEVNFNFDDPNLIILPLAFGKRQGREFIWNDLLSLETGSLKLANGRVIEKTLYNRRTRQDEPALFVALTFERREVLDSSNIKPMNLIGVDRGENIPAVIALTDPEGCPLSRFKDSLGNPTHILRIGESYKEKQRTIQAKKEVEQRRAGGYSRKYASKAKNLADDMVRNTARDLLYYAVTQDAMLIFENLSRGFGRQGKRTFMAERQYTRMEDWLTAKLAYEGLPSKTYLSKTLAQYTSKTCSNCGFTITSADYDRVLEKLKKTATGWMTTINGKELKVEGQITYYNRYKRQNVVKDLSVELDRLSEESVNNDISSWTKGRSGEALSLLKKRFSHRPVQEKFVCLNCGFETHADEQAALNIARSWLFLRSQEYKKYQTNKTSTGNTDKRAFVETWQSFYRKKLKEVWKPAV

SEQ ID NO: 31107 - protein, 979 aa, synthetic construct
  REGION 1..979: note = engineered CasX variant
QEIKRINKIRRRLVKDSNTKKAGKTGPMKTLLVRVMTPDLRERLENLRKKPENIPQPISNTSRANLNKLLTDYTEMKKAILHVYWEEFQKDPVGLMSRVAQPASKKIDQNKLKPEMDEKGNLTTAGFACSQCGQPLFVYKLEQVSEKGKAYTNYFGRCNVAEHEKLILLDQLKPEKDSDEAVTYSLGKFGQRALDFYSIHVTKESTHPVKPLAQIAGNRYASYPVGKALSDACMGTIASFLSKYQDIIIEHQKVVKGNQKRLESLRELAGKENLEYPSVTLPPQPHTKEGVDAYNEVIARVRMWVNLNLWQKLKLSRDDAKPLLRLKGFPSFPLVERQANEVDWWDMVCNVKKLINEKKEDGKVFWQNLAGYKRQEALRPYLSSEEDRKKGKKFARYQLGDLLLHLEKKHGEDWGKVYDEAWERIDKKVEGLSKHIKLEEERRSEDAQSKAALTDWLRAKASFVIEGLKEADKDEFCRCELKLQKWYGDLRGKPFAIEAENSILDISGFSKQYNCAFIWQKDGVKKLNLYLIINYFKGGKLRFKKIKPEAFEANRFYTVINKKSGEIVPMEVNFNFDDPNLIILPLAFGKRQGREFIWNDLLSLETGSLKLANGRVIEKTLYNRRTRQDEPALFVALTFERREVLDSSNIKPMNLIGVDRGENIPAVIALTDPEGCPLSRFKDSLGNPTHILRIGESYKEKQRTIQAKKEVEQRRAGGYSRKYASKAKNLADDMVRNTARDLLYYAVTQDAMLIFENLSRGFGRQGKRTFMAERQYTRMEDWLTAKLAYEGLPSKTYLSKTLAQYTSKTCSNCGFTITSADYDRVLEKLKKTATGWMTTINGKELKVEGQITYYNRYKRQNVVKDLSVELDRLSEESVNNDISSWTKGRSGEALSLLKKRFSHRPVQEKFVCLNCGFETHADEQAALNIARSWLFLRSQEYKKYQTNKTTGKNTDKRAFVETWQSFYRKKLKEVWKPAV

SEQ ID NO: 31108 - protein, 979 aa, synthetic construct
  REGION 1..979: note = engineered CasX variant
QEIKRINKIRRRLVKDSNTKKAGKTGPMKTLLVRVMTPDLRERLENLRKKPENIPQPISNTSRANLNKLLTDYTEMKKAILHVYWEEFQKDPVGLMSRVAQPASKKIDQNKLKPEMDEKGNLTTAGFACSQCGQPLFVYKLEQVSEKGKAYTNYFGRCNVAEHEKLILLDQLKPEKDSDEAVTYSLGKFGQRALDFYSIHVTKESTHPVKPLAQIAGNRYASHPVGKALSDACMGTIASFLSKYQDIIIEHQKVVKGNQKRLESLRELAGKENLEYPSVTLPPQPHTKEGVDAYNEVIARVRMWVNLNLWQKLKLSRDDAKPLLRLKGFPSFPLVERQANEVDWWDMVCNVKKLINEKKEDGKVFWQNLAGYKRQEALRPYLSSEEDRKKGKKFARYQLGDLLLHLEKKHGEDWGKVYDEAWERIDKKVEGLSKHIKLEEERRSEDAQSKAALTDWLRAKASFVIEGLKEADKDEFCRCELKLQKWYGDLRGKPFAIEAENSILDISGFSKQYNCAFIWQKDGVKKLNLYLIINYFKGGKLRFKKIKPEAFEANRFYTVINKKSGEIVPMEVNFNFDDPNLIILPLAFGKRQGREFIWNDLLSLETGSLKLANGRVIEKTLYNRRTRQDEPALFVALTFERREVLDSSNIKPMNLIGVDRGENIPAVIALTDPEGCPLSRFKDSLGNPTHILRIGESYKEKQRTIQAKKEVEQRRAGGYSRKYASKAKNLADDMVRNTARDLLYYAVTQDAMLIFENLSRGFGRQGKRTFMAERQYTRMEDWLTAKLAYEGLPSKTYLSKTLAQYTSKTCSNCGFTITSADYDRVLEKLKKTATGWMTTINGKELKVEGQITYYNRYKRQNVVKDLSVELDRLSEESVNNDISSWTKGRSGEALSLLKKRFSHRPVQEKFVCLNCGFETHADEQAALNIARSWLFLRSQEYKKYQTNKTTGKNTDKRAFVETWQSFYRKKLKEVWKPAV

SEQ ID NO: 31109 - protein, 979 aa, synthetic construct
  REGION 1..979: note = engineered CasX variant
QEIKRINKIRRRLVKDSNTKKAGKTGPMKTLLVRVMTPDLRERLENLRKKPENIPQPISNTSRANLNKLLTDYTEMKKAILHVYWEEFQKDPVGLMSRVAQPASKKIDQNKLKPEMDEKGNLTTAGFACSQCGQPLFVYKLEQVSEKGKAYTNYFGRCNVAEHEKLILLDQLKPEKDSDEAVTYSLGKFGQRALDFYSIHVTKESTHPVKPLAQIAGNRYASSPVGKALSDACMGTIASFLSKYQDIIIEHQKVVKGNQKRLESLRELAGKENLEYPSVTLPPQPHTKEGVDAYNEVIARVRMWVNLNLWQKLKLSRDDAKPLLRLKGFPSFPLVERQANEVDWWDMVCNVKKLINEKKEDGKVFWQNLAGYKRQEALRPYLSSEEDRKKGKKFARYQLGDLLLHLEKKHGEDWGKVYDEAWERIDKKVEGLSKHIKLEEERRSEDAQSKAALTDWLRAKASFVIEGLKEADKDEFCRCELKLQKWYGDLRGKPFAIEAENSILDISGFSKQYNCAFIWQKDGVKKLNLYLIINYFKGGKLRFKKIKPEAFEANRFYTVINKKSGEIVPMEVNFNFDDPNLIILPLAFGKRQGREFIWNDLLSLETGSLKLANGRVIEKTLYNRRTRQDEPALFVALTFERREVLDSSNIKPMNLIGVDRGENIPAVIALTDPEGCPLSRFKDSLGNPTHILRIGESYKEKQRTIQAKKEVEQRRAGGYSRKYASKAKNLADDMVRNTARDLLYYAVTQDAMLIFENLSRGFGRQGKRTFMAERQYTRMEDWLTAKLAYEGLPSKTYLSKTLAQYTSKTCSNCGFTITSADYDRVLEKLKKTATGWMTTINGKELKVEGQITYYNRYKRQNVVKDLSVELDRLSEESVNNDISSWTKGRSGEALSLLKKRFSHRPVQEKFVCLNCGFETHADEQAALNIARSWLFLRSQEYKKYQTNKTTGKNTDKRAFVETWQSFYRKKLKEVWKPAV

SEQ ID NO: 31110 - protein, 979 aa, synthetic construct
  REGION 1..979: note = engineered CasX variant
QEIKRINKIRRRLVKDSNTKKAGKTGPMKTLLVRVMTPDLRERLENLRKKPENIPQPISNTSRANLNKLLTDYTEMKKAILHVYWEEFQKDPVGLMSRVAQPASKKIDQNKLKPEMDEKGNLTTAGFACSQCGQPLFVYKLEQVSEKGKAYTNYFGRCNVAEHEKLILLDQLKPEKDSDEAVTYSLGKFGQRALDFYSIHVTKESTHPVKPLAQIAGNRYASTPVGKALSDACMGTIASFLSKYQDIIIEHQKVVKGNQKRLESLRELAGKENLEYPSVTLPPQPHTKEGVDAYNEVIARVRMWVNLNLWQKLKLSRDDAKPLLRLKGFPSFPLVERQANEVDWWDMVCNVKKLINEKKEDGKVFWQNLAGYKRQEALRPYLSSEEDRKKGKKFARYQLGDLLLHLEKKHGEDWGKVYDEAWERIDKKVEGLSKHIKLEEERRSEDAQSKAALTDWLRAKASFVIEGLKEADKDEFCRCELKLQKWYGDLRGKPFAIEAENSILDISGFSKQYNCAFIWQKDGVKKLNLYLIINYFKGGKLRFKKIKPEAFEANRFYTVINKKSGEIVPMEVNFNFDDPNLIILPLAFGKRQGREFIWNDLLSLETGSLKLANGRVIEKTLYNRRTRQDEPALFVALTFERREVLDSSNIKPMNLIGVDRGENIPAVIALTDPEGCPLSRFKDSLGNPTHILRIGESYKEKQRTIQAKKEVEQRRAGGYSRKYASKAKNLADDMVRNTARDLLYYAVTQDAMLIFENLSRGFGRQGKRTFMAERQYTRMEDWLTAKLAYEGLPSKTYLSKTLAQYTSKTCSNCGFTITSADYDRVLEKLKKTATGWMTTINGKELKVEGQITYYNRYKRQNVVKDLSVELDRLSEESVNNDISSWTKGRSGEALSLLKKRFSHRPVQEKFVCLNCGFETHADEQAALNIARSWLFLRSQEYKKYQTNKTTGKNTDKRAFVETWQSFYRKKLKEVWKPAV

SEQ ID NO: 31111 - protein, 979 aa, synthetic construct
  REGION 1..979: note = engineered CasX variant
QEIKRINKIRRRLVKDSNTKKAGKTGPMKTLLVRVMTPDLRERLENLRKKPENIPQPISNTSRANLNKLLTDYTEMKKAILHVYWEEFQKDPVGLMSRVAQPASKKIDQNKLKPEMDEKGNLTTAGFACSQCGQPLFVYKLEQVSEKGKAYTNYFGRCNVAEHEKLILLDQLKPEKDSDEAVTYSLGKFGQRALDFYSIHVTKESTHPVKPLAQIAGNRYASAPVGKALSDACMGTIASFLSKYQDIIIEHQKVVKGNQKRLESLRELAGKENLEYPSVTLPPQPHTKEGVDAYNEVIARVRMWVNLNLWQKLKLSRDDAKPLLRLKGFPSFPLVERQANEVDWWDMVCNVKKLINEKKEDGKVFWQNLAGYKRQEALRPYLSSEEDRKKGKKFARYQLGDLLLHLEKKHGEDWGKVYDEAWERIDKKVEGLSKHIKLEEERRSEDAQSKAALTDWLRAKASFVIEGLKEADKDEFCRCELKLQKWYGDLRGKPFAIEAENSILDISGFSKQYNCAFIWQKDGVKKLNLYLIINYFKGGKLRFKKIKPEAFEANRFYTVINKKSGEIVPMEVNFNFDDPNLIILPLAFGKRQGREFIWNDLLSLETGSLKLANGRVIEKTLYNRRTRQDEPALFVALTFERREVLDSSNIKPMNLIGVDRGENIPAVIALTDPEGCPLSRFKDSLGNPTHILRIGESYKEKQRTIQAKKEVEQRRAGGYSRKYASKAKNLADDMVRNTARDLLYYAVTQDAMLIFENLSRGFGRQGKRTFMAERQYTRMEDWLTAKLAYEGLPSKTYLSKTLAQYTSKTCSNCGFTITSADYDRVLEKLKKTATGWMTTINGKELKVEGQITYYNRYKRQNVVKDLSVELDRLSEESVNNDISSWTKGRSGEALSLLKKRFSHRPVQEKFVCLNCGFETHADEQAALNIARSWLFLRSQEYKKYQTNKTTGKNTDKRAFVETWQSFYRKKLKEVWKPAV

SEQ ID NO: 31112 - protein, 979 aa, synthetic construct
  REGION 1..979: note = engineered CasX variant
QEIKRINKIRRRLVKDSNTKKAGKTGPMKTLLVRVMTPDLRERLENLRKKPENIPQPISNTSRANLNKLLTDYTEMKKAILHVYWEEFQKDPVGLMSRVAQPASKKIDQNKLKPEMDEKGNLTTAGFACSQCGQPLFVYKLEQVSEKGKAYTNYFGRCNVAEHEKLILLDQLKPEKDSDEAVTYSLGKFGQRALDFYSIHVTKESTHPVKPLAQIAGNRYASVPVGKALSDACMGTIASFLSKYQDIIIEHQKVVKGNQKRLESLRELAGKENLEYPSVTLPPQPHTKEGVDAYNEVIARVRMWVNLNLWQKLKLSRDDAKPLLRLKGFPSFPLVERQANEVDWWDMVCNVKKLINEKKEDGKVFWQNLAGYKRQEALRPYLSSEEDRKKGKKFARYQLGDLLLHLEKKHGEDWGKVYDEAWERIDKKVEGLSKHIKLEEERRSEDAQSKAALTDWLRAKASFVIEGLKEADKDEFCRCELKLQKWYGDLRGKPFAIEAENSILDISGFSKQYNCAFIWQKDGVKKLNLYLIINYFKGGKLRFKKIKPEAFEANRFYTVINKKSGEIVPMEVNFNFDDPNLIILPLAFGKRQGREFIWNDLLSLETGSLKLANGRVIEKTLYNRRTRQDEPALFVALTFERREVLDSSNIKPMNLIGVDRGENIPAVIALTDPEGCPLSRFKDSLGNPTHILRIGESYKEKQRTIQAKKEVEQRRAGGYSRKYASKAKNLADDMVRNTARDLLYYAVTQDAMLIFENLSRGFGRQGKRTFMAERQYTRMEDWLTAKLAYEGLPSKTYLSKTLAQYTSKTCSNCGFTITSADYDRVLEKLKKTATGWMTTINGKELKVEGQITYYNRYKRQNVVKDLSVELDRLSEESVNNDISSWTKGRSGEALSLLKKRFSHRPVQEKFVCLNCGFETHADEQAALNIARSWLFLRSQEYKKYQTNKTTGKNTDKRAFVETWQSFYRKKLKEVWKPAV

SEQ ID NO: 31113 - protein, 979 aa, synthetic construct
  REGION 1..979: note = engineered CasX variant
QEIKRINKIRRRLVKDSNTKKAGKTGPMKTLLVRVMTPDLRERLENLRKKPENIPQPISNTSRANLNKLLTDYTEMKKAILHVYWEEFQKDPVGLMSRVAQPASKKIDQNKLKPEMDEKGNLTTAGFACSQCGQPLFVYKLEQVSEKGKAYTNYFGRCNVAEHEKLIKLDQLKPEKDSDEAVTYSLGKFGQRALDFYSIHVTKESTHPVKPLAQIAGNRYASGPVGKALSDACMGTIASFLSKYQDIIIEHQKVVKGNQKRLESLRELAGKENLEYPSVTLPPQPHTKEGVDAYNEVIARVRMWVNLNLWQKLKLSRDDAKPLLRLKGFPSFPLVERQANEVDWWDMVCNVKKLINEKKEDGKVFWQNLAGYKRQEALRPYLSSEEDRKKGKKFARYQLGDLLLHLEKKHGEDWGKVYDEAWERIDKKVEGLSKHIKLEEERRSEDAQSKAALTDWLRAKASFVIEGLKEADKDEFCRCELKLQKWYGDLRGKPFAIEAENSILDISGFSKQYNCAFIWQKDGVKKLNLYLIINYFKGGKLRFKKIKPEAFEANRFYTVINKKSGEIVPMEVNFNFDDPNLIILPLAFGKRQGREFIWNDLLSLETGSLKLANGRVIEKTLYNRRTRQDEPALFVALTFERREVLDSSNIKPMNLIGVDRGENIPAVIALTDPEGCPLSRFKDSLGNPTHILRIGESYKEKQRTIQAKKEVEQRRAGGYSRKYASKAKNLADDMVRNTARDLLYYAVTQDAMLIFENLSRGFGRQGKRTFMAERQYTRMEDWLTAKLAYEGLPSKTYLSKTLAQYTSKTCSNCGFTITSADYDRVLEKLKKTATGWMTTINGKELKVEGQITYYNRYKRQNVVKDLSVELDRLSEESVNNDISSWTKGRSGEALSLLKKRFSHRPVQEKFVCLNCGFETHADEQAALNIARSWLFLRSQEYKKYQTNKTTGKNTDKRAFVETWQSFYRKKLKEVWKPAV

SEQ ID NO: 31114 - protein, 978 aa, synthetic construct
  REGION 1..978: note = engineered CasX variant
QEIKRINKIRRRLVKDSNTKKAGKTGPMKTLLVRVMTPDLRERLENLRKKPENIPQPISNTSRANLNKLLTDYTEMKKAILHVYWEEFQKDPVGLMSRVAQPASKKIDQNKLKPEMDEKGNLTTAGFACSQCGQPLFVYKLEQVSEKGKAYTNYFGRCNVAEHEKLILLDQLKPEKDSDEAVTYSLGKFGQRALDFYSIHVTKESTHPVKPLAQIAGNRYASPVGKALSDACMGTIASFLSKYQDIIIEHQKVVKGNQKRLESLRELAGKENLEYPSVTLPPQPHTKEGVDAYNEVIARVRMWVNLNLWQKLKLSRDDAKPLLRLKGFPSFPLVERQANEVDWWDMVCNVKKLINEKKEDGKVFWQNLAGYKRQEALRPYLSSEEDRKKGKKFARYQLGDLLLHLEKKHGEDWGKVYDEAWERIDKKVEGLSKHIKLEEERRSEDAQSKAALTDWLRAKASFVIEGLKEADKDEFCRCELKLQKWYGDLRGKPFAIEAENSILDISGFSKQYNCAFIWQKDGVKKLNLYLIINYFKGGKLRFKKIKPEAFEANRFYTVINKKSGEIVPMEVNFNFDDPNLIILPLAFGKRQGREFIWNDLLSLETGSLKLANGRVIEKTLYNRRTRQDEPALFVALTFERREVLDSSNIKPMNLIGVDRGENIPAVIALTDPEGCPLSRFKDSLGNPTHILRIGESYKEKQRTIQAKKEVEQRRAGGYSRKYASKAKNLADDMVRNTARDLLYYAVTQDAMLIFENLSRGFGRQGKRTFMAERQYTRMEDWLTAKLAYEGLPSKTYLSKTLAQYTSKTCSNCGFTITSADYDRVLEKLKKTATGWMTTINGKELKVEGQITYYNRYKRQNVVKDLSVELDRLSEESVNNDISSWTKGRSGEALSLLKKRFSHRPVQEKFVCLNCGFETHADEQAALNIARSWLFLRSQEYKKYQTNKTTGKNTDKRAFVETWQSFYRKKLKEVWKPAV

SEQ ID NO: 31115 - protein, 978 aa, synthetic construct
  REGION 1..978: note = engineered CasX variant
QEIKRINKIRRRLVKDSNTKKAGKTGPMKTLLVRVMTPDLRERLENLRKKPENIPQPISNTSRANLNKLLTDYTEMKKAILHVYWEEFQKDPVGLMSRVAQPASKKIDQNKLKPEMDEKGNLTTAGFACSQCGQPLFVYKLEQVSEKGKAYTNYFGRCNVAEHEKLILLDQLKPEKDSDEAVTYSLGKFGQRALDFYSIHVTKESTHPVKPLAQIAGNRYASYPVGKALSDACMGTIASFLSKYQDIIIEHQKVVKGNQKRLESLRELAGKENLEYPSVTLPPQPHTKEGVDAYNEVIARVRMWVNLNLWQKLKLSRDDAKPLLRLKKFPSFPLVERQANEVDWWDMVCNVKKLINEKKEDGKVFWQNLAGYKRQEALRPYLSSEEDRKKGKKFARYQLGDLLLHLEKKHGEDWGKVYDEAWERIDKKVEGLSKHIKLEEERRSEDAQSKAALTDWLRAKASFVIEGLKEADKDEFCRCELKLQKWYGDLRGKPFAIEAENSILDISGFSKQYNCAFIWQKDGVKKLNLYLIINYFKGGKLRFKKIKPEAFEANRFYTVINKKSGEIVPMEVNFNFDDPNLIILPLAFGKRQGREFIWNDLLSLETGSLKLANGRVIEKTLYNRRTRQDEPALFVALTFERREVLDSSNIKPMNLIGVDRGENIPAVIALTDPEGCPLSRFKDSLGNPTHILRIGESYKEKQRTIQAKKEVEQRRAGGYSRKYASKAKNLADDMVRNTARDLLYYAVTQDAMLIFENLSRGFGRQGKRTFMAERQYTRMEDWLTAKLAYEGLPSKTYLSKTLAQYTSKTCSNCGFTITSADYDRVLEKLKKTATGWMTTINGKELKVEGQITYYNRYKRQNVVKDLSVELDRLSEESVNNDISSWTKGRSGEALSLLKKRFSHRPVQEKFVCLNCGFETHADEQAALNIARSWLFLRSQEYKKYQTNKTTGNTDKRAFVETWQSFYRKKLKEVWKPAV

SEQ ID NO: 31116 - protein, 978 aa, synthetic construct
  REGION 1..978: note = engineered CasX variant
QEIKRINKIRRRLVKDSNTKKAGKTGPMKTLLVRVMTPDLRERLENLRKKPENIPQPISNTSRANLNKLLTDYTEMKKAILHVYWEEFQKDPVGLMSRVAQPASKKIDQNKLKPEMDEKGNLTTAGFACSQCGQPLFVYKLEQVSEKGKAYTNYFGRCNVAEHEKLILLDQLKPEKDSDEAVTYSLGKFGQRALDFYSIHVTKESTHPVKPLAQIAGNRYASHPVGKALSDACMGTIASFLSKYQDIIIEHQKVVKGNQKRLESLRELAGKENLEYPSVTLPPQPHTKEGVDAYNEVIARVRMWVNLNLWQKLKLSRDDAKPLLRLKKFPSFPLVERQANEVDWWDMVCNVKKLINEKKEDGKVFWQNLAGYKRQEALRPYLSSEEDRKKGKKFARYQLGDLLLHLEKKHGEDWGKVYDEAWERIDKKVEGLSKHIKLEEERRSEDAQSKAALTDWLRAKASFVIEGLKEADKDEFCRCELKLQKWYGDLRGKPFAIEAENSILDISGFSKQYNCAFIWQKDGVKKLNLYLIINYFKGGKLRFKKIKPEAFEANRFYTVINKKSGEIVPMEVNFNFDDPNLIILPLAFGKRQGREFIWNDLLSLETGSLKLANGRVIEKTLYNRRTRQDEPALFVALTFERREVLDSSNIKPMNLIGVDRGENIPAVIALTDPEGCPLSRFKDSLGNPTHILRIGESYKEKQRTIQAKKEVEQRRAGGYSRKYASKAKNLADDMVRNTARDLLYYAVTQDAMLIFENLSRGFGRQGKRTFMAERQYTRMEDWLTAKLAYEGLPSKTYLSKTLAQYTSKTCSNCGFTITSADYDRVLEKLKKTATGWMTTINGKELKVEGQITYYNRYKRQNVVKDLSVELDRLSEESVNNDISSWTKGRSGEALSLLKKRFSHRPVQEKFVCLNCGFETHADEQAALNIARSWLFLRSQEYKKYQTNKTTGNTDKRAFVETWQSFYRKKLKEVWKPAV

SEQ ID NO: 31117 - protein, 978 aa, synthetic construct
  REGION 1..978: note = engineered CasX variant
QEIKRINKIRRRLVKDSNTKKAGKTGPMKTLLVRVMTPDLRERLENLRKKPENIPQPISNTSRANLNKLLTDYTEMKKAILHVYWEEFQKDPVGLMSRVAQPASKKIDQNKLKPEMDEKGNLTTAGFACSQCGQPLFVYKLEQVSEKGKAYTNYFGRCNVAEHEKLILLDQLKPEKDSDEAVTYSLGKFGQRALDFYSIHVTKESTHPVKPLAQIAGNRYASSPVGKALSDACMGTIASFLSKYQDIIIEHQKVVKGNQKRLESLRELAGKENLEYPSVTLPPQPHTKEGVDAYNEVIARVRMWVNLNLWQKLKLSRDDAKPLLRLKKFPSFPLVERQANEVDWWDMVCNVKKLINEKKEDGKVFWQNLAGYKRQEALRPYLSSEEDRKKGKKFARYQLGDLLLHLEKKHGEDWGKVYDEAWERIDKKVEGLSKHIKLEEERRSEDAQSKAALTDWLRAKASFVIEGLKEADKDEFCRCELKLQKWYGDLRGKPFAIEAENSILDISGFSKQYNCAFIWQKDGVKKLNLYLIINYFKGGKLRFKKIKPEAFEANRFYTVINKKSGEIVPMEVNFNFDDPNLIILPLAFGKRQGREFIWNDLLSLETGSLKLANGRVIEKTLYNRRTRQDEPALFVALTFERREVLDSSNIKPMNLIGVDRGENIPAVIALTDPEGCPLSRFKDSLGNPTHILRIGESYKEKQRTIQAKKEVEQRRAGGYSRKYASKAKNLADDMVRNTARDLLYYAVTQDAMLIFENLSRGFGRQGKRTFMAERQYTRMEDWLTAKLAYEGLPSKTYLSKTLAQYTSKTCSNCGFTITSADYDRVLEKLKKTATGWMTTINGKELKVEGQITYYNRYKRQNVVKDLSVELDRLSEESVNNDISSWTKGRSGEALSLLKKRFSHRPVQEKFVCLNCGFETHADEQAALNIARSWLFLRSQEYKKYQTNKTTGNTDKRAFVETWQSFYRKKLKEVWKPAV

SEQ ID NO: 31118 - protein, 978 aa, synthetic construct
  REGION 1..978: note = engineered CasX variant
QEIKRINKIRRRLVKDSNTKKAGKTGPMKTLLVRVMTPDLRERLENLRKKPENIPQPISNTSRANLNKLLTDYTEMKKAILHVYWEEFQKDPVGLMSRVAQPASKKIDQNKLKPEMDEKGNLTTAGFACSQCGQPLFVYKLEQVSEKGKAYTNYFGRCNVAEHEKLILLDQLKPEKDSDEAVTYSLGKFGQRALDFYSIHVTKESTHPVKPLAQIAGNRYASTPVGKALSDACMGTIASFLSKYQDIIIEHQKVVKGNQKRLESLRELAGKENLEYPSVTLPPQPHTKEGVDAYNEVIARVRMWVNLNLWQKLKLSRDDAKPLLRLKKFPSFPLVERQANEVDWWDMVCNVKKLINEKKEDGKVFWQNLAGYKRQEALRPYLSSEEDRKKGKKFARYQLGDLLLHLEKKHGEDWGKVYDEAWERIDKKVEGLSKHIKLEEERRSEDAQSKAALTDWLRAKASFVIEGLKEADKDEFCRCELKLQKWYGDLRGKPFAIEAENSILDISGFSKQYNCAFIWQKDGVKKLNLYLIINYFKGGKLRFKKIKPEAFEANRFYTVINKKSGEIVPMEVNFNFDDPNLIILPLAFGKRQGREFIWNDLLSLETGSLKLANGRVIEKTLYNRRTRQDEPALFVALTFERREVLDSSNIKPMNLIGVDRGENIPAVIALTDPEGCPLSRFKDSLGNPTHILRIGESYKEKQRTIQAKKEVEQRRAGGYSRKYASKAKNLADDMVRNTARDLLYYAVTQDAMLIFENLSRGFGRQGKRTFMAERQYTRMEDWLTAKLAYEGLPSKTYLSKTLAQYTSKTCSNCGFTITSADYDRVLEKLKKTATGWMTTINGKELKVEGQITYYNRYKRQNVVKDLSVELDRLSEESVNNDISSWTKGRSGEALSLLKKRFSHRPVQEKFVCLNCGFETHADEQAALNIARSWLFLRSQEYKKYQTNKTTGNTDKRAFVETWQSFYRKKLKEVWKPAV

SEQ ID NO: 31119 - protein, 978 aa, synthetic construct
  REGION 1..978: note = engineered CasX variant
QEIKRINKIRRRLVKDSNTKKAGKTGPMKTLLVRVMTPDLRERLENLRKKPENIPQPISNTSRANLNKLLTDYTEMKKAILHVYWEEFQKDPVGLMSRVAQPASKKIDQNKLKPEMDEKGNLTTAGFACSQCGQPLFVYKLEQVSEKGKAYTNYFGRCNVAEHEKLILLDQLKPEKDSDEAVTYSLGKFGQRALDFYSIHVTKESTHPVKPLAQIAGNRYASAPVGKALSDACMGTIASFLSKYQDIIIEHQKVVKGNQKRLESLRELAGKENLEYPSVTLPPQPHTKEGVDAYNEVIARVRMWVNLNLWQKLKLSRDDAKPLLRLKKFPSFPLVERQANEVDWWDMVCNVKKLINEKKEDGKVFWQNLAGYKRQEALRPYLSSEEDRKKGKKFARYQLGDLLLHLEKKHGEDWGKVYDEAWERIDKKVEGLSKHIKLEEERRSEDAQSKAALTDWLRAKASFVIEGLKEADKDEFCRCELKLQKWYGDLRGKPFAIEAENSILDISGFSKQYNCAFIWQKDGVKKLNLYLIINYFKGGKLRFKKIKPEAFEANRFYTVINKKSGEIVPMEVNFNFDDPNLIILPLAFGKRQGREFIWNDLLSLETGSLKLANGRVIEKTLYNRRTRQDEPALFVALTFERREVLDSSNIKPMNLIGVDRGENIPAVIALTDPEGCPLSRFKDSLGNPTHILRIGESYKEKQRTIQAKKEVEQRRAGGYSRKYASKAKNLADDMVRNTARDLLYYAVTQDAMLIFENLSRGFGRQGKRTFMAERQYTRMEDWLTAKLAYEGLPSKTYLSKTLAQYTSKTCSNCGFTITSADYDRVLEKLKKTATGWMTTINGKELKVEGQITYYNRYKRQNVVKDLSVELDRLSEESVNNDISSWTKGRSGEALSLLKKRFSHRPVQEKFVCLNCGFETHADEQAALNIARSWLFLRSQEYKKYQTNKTTGNTDKRAFVETWQSFYRKKLKEVWKPAV

SEQ ID NO: 31120 - protein, 978 aa, synthetic construct
  REGION 1..978: note = engineered CasX variant
QEIKRINKIRRRLVKDSNTKKAGKTGPMKTLLVRVMTPDLRERLENLRKKPENIPQPISNTSRANLNKLLTDYTEMKKAILHVYWEEFQKDPVGLMSRVAQPASKKIDQNKLKPEMDEKGNLTTAGFACSQCGQPLFVYKLEQVSEKGKAYTNYFGRCNVAEHEKLILLDQLKPEKDSDEAVTYSLGKFGQRALDFYSIHVTKESTHPVKPLAQIAGNRYASVPVGKALSDACMGTIASFLSKYQDIIIEHQKVVKGNQKRLESLRELAGKENLEYPSVTLPPQPHTKEGVDAYNEVIARVRMWVNLNLWQKLKLSRDDAKPLLRLKKFPSFPLVERQANEVDWWDMVCNVKKLINEKKEDGKVFWQNLAGYKRQEALRPYLSSEEDRKKGKKFARYQLGDLLLHLEKKHGEDWGKVYDEAWERIDKKVEGLSKHIKLEEERRSEDAQSKAALTDWLRAKASFVIEGLKEADKDEFCRCELKLQKWYGDLRGKPFAIEAENSILDISGFSKQYNCAFIWQKDGVKKLNLYLIINYFKGGKLRFKKIKPEAFEANRFYTVINKKSGEIVPMEVNFNFDDPNLIILPLAFGKRQGREFIWNDLLSLETGSLKLANGRVIEKTLYNRRTRQDEPALFVALTFERREVLDSSNIKPMNLIGVDRGENIPAVIALTDPEGCPLSRFKDSLGNPTHILRIGESYKEKQRTIQAKKEVEQRRAGGYSRKYASKAKNLADDMVRNTARDLLYYAVTQDAMLIFENLSRGFGRQGKRTFMAERQYTRMEDWLTAKLAYEGLPSKTYLSKTLAQYTSKTCSNCGFTITSADYDRVLEKLKKTATGWMTTINGKELKVEGQITYYNRYKRQNVVKDLSVELDRLSEESVNNDISSWTKGRSGEALSLLKKRFSHRPVQEKFVCLNCGFETHADEQAALNIARSWLFLRSQEYKKYQTNKTTGNTDKRAFVETWQSFYRKKLKEVWKPAV

SEQ ID NO: 31121 - protein, 978 aa, synthetic construct
  REGION 1..978: note = engineered CasX variant
QEIKRINKIRRRLVKDSNTKKAGKTGPMKTLLVRVMTPDLRERLENLRKKPENIPQPISNTSRANLNKLLTDYTEMKKAILHVYWEEFQKDPVGLMSRVAQPASKKIDQNKLKPEMDEKGNLTTAGFACSQCGQPLFVYKLEQVSEKGKAYTNYFGRCNVAEHEKLIKLDQLKPEKDSDEAVTYSLGKFGQRALDFYSIHVTKESTHPVKPLAQIAGNRYASGPVGKALSDACMGTIASFLSKYQDIIIEHQKVVKGNQKRLESLRELAGKENLEYPSVTLPPQPHTKEGVDAYNEVIARVRMWVNLNLWQKLKLSRDDAKPLLRLKKFPSFPLVERQANEVDWWDMVCNVKKLINEKKEDGKVFWQNLAGYKRQEALRPYLSSEEDRKKGKKFARYQLGDLLLHLEKKHGEDWGKVYDEAWERIDKKVEGLSKHIKLEEERRSEDAQSKAALTDWLRAKASFVIEGLKEADKDEFCRCELKLQKWYGDLRGKPFAIEAENSILDISGFSKQYNCAFIWQKDGVKKLNLYLIINYFKGGKLRFKKIKPEAFEANRFYTVINKKSGEIVPMEVNFNFDDPNLIILPLAFGKRQGREFIWNDLLSLETGSLKLANGRVIEKTLYNRRTRQDEPALFVALTFERREVLDSSNIKPMNLIGVDRGENIPAVIALTDPEGCPLSRFKDSLGNPTHILRIGESYKEKQRTIQAKKEVEQRRAGGYSRKYASKAKNLADDMVRNTARDLLYYAVTQDAMLIFENLSRGFGRQGKRTFMAERQYTRMEDWLTAKLAYEGLPSKTYLSKTLAQYTSKTCSNCGFTITSADYDRVLEKLKKTATGWMTTINGKELKVEGQITYYNRYKRQNVVKDLSVELDRLSEESVNNDISSWTKGRSGEALSLLKKRFSHRPVQEKFVCLNCGFETHADEQAALNIARSWLFLRSQEYKKYQTNKTTGNTDKRAFVETWQSFYRKKLKEVWKPAV

SEQ ID NO: 31122 - protein, 977 aa, synthetic construct
  REGION 1..977: note = engineered CasX variant
QEIKRINKIRRRLVKDSNTKKAGKTGPMKTLLVRVMTPDLRERLENLRKKPENIPQPISNTSRANLNKLLTDYTEMKKAILHVYWEEFQKDPVGLMSRVAQPASKKIDQNKLKPEMDEKGNLTTAGFACSQCGQPLFVYKLEQVSEKGKAYTNYFGRCNVAEHEKLILLDQLKPEKDSDEAVTYSLGKFGQRALDFYSIHVTKESTHPVKPLAQIAGNRYASPVGKALSDACMGTIASFLSKYQDIIIEHQKVVKGNQKRLESLRELAGKENLEYPSVTLPPQPHTKEGVDAYNEVIARVRMWVNLNLWQKLKLSRDDAKPLLRLKKFPSFPLVERQANEVDWWDMVCNVKKLINEKKEDGKVFWQNLAGYKRQEALRPYLSSEEDRKKGKKFARYQLGDLLLHLEKKHGEDWGKVYDEAWERIDKKVEGLSKHIKLEEERRSEDAQSKAALTDWLRAKASFVIEGLKEADKDEFCRCELKLQKWYGDLRGKPFAIEAENSILDISGFSKQYNCAFIWQKDGVKKLNLYLIINYFKGGKLRFKKIKPEAFEANRFYTVINKKSGEIVPMEVNFNFDDPNLIILPLAFGKRQGREFIWNDLLSLETGSLKLANGRVIEKTLYNRRTRQDEPALFVALTFERREVLDSSNIKPMNLIGVDRGENIPAVIALTDPEGCPLSRFKDSLGNPTHILRIGESYKEKQRTIQAKKEVEQRRAGGYSRKYASKAKNLADDMVRNTARDLLYYAVTQDAMLIFENLSRGFGRQGKRTFMAERQYTRMEDWLTAKLAYEGLPSKTYLSKTLAQYTSKTCSNCGFTITSADYDRVLEKLKKTATGWMTTINGKELKVEGQITYYNRYKRQNVVKDLSVELDRLSEESVNNDISSWTKGRSGEALSLLKKRFSHRPVQEKFVCLNCGFETHADEQAALNIARSWLFLRSQEYKKYQTNKTTGNTDKRAFVETWQSFYRKKLKEVWKPAV

SEQ ID NO: 31123 - protein, 978 aa, synthetic construct
  REGION 1..978: note = engineered CasX variant
QEIKRINKIRRRLVKDSNTKKAGKTGPMKTLLVRVMTPDLRERLENLRKKPENIPQPISNTSRANLNKLLTDYTEMKKAILHVYWEEFQKDPVGLMSRVAQPASKKIDQNKLKPEMDEKGNLTTAGFACSQCGQPLFVYKLEQVSEKGKAYTNYFGRCNVAEHEKLILLDQLKPEKDSDEAVTYSLGKFGQRALDFYSIHVTKESTHPVKPLAQIAGNRYASYPVGKALSDACMGTIASFLSKYQDIIIEHQKVVKGNQKRLESLRELAGKENLEYPSVTLPPQPHTKEGVDAYNEVIARVRMWVNLNLWQKLKLSRDDAKPLLRLKGFPSFPLVERQANEVDWWDMVCNVKKLINEKKEDGKVFWQNLAGYKRQEALRPYLSSEEDRKKGKKFARYQLGDLLLHLEKKHGEDWGKVYDEAWERIDKKVEGLSKHIKLEEERRSEDAQSKAALTDWLRAKASFVIEGLKEADKDEFCRCELKLQKWYGDLRGKPFAIEAENSILDISGFSKQYNCAFIWQKDGVKKLNLYLIINYFKGGKLRFKKIKPEAFEANRFYTVINKKSGEIVPMEVNFNFDDPNLIILPLAFGKRQGREFIWNDLLSLETGSLKLANGRVIEKTLYNRRTRQDEPALFVALTFERREVLDSSNIKPMNLIGVDRGENIPAVIALTDPEGCPLSRFKDSLGNPTHILRIGERYKEKQRTIQAKKEVEQRRAGGYSRKYASKAKNLADDMVRNTARDLLYYAVTQDAMLIFENLSRGFGRQGKRTFMAERQYTRMEDWLTAKLAYEGLPSKTYLSKTLAQYTSKTCSNCGFTITSADYDRVLEKLKKTATGWMTTINGKELKVEGQITYYNRYKRQNVVKDLSVELDRLSEESVNNDISSWTKGRSGEALSLLKKRFSHRPVQEKFVCLNCGFETHADEQAALNIARSWLFLRSQEYKKYQTNKTTGNTDKRAFVETWQSFYRKKLKEVWKPAV

SEQ ID NO: 31124 - protein, 978 aa, synthetic construct
  REGION 1..978: note = engineered CasX variant
QEIKRINKIRRRLVKDSNTKKAGKTGPMKTLLVRVMTPDLRERLENLRKKPENIPQPISNTSRANLNKLLTDYTEMKKAILHVYWEEFQKDPVGLMSRVAQPASKKIDQNKLKPEMDEKGNLTTAGFACSQCGQPLFVYKLEQVSEKGKAYTNYFGRCNVAEHEKLILLDQLKPEKDSDEAVTYSLGKFGQRALDFYSIHVTKESTHPVKPLAQIAGNRYASHPVGKALSDACMGTIASFLSKYQDIIIEHQKVVKGNQKRLESLRELAGKENLEYPSVTLPPQPHTKEGVDAYNEVIARVRMWVNLNLWQKLKLSRDDAKPLLRLKGFPSFPLVERQANEVDWWDMVCNVKKLINEKKEDGKVFWQNLAGYKRQEALRPYLSSEEDRKKGKKFARYQLGDLLLHLEKKHGEDWGKVYDEAWERIDKKVEGLSKHIKLEEERRSEDAQSKAALTDWLRAKASFVIEGLKEADKDEFCRCELKLQKWYGDLRGKPFAIEAENSILDISGFSKQYNCAFIWQKDGVKKLNLYLIINYFKGGKLRFKKIKPEAFEANRFYTVINKKSGEIVPMEVNFNFDDPNLIILPLAFGKRQGREFIWNDLLSLETGSLKLANGRVIEKTLYNRRTRQDEPALFVALTFERREVLDSSNIKPMNLIGVDRGENIPAVIALTDPEGCPLSRFKDSLGNPTHILRIGERYKEKQRTIQAKKEVEQRRAGGYSRKYASKAKNLADDMVRNTARDLLYYAVTQDAMLIFENLSRGFGRQGKRTFMAERQYTRMEDWLTAKLAYEGLPSKTYLSKTLAQYTSKTCSNCGFTITSADYDRVLEKLKKTATGWMTTINGKELKVEGQITYYNRYKRQNVVKDLSVELDRLSEESVNNDISSWTKGRSGEALSLLKKRFSHRPVQEKFVCLNCGFETHADEQAALNIARSWLFLRSQEYKKYQTNKTTGNTDKRAFVETWQSFYRKKLKEVWKPAV

SEQ ID NO: 31125 - protein, 978 aa, synthetic construct
  REGION 1..978: note = engineered CasX variant
QEIKRINKIRRRLVKDSNTKKAGKTGPMKTLLVRVMTPDLRERLENLRKKPENIPQPISNTSRANLNKLLTDYTEMKKAILHVYWEEFQKDPVGLMSRVAQPASKKIDQNKLKPEMDEKGNLTTAGFACSQCGQPLFVYKLEQVSEKGKAYTNYFGRCNVAEHEKLILLDQLKPEKDSDEAVTYSLGKFGQRALDFYSIHVTKESTHPVKPLAQIAGNRYASSPVGKALSDACMGTIASFLSKYQDIIIEHQKVVKGNQKRLESLRELAGKENLEYPSVTLPPQPHTKEGVDAYNEVIARVRMWVNLNLWQKLKLSRDDAKPLLRLKGFPSFPLVERQANEVDWWDMVCNVKKLINEKKEDGKVFWQNLAGYKRQEALRPYLSSEEDRKKGKKFARYQLGDLLLHLEKKHGEDWGKVYDEAWERIDKKVEGLSKHIKLEEERRSEDAQSKAALTDWLRAKASFVIEGLKEADKDEFCRCELKLQKWYGDLRGKPFAIEAENSILDISGFSKQYNCAFIWQKDGVKKLNLYLIINYFKGGKLRFKKIKPEAFEANRFYTVINKKSGEIVPMEVNFNFDDPNLIILPLAFGKRQGREFIWNDLLSLETGSLKLANGRVIEKTLYNRRTRQDEPALFVALTFERREVLDSSNIKPMNLIGVDRGENIPAVIALTDPEGCPLSRFKDSLGNPTHILRIGERYKEKQRTIQAKKEVEQRRAGGYSRKYASKAKNLADDMVRNTARDLLYYAVTQDAMLIFENLSRGFGRQGKRTFMAERQYTRMEDWLTAKLAYEGLPSKTYLSKTLAQYTSKTCSNCGFTITSADYDRVLEKLKKTATGWMTTINGKELKVEGQITYYNRYKRQNVVKDLSVELDRLSEESVNNDISSWTKGRSGEALSLLKKRFSHRPVQEKFVCLNCGFETHADEQAALNIARSWLFLRSQEYKKYQTNKTTGNTDKRAFVETWQSFYRKKLKEVWKPAV

SEQ ID NO: 31126 - protein, 978 aa, synthetic construct
  REGION 1..978: note = engineered CasX variant
QEIKRINKIRRRLVKDSNTKKAGKTGPMKTLLVRVMTPDLRERLENLRKKPENIPQPISNTSRANLNKLLTDYTEMKKAILHVYWEEFQKDPVGLMSRVAQPASKKIDQNKLKPEMDEKGNLTTAGFACSQCGQPLFVYKLEQVSEKGKAYTNYFGRCNVAEHEKLILLDQLKPEKDSDEAVTYSLGKFGQRALDFYSIHVTKESTHPVKPLAQIAGNRYASTPVGKALSDACMGTIASFLSKYQDIIIEHQKVVKGNQKRLESLRELAGKENLEYPSVTLPPQPHTKEGVDAYNEVIARVRMWVNLNLWQKLKLSRDDAKPLLRLKGFPSFPLVERQANEVDWWDMVCNVKKLINEKKEDGKVFWQNLAGYKRQEALRPYLSSEEDRKKGKKFARYQLGDLLLHLEKKHGEDWGKVYDEAWERIDKKVEGLSKHIKLEEERRSEDAQSKAALTDWLRAKASFVIEGLKEADKDEFCRCELKLQKWYGDLRGKPFAIEAENSILDISGFSKQYNCAFIWQKDGVKKLNLYLIINYFKGGKLRFKKIKPEAFEANRFYTVINKKSGEIVPMEVNFNFDDPNLIILPLAFGKRQGREFIWNDLLSLETGSLKLANGRVIEKTLYNRRTRQDEPALFVALTFERREVLDSSNIKPMNLIGVDRGENIPAVIALTDPEGCPLSRFKDSLGNPTHILRIGERYKEKQRTIQAKKEVEQRRAGGYSRKYASKAKNLADDMVRNTARDLLYYAVTQDAMLIFENLSRGFGRQGKRTFMAERQYTRMEDWLTAKLAYEGLPSKTYLSKTLAQYTSKTCSNCGFTITSADYDRVLEKLKKTATGWMTTINGKELKVEGQITYYNRYKRQNVVKDLSVELDRLSEESVNNDISSWTKGRSGEALSLLKKRFSHRPVQEKFVCLNCGFETHADEQAALNIARSWLFLRSQEYKKYQTNKTTGNTDKRAFVETWQSFYRKKLKEVWKPAV

SEQ ID NO: 31127 - protein, 978 aa, synthetic construct
  REGION 1..978: note = engineered CasX variant
QEIKRINKIRRRLVKDSNTKKAGKTGPMKTLLVRVMTPDLRERLENLRKKPENIPQPISNTSRANLNKLLTDYTEMKKAILHVYWEEFQKDPVGLMSRVAQPASKKIDQNKLKPEMDEKGNLTTAGFACSQCGQPLFVYKLEQVSEKGKAYTNYFGRCNVAEHEKLILLDQLKPEKDSDEAVTYSLGKFGQRALDFYSIHVTKESTHPVKPLAQIAGNRYASAPVGKALSDACMGTIASFLSKYQDIIIEHQKVVKGNQKRLESLRELAGKENLEYPSVTLPPQPHTKEGVDAYNEVIARVRMWVNLNLWQKLKLSRDDAKPLLRLKGFPSFPLVERQANEVDWWDMVCNVKKLINEKKEDGKVFWQNLAGYKRQEALRPYLSSEEDRKKGKKFARYQLGDLLLHLEKKHGEDWGKVYDEAWERIDKKVEGLSKHIKLEEERRSEDAQSKAALTDWLRAKASFVIEGLKEADKDEFCRCELKLQKWYGDLRGKPFAIEAENSILDISGFSKQYNCAFIWQKDGVKKLNLYLIINYFKGGKLRFKKIKPEAFEANRFYTVINKKSGEIVPMEVNFNFDDPNLIILPLAFGKRQGREFIWNDLLSLETGSLKLANGRVIEKTLYNRRTRQDEPALFVALTFERREVLDSSNIKPMNLIGVDRGENIPAVIALTDPEGCPLSRFKDSLGNPTHILRIGERYKEKQRTIQAKKEVEQRRAGGYSRKYASKAKNLADDMVRNTARDLLYYAVTQDAMLIFENLSRGFGRQGKRTFMAERQYTRMEDWLTAKLAYEGLPSKTYLSKTLAQYTSKTCSNCGFTITSADYDRVLEKLKKTATGWMTTINGKELKVEGQITYYNRYKRQNVVKDLSVELDRLSEESVNNDISSWTKGRSGEALSLLKKRFSHRPVQEKFVCLNCGFETHADEQAALNIARSWLFLRSQEYKKYQTNKTTGNTDKRAFVETWQSFYRKKLKEVWKPAV

SEQ ID NO: 31128 - protein, 978 aa, synthetic construct
  REGION 1..978: note = engineered CasX variant
QEIKRINKIRRRLVKDSNTKKAGKTGPMKTLLVRVMTPDLRERLENLRKKPENIPQPISNTSRANLNKLLTDYTEMKKAILHVYWEEFQKDPVGLMSRVAQPASKKIDQNKLKPEMDEKGNLTTAGFACSQCGQPLFVYKLEQVSEKGKAYTNYFGRCNVAEHEKLILLDQLKPEKDSDEAVTYSLGKFGQRALDFYSIHVTKESTHPVKPLAQIAGNRYASVPVGKALSDACMGTIASFLSKYQDIIIEHQKVVKGNQKRLESLRELAGKENLEYPSVTLPPQPHTKEGVDAYNEVIARVRMWVNLNLWQKLKLSRDDAKPLLRLKGFPSFPLVERQANEVDWWDMVCNVKKLINEKKEDGKVFWQNLAGYKRQEALRPYLSSEEDRKKGKKFARYQLGDLLLHLEKKHGEDWGKVYDEAWERIDKKVEGLSKHIKLEEERRSEDAQSKAALTDWLRAKASFVIEGLKEADKDEFCRCELKLQKWYGDLRGKPFAIEAENSILDISGFSKQYNCAFIWQKDGVKKLNLYLIINYFKGGKLRFKKIKPEAFEANRFYTVINKKSGEIVPMEVNFNFDDPNLIILPLAFGKRQGREFIWNDLLSLETGSLKLANGRVIEKTLYNRRTRQDEPALFVALTFERREVLDSSNIKPMNLIGVDRGENIPAVIALTDPEGCPLSRFKDSLGNPTHILRIGERYKEKQRTIQAKKEVEQRRAGGYSRKYASKAKNLADDMVRNTARDLLYYAVTQDAMLIFENLSRGFGRQGKRTFMAERQYTRMEDWLTAKLAYEGLPSKTYLSKTLAQYTSKTCSNCGFTITSADYDRVLEKLKKTATGWMTTINGKELKVEGQITYYNRYKRQNVVKDLSVELDRLSEESVNNDISSWTKGRSGEALSLLKKRFSHRPVQEKFVCLNCGFETHADEQAALNIARSWLFLRSQEYKKYQTNKTTGNTDKRAFVETWQSFYRKKLKEVWKPAV

SEQ ID NO: 31129 - protein, 978 aa, synthetic construct
  REGION 1..978: note = engineered CasX variant
QEIKRINKIRRRLVKDSNTKKAGKTGPMKTLLVRVMTPDLRERLENLRKKPENIPQPISNTSRANLNKLLTDYTEMKKAILHVYWEEFQKDPVGLMSRVAQPASKKIDQNKLKPEMDEKGNLTTAGFACSQCGQPLFVYKLEQVSEKGKAYTNYFGRCNVAEHEKLIKLDQLKPEKDSDEAVTYSLGKFGQRALDFYSIHVTKESTHPVKPLAQIAGNRYASGPVGKALSDACMGTIASFLSKYQDIIIEHQKVVKGNQKRLESLRELAGKENLEYPSVTLPPQPHTKEGVDAYNEVIARVRMWVNLNLWQKLKLSRDDAKPLLRLKGFPSFPLVERQANEVDWWDMVCNVKKLINEKKEDGKVFWQNLAGYKRQEALRPYLSSEEDRKKGKKFARYQLGDLLLHLEKKHGEDWGKVYDEAWERIDKKVEGLSKHIKLEEERRSEDAQSKAALTDWLRAKASFVIEGLKEADKDEFCRCELKLQKWYGDLRGKPFAIEAENSILDISGFSKQYNCAFIWQKDGVKKLNLYLIINYFKGGKLRFKKIKPEAFEANRFYTVINKKSGEIVPMEVNFNFDDPNLIILPLAFGKRQGREFIWNDLLSLETGSLKLANGRVIEKTLYNRRTRQDEPALFVALTFERREVLDSSNIKPMNLIGVDRGENIPAVIALTDPEGCPLSRFKDSLGNPTHILRIGERYKEKQRTIQAKKEVEQRRAGGYSRKYASKAKNLADDMVRNTARDLLYYAVTQDAMLIFENLSRGFGRQGKRTFMAERQYTRMEDWLTAKLAYEGLPSKTYLSKTLAQYTSKTCSNCGFTITSADYDRVLEKLKKTATGWMTTINGKELKVEGQITYYNRYKRQNVVKDLSVELDRLSEESVNNDISSWTKGRSGEALSLLKKRFSHRPVQEKFVCLNCGFETHADEQAALNIARSWLFLRSQEYKKYQTNKTTGNTDKRAFVETWQSFYRKKLKEVWKPAV

SEQ ID NO: 31130 - protein, 977 aa, synthetic construct
  REGION 1..977: note = engineered CasX variant
QEIKRINKIRRRLVKDSNTKKAGKTGPMKTLLVRVMTPDLRERLENLRKKPENIPQPISNTSRANLNKLLTDYTEMKKAILHVYWEEFQKDPVGLMSRVAQPASKKIDQNKLKPEMDEKGNLTTAGFACSQCGQPLFVYKLEQVSEKGKAYTNYFGRCNVAEHEKLILLDQLKPEKDSDEAVTYSLGKFGQRALDFYSIHVTKESTHPVKPLAQIAGNRYASPVGKALSDACMGTIASFLSKYQDIIIEHQKVVKGNQKRLESLRELAGKENLEYPSVTLPPQPHTKEGVDAYNEVIARVRMWVNLNLWQKLKLSRDDAKPLLRLKGFPSFPLVERQANEVDWWDMVCNVKKLINEKKEDGKVFWQNLAGYKRQEALRPYLSSEEDRKKGKKFARYQLGDLLLHLEKKHGEDWGKVYDEAWERIDKKVEGLSKHIKLEEERRSEDAQSKAALTDWLRAKASFVIEGLKEADKDEFCRCELKLQKWYGDLRGKPFAIEAENSILDISGFSKQYNCAFIWQKDGVKKLNLYLIINYFKGGKLRFKKIKPEAFEANRFYTVINKKSGEIVPMEVNFNFDDPNLIILPLAFGKRQGREFIWNDLLSLETGSLKLANGRVIEKTLYNRRTRQDEPALFVALTFERREVLDSSNIKPMNLIGVDRGENIPAVIALTDPEGCPLSRFKDSLGNPTHILRIGERYKEKQRTIQAKKEVEQRRAGGYSRKYASKAKNLADDMVRNTARDLLYYAVTQDAMLIFENLSRGFGRQGKRTFMAERQYTRMEDWLTAKLAYEGLPSKTYLSKTLAQYTSKTCSNCGFTITSADYDRVLEKLKKTATGWMTTINGKELKVEGQITYYNRYKRQNVVKDLSVELDRLSEESVNNDISSWTKGRSGEALSLLKKRFSHRPVQEKFVCLNCGFETHADEQAALNIARSWLFLRSQEYKKYQTNKTTGNTDKRAFVETWQSFYRKKLKEVWKPAV

SEQ ID NO: 31131 - protein, 978 aa, synthetic construct
  REGION 1..978: note = engineered CasX variant
QEIKRINKIRRRLVKDSNTKKAGKTGPMKTLLVRVMTPDLRERLENLRKKPENIPQPISNTSRANLNKLLTDYTEMKKAILHVYWEEFQKDPVGLMSRVAQPASKKIDQNKLKPEMDEKGNLTTAGFACSQCGQPLFVYKLEQVSEKGKAYTNYFGRCNVAEHEKLILLDQLKPEKDSDEAVTYSLGKFGQRALDFYSIHVTKESTHPVKPLAQIAGNRYASYPVGKALSDACMGTIASFLSKYQDIIIEHQKVVKGNQKRLESLRELAGKENLEYPSVTLPPQPHTKEGVDAYNEVIARVRMWVNLNLWQKLKLSRDDAKPLLRLKGFPSFPLVERQANEVDWWDMVCNVKKLINEKKEDGKVFWQNLAGYKRQEALRPYLSSEEDRKKGKKFARYQLGDLLLHLEKKHGEDWGKVYDEAWERIDKKVEGLSKHIKLEEERRSEDAQSKAALTDWLRAKASFVIEGLKEADKDEFCRCELKLQKWYGDLRGKPFAIEAENSILDISGFSKQYNCAFIWQKDGVKKLNLYLIINYFKGGKLRFKKIKPEAFEANRFYTVINKKSGEIVPMEVNFNFDDPNLIILPLAFGKRQGREFIWNDLLSLETGSLQLANGRVIEKTLYNRRTRQDEPALFVALTFERREVLDSSNIKPMNLIGVDRGENIPAVIALTDPEGCPLSRFKDSLGNPTHILRIGESYKEKQRTIQAKKEVEQRRAGGYSRKYASKAKNLADDMVRNTARDLLYYAVTQDAMLIFENLSRGFGRQGKRTFMAERQYTRMEDWLTAKLAYEGLPSKTYLSKTLAQYTSKTCSNCGFTITSADYDRVLEKLKKTATGWMTTINGKELKVEGQITYYNRYKRQNVVKDLSVELDRLSEESVNNDISSWTKGRSGEALSLLKKRFSHRPVQEKFVCLNCGFETHADEQAALNIARSWLFLRSQEYKKYQTNKTTGNTDKRAFVETWQSFYRKKLKEVWKPAV

SEQ ID NO: 31132 - protein, 978 aa, synthetic construct
  REGION 1..978: note = engineered CasX variant
QEIKRINKIRRRLVKDSNTKKAGKTGPMKTLLVRVMTPDLRERLENLRKKPENIPQPISNTSRANLNKLLTDYTEMKKAILHVYWEEFQKDPVGLMSRVAQPASKKIDQNKLKPEMDEKGNLTTAGFACSQCGQPLFVYKLEQVSEKGKAYTNYFGRCNVAEHEKLILLDQLKPEKDSDEAVTYSLGKFGQRALDFYSIHVTKESTHPVKPLAQIAGNRYASHPVGKALSDACMGTIASFLSKYQDIIIEHQKVVKGNQKRLESLRELAGKENLEYPSVTLPPQPHTKEGVDAYNEVIARVRMWVNLNLWQKLKLSRDDAKPLLRLKGFPSFPLVERQANEVDWWDMVCNVKKLINEKKEDGKVFWQNLAGYKRQEALRPYLSSEEDRKKGKKFARYQLGDLLLHLEKKHGEDWGKVYDEAWERIDKKVEGLSKHIKLEEERRSEDAQSKAALTDWLRAKASFVIEGLKEADKDEFCRCELKLQKWYGDLRGKPFAIEAENSILDISGFSKQYNCAFIWQKDGVKKLNLYLIINYFKGGKLRFKKIKPEAFEANRFYTVINKKSGEIVPMEVNFNFDDPNLIILPLAFGKRQGREFIWNDLLSLETGSLQLANGRVIEKTLYNRRTRQDEPALFVALTFERREVLDSSNIKPMNLIGVDRGENIPAVIALTDPEGCPLSRFKDSLGNPTHILRIGESYKEKQRTIQAKKEVEQRRAGGYSRKYASKAKNLADDMVRNTARDLLYYAVTQDAMLIFENLSRGFGRQGKRTFMAERQYTRMEDWLTAKLAYEGLPSKTYLSKTLAQYTSKTCSNCGFTITSADYDRVLEKLKKTATGWMTTINGKELKVEGQITYYNRYKRQNVVKDLSVELDRLSEESVNNDISSWTKGRSGEALSLLKKRFSHRPVQEKFVCLNCGFETHADEQAALNIARSWLFLRSQEYKKYQTNKTTGNTDKRAFVETWQSFYRKKLKEVWKPAV

SEQ ID NO: 31133 - protein, 978 aa, synthetic construct
  REGION 1..978: note = engineered CasX variant
QEIKRINKIRRRLVKDSNTKKAGKTGPMKTLLVRVMTPDLRERLENLRKKPENIPQPISNTSRANLNKLLTDYTEMKKAILHVYWEEFQKDPVGLMSRVAQPASKKIDQNKLKPEMDEKGNLTTAGFACSQCGQPLFVYKLEQVSEKGKAYTNYFGRCNVAEHEKLILLDQLKPEKDSDEAVTYSLGKFGQRALDFYSIHVTKESTHPVKPLAQIAGNRYASSPVGKALSDACMGTIASFLSKYQDIIIEHQKVVKGNQKRLESLRELAGKENLEYPSVTLPPQPHTKEGVDAYNEVIARVRMWVNLNLWQKLKLSRDDAKPLLRLKGFPSFPLVERQANEVDWWDMVCNVKKLINEKKEDGKVFWQNLAGYKRQEALRPYLSSEEDRKKGKKFARYQLGDLLLHLEKKHGEDWGKVYDEAWERIDKKVEGLSKHIKLEEERRSEDAQSKAALTDWLRAKASFVIEGLKEADKDEFCRCELKLQKWYGDLRGKPFAIEAENSILDISGFSKQYNCAFIWQKDGVKKLNLYLIINYFKGGKLRFKKIKPEAFEANRFYTVINKKSGEIVPMEVNFNFDDPNLIILPLAFGKRQGREFIWNDLLSLETGSLQLANGRVIEKTLYNRRTRQDEPALFVALTFERREVLDSSNIKPMNLIGVDRGENIPAVIALTDPEGCPLSRFKDSLGNPTHILRIGESYKEKQRTIQAKKEVEQRRAGGYSRKYASKAKNLADDMVRNTARDLLYYAVTQDAMLIFENLSRGFGRQGKRTFMAERQYTRMEDWLTAKLAYEGLPSKTYLSKTLAQYTSKTCSNCGFTITSADYDRVLEKLKKTATGWMTTINGKELKVEGQITYYNRYKRQNVVKDLSVELDRLSEESVNNDISSWTKGRSGEALSLLKKRFSHRPVQEKFVCLNCGFETHADEQAALNIARSWLFLRSQEYKKYQTNKTTGNTDKRAFVETWQSFYRKKLKEVWKPAV

SEQ ID NO: 31134 - protein, 978 aa, synthetic construct
  REGION 1..978: note = engineered CasX variant
QEIKRINKIRRRLVKDSNTKKAGKTGPMKTLLVRVMTPDLRERLENLRKKPENIPQPISNTSRANLNKLLTDYTEMKKAILHVYWEEFQKDPVGLMSRVAQPASKKIDQNKLKPEMDEKGNLTTAGFACSQCGQPLFVYKLEQVSEKGKAYTNYFGRCNVAEHEKLILLDQLKPEKDSDEAVTYSLGKFGQRALDFYSIHVTKESTHPVKPLAQIAGNRYASTPVGKALSDACMGTIASFLSKYQDIIIEHQKVVKGNQKRLESLRELAGKENLEYPSVTLPPQPHTKEGVDAYNEVIARVRMWVNLNLWQKLKLSRDDAKPLLRLKGFPSFPLVERQANEVDWWDMVCNVKKLINEKKEDGKVFWQNLAGYKRQEALRPYLSSEEDRKKGKKFARYQLGDLLLHLEKKHGEDWGKVYDEAWERIDKKVEGLSKHIKLEEERRSEDAQSKAALTDWLRAKASFVIEGLKEADKDEFCRCELKLQKWYGDLRGKPFAIEAENSILDISGFSKQYNCAFIWQKDGVKKLNLYLIINYFKGGKLRFKKIKPEAFEANRFYTVINKKSGEIVPMEVNFNFDDPNLIILPLAFGKRQGREFIWNDLLSLETGSLQLANGRVIEKTLYNRRTRQDEPALFVALTFERREVLDSSNIKPMNLIGVDRGENIPAVIALTDPEGCPLSRFKDSLGNPTHILRIGESYKEKQRTIQAKKEVEQRRAGGYSRKYASKAKNLADDMVRNTARDLLYYAVTQDAMLIFENLSRGFGRQGKRTFMAERQYTRMEDWLTAKLAYEGLPSKTYLSKTLAQYTSKTCSNCGFTITSADYDRVLEKLKKTATGWMTTINGKELKVEGQITYYNRYKRQNVVKDLSVELDRLSEESVNNDISSWTKGRSGEALSLLKKRFSHRPVQEKFVCLNCGFETHADEQAALNIARSWLFLRSQEYKKYQTNKTTGNTDKRAFVETWQSFYRKKLKEVWKPAV

SEQ ID NO: 31135 - protein, 978 aa, synthetic construct
  REGION 1..978: note = engineered CasX variant
QEIKRINKIRRRLVKDSNTKKAGKTGPMKTLLVRVMTPDLRERLENLRKKPENIPQPISNTSRANLNKLLTDYTEMKKAILHVYWEEFQKDPVGLMSRVAQPASKKIDQNKLKPEMDEKGNLTTAGFACSQCGQPLFVYKLEQVSEKGKAYTNYFGRCNVAEHEKLILLDQLKPEKDSDEAVTYSLGKFGQRALDFYSIHVTKESTHPVKPLAQIAGNRYASAPVGKALSDACMGTIASFLSKYQDIIIEHQKVVKGNQKRLESLRELAGKENLEYPSVTLPPQPHTKEGVDAYNEVIARVRMWVNLNLWQKLKLSRDDAKPLLRLKGFPSFPLVERQANEVDWWDMVCNVKKLINEKKEDGKVFWQNLAGYKRQEALRPYLSSEEDRKKGKKFARYQLGDLLLHLEKKHGEDWGKVYDEAWERIDKKVEGLSKHIKLEEERRSEDAQSKAALTDWLRAKASFVIEGLKEADKDEFCRCELKLQKWYGDLRGKPFAIEAENSILDISGFSKQYNCAFIWQKDGVKKLNLYLIINYFKGGKLRFKKIKPEAFEANRFYTVINKKSGEIVPMEVNFNFDDPNLIILPLAFGKRQGREFIWNDLLSLETGSLQLANGRVIEKTLYNRRTRQDEPALFVALTFERREVLDSSNIKPMNLIGVDRGENIPAVIALTDPEGCPLSRFKDSLGNPTHILRIGESYKEKQRTIQAKKEVEQRRAGGYSRKYASKAKNLADDMVRNTARDLLYYAVTQDAMLIFENLSRGFGRQGKRTFMAERQYTRMEDWLTAKLAYEGLPSKTYLSKTLAQYTSKTCSNCGFTITSADYDRVLEKLKKTATGWMTTINGKELKVEGQITYYNRYKRQNVVKDLSVELDRLSEESVNNDISSWTKGRSGEALSLLKKRFSHRPVQEKFVCLNCGFETHADEQAALNIARSWLFLRSQEYKKYQTNKTTGNTDKRAFVETWQSFYRKKLKEVWKPAV

SEQ ID NO: 31136 - protein, 978 aa, synthetic construct
  REGION 1..978: note = engineered CasX variant
QEIKRINKIRRRLVKDSNTKKAGKTGPMKTLLVRVMTPDLRERLENLRKKPENIPQPISNTSRANLNKLLTDYTEMKKAILHVYWEEFQKDPVGLMSRVAQPASKKIDQNKLKPEMDEKGNLTTAGFACSQCGQPLFVYKLEQVSEKGKAYTNYFGRCNVAEHEKLILLDQLKPEKDSDEAVTYSLGKFGQRALDFYSIHVTKESTHPVKPLAQIAGNRYASVPVGKALSDACMGTIASFLSKYQDIIIEHQKVVKGNQKRLESLRELAGKENLEYPSVTLPPQPHTKEGVDAYNEVIARVRMWVNLNLWQKLKLSRDDAKPLLRLKGFPSFPLVERQANEVDWWDMVCNVKKLINEKKEDGKVFWQNLAGYKRQEALRPYLSSEEDRKKGKKFARYQLGDLLLHLEKKHGEDWGKVYDEAWERIDKKVEGLSKHIKLEEERRSEDAQSKAALTDWLRAKASFVIEGLKEADKDEFCRCELKLQKWYGDLRGKPFAIEAENSILDISGFSKQYNCAFIWQKDGVKKLNLYLIINYFKGGKLRFKKIKPEAFEANRFYTVINKKSGEIVPMEVNFNFDDPNLIILPLAFGKRQGREFIWNDLLSLETGSLQLANGRVIEKTLYNRRTRQDEPALFVALTFERREVLDSSNIKPMNLIGVDRGENIPAVIALTDPEGCPLSRFKDSLGNPTHILRIGESYKEKQRTIQAKKEVEQRRAGGYSRKYASKAKNLADDMVRNTARDLLYYAVTQDAMLIFENLSRGFGRQGKRTFMAERQYTRMEDWLTAKLAYEGLPSKTYLSKTLAQYTSKTCSNCGFTITSADYDRVLEKLKKTATGWMTTINGKELKVEGQITYYNRYKRQNVVKDLSVELDRLSEESVNNDISSWTKGRSGEALSLLKKRFSHRPVQEKFVCLNCGFETHADEQAALNIARSWLFLRSQEYKKYQTNKTTGNTDKRAFVETWQSFYRKKLKEVWKPAV

SEQ ID NO: 31137 - protein, 978 aa, synthetic construct
  REGION 1..978: note = engineered CasX variant
QEIKRINKIRRRLVKDSNTKKAGKTGPMKTLLVRVMTPDLRERLENLRKKPENIPQPISNTSRANLNKLLTDYTEMKKAILHVYWEEFQKDPVGLMSRVAQPASKKIDQNKLKPEMDEKGNLTTAGFACSQCGQPLFVYKLEQVSEKGKAYTNYFGRCNVAEHEKLIKLDQLKPEKDSDEAVTYSLGKFGQRALDFYSIHVTKESTHPVKPLAQIAGNRYASGPVGKALSDACMGTIASFLSKYQDIIIEHQKVVKGNQKRLESLRELAGKENLEYPSVTLPPQPHTKEGVDAYNEVIARVRMWVNLNLWQKLKLSRDDAKPLLRLKGFPSFPLVERQANEVDWWDMVCNVKKLINEKKEDGKVFWQNLAGYKRQEALRPYLSSEEDRKKGKKFARYQLGDLLLHLEKKHGEDWGKVYDEAWERIDKKVEGLSKHIKLEEERRSEDAQSKAALTDWLRAKASFVIEGLKEADKDEFCRCELKLQKWYGDLRGKPFAIEAENSILDISGFSKQYNCAFIWQKDGVKKLNLYLIINYFKGGKLRFKKIKPEAFEANRFYTVINKKSGEIVPMEVNFNFDDPNLIILPLAFGKRQGREFIWNDLLSLETGSLQLANGRVIEKTLYNRRTRQDEPALFVALTFERREVLDSSNIKPMNLIGVDRGENIPAVIALTDPEGCPLSRFKDSLGNPTHILRIGESYKEKQRTIQAKKEVEQRRAGGYSRKYASKAKNLADDMVRNTARDLLYYAVTQDAMLIFENLSRGFGRQGKRTFMAERQYTRMEDWLTAKLAYEGLPSKTYLSKTLAQYTSKTCSNCGFTITSADYDRVLEKLKKTATGWMTTINGKELKVEGQITYYNRYKRQNVVKDLSVELDRLSEESVNNDISSWTKGRSGEALSLLKKRFSHRPVQEKFVCLNCGFETHADEQAALNIARSWLFLRSQEYKKYQTNKTTGNTDKRAFVETWQSFYRKKLKEVWKPAV

SEQ ID NO: 31138 - protein, 977 aa, synthetic construct
  REGION 1..977: note = engineered CasX variant
QEIKRINKIRRRLVKDSNTKKAGKTGPMKTLLVRVMTPDLRERLENLRKKPENIPQPISNTSRANLNKLLTDYTEMKKAILHVYWEEFQKDPVGLMSRVAQPASKKIDQNKLKPEMDEKGNLTTAGFACSQCGQPLFVYKLEQVSEKGKAYTNYFGRCNVAEHEKLILLDQLKPEKDSDEAVTYSLGKFGQRALDFYSIHVTKESTHPVKPLAQIAGNRYASPVGKALSDACMGTIASFLSKYQDIIIEHQKVVKGNQKRLESLRELAGKENLEYPSVTLPPQPHTKEGVDAYNEVIARVRMWVNLNLWQKLKLSRDDAKPLLRLKGFPSFPLVERQANEVDWWDMVCNVKKLINEKKEDGKVFWQNLAGYKRQEALRPYLSSEEDRKKGKKFARYQLGDLLLHLEKKHGEDWGKVYDEAWERIDKKVEGLSKHIKLEEERRSEDAQSKAALTDWLRAKASFVIEGLKEADKDEFCRCELKLQKWYGDLRGKPFAIEAENSILDISGFSKQYNCAFIWQKDGVKKLNLYLIINYFKGGKLRFKKIKPEAFEANRFYTVINKKSGEIVPMEVNFNFDDPNLIILPLAFGKRQGREFIWNDLLSLETGSLQLANGRVIEKTLYNRRTRQDEPALFVALTFERREVLDSSNIKPMNLIGVDRGENIPAVIALTDPEGCPLSRFKDSLGNPTHILRIGESYKEKQRTIQAKKEVEQRRAGGYSRKYASKAKNLADDMVRNTARDLLYYAVTQDAMLIFENLSRGFGRQGKRTFMAERQYTRMEDWLTAKLAYEGLPSKTYLSKTLAQYTSKTCSNCGFTITSADYDRVLEKLKKTATGWMTTINGKELKVEGQITYYNRYKRQNVVKDLSVELDRLSEESVNNDISSWTKGRSGEALSLLKKRFSHRPVQEKFVCLNCGFETHADEQAALNIARSWLFLRSQEYKKYQTNKTTGNTDKRAFVETWQSFYRKKLKEVWKPAV

SEQ ID NO: 31139 - protein, 979 aa, synthetic construct
  REGION 1..979: note = engineered CasX variant
QEGGKRINKIRRRLVKDSNTKKAGKTGPMKTLLVRVMTPDLRERLENLRKKPENIPQPISNTSRANLNKLLTDYTEMKKAILHVYWEEFQKDPVGLMSRVAQPASKKIDQNKLKPEMDEKGNLTTAGFACSQCGQPLFVYKLEQVSEKGKAYTNYFGRCNVAEHEKLILLAQLKPEKDSDEAVTYSLGKFGQRALDFYSIHVTKESTHPVKPLAQIAGNRYASYPVGKALSDACMGTIASFLSKYQDIIIEHQKVVKGNQKRLESLRELAGKENLEYPSVTLPPQPHTKEGVDAYNEVIARVRMWVNLNLWQKLKLSRDDAKPLLRLKGFPSFPLVERQANEVDWWDMVCNVKKLINEKKEDGKVFWQNLAGYKRQEALRPYLSSEEDRKKGKKFARYQLGDLLLHLEKKHGEDWGKVYDEAWERIDKKVEGLSKHIKLEEERRSEDAQSKAALTDWLRAKASFVIEGLKEADKDEFCRCELKLQKWYGDLRGKPFAIEAENSILDISGFSKQYNCAFIWQKDGVKKLNLYLIINYFKGGKLRFKKIKPEAFEANRFYTVINKKSGEIVPMEVNFNFDDPNLIILPLAFGKRQGREFIWNDLLSLETGSLKLANGRVIEKTLYNRRTRQDEPALFVALTFERREVLDSSNIKPMNLIGVDRGENIPAVIALTDPEGCPLSRFKDSLGNPTHILRIGESYKEKQRTIQAKKEVEQRRAGGYSRKYASKAKNLADDMVRNTARDLLYYAVTQDAMLIFENLSRGFGRQGKRTFMAERQYTRMEDWLTAKLAYEGLPSKTYLSKTLAQYTSKTCSNCGFTITSADYDRVLEKLKKTATGWMTTINGKELKVEGQITYYNRYKRQNVVKDLSVELDRLSEESVNNDISSWTKGRSGEALSLLKKRFSHRPVQEKFVCLNCGFETHADEQAALNIARSWLFLRSQEYKKYQTNKTTGNTDKRAFVETWQSFYRKKLKEVWKPAV

SEQ ID NO: 31140 - protein, 979 aa, synthetic construct
  REGION 1..979: note = engineered CasX variant
QEGGKRINKIRRRLVKDSNTKKAGKTGPMKTLLVRVMTPDLRERLENLRKKPENIPQPISNTSRANLNKLLTDYTEMKKAILHVYWEEFQKDPVGLMSRVAQPASKKIDQNKLKPEMDEKGNLTTAGFACSQCGQPLFVYKLEQVSEKGKAYTNYFGRCNVAEHEKLILLAQLKPEKDSDEAVTYSLGKFGQRALDFYSIHVTKESTHPVKPLAQIAGNRYASHPVGKALSDACMGTIASFLSKYQDIIIEHQKVVKGNQKRLESLRELAGKENLEYPSVTLPPQPHTKEGVDAYNEVIARVRMWVNLNLWQKLKLSRDDAKPLLRLKGFPSFPLVERQANEVDWWDMVCNVKKLINEKKEDGKVFWQNLAGYKRQEALRPYLSSEEDRKKGKKFARYQLGDLLLHLEKKHGEDWGKVYDEAWERIDKKVEGLSKHIKLEEERRSEDAQSKAALTDWLRAKASFVIEGLKEADKDEFCRCELKLQKWYGDLRGKPFAIEAENSILDISGFSKQYNCAFIWQKDGVKKLNLYLIINYFKGGKLRFKKIKPEAFEANRFYTVINKKSGEIVPMEVNFNFDDPNLIILPLAFGKRQGREFIWNDLLSLETGSLKLANGRVIEKTLYNRRTRQDEPALFVALTFERREVLDSSNIKPMNLIGVDRGENIPAVIALTDPEGCPLSRFKDSLGNPTHILRIGESYKEKQRTIQAKKEVEQRRAGGYSRKYASKAKNLADDMVRNTARDLLYYAVTQDAMLIFENLSRGFGRQGKRTFMAERQYTRMEDWLTAKLAYEGLPSKTYLSKTLAQYTSKTCSNCGFTITSADYDRVLEKLKKTATGWMTTINGKELKVEGQITYYNRYKRQNVVKDLSVELDRLSEESVNNDISSWTKGRSGEALSLLKKRFSHRPVQEKFVCLNCGFETHADEQAALNIARSWLFLRSQEYKKYQTNKTTGNTDKRAFVETWQSFYRKKLKEVWKPAV

SEQ ID NO: 31141 - protein, 979 aa, synthetic construct
  REGION 1..979: note = engineered CasX variant
QEGGKRINKIRRRLVKDSNTKKAGKTGPMKTLLVRVMTPDLRERLENLRKKPENIPQPISNTSRANLNKLLTDYTEMKKAILHVYWEEFQKDPVGLMSRVAQPASKKIDQNKLKPEMDEKGNLTTAGFACSQCGQPLFVYKLEQVSEKGKAYTNYFGRCNVAEHEKLILLAQLKPEKDSDEAVTYSLGKFGQRALDFYSIHVTKESTHPVKPLAQIAGNRYASSPVGKALSDACMGTIASFLSKYQDIIIEHQKVVKGNQKRLESLRELAGKENLEYPSVTLPPQPHTKEGVDAYNEVIARVRMWVNLNLWQKLKLSRDDAKPLLRLKGFPSFPLVERQANEVDWWDMVCNVKKLINEKKEDGKVFWQNLAGYKRQEALRPYLSSEEDRKKGKKFARYQLGDLLLHLEKKHGEDWGKVYDEAWERIDKKVEGLSKHIKLEEERRSEDAQSKAALTDWLRAKASFVIEGLKEADKDEFCRCELKLQKWYGDLRGKPFAIEAENSILDISGFSKQYNCAFIWQKDGVKKLNLYLIINYFKGGKLRFKKIKPEAFEANRFYTVINKKSGEIVPMEVNFNFDDPNLIILPLAFGKRQGREFIWNDLLSLETGSLKLANGRVIEKTLYNRRTRQDEPALFVALTFERREVLDSSNIKPMNLIGVDRGENIPAVIALTDPEGCPLSRFKDSLGNPTHILRIGESYKEKQRTIQAKKEVEQRRAGGYSRKYASKAKNLADDMVRNTARDLLYYAVTQDAMLIFENLSRGFGRQGKRTFMAERQYTRMEDWLTAKLAYEGLPSKTYLSKTLAQYTSKTCSNCGFTITSADYDRVLEKLKKTATGWMTTINGKELKVEGQITYYNRYKRQNVVKDLSVELDRLSEESVNNDISSWTKGRSGEALSLLKKRFSHRPVQEKFVCLNCGFETHADEQAALNIARSWLFLRSQEYKKYQTNKTTGNTDKRAFVETWQSFYRKKLKEVWKPAV

SEQ ID NO: 31142 - protein, 979 aa, synthetic construct
  REGION 1..979: note = engineered CasX variant
QEGGKRINKIRRRLVKDSNTKKAGKTGPMKTLLVRVMTPDLRERLENLRKKPENIPQPISNTSRANLNKLLTDYTEMKKAILHVYWEEFQKDPVGLMSRVAQPASKKIDQNKLKPEMDEKGNLTTAGFACSQCGQPLFVYKLEQVSEKGKAYTNYFGRCNVAEHEKLILLAQLKPEKDSDEAVTYSLGKFGQRALDFYSIHVTKESTHPVKPLAQIAGNRYASTPVGKALSDACMGTIASFLSKYQDIIIEHQKVVKGNQKRLESLRELAGKENLEYPSVTLPPQPHTKEGVDAYNEVIARVRMWVNLNLWQKLKLSRDDAKPLLRLKGFPSFPLVERQANEVDWWDMVCNVKKLINEKKEDGKVFWQNLAGYKRQEALRPYLSSEEDRKKGKKFARYQLGDLLLHLEKKHGEDWGKVYDEAWERIDKKVEGLSKHIKLEEERRSEDAQSKAALTDWLRAKASFVIEGLKEADKDEFCRCELKLQKWYGDLRGKPFAIEAENSILDISGFSKQYNCAFIWQKDGVKKLNLYLIINYFKGGKLRFKKIKPEAFEANRFYTVINKKSGEIVPMEVNFNFDDPNLIILPLAFGKRQGREFIWNDLLSLETGSLKLANGRVIEKTLYNRRTRQDEPALFVALTFERREVLDSSNIKPMNLIGVDRGENIPAVIALTDPEGCPLSRFKDSLGNPTHILRIGESYKEKQRTIQAKKEVEQRRAGGYSRKYASKAKNLADDMVRNTARDLLYYAVTQDAMLIFENLSRGFGRQGKRTFMAERQYTRMEDWLTAKLAYEGLPSKTYLSKTLAQYTSKTCSNCGFTITSADYDRVLEKLKKTATGWMTTINGKELKVEGQITYYNRYKRQNVVKDLSVELDRLSEESVNNDISSWTKGRSGEALSLLKKRFSHRPVQEKFVCLNCGFETHADEQAALNIARSWLFLRSQEYKKYQTNKTTGNTDKRAFVETWQSFYRKKLKEVWKPAV

SEQ ID NO: 31143 - protein, 979 aa, synthetic construct
  REGION 1..979: note = engineered CasX variant
QEGGKRINKIRRRLVKDSNTKKAGKTGPMKTLLVRVMTPDLRERLENLRKKPENIPQPISNTSRANLNKLLTDYTEMKKAILHVYWEEFQKDPVGLMSRVAQPASKKIDQNKLKPEMDEKGNLTTAGFACSQCGQPLFVYKLEQVSEKGKAYTNYFGRCNVAEHEKLILLAQLKPEKDSDEAVTYSLGKFGQRALDFYSIHVTKESTHPVKPLAQIAGNRYASAPVGKALSDACMGTIASFLSKYQDIIIEHQKVVKGNQKRLESLRELAGKENLEYPSVTLPPQPHTKEGVDAYNEVIARVRMWVNLNLWQKLKLSRDDAKPLLRLKGFPSFPLVERQANEVDWWDMVCNVKKLINEKKEDGKVFWQNLAGYKRQEALRPYLSSEEDRKKGKKFARYQLGDLLLHLEKKHGEDWGKVYDEAWERIDKKVEGLSKHIKLEEERRSEDAQSKAALTDWLRAKASFVIEGLKEADKDEFCRCELKLQKWYGDLRGKPFAIEAENSILDISGFSKQYNCAFIWQKDGVKKLNLYLIINYFKGGKLRFKKIKPEAFEANRFYTVINKKSGEIVPMEVNFNFDDPNLIILPLAFGKRQGREFIWNDLLSLETGSLKLANGRVIEKTLYNRRTRQDEPALFVALTFERREVLDSSNIKPMNLIGVDRGENIPAVIALTDPEGCPLSRFKDSLGNPTHILRIGESYKEKQRTIQAKKEVEQRRAGGYSRKYASKAKNLADDMVRNTARDLLYYAVTQDAMLIFENLSRGFGRQGKRTFMAERQYTRMEDWLTAKLAYEGLPSKTYLSKTLAQYTSKTCSNCGFTITSADYDRVLEKLKKTATGWMTTINGKELKVEGQITYYNRYKRQNVVKDLSVELDRLSEESVNNDISSWTKGRSGEALSLLKKRFSHRPVQEKFVCLNCGFETHADEQAALNIARSWLFLRSQEYKKYQTNKTTGNTDKRAFVETWQSFYRKKLKEVWKPAV

SEQ ID NO: 31144 - protein, 979 aa, synthetic construct
  REGION 1..979: note = engineered CasX variant
QEGGKRINKIRRRLVKDSNTKKAGKTGPMKTLLVRVMTPDLRERLENLRKKPENIPQPISNTSRANLNKLLTDYTEMKKAILHVYWEEFQKDPVGLMSRVAQPASKKIDQNKLKPEMDEKGNLTTAGFACSQCGQPLFVYKLEQVSEKGKAYTNYFGRCNVAEHEKLILLAQLKPEKDSDEAVTYSLGKFGQRALDFYSIHVTKESTHPVKPLAQIAGNRYASVPVGKALSDACMGTIASFLSKYQDIIIEHQKVVKGNQKRLESLRELAGKENLEYPSVTLPPQPHTKEGVDAYNEVIARVRMWVNLNLWQKLKLSRDDAKPLLRLKGFPSFPLVERQANEVDWWDMVCNVKKLINEKKEDGKVFWQNLAGYKRQEALRPYLSSEEDRKKGKKFARYQLGDLLLHLEKKHGEDWGKVYDEAWERIDKKVEGLSKHIKLEEERRSEDAQSKAALTDWLRAKASFVIEGLKEADKDEFCRCELKLQKWYGDLRGKPFAIEAENSILDISGFSKQYNCAFIWQKDGVKKLNLYLIINYFKGGKLRFKKIKPEAFEANRFYTVINKKSGEIVPMEVNFNFDDPNLIILPLAFGKRQGREFIWNDLLSLETGSLKLANGRVIEKTLYNRRTRQDEPALFVALTFERREVLDSSNIKPMNLIGVDRGENIPAVIALTDPEGCPLSRFKDSLGNPTHILRIGESYKEKQRTIQAKKEVEQRRAGGYSRKYASKAKNLADDMVRNTARDLLYYAVTQDAMLIFENLSRGFGRQGKRTFMAERQYTRMEDWLTAKLAYEGLPSKTYLSKTLAQYTSKTCSNCGFTITSADYDRVLEKLKKTATGWMTTINGKELKVEGQITYYNRYKRQNVVKDLSVELDRLSEESVNNDISSWTKGRSGEALSLLKKRFSHRPVQEKFVCLNCGFETHADEQAALNIARSWLFLRSQEYKKYQTNKTTGNTDKRAFVETWQSFYRKKLKEVWKPAV

SEQ ID NO: 31145 - protein, 979 aa, synthetic construct
  REGION 1..979: note = engineered CasX variant
QEGGKRINKIRRRLVKDSNTKKAGKTGPMKTLLVRVMTPDLRERLENLRKKPENIPQPISNTSRANLNKLLTDYTEMKKAILHVYWEEFQKDPVGLMSRVAQPASKKIDQNKLKPEMDEKGNLTTAGFACSQCGQPLFVYKLEQVSEKGKAYTNYFGRCNVAEHEKLIKLAQLKPEKDSDEAVTYSLGKFGQRALDFYSIHVTKESTHPVKPLAQIAGNRYASGPVGKALSDACMGTIASFLSKYQDIIIEHQKVVKGNQKRLESLRELAGKENLEYPSVTLPPQPHTKEGVDAYNEVIARVRMWVNLNLWQKLKLSRDDAKPLLRLKGFPSFPLVERQANEVDWWDMVCNVKKLINEKKEDGKVFWQNLAGYKRQEALRPYLSSEEDRKKGKKFARYQLGDLLLHLEKKHGEDWGKVYDEAWERIDKKVEGLSKHIKLEEERRSEDAQSKAALTDWLRAKASFVIEGLKEADKDEFCRCELKLQKWYGDLRGKPFAIEAENSILDISGFSKQYNCAFIWQKDGVKKLNLYLIINYFKGGKLRFKKIKPEAFEANRFYTVINKKSGEIVPMEVNFNFDDPNLIILPLAFGKRQGREFIWNDLLSLETGSLKLANGRVIEKTLYNRRTRQDEPALFVALTFERREVLDSSNIKPMNLIGVDRGENIPAVIALTDPEGCPLSRFKDSLGNPTHILRIGESYKEKQRTIQAKKEVEQRRAGGYSRKYASKAKNLADDMVRNTARDLLYYAVTQDAMLIFENLSRGFGRQGKRTFMAERQYTRMEDWLTAKLAYEGLPSKTYLSKTLAQYTSKTCSNCGFTITSADYDRVLEKLKKTATGWMTTINGKELKVEGQITYYNRYKRQNVVKDLSVELDRLSEESVNNDISSWTKGRSGEALSLLKKRFSHRPVQEKFVCLNCGFETHADEQAALNIARSWLFLRSQEYKKYQTNKTTGNTDKRAFVETWQSFYRKKLKEVWKPAV

SEQ ID NO: 31146 - protein, 978 aa, synthetic construct
  REGION 1..978: note = engineered CasX variant
QEGGKRINKIRRRLVKDSNTKKAGKTGPMKTLLVRVMTPDLRERLENLRKKPENIPQPISNTSRANLNKLLTDYTEMKKAILHVYWEEFQKDPVGLMSRVAQPASKKIDQNKLKPEMDEKGNLTTAGFACSQCGQPLFVYKLEQVSEKGKAYTNYFGRCNVAEHEKLILLAQLKPEKDSDEAVTYSLGKFGQRALDFYSIHVTKESTHPVKPLAQIAGNRYASPVGKALSDACMGTIASFLSKYQDIIIEHQKVVKGNQKRLESLRELAGKENLEYPSVTLPPQPHTKEGVDAYNEVIARVRMWVNLNLWQKLKLSRDDAKPLLRLKGFPSFPLVERQANEVDWWDMVCNVKKLINEKKEDGKVFWQNLAGYKRQEALRPYLSSEEDRKKGKKFARYQLGDLLLHLEKKHGEDWGKVYDEAWERIDKKVEGLSKHIKLEEERRSEDAQSKAALTDWLRAKASFVIEGLKEADKDEFCRCELKLQKWYGDLRGKPFAIEAENSILDISGFSKQYNCAFIWQKDGVKKLNLYLIINYFKGGKLRFKKIKPEAFEANRFYTVINKKSGEIVPMEVNFNFDDPNLIILPLAFGKRQGREFIWNDLLSLETGSLKLANGRVIEKTLYNRRTRQDEPALFVALTFERREVLDSSNIKPMNLIGVDRGENIPAVIALTDPEGCPLSRFKDSLGNPTHILRIGESYKEKQRTIQAKKEVEQRRAGGYSRKYASKAKNLADDMVRNTARDLLYYAVTQDAMLIFENLSRGFGRQGKRTFMAERQYTRMEDWLTAKLAYEGLPSKTYLSKTLAQYTSKTCSNCGFTITSADYDRVLEKLKKTATGWMTTINGKELKVEGQITYYNRYKRQNVVKDLSVELDRLSEESVNNDISSWTKGRSGEALSLLKKRFSHRPVQEKFVCLNCGFETHADEQAALNIARSWLFLRSQEYKKYQTNKTTGNTDKRAFVETWQSFYRKKLKEVWKPAV

SEQ ID NO: 31147 - protein, 978 aa, synthetic construct
  REGION 1..978: note = engineered CasX variant
QEGGRINKIRRRLVKDSNTKKAGKTGPMKTLLVRVMTPDLRERLENLRKKPENIPQPISNTSRANLNKLLTDYTEMKKAILHVYWEEFQKDPVGLMSRVAQPASKKIDQNKLKPEMDEKGNLTTAGFACSQCGQPLFVYKLEQVSEKGKAYTNYFGRCNVAEHEKLILLAQLKPEKDSDEAVTYSLGKFGQRALDFYSIHVTKESTHPVKPLAQIAGNRYASYPVGKALSDACMGTIASFLSKYQDIIIEHQKVVKGNQKRLESLRELAGKENLEYPSVTLPPQPHTKEGVDAYNEVIARVRMWVNLNLWQKLKLSRDDAKPLLRLKGFPSFPLVERQANEVDWWDMVCNVKKLINEKKEDGKVFWQNLAGYKRQEALRPYLSSEEDRKKGKKFARYQLGDLLLHLEKKHGEDWGKVYDEAWERIDKKVEGLSKHIKLEEERRSEDAQSKAALTDWLRAKASFVIEGLKEADKDEFCRCELKLQKWYGDLRGKPFAIEAENSILDISGFSKQYNCAFIWQKDGVKKLNLYLIINYFKGGKLRFKKIKPEAFEANRFYTVINKKSGEIVPMEVNFNFDDPNLIILPLAFGKRQGREFIWNDLLSLETGSLKLANGRVIEKTLYNRRTRQDEPALFVALTFERREVLDSSNIKPMNLIGVDRGENIPAVIALTDPEGCPLSRFKDSLGNPTHILRIGESYKEKQRTIQAKKEVEQRRAGGYSRKYASKAKNLADDMVRNTARDLLYYAVTQDAMLIFENLSRGFGRQGKRTFMAERQYTRMEDWLTAKLAYEGLPSKTYLSKTLAQYTSKTCSNCGFTITSADYDRVLEKLKKTATGWMTTINGKELKVEGQITYYNRYKRQNVVKDLSVELDRLSEESVNNDISSWTKGRSGEALSLLKKRFSHRPVQEKFVCLNCGFETHADEQAALNIARSWLFLRSQEYKKYQTNKTTGNTDKRAFVETWQSFYRKKLKEVWKPAV

SEQ ID NO: 31148 - protein, 978 aa, synthetic construct
  REGION 1..978: note = engineered CasX variant
QEGGRINKIRRRLVKDSNTKKAGKTGPMKTLLVRVMTPDLRERLENLRKKPENIPQPISNTSRANLNKLLTDYTEMKKAILHVYWEEFQKDPVGLMSRVAQPASKKIDQNKLKPEMDEKGNLTTAGFACSQCGQPLFVYKLEQVSEKGKAYTNYFGRCNVAEHEKLILLAQLKPEKDSDEAVTYSLGKFGQRALDFYSIHVTKESTHPVKPLAQIAGNRYASHPVGKALSDACMGTIASFLSKYQDIIIEHQKVVKGNQKRLESLRELAGKENLEYPSVTLPPQPHTKEGVDAYNEVIARVRMWVNLNLWQKLKLSRDDAKPLLRLKGFPSFPLVERQANEVDWWDMVCNVKKLINEKKEDGKVFWQNLAGYKRQEALRPYLSSEEDRKKGKKFARYQLGDLLLHLEKKHGEDWGKVYDEAWERIDKKVEGLSKHIKLEEERRSEDAQSKAALTDWLRAKASFVIEGLKEADKDEFCRCELKLQKWYGDLRGKPFAIEAENSILDISGFSKQYNCAFIWQKDGVKKLNLYLIINYFKGGKLRFKKIKPEAFEANRFYTVINKKSGEIVPMEVNFNFDDPNLIILPLAFGKRQGREFIWNDLLSLETGSLKLANGRVIEKTLYNRRTRQDEPALFVALTFERREVLDSSNIKPMNLIGVDRGENIPAVIALTDPEGCPLSRFKDSLGNPTHILRIGESYKEKQRTIQAKKEVEQRRAGGYSRKYASKAKNLADDMVRNTARDLLYYAVTQDAMLIFENLSRGFGRQGKRTFMAERQYTRMEDWLTAKLAYEGLPSKTYLSKTLAQYTSKTCSNCGFTITSADYDRVLEKLKKTATGWMTTINGKELKVEGQITYYNRYKRQNVVKDLSVELDRLSEESVNNDISSWTKGRSGEALSLLKKRFSHRPVQEKFVCLNCGFETHADEQAALNIARSWLFLRSQEYKKYQTNKTTGNTDKRAFVETWQSFYRKKLKEVWKPAV

SEQ ID NO: 31149 - protein, 978 aa, synthetic construct
  REGION 1..978: note = engineered CasX variant
QEGGRINKIRRRLVKDSNTKKAGKTGPMKTLLVRVMTPDLRERLENLRKKPENIPQPISNTSRANLNKLLTDYTEMKKAILHVYWEEFQKDPVGLMSRVAQPASKKIDQNKLKPEMDEKGNLTTAGFACSQCGQPLFVYKLEQVSEKGKAYTNYFGRCNVAEHEKLILLAQLKPEKDSDEAVTYSLGKFGQRALDFYSIHVTKESTHPVKPLAQIAGNRYASSPVGKALSDACMGTIASFLSKYQDIIIEHQKVVKGNQKRLESLRELAGKENLEYPSVTLPPQPHTKEGVDAYNEVIARVRMWVNLNLWQKLKLSRDDAKPLLRLKGFPSFPLVERQANEVDWWDMVCNVKKLINEKKEDGKVFWQNLAGYKRQEALRPYLSSEEDRKKGKKFARYQLGDLLLHLEKKHGEDWGKVYDEAWERIDKKVEGLSKHIKLEEERRSEDAQSKAALTDWLRAKASFVIEGLKEADKDEFCRCELKLQKWYGDLRGKPFAIEAENSILDISGFSKQYNCAFIWQKDGVKKLNLYLIINYFKGGKLRFKKIKPEAFEANRFYTVINKKSGEIVPMEVNFNFDDPNLIILPLAFGKRQGREFIWNDLLSLETGSLKLANGRVIEKTLYNRRTRQDEPALFVALTFERREVLDSSNIKPMNLIGVDRGENIPAVIALTDPEGCPLSRFKDSLGNPTHILRIGESYKEKQRTIQAKKEVEQRRAGGYSRKYASKAKNLADDMVRNTARDLLYYAVTQDAMLIFENLSRGFGRQGKRTFMAERQYTRMEDWLTAKLAYEGLPSKTYLSKTLAQYTSKTCSNCGFTITSADYDRVLEKLKKTATGWMTTINGKELKVEGQITYYNRYKRQNVVKDLSVELDRLSEESVNNDISSWTKGRSGEALSLLKKRFSHRPVQEKFVCLNCGFETHADEQAALNIARSWLFLRSQEYKKYQTNKTTGNTDKRAFVETWQSFYRKKLKEVWKPAV

SEQ ID NO: 31150 - protein, 978 aa, synthetic construct
  REGION 1..978: note = engineered CasX variant
QEGGRINKIRRRLVKDSNTKKAGKTGPMKTLLVRVMTPDLRERLENLRKKPENIPQPISNTSRANLNKLLTDYTEMKKAILHVYWEEFQKDPVGLMSRVAQPASKKIDQNKLKPEMDEKGNLTTAGFACSQCGQPLFVYKLEQVSEKGKAYTNYFGRCNVAEHEKLILLAQLKPEKDSDEAVTYSLGKFGQRALDFYSIHVTKESTHPVKPLAQIAGNRYASTPVGKALSDACMGTIASFLSKYQDIIIEHQKVVKGNQKRLESLRELAGKENLEYPSVTLPPQPHTKEGVDAYNEVIARVRMWVNLNLWQKLKLSRDDAKPLLRLKGFPSFPLVERQANEVDWWDMVCNVKKLINEKKEDGKVFWQNLAGYKRQEALRPYLSSEEDRKKGKKFARYQLGDLLLHLEKKHGEDWGKVYDEAWERIDKKVEGLSKHIKLEEERRSEDAQSKAALTDWLRAKASFVIEGLKEADKDEFCRCELKLQKWYGDLRGKPFAIEAENSILDISGFSKQYNCAFIWQKDGVKKLNLYLIINYFKGGKLRFKKIKPEAFEANRFYTVINKKSGEIVPMEVNFNFDDPNLIILPLAFGKRQGREFIWNDLLSLETGSLKLANGRVIEKTLYNRRTRQDEPALFVALTFERREVLDSSNIKPMNLIGVDRGENIPAVIALTDPEGCPLSRFKDSLGNPTHILRIGESYKEKQRTIQAKKEVEQRRAGGYSRKYASKAKNLADDMVRNTARDLLYYAVTQDAMLIFENLSRGFGRQGKRTFMAERQYTRMEDWLTAKLAYEGLPSKTYLSKTLAQYTSKTCSNCGFTITSADYDRVLEKLKKTATGWMTTINGKELKVEGQITYYNRYKRQNVVKDLSVELDRLSEESVNNDISSWTKGRSGEALSLLKKRFSHRPVQEKFVCLNCGFETHADEQAALNIARSWLFLRSQEYKKYQTNKTTGNTDKRAFVETWQSFYRKKLKEVWKPAV

SEQ ID NO: 31151 - protein, 978 aa, synthetic construct
  REGION 1..978: note = engineered CasX variant
QEGGRINKIRRRLVKDSNTKKAGKTGPMKTLLVRVMTPDLRERLENLRKKPENIPQPISNTSRANLNKLLTDYTEMKKAILHVYWEEFQKDPVGLMSRVAQPASKKIDQNKLKPEMDEKGNLTTAGFACSQCGQPLFVYKLEQVSEKGKAYTNYFGRCNVAEHEKLILLAQLKPEKDSDEAVTYSLGKFGQRALDFYSIHVTKESTHPVKPLAQIAGNRYASAPVGKALSDACMGTIASFLSKYQDIIIEHQKVVKGNQKRLESLRELAGKENLEYPSVTLPPQPHTKEGVDAYNEVIARVRMWVNLNLWQKLKLSRDDAKPLLRLKGFPSFPLVERQANEVDWWDMVCNVKKLINEKKEDGKVFWQNLAGYKRQEALRPYLSSEEDRKKGKKFARYQLGDLLLHLEKKHGEDWGKVYDEAWERIDKKVEGLSKHIKLEEERRSEDAQSKAALTDWLRAKASFVIEGLKEADKDEFCRCELKLQKWYGDLRGKPFAIEAENSILDISGFSKQYNCAFIWQKDGVKKLNLYLIINYFKGGKLRFKKIKPEAFEANRFYTVINKKSGEIVPMEVNFNFDDPNLIILPLAFGKRQGREFIWNDLLSLETGSLKLANGRVIEKTLYNRRTRQDEPALFVALTFERREVLDSSNIKPMNLIGVDRGENIPAVIALTDPEGCPLSRFKDSLGNPTHILRIGESYKEKQRTIQAKKEVEQRRAGGYSRKYASKAKNLADDMVRNTARDLLYYAVTQDAMLIFENLSRGFGRQGKRTFMAERQYTRMEDWLTAKLAYEGLPSKTYLSKTLAQYTSKTCSNCGFTITSADYDRVLEKLKKTATGWMTTINGKELKVEGQITYYNRYKRQNVVKDLSVELDRLSEESVNNDISSWTKGRSGEALSLLKKRFSHRPVQEKFVCLNCGFETHADEQAALNIARSWLFLRSQEYKKYQTNKTTGNTDKRAFVETWQSFYRKKLKEVWKPAV

SEQ ID NO: 31152 - protein, 978 aa, synthetic construct
  REGION 1..978: note = engineered CasX variant
QEGGRINKIRRRLVKDSNTKKAGKTGPMKTLLVRVMTPDLRERLENLRKKPENIPQPISNTSRANLNKLLTDYTEMKKAILHVYWEEFQKDPVGLMSRVAQPASKKIDQNKLKPEMDEKGNLTTAGFACSQCGQPLFVYKLEQVSEKGKAYTNYFGRCNVAEHEKLILLAQLKPEKDSDEAVTYSLGKFGQRALDFYSIHVTKESTHPVKPLAQIAGNRYASVPVGKALSDACMGTIASFLSKYQDIIIEHQKVVKGNQKRLESLRELAGKENLEYPSVTLPPQPHTKEGVDAYNEVIARVRMWVNLNLWQKLKLSRDDAKPLLRLKGFPSFPLVERQANEVDWWDMVCNVKKLINEKKEDGKVFWQNLAGYKRQEALRPYLSSEEDRKKGKKFARYQLGDLLLHLEKKHGEDWGKVYDEAWERIDKKVEGLSKHIKLEEERRSEDAQSKAALTDWLRAKASFVIEGLKEADKDEFCRCELKLQKWYGDLRGKPFAIEAENSILDISGFSKQYNCAFIWQKDGVKKLNLYLIINYFKGGKLRFKKIKPEAFEANRFYTVINKKSGEIVPMEVNFNFDDPNLIILPLAFGKRQGREFIWNDLLSLETGSLKLANGRVIEKTLYNRRTRQDEPALFVALTFERREVLDSSNIKPMNLIGVDRGENIPAVIALTDPEGCPLSRFKDSLGNPTHILRIGESYKEKQRTIQAKKEVEQRRAGGYSRKYASKAKNLADDMVRNTARDLLYYAVTQDAMLIFENLSRGFGRQGKRTFMAERQYTRMEDWLTAKLAYEGLPSKTYLSKTLAQYTSKTCSNCGFTITSADYDRVLEKLKKTATGWMTTINGKELKVEGQITYYNRYKRQNVVKDLSVELDRLSEESVNNDISSWTKGRSGEALSLLKKRFSHRPVQEKFVCLNCGFETHADEQAALNIARSWLFLRSQEYKKYQTNKTTGNTDKRAFVETWQSFYRKKLKEVWKPAV

SEQ ID NO: 31153 - protein, 978 aa, synthetic construct
  REGION 1..978: note = engineered CasX variant
QEGGRINKIRRRLVKDSNTKKAGKTGPMKTLLVRVMTPDLRERLENLRKKPENIPQPISNTSRANLNKLLTDYTEMKKAILHVYWEEFQKDPVGLMSRVAQPASKKIDQNKLKPEMDEKGNLTTAGFACSQCGQPLFVYKLEQVSEKGKAYTNYFGRCNVAEHEKLIKLAQLKPEKDSDEAVTYSLGKFGQRALDFYSIHVTKESTHPVKPLAQIAGNRYASGPVGKALSDACMGTIASFLSKYQDIIIEHQKVVKGNQKRLESLRELAGKENLEYPSVTLPPQPHTKEGVDAYNEVIARVRMWVNLNLWQKLKLSRDDAKPLLRLKGFPSFPLVERQANEVDWWDMVCNVKKLINEKKEDGKVFWQNLAGYKRQEALRPYLSSEEDRKKGKKFARYQLGDLLLHLEKKHGEDWGKVYDEAWERIDKKVEGLSKHIKLEEERRSEDAQSKAALTDWLRAKASFVIEGLKEADKDEFCRCELKLQKWYGDLRGKPFAIEAENSILDISGFSKQYNCAFIWQKDGVKKLNLYLIINYFKGGKLRFKKIKPEAFEANRFYTVINKKSGEIVPMEVNFNFDDPNLIILPLAFGKRQGREFIWNDLLSLETGSLKLANGRVIEKTLYNRRTRQDEPALFVALTFERREVLDSSNIKPMNLIGVDRGENIPAVIALTDPEGCPLSRFKDSLGNPTHILRIGESYKEKQRTIQAKKEVEQRRAGGYSRKYASKAKNLADDMVRNTARDLLYYAVTQDAMLIFENLSRGFGRQGKRTFMAERQYTRMEDWLTAKLAYEGLPSKTYLSKTLAQYTSKTCSNCGFTITSADYDRVLEKLKKTATGWMTTINGKELKVEGQITYYNRYKRQNVVKDLSVELDRLSEESVNNDISSWTKGRSGEALSLLKKRFSHRPVQEKFVCLNCGFETHADEQAALNIARSWLFLRSQEYKKYQTNKTTGNTDKRAFVETWQSFYRKKLKEVWKPAV

SEQ ID NO: 31154 - protein, 977 aa, synthetic construct
  REGION 1..977: note = engineered CasX variant
QEGGRINKIRRRLVKDSNTKKAGKTGPMKTLLVRVMTPDLRERLENLRKKPENIPQPISNTSRANLNKLLTDYTEMKKAILHVYWEEFQKDPVGLMSRVAQPASKKIDQNKLKPEMDEKGNLTTAGFACSQCGQPLFVYKLEQVSEKGKAYTNYFGRCNVAEHEKLILLAQLKPEKDSDEAVTYSLGKFGQRALDFYSIHVTKESTHPVKPLAQIAGNRYASPVGKALSDACMGTIASFLSKYQDIIIEHQKVVKGNQKRLESLRELAGKENLEYPSVTLPPQPHTKEGVDAYNEVIARVRMWVNLNLWQKLKLSRDDAKPLLRLKGFPSFPLVERQANEVDWWDMVCNVKKLINEKKEDGKVFWQNLAGYKRQEALRPYLSSEEDRKKGKKFARYQLGDLLLHLEKKHGEDWGKVYDEAWERIDKKVEGLSKHIKLEEERRSEDAQSKAALTDWLRAKASFVIEGLKEADKDEFCRCELKLQKWYGDLRGKPFAIEAENSILDISGFSKQYNCAFIWQKDGVKKLNLYLIINYFKGGKLRFKKIKPEAFEANRFYTVINKKSGEIVPMEVNFNFDDPNLIILPLAFGKRQGREFIWNDLLSLETGSLKLANGRVIEKTLYNRRTRQDEPALFVALTFERREVLDSSNIKPMNLIGVDRGENIPAVIALTDPEGCPLSRFKDSLGNPTHILRIGESYKEKQRTIQAKKEVEQRRAGGYSRKYASKAKNLADDMVRNTARDLLYYAVTQDAMLIFENLSRGFGRQGKRTFMAERQYTRMEDWLTAKLAYEGLPSKTYLSKTLAQYTSKTCSNCGFTITSADYDRVLEKLKKTATGWMTTINGKELKVEGQITYYNRYKRQNVVKDLSVELDRLSEESVNNDISSWTKGRSGEALSLLKKRFSHRPVQEKFVCLNCGFETHADEQAALNIARSWLFLRSQEYKKYQTNKTTGNTDKRAFVETWQSFYRKKLKEVWKPAV

SEQ ID NO: 31155 - protein, 979 aa, synthetic construct
  REGION 1..979: note = engineered CasX variant
QEGKGRINKIRRRLVKDSNTKKAGKTGPMKTLLVRVMTPDLRERLENLRKKPENIPQPISNTSRANLNKLLTDYTEMKKAILHVYWEEFQKDPVGLMSRVAQPASKKIDQNKLKPEMDEKGNLTTAGFACSQCGQPLFVYKLEQVSEKGKAYTNYFGRCNVAEHEKLILLAQLKPEKDSDEAVTYSLGKFGQRALDFYSIHVTKESTHPVKPLAQIAGNRYASYPVGKALSDACMGTIASFLSKYQDIIIEHQKVVKGNQKRLESLRELAGKENLEYPSVTLPPQPHTKEGVDAYNEVIARVRMWVNLNLWQKLKLSRDDAKPLLRLKGFPSFPLVERQANEVDWWDMVCNVKKLINEKKEDGKVFWQNLAGYKRQEALRPYLSSEEDRKKGKKFARYQLGDLLLHLEKKHGEDWGKVYDEAWERIDKKVEGLSKHIKLEEERRSEDAQSKAALTDWLRAKASFVIEGLKEADKDEFCRCELKLQKWYGDLRGKPFAIEAENSILDISGFSKQYNCAFIWQKDGVKKLNLYLIINYFKGGKLRFKKIKPEAFEANRFYTVINKKSGEIVPMEVNFNFDDPNLIILPLAFGKRQGREFIWNDLLSLETGSLKLANGRVIEKTLYNRRTRQDEPALFVALTFERREVLDSSNIKPMNLIGVDRGENIPAVIALTDPEGCPLSRFKDSLGNPTHILRIGESYKEKQRTIQAKKEVEQRRAGGYSRKYASKAKNLADDMVRNTARDLLYYAVTQDAMLIFENLSRGFGRQGKRTFMAERQYTRMEDWLTAKLAYEGLPSKTYLSKTLAQYTSKTCSNCGFTITSADYDRVLEKLKKTATGWMTTINGKELKVEGQITYYNRYKRQNVVKDLSVELDRLSEESVNNDISSWTKGRSGEALSLLKKRFSHRPVQEKFVCLNCGFETHADEQAALNIARSWLFLRSQEYKKYQTNKTTGNTDKRAFVETWQSFYRKKLKEVWKPAV

SEQ ID NO: 31156 - protein, 979 aa, synthetic construct
  REGION 1..979: note = engineered CasX variant
QEGKGRINKIRRRLVKDSNTKKAGKTGPMKTLLVRVMTPDLRERLENLRKKPENIPQPISNTSRANLNKLLTDYTEMKKAILHVYWEEFQKDPVGLMSRVAQPASKKIDQNKLKPEMDEKGNLTTAGFACSQCGQPLFVYKLEQVSEKGKAYTNYFGRCNVAEHEKLILLAQLKPEKDSDEAVTYSLGKFGQRALDFYSIHVTKESTHPVKPLAQIAGNRYASHPVGKALSDACMGTIASFLSKYQDIIIEHQKVVKGNQKRLESLRELAGKENLEYPSVTLPPQPHTKEGVDAYNEVIARVRMWVNLNLWQKLKLSRDDAKPLLRLKGFPSFPLVERQANEVDWWDMVCNVKKLINEKKEDGKVFWQNLAGYKRQEALRPYLSSEEDRKKGKKFARYQLGDLLLHLEKKHGEDWGKVYDEAWERIDKKVEGLSKHIKLEEERRSEDAQSKAALTDWLRAKASFVIEGLKEADKDEFCRCELKLQKWYGDLRGKPFAIEAENSILDISGFSKQYNCAFIWQKDGVKKLNLYLIINYFKGGKLRFKKIKPEAFEANRFYTVINKKSGEIVPMEVNFNFDDPNLIILPLAFGKRQGREFIWNDLLSLETGSLKLANGRVIEKTLYNRRTRQDEPALFVALTFERREVLDSSNIKPMNLIGVDRGENIPAVIALTDPEGCPLSRFKDSLGNPTHILRIGESYKEKQRTIQAKKEVEQRRAGGYSRKYASKAKNLADDMVRNTARDLLYYAVTQDAMLIFENLSRGFGRQGKRTFMAERQYTRMEDWLTAKLAYEGLPSKTYLSKTLAQYTSKTCSNCGFTITSADYDRVLEKLKKTATGWMTTINGKELKVEGQITYYNRYKRQNVVKDLSVELDRLSEESVNNDISSWTKGRSGEALSLLKKRFSHRPVQEKFVCLNCGFETHADEQAALNIARSWLFLRSQEYKKYQTNKTTGNTDKRAFVETWQSFYRKKLKEVWKPAV

SEQ ID NO: 31157 - protein, 979 aa, synthetic construct
  REGION 1..979: note = engineered CasX variant
QEGKGRINKIRRRLVKDSNTKKAGKTGPMKTLLVRVMTPDLRERLENLRKKPENIPQPISNTSRANLNKLLTDYTEMKKAILHVYWEEFQKDPVGLMSRVAQPASKKIDQNKLKPEMDEKGNLTTAGFACSQCGQPLFVYKLEQVSEKGKAYTNYFGRCNVAEHEKLILLAQLKPEKDSDEAVTYSLGKFGQRALDFYSIHVTKESTHPVKPLAQIAGNRYASSPVGKALSDACMGTIASFLSKYQDIIIEHQKVVKGNQKRLESLRELAGKENLEYPSVTLPPQPHTKEGVDAYNEVIARVRMWVNLNLWQKLKLSRDDAKPLLRLKGFPSFPLVERQANEVDWWDMVCNVKKLINEKKEDGKVFWQNLAGYKRQEALRPYLSSEEDRKKGKKFARYQLGDLLLHLEKKHGEDWGKVYDEAWERIDKKVEGLSKHIKLEEERRSEDAQSKAALTDWLRAKASFVIEGLKEADKDEFCRCELKLQKWYGDLRGKPFAIEAENSILDISGFSKQYNCAFIWQKDGVKKLNLYLIINYFKGGKLRFKKIKPEAFEANRFYTVINKKSGEIVPMEVNFNFDDPNLIILPLAFGKRQGREFIWNDLLSLETGSLKLANGRVIEKTLYNRRTRQDEPALFVALTFERREVLDSSNIKPMNLIGVDRGENIPAVIALTDPEGCPLSRFKDSLGNPTHILRIGESYKEKQRTIQAKKEVEQRRAGGYSRKYASKAKNLADDMVRNTARDLLYYAVTQDAMLIFENLSRGFGRQGKRTFMAERQYTRMEDWLTAKLAYEGLPSKTYLSKTLAQYTSKTCSNCGFTITSADYDRVLEKLKKTATGWMTTINGKELKVEGQITYYNRYKRQNVVKDLSVELDRLSEESVNNDISSWTKGRSGEALSLLKKRFSHRPVQEKFVCLNCGFETHADEQAALNIARSWLFLRSQEYKKYQTNKTTGNTDKRAFVETWQSFYRKKLKEVWKPAV

SEQ ID NO: 31158 - protein, 979 aa, synthetic construct
  REGION 1..979: note = engineered CasX variant
QEGKGRINKIRRRLVKDSNTKKAGKTGPMKTLLVRVMTPDLRERLENLRKKPENIPQPISNTSRANLNKLLTDYTEMKKAILHVYWEEFQKDPVGLMSRVAQPASKKIDQNKLKPEMDEKGNLTTAGFACSQCGQPLFVYKLEQVSEKGKAYTNYFGRCNVAEHEKLILLAQLKPEKDSDEAVTYSLGKFGQRALDFYSIHVTKESTHPVKPLAQIAGNRYASTPVGKALSDACMGTIASFLSKYQDIIIEHQKVVKGNQKRLESLRELAGKENLEYPSVTLPPQPHTKEGVDAYNEVIARVRMWVNLNLWQKLKLSRDDAKPLLRLKGFPSFPLVERQANEVDWWDMVCNVKKLINEKKEDGKVFWQNLAGYKRQEALRPYLSSEEDRKKGKKFARYQLGDLLLHLEKKHGEDWGKVYDEAWERIDKKVEGLSKHIKLEEERRSEDAQSKAALTDWLRAKASFVIEGLKEADKDEFCRCELKLQKWYGDLRGKPFAIEAENSILDISGFSKQYNCAFIWQKDGVKKLNLYLIINYFKGGKLRFKKIKPEAFEANRFYTVINKKSGEIVPMEVNFNFDDPNLIILPLAFGKRQGREFIWNDLLSLETGSLKLANGRVIEKTLYNRRTRQDEPALFVALTFERREVLDSSNIKPMNLIGVDRGENIPAVIALTDPEGCPLSRFKDSLGNPTHILRIGESYKEKQRTIQAKKEVEQRRAGGYSRKYASKAKNLADDMVRNTARDLLYYAVTQDAMLIFENLSRGFGRQGKRTFMAERQYTRMEDWLTAKLAYEGLPSKTYLSKTLAQYTSKTCSNCGFTITSADYDRVLEKLKKTATGWMTTINGKELKVEGQITYYNRYKRQNVVKDLSVELDRLSEESVNNDISSWTKGRSGEALSLLKKRFSHRPVQEKFVCLNCGFETHADEQAALNIARSWLFLRSQEYKKYQTNKTTGNTDKRAFVETWQSFYRKKLKEVWKPAV

SEQ ID NO: 31159 - protein, 979 aa, synthetic construct
  REGION 1..979: note = engineered CasX variant
QEGKGRINKIRRRLVKDSNTKKAGKTGPMKTLLVRVMTPDLRERLENLRKKPENIPQPISNTSRANLNKLLTDYTEMKKAILHVYWEEFQKDPVGLMSRVAQPASKKIDQNKLKPEMDEKGNLTTAGFACSQCGQPLFVYKLEQVSEKGKAYTNYFGRCNVAEHEKLILLAQLKPEKDSDEAVTYSLGKFGQRALDFYSIHVTKESTHPVKPLAQIAGNRYASAPVGKALSDACMGTIASFLSKYQDIIIEHQKVVKGNQKRLESLRELAGKENLEYPSVTLPPQPHTKEGVDAYNEVIARVRMWVNLNLWQKLKLSRDDAKPLLRLKGFPSFPLVERQANEVDWWDMVCNVKKLINEKKEDGKVFWQNLAGYKRQEALRPYLSSEEDRKKGKKFARYQLGDLLLHLEKKHGEDWGKVYDEAWERIDKKVEGLSKHIKLEEERRSEDAQSKAALTDWLRAKASFVIEGLKEADKDEFCRCELKLQKWYGDLRGKPFAIEAENSILDISGFSKQYNCAFIWQKDGVKKLNLYLIINYFKGGKLRFKKIKPEAFEANRFYTVINKKSGEIVPMEVNFNFDDPNLIILPLAFGKRQGREFIWNDLLSLETGSLKLANGRVIEKTLYNRRTRQDEPALFVALTFERREVLDSSNIKPMNLIGVDRGENIPAVIALTDPEGCPLSRFKDSLGNPTHILRIGESYKEKQRTIQAKKEVEQRRAGGYSRKYASKAKNLADDMVRNTARDLLYYAVTQDAMLIFENLSRGFGRQGKRTFMAERQYTRMEDWLTAKLAYEGLPSKTYLSKTLAQYTSKTCSNCGFTITSADYDRVLEKLKKTATGWMTTINGKELKVEGQITYYNRYKRQNVVKDLSVELDRLSEESVNNDISSWTKGRSGEALSLLKKRFSHRPVQEKFVCLNCGFETHADEQAALNIARSWLFLRSQEYKKYQTNKTTGNTDKRAFVETWQSFYRKKLKEVWKPAV

SEQ ID NO: 31160 - protein, 979 aa, synthetic construct
  REGION 1..979: note = engineered CasX variant
QEGKGRINKIRRRLVKDSNTKKAGKTGPMKTLLVRVMTPDLRERLENLRKKPENIPQPISNTSRANLNKLLTDYTEMKKAILHVYWEEFQKDPVGLMSRVAQPASKKIDQNKLKPEMDEKGNLTTAGFACSQCGQPLFVYKLEQVSEKGKAYTNYFGRCNVAEHEKLILLAQLKPEKDSDEAVTYSLGKFGQRALDFYSIHVTKESTHPVKPLAQIAGNRYASVPVGKALSDACMGTIASFLSKYQDIIIEHQKVVKGNQKRLESLRELAGKENLEYPSVTLPPQPHTKEGVDAYNEVIARVRMWVNLNLWQKLKLSRDDAKPLLRLKGFPSFPLVERQANEVDWWDMVCNVKKLINEKKEDGKVFWQNLAGYKRQEALRPYLSSEEDRKKGKKFARYQLGDLLLHLEKKHGEDWGKVYDEAWERIDKKVEGLSKHIKLEEERRSEDAQSKAALTDWLRAKASFVIEGLKEADKDEFCRCELKLQKWYGDLRGKPFAIEAENSILDISGFSKQYNCAFIWQKDGVKKLNLYLIINYFKGGKLRFKKIKPEAFEANRFYTVINKKSGEIVPMEVNFNFDDPNLIILPLAFGKRQGREFIWNDLLSLETGSLKLANGRVIEKTLYNRRTRQDEPALFVALTFERREVLDSSNIKPMNLIGVDRGENIPAVIALTDPEGCPLSRFKDSLGNPTHILRIGESYKEKQRTIQAKKEVEQRRAGGYSRKYASKAKNLADDMVRNTARDLLYYAVTQDAMLIFENLSRGFGRQGKRTFMAERQYTRMEDWLTAKLAYEGLPSKTYLSKTLAQYTSKTCSNCGFTITSADYDRVLEKLKKTATGWMTTINGKELKVEGQITYYNRYKRQNVVKDLSVELDRLSEESVNNDISSWTKGRSGEALSLLKKRFSHRPVQEKFVCLNCGFETHADEQAALNIARSWLFLRSQEYKKYQTNKTTGNTDKRAFVETWQSFYRKKLKEVWKPAV

SEQ ID NO: 31161 - protein, 979 aa, synthetic construct
  REGION 1..979: note = engineered CasX variant
QEGKGRINKIRRRLVKDSNTKKAGKTGPMKTLLVRVMTPDLRERLENLRKKPENIPQPISNTSRANLNKLLTDYTEMKKAILHVYWEEFQKDPVGLMSRVAQPASKKIDQNKLKPEMDEKGNLTTAGFACSQCGQPLFVYKLEQVSEKGKAYTNYFGRCNVAEHEKLIKLAQLKPEKDSDEAVTYSLGKFGQRALDFYSIHVTKESTHPVKPLAQIAGNRYASGPVGKALSDACMGTIASFLSKYQDIIIEHQKVVKGNQKRLESLRELAGKENLEYPSVTLPPQPHTKEGVDAYNEVIARVRMWVNLNLWQKLKLSRDDAKPLLRLKGFPSFPLVERQANEVDWWDMVCNVKKLINEKKEDGKVFWQNLAGYKRQEALRPYLSSEEDRKKGKKFARYQLGDLLLHLEKKHGEDWGKVYDEAWERIDKKVEGLSKHIKLEEERRSEDAQSKAALTDWLRAKASFVIEGLKEADKDEFCRCELKLQKWYGDLRGKPFAIEAENSILDISGFSKQYNCAFIWQKDGVKKLNLYLIINYFKGGKLRFKKIKPEAFEANRFYTVINKKSGEIVPMEVNFNFDDPNLIILPLAFGKRQGREFIWNDLLSLETGSLKLANGRVIEKTLYNRRTRQDEPALFVALTFERREVLDSSNIKPMNLIGVDRGENIPAVIALTDPEGCPLSRFKDSLGNPTHILRIGESYKEKQRTIQAKKEVEQRRAGGYSRKYASKAKNLADDMVRNTARDLLYYAVTQDAMLIFENLSRGFGRQGKRTFMAERQYTRMEDWLTAKLAYEGLPSKTYLSKTLAQYTSKTCSNCGFTITSADYDRVLEKLKKTATGWMTTINGKELKVEGQITYYNRYKRQNVVKDLSVELDRLSEESVNNDISSWTKGRSGEALSLLKKRFSHRPVQEKFVCLNCGFETHADEQAALNIARSWLFLRSQEYKKYQTNKTTGNTDKRAFVETWQSFYRKKLKEVWKPAV

SEQ ID NO: 31162 - protein, 978 aa, synthetic construct
  REGION 1..978: note = engineered CasX variant
QEGKGRINKIRRRLVKDSNTKKAGKTGPMKTLLVRVMTPDLRERLENLRKKPENIPQPISNTSRANLNKLLTDYTEMKKAILHVYWEEFQKDPVGLMSRVAQPASKKIDQNKLKPEMDEKGNLTTAGFACSQCGQPLFVYKLEQVSEKGKAYTNYFGRCNVAEHEKLILLAQLKPEKDSDEAVTYSLGKFGQRALDFYSIHVTKESTHPVKPLAQIAGNRYASPVGKALSDACMGTIASFLSKYQDIIIEHQKVVKGNQKRLESLRELAGKENLEYPSVTLPPQPHTKEGVDAYNEVIARVRMWVNLNLWQKLKLSRDDAKPLLRLKGFPSFPLVERQANEVDWWDMVCNVKKLINEKKEDGKVFWQNLAGYKRQEALRPYLSSEEDRKKGKKFARYQLGDLLLHLEKKHGEDWGKVYDEAWERIDKKVEGLSKHIKLEEERRSEDAQSKAALTDWLRAKASFVIEGLKEADKDEFCRCELKLQKWYGDLRGKPFAIEAENSILDISGFSKQYNCAFIWQKDGVKKLNLYLIINYFKGGKLRFKKIKPEAFEANRFYTVINKKSGEIVPMEVNFNFDDPNLIILPLAFGKRQGREFIWNDLLSLETGSLKLANGRVIEKTLYNRRTRQDEPALFVALTFERREVLDSSNIKPMNLIGVDRGENIPAVIALTDPEGCPLSRFKDSLGNPTHILRIGESYKEKQRTIQAKKEVEQRRAGGYSRKYASKAKNLADDMVRNTARDLLYYAVTQDAMLIFENLSRGFGRQGKRTFMAERQYTRMEDWLTAKLAYEGLPSKTYLSKTLAQYTSKTCSNCGFTITSADYDRVLEKLKKTATGWMTTINGKELKVEGQITYYNRYKRQNVVKDLSVELDRLSEESVNNDISSWTKGRSGEALSLLKKRFSHRPVQEKFVCLNCGFETHADEQAALNIARSWLFLRSQEYKKYQTNKTTGNTDKRAFVETWQSFYRKKLKEVWKPAV

SEQ ID NO: 31163 - protein, 978 aa, synthetic construct
  REGION 1..978: note = engineered CasX variant
QEGKRANKIRRRLVKDSNTKKAGKTGPMKTLLVRVMTPDLRERLENLRKKPENIPQPISNTSRANLNKLLTDYTEMKKAILHVYWEEFQKDPVGLMSRVAQPASKKIDQNKLKPEMDEKGNLTTAGFACSQCGQPLFVYKLEQVSEKGKAYTNYFGRCNVAEHEKLILLAQLKPEKDSDEAVTYSLGKFGQRALDFYSIHVTKESTHPVKPLAQIAGNRYASYPVGKALSDACMGTIASFLSKYQDIIIEHQKVVKGNQKRLESLRELAGKENLEYPSVTLPPQPHTKEGVDAYNEVIARVRMWVNLNLWQKLKLSRDDAKPLLRLKGFPSFPLVERQANEVDWWDMVCNVKKLINEKKEDGKVFWQNLAGYKRQEALRPYLSSEEDRKKGKKFARYQLGDLLLHLEKKHGEDWGKVYDEAWERIDKKVEGLSKHIKLEEERRSEDAQSKAALTDWLRAKASFVIEGLKEADKDEFCRCELKLQKWYGDLRGKPFAIEAENSILDISGFSKQYNCAFIWQKDGVKKLNLYLIINYFKGGKLRFKKIKPEAFEANRFYTVINKKSGEIVPMEVNFNFDDPNLIILPLAFGKRQGREFIWNDLLSLETGSLKLANGRVIEKTLYNRRTRQDEPALFVALTFERREVLDSSNIKPMNLIGVDRGENIPAVIALTDPEGCPLSRFKDSLGNPTHILRIGESYKEKQRTIQAKKEVEQRRAGGYSRKYASKAKNLADDMVRNTARDLLYYAVTQDAMLIFENLSRGFGRQGKRTFMAERQYTRMEDWLTAKLAYEGLPSKTYLSKTLAQYTSKTCSNCGFTITSADYDRVLEKLKKTATGWMTTINGKELKVEGQITYYNRYKRQNVVKDLSVELDRLSEESVNNDISSWTKGRSGEALSLLKKRFSHRPVQEKFVCLNCGFETHADEQAALNIARSWLFLRSQEYKKYQTNKTTGNTDKRAFVETWQSFYRKKLKEVWKPAV

SEQ ID NO: 31164 - protein, 978 aa, synthetic construct
  REGION 1..978: note = engineered CasX variant
QEGKRANKIRRRLVKDSNTKKAGKTGPMKTLLVRVMTPDLRERLENLRKKPENIPQPISNTSRANLNKLLTDYTEMKKAILHVYWEEFQKDPVGLMSRVAQPASKKIDQNKLKPEMDEKGNLTTAGFACSQCGQPLFVYKLEQVSEKGKAYTNYFGRCNVAEHEKLILLAQLKPEKDSDEAVTYSLGKFGQRALDFYSIHVTKESTHPVKPLAQIAGNRYASHPVGKALSDACMGTIASFLSKYQDIIIEHQKVVKGNQKRLESLRELAGKENLEYPSVTLPPQPHTKEGVDAYNEVIARVRMWVNLNLWQKLKLSRDDAKPLLRLKGFPSFPLVERQANEVDWWDMVCNVKKLINEKKEDGKVFWQNLAGYKRQEALRPYLSSEEDRKKGKKFARYQLGDLLLHLEKKHGEDWGKVYDEAWERIDKKVEGLSKHIKLEEERRSEDAQSKAALTDWLRAKASFVIEGLKEADKDEFCRCELKLQKWYGDLRGKPFAIEAENSILDISGFSKQYNCAFIWQKDGVKKLNLYLIINYFKGGKLRFKKIKPEAFEANRFYTVINKKSGEIVPMEVNFNFDDPNLIILPLAFGKRQGREFIWNDLLSLETGSLKLANGRVIEKTLYNRRTRQDEPALFVALTFERREVLDSSNIKPMNLIGVDRGENIPAVIALTDPEGCPLSRFKDSLGNPTHILRIGESYKEKQRTIQAKKEVEQRRAGGYSRKYASKAKNLADDMVRNTARDLLYYAVTQDAMLIFENLSRGFGRQGKRTFMAERQYTRMEDWLTAKLAYEGLPSKTYLSKTLAQYTSKTCSNCGFTITSADYDRVLEKLKKTATGWMTTINGKELKVEGQITYYNRYKRQNVVKDLSVELDRLSEESVNNDISSWTKGRSGEALSLLKKRFSHRPVQEKFVCLNCGFETHADEQAALNIARSWLFLRSQEYKKYQTNKTTGNTDKRAFVETWQSFYRKKLKEVWKPAV

SEQ ID NO: 31165 - protein, 978 aa, synthetic construct
  REGION 1..978: note = engineered CasX variant
QEGKRANKIRRRLVKDSNTKKAGKTGPMKTLLVRVMTPDLRERLENLRKKPENIPQPISNTSRANLNKLLTDYTEMKKAILHVYWEEFQKDPVGLMSRVAQPASKKIDQNKLKPEMDEKGNLTTAGFACSQCGQPLFVYKLEQVSEKGKAYTNYFGRCNVAEHEKLILLAQLKPEKDSDEAVTYSLGKFGQRALDFYSIHVTKESTHPVKPLAQIAGNRYASSPVGKALSDACMGTIASFLSKYQDIIIEHQKVVKGNQKRLESLRELAGKENLEYPSVTLPPQPHTKEGVDAYNEVIARVRMWVNLNLWQKLKLSRDDAKPLLRLKGFPSFPLVERQANEVDWWDMVCNVKKLINEKKEDGKVFWQNLAGYKRQEALRPYLSSEEDRKKGKKFARYQLGDLLLHLEKKHGEDWGKVYDEAWERIDKKVEGLSKHIKLEEERRSEDAQSKAALTDWLRAKASFVIEGLKEADKDEFCRCELKLQKWYGDLRGKPFAIEAENSILDISGFSKQYNCAFIWQKDGVKKLNLYLIINYFKGGKLRFKKIKPEAFEANRFYTVINKKSGEIVPMEVNFNFDDPNLIILPLAFGKRQGREFIWNDLLSLETGSLKLANGRVIEKTLYNRRTRQDEPALFVALTFERREVLDSSNIKPMNLIGVDRGENIPAVIALTDPEGCPLSRFKDSLGNPTHILRIGESYKEKQRTIQAKKEVEQRRAGGYSRKYASKAKNLADDMVRNTARDLLYYAVTQDAMLIFENLSRGFGRQGKRTFMAERQYTRMEDWLTAKLAYEGLPSKTYLSKTLAQYTSKTCSNCGFTITSADYDRVLEKLKKTATGWMTTINGKELKVEGQITYYNRYKRQNVVKDLSVELDRLSEESVNNDISSWTKGRSGEALSLLKKRFSHRPVQEKFVCLNCGFETHADEQAALNIARSWLFLRSQEYKKYQTNKTTGNTDKRAFVETWQSFYRKKLKEVWKPAV

SEQ ID NO: 31166 - protein, 978 aa, synthetic construct
  REGION 1..978: note = engineered CasX variant
QEGKRANKIRRRLVKDSNTKKAGKTGPMKTLLVRVMTPDLRERLENLRKKPENIPQPISNTSRANLNKLLTDYTEMKKAILHVYWEEFQKDPVGLMSRVAQPASKKIDQNKLKPEMDEKGNLTTAGFACSQCGQPLFVYKLEQVSEKGKAYTNYFGRCNVAEHEKLILLAQLKPEKDSDEAVTYSLGKFGQRALDFYSIHVTKESTHPVKPLAQIAGNRYASTPVGKALSDACMGTIASFLSKYQDIIIEHQKVVKGNQKRLESLRELAGKENLEYPSVTLPPQPHTKEGVDAYNEVIARVRMWVNLNLWQKLKLSRDDAKPLLRLKGFPSFPLVERQANEVDWWDMVCNVKKLINEKKEDGKVFWQNLAGYKRQEALRPYLSSEEDRKKGKKFARYQLGDLLLHLEKKHGEDWGKVYDEAWERIDKKVEGLSKHIKLEEERRSEDAQSKAALTDWLRAKASFVIEGLKEADKDEFCRCELKLQKWYGDLRGKPFAIEAENSILDISGFSKQYNCAFIWQKDGVKKLNLYLIINYFKGGKLRFKKIKPEAFEANRFYTVINKKSGEIVPMEVNFNFDDPNLIILPLAFGKRQGREFIWNDLLSLETGSLKLANGRVIEKTLYNRRTRQDEPALFVALTFERREVLDSSNIKPMNLIGVDRGENIPAVIALTDPEGCPLSRFKDSLGNPTHILRIGESYKEKQRTIQAKKEVEQRRAGGYSRKYASKAKNLADDMVRNTARDLLYYAVTQDAMLIFENLSRGFGRQGKRTFMAERQYTRMEDWLTAKLAYEGLPSKTYLSKTLAQYTSKTCSNCGFTITSADYDRVLEKLKKTATGWMTTINGKELKVEGQITYYNRYKRQNVVKDLSVELDRLSEESVNNDISSWTKGRSGEALSLLKKRFSHRPVQEKFVCLNCGFETHADEQAALNIARSWLFLRSQEYKKYQTNKTTGNTDKRAFVETWQSFYRKKLKEVWKPAV

SEQ ID NO: 31167 - protein, 978 aa, synthetic construct
  REGION 1..978: note = engineered CasX variant
QEGKRANKIRRRLVKDSNTKKAGKTGPMKTLLVRVMTPDLRERLENLRKKPENIPQPISNTSRANLNKLLTDYTEMKKAILHVYWEEFQKDPVGLMSRVAQPASKKIDQNKLKPEMDEKGNLTTAGFACSQCGQPLFVYKLEQVSEKGKAYTNYFGRCNVAEHEKLILLAQLKPEKDSDEAVTYSLGKFGQRALDFYSIHVTKESTHPVKPLAQIAGNRYASAPVGKALSDACMGTIASFLSKYQDIIIEHQKVVKGNQKRLESLRELAGKENLEYPSVTLPPQPHTKEGVDAYNEVIARVRMWVNLNLWQKLKLSRDDAKPLLRLKGFPSFPLVERQANEVDWWDMVCNVKKLINEKKEDGKVFWQNLAGYKRQEALRPYLSSEEDRKKGKKFARYQLGDLLLHLEKKHGEDWGKVYDEAWERIDKKVEGLSKHIKLEEERRSEDAQSKAALTDWLRAKASFVIEGLKEADKDEFCRCELKLQKWYGDLRGKPFAIEAENSILDISGFSKQYNCAFIWQKDGVKKLNLYLIINYFKGGKLRFKKIKPEAFEANRFYTVINKKSGEIVPMEVNFNFDDPNLIILPLAFGKRQGREFIWNDLLSLETGSLKLANGRVIEKTLYNRRTRQDEPALFVALTFERREVLDSSNIKPMNLIGVDRGENIPAVIALTDPEGCPLSRFKDSLGNPTHILRIGESYKEKQRTIQAKKEVEQRRAGGYSRKYASKAKNLADDMVRNTARDLLYYAVTQDAMLIFENLSRGFGRQGKRTFMAERQYTRMEDWLTAKLAYEGLPSKTYLSKTLAQYTSKTCSNCGFTITSADYDRVLEKLKKTATGWMTTINGKELKVEGQITYYNRYKRQNVVKDLSVELDRLSEESVNNDISSWTKGRSGEALSLLKKRFSHRPVQEKFVCLNCGFETHADEQAALNIARSWLFLRSQEYKKYQTNKTTGNTDKRAFVETWQSFYRKKLKEVWKPAV

SEQ ID NO: 31168 - protein, 978 aa, synthetic construct
  REGION 1..978: note = engineered CasX variant
QEGKRANKIRRRLVKDSNTKKAGKTGPMKTLLVRVMTPDLRERLENLRKKPENIPQPISNTSRANLNKLLTDYTEMKKAILHVYWEEFQKDPVGLMSRVAQPASKKIDQNKLKPEMDEKGNLTTAGFACSQCGQPLFVYKLEQVSEKGKAYTNYFGRCNVAEHEKLILLAQLKPEKDSDEAVTYSLGKFGQRALDFYSIHVTKESTHPVKPLAQIAGNRYASVPVGKALSDACMGTIASFLSKYQDIIIEHQKVVKGNQKRLESLRELAGKENLEYPSVTLPPQPHTKEGVDAYNEVIARVRMWVNLNLWQKLKLSRDDAKPLLRLKGFPSFPLVERQANEVDWWDMVCNVKKLINEKKEDGKVFWQNLAGYKRQEALRPYLSSEEDRKKGKKFARYQLGDLLLHLEKKHGEDWGKVYDEAWERIDKKVEGLSKHIKLEEERRSEDAQSKAALTDWLRAKASFVIEGLKEADKDEFCRCELKLQKWYGDLRGKPFAIEAENSILDISGFSKQYNCAFIWQKDGVKKLNLYLIINYFKGGKLRFKKIKPEAFEANRFYTVINKKSGEIVPMEVNFNFDDPNLIILPLAFGKRQGREFIWNDLLSLETGSLKLANGRVIEKTLYNRRTRQDEPALFVALTFERREVLDSSNIKPMNLIGVDRGENIPAVIALTDPEGCPLSRFKDSLGNPTHILRIGESYKEKQRTIQAKKEVEQRRAGGYSRKYASKAKNLADDMVRNTARDLLYYAVTQDAMLIFENLSRGFGRQGKRTFMAERQYTRMEDWLTAKLAYEGLPSKTYLSKTLAQYTSKTCSNCGFTITSADYDRVLEKLKKTATGWMTTINGKELKVEGQITYYNRYKRQNVVKDLSVELDRLSEESVNNDISSWTKGRSGEALSLLKKRFSHRPVQEKFVCLNCGFETHADEQAALNIARSWLFLRSQEYKKYQTNKTTGNTDKRAFVETWQSFYRKKLKEVWKPAV

SEQ ID NO: 31169 - protein, 978 aa, synthetic construct
  REGION 1..978: note = engineered CasX variant
QEGKRANKIRRRLVKDSNTKKAGKTGPMKTLLVRVMTPDLRERLENLRKKPENIPQPISNTSRANLNKLLTDYTEMKKAILHVYWEEFQKDPVGLMSRVAQPASKKIDQNKLKPEMDEKGNLTTAGFACSQCGQPLFVYKLEQVSEKGKAYTNYFGRCNVAEHEKLIKLAQLKPEKDSDEAVTYSLGKFGQRALDFYSIHVTKESTHPVKPLAQIAGNRYASGPVGKALSDACMGTIASFLSKYQDIIIEHQKVVKGNQKRLESLRELAGKENLEYPSVTLPPQPHTKEGVDAYNEVIARVRMWVNLNLWQKLKLSRDDAKPLLRLKGFPSFPLVERQANEVDWWDMVCNVKKLINEKKEDGKVFWQNLAGYKRQEALRPYLSSEEDRKKGKKFARYQLGDLLLHLEKKHGEDWGKVYDEAWERIDKKVEGLSKHIKLEEERRSEDAQSKAALTDWLRAKASFVIEGLKEADKDEFCRCELKLQKWYGDLRGKPFAIEAENSILDISGFSKQYNCAFIWQKDGVKKLNLYLIINYFKGGKLRFKKIKPEAFEANRFYTVINKKSGEIVPMEVNFNFDDPNLIILPLAFGKRQGREFIWNDLLSLETGSLKLANGRVIEKTLYNRRTRQDEPALFVALTFERREVLDSSNIKPMNLIGVDRGENIPAVIALTDPEGCPLSRFKDSLGNPTHILRIGESYKEKQRTIQAKKEVEQRRAGGYSRKYASKAKNLADDMVRNTARDLLYYAVTQDAMLIFENLSRGFGRQGKRTFMAERQYTRMEDWLTAKLAYEGLPSKTYLSKTLAQYTSKTCSNCGFTITSADYDRVLEKLKKTATGWMTTINGKELKVEGQITYYNRYKRQNVVKDLSVELDRLSEESVNNDISSWTKGRSGEALSLLKKRFSHRPVQEKFVCLNCGFETHADEQAALNIARSWLFLRSQEYKKYQTNKTTGNTDKRAFVETWQSFYRKKLKEVWKPAV

SEQ ID NO: 31170 - protein, 977 aa, synthetic construct
  REGION 1..977: note = engineered CasX variant
QEGKRANKIRRRLVKDSNTKKAGKTGPMKTLLVRVMTPDLRERLENLRKKPENIPQPISNTSRANLNKLLTDYTEMKKAILHVYWEEFQKDPVGLMSRVAQPASKKIDQNKLKPEMDEKGNLTTAGFACSQCGQPLFVYKLEQVSEKGKAYTNYFGRCNVAEHEKLILLAQLKPEKDSDEAVTYSLGKFGQRALDFYSIHVTKESTHPVKPLAQIAGNRYASPVGKALSDACMGTIASFLSKYQDIIIEHQKVVKGNQKRLESLRELAGKENLEYPSVTLPPQPHTKEGVDAYNEVIARVRMWVNLNLWQKLKLSRDDAKPLLRLKGFPSFPLVERQANEVDWWDMVCNVKKLINEKKEDGKVFWQNLAGYKRQEALRPYLSSEEDRKKGKKFARYQLGDLLLHLEKKHGEDWGKVYDEAWERIDKKVEGLSKHIKLEEERRSEDAQSKAALTDWLRAKASFVIEGLKEADKDEFCRCELKLQKWYGDLRGKPFAIEAENSILDISGFSKQYNCAFIWQKDGVKKLNLYLIINYFKGGKLRFKKIKPEAFEANRFYTVINKKSGEIVPMEVNFNFDDPNLIILPLAFGKRQGREFIWNDLLSLETGSLKLANGRVIEKTLYNRRTRQDEPALFVALTFERREVLDSSNIKPMNLIGVDRGENIPAVIALTDPEGCPLSRFKDSLGNPTHILRIGESYKEKQRTIQAKKEVEQRRAGGYSRKYASKAKNLADDMVRNTARDLLYYAVTQDAMLIFENLSRGFGRQGKRTFMAERQYTRMEDWLTAKLAYEGLPSKTYLSKTLAQYTSKTCSNCGFTITSADYDRVLEKLKKTATGWMTTINGKELKVEGQITYYNRYKRQNVVKDLSVELDRLSEESVNNDISSWTKGRSGEALSLLKKRFSHRPVQEKFVCLNCGFETHADEQAALNIARSWLFLRSQEYKKYQTNKTTGNTDKRAFVETWQSFYRKKLKEVWKPAV

SEQ ID NO: 31171 - protein, 978 aa, synthetic construct
  REGION 1..978: note = engineered CasX variant
QEGKRISKIRRRLVKDSNTKKAGKTGPMKTLLVRVMTPDLRERLENLRKKPENIPQPISNTSRANLNKLLTDYTEMKKAILHVYWEEFQKDPVGLMSRVAQPASKKIDQNKLKPEMDEKGNLTTAGFACSQCGQPLFVYKLEQVSEKGKAYTNYFGRCNVAEHEKLILLAQLKPEKDSDEAVTYSLGKFGQRALDFYSIHVTKESTHPVKPLAQIAGNRYASYPVGKALSDACMGTIASFLSKYQDIIIEHQKVVKGNQKRLESLRELAGKENLEYPSVTLPPQPHTKEGVDAYNEVIARVRMWVNLNLWQKLKLSRDDAKPLLRLKGFPSFPLVERQANEVDWWDMVCNVKKLINEKKEDGKVFWQNLAGYKRQEALRPYLSSEEDRKKGKKFARYQLGDLLLHLEKKHGEDWGKVYDEAWERIDKKVEGLSKHIKLEEERRSEDAQSKAALTDWLRAKASFVIEGLKEADKDEFCRCELKLQKWYGDLRGKPFAIEAENSILDISGFSKQYNCAFIWQKDGVKKLNLYLIINYFKGGKLRFKKIKPEAFEANRFYTVINKKSGEIVPMEVNFNFDDPNLIILPLAFGKRQGREFIWNDLLSLETGSLKLANGRVIEKTLYNRRTRQDEPALFVALTFERREVLDSSNIKPMNLIGVDRGENIPAVIALTDPEGCPLSRFKDSLGNPTHILRIGESYKEKQRTIQAKKEVEQRRAGGYSRKYASKAKNLADDMVRNTARDLLYYAVTQDAMLIFENLSRGFGRQGKRTFMAERQYTRMEDWLTAKLAYEGLPSKTYLSKTLAQYTSKTCSNCGFTITSADYDRVLEKLKKTATGWMTTINGKELKVEGQITYYNRYKRQNVVKDLSVELDRLSEESVNNDISSWTKGRSGEALSLLKKRFSHRPVQEKFVCLNCGFETHADEQAALNIARSWLFLRSQEYKKYQTNKTTGNTDKRAFVETWQSFYRKKLKEVWKPAV

SEQ ID NO: 31172 - protein, 978 aa, synthetic construct
  REGION 1..978: note = engineered CasX variant
QEGKRISKIRRRLVKDSNTKKAGKTGPMKTLLVRVMTPDLRERLENLRKKPENIPQPISNTSRANLNKLLTDYTEMKKAILHVYWEEFQKDPVGLMSRVAQPASKKIDQNKLKPEMDEKGNLTTAGFACSQCGQPLFVYKLEQVSEKGKAYTNYFGRCNVAEHEKLILLAQLKPEKDSDEAVTYSLGKFGQRALDFYSIHVTKESTHPVKPLAQIAGNRYASHPVGKALSDACMGTIASFLSKYQDIIIEHQKVVKGNQKRLESLRELAGKENLEYPSVTLPPQPHTKEGVDAYNEVIARVRMWVNLNLWQKLKLSRDDAKPLLRLKGFPSFPLVERQANEVDWWDMVCNVKKLINEKKEDGKVFWQNLAGYKRQEALRPYLSSEEDRKKGKKFARYQLGDLLLHLEKKHGEDWGKVYDEAWERIDKKVEGLSKHIKLEEERRSEDAQSKAALTDWLRAKASFVIEGLKEADKDEFCRCELKLQKWYGDLRGKPFAIEAENSILDISGFSKQYNCAFIWQKDGVKKLNLYLIINYFKGGKLRFKKIKPEAFEANRFYTVINKKSGEIVPMEVNFNFDDPNLIILPLAFGKRQGREFIWNDLLSLETGSLKLANGRVIEKTLYNRRTRQDEPALFVALTFERREVLDSSNIKPMNLIGVDRGENIPAVIALTDPEGCPLSRFKDSLGNPTHILRIGESYKEKQRTIQAKKEVEQRRAGGYSRKYASKAKNLADDMVRNTARDLLYYAVTQDAMLIFENLSRGFGRQGKRTFMAERQYTRMEDWLTAKLAYEGLPSKTYLSKTLAQYTSKTCSNCGFTITSADYDRVLEKLKKTATGWMTTINGKELKVEGQITYYNRYKRQNVVKDLSVELDRLSEESVNNDISSWTKGRSGEALSLLKKRFSHRPVQEKFVCLNCGFETHADEQAALNIARSWLFLRSQEYKKYQTNKTTGNTDKRAFVETWQSFYRKKLKEVWKPAV

SEQ ID NO: 31173 - protein, 978 aa, synthetic construct
  REGION 1..978: note = engineered CasX variant
QEGKRISKIRRRLVKDSNTKKAGKTGPMKTLLVRVMTPDLRERLENLRKKPENIPQPISNTSRANLNKLLTDYTEMKKAILHVYWEEFQKDPVGLMSRVAQPASKKIDQNKLKPEMDEKGNLTTAGFACSQCGQPLFVYKLEQVSEKGKAYTNYFGRCNVAEHEKLILLAQLKPEKDSDEAVTYSLGKFGQRALDFYSIHVTKESTHPVKPLAQIAGNRYASSPVGKALSDACMGTIASFLSKYQDIIIEHQKVVKGNQKRLESLRELAGKENLEYPSVTLPPQPHTKEGVDAYNEVIARVRMWVNLNLWQKLKLSRDDAKPLLRLKGFPSFPLVERQANEVDWWDMVCNVKKLINEKKEDGKVFWQNLAGYKRQEALRPYLSSEEDRKKGKKFARYQLGDLLLHLEKKHGEDWGKVYDEAWERIDKKVEGLSKHIKLEEERRSEDAQSKAALTDWLRAKASFVIEGLKEADKDEFCRCELKLQKWYGDLRGKPFAIEAENSILDISGFSKQYNCAFIWQKDGVKKLNLYLIINYFKGGKLRFKKIKPEAFEANRFYTVINKKSGEIVPMEVNFNFDDPNLIILPLAFGKRQGREFIWNDLLSLETGSLKLANGRVIEKTLYNRRTRQDEPALFVALTFERREVLDSSNIKPMNLIGVDRGENIPAVIALTDPEGCPLSRFKDSLGNPTHILRIGESYKEKQRTIQAKKEVEQRRAGGYSRKYASKAKNLADDMVRNTARDLLYYAVTQDAMLIFENLSRGFGRQGKRTFMAERQYTRMEDWLTAKLAYEGLPSKTYLSKTLAQYTSKTCSNCGFTITSADYDRVLEKLKKTATGWMTTINGKELKVEGQITYYNRYKRQNVVKDLSVELDRLSEESVNNDISSWTKGRSGEALSLLKKRFSHRPVQEKFVCLNCGFETHADEQAALNIARSWLFLRSQEYKKYQTNKTTGNTDKRAFVETWQSFYRKKLKEVWKPAV

SEQ ID NO: 31174 - protein, 978 aa, synthetic construct
  REGION 1..978: note = engineered CasX variant
QEGKRISKIRRRLVKDSNTKKAGKTGPMKTLLVRVMTPDLRERLENLRKKPENIPQPISNTSRANLNKLLTDYTEMKKAILHVYWEEFQKDPVGLMSRVAQPASKKIDQNKLKPEMDEKGNLTTAGFACSQCGQPLFVYKLEQVSEKGKAYTNYFGRCNVAEHEKLILLAQLKPEKDSDEAVTYSLGKFGQRALDFYSIHVTKESTHPVKPLAQIAGNRYASTPVGKALSDACMGTIASFLSKYQDIIIEHQKVVKGNQKRLESLRELAGKENLEYPSVTLPPQPHTKEGVDAYNEVIARVRMWVNLNLWQKLKLSRDDAKPLLRLKGFPSFPLVERQANEVDWWDMVCNVKKLINEKKEDGKVFWQNLAGYKRQEALRPYLSSEEDRKKGKKFARYQLGDLLLHLEKKHGEDWGKVYDEAWERIDKKVEGLSKHIKLEEERRSEDAQSKAALTDWLRAKASFVIEGLKEADKDEFCRCELKLQKWYGDLRGKPFAIEAENSILDISGFSKQYNCAFIWQKDGVKKLNLYLIINYFKGGKLRFKKIKPEAFEANRFYTVINKKSGEIVPMEVNFNFDDPNLIILPLAFGKRQGREFIWNDLLSLETGSLKLANGRVIEKTLYNRRTRQDEPALFVALTFERREVLDSSNIKPMNLIGVDRGENIPAVIALTDPEGCPLSRFKDSLGNPTHILRIGESYKEKQRTIQAKKEVEQRRAGGYSRKYASKAKNLADDMVRNTARDLLYYAVTQDAMLIFENLSRGFGRQGKRTFMAERQYTRMEDWLTAKLAYEGLPSKTYLSKTLAQYTSKTCSNCGFTITSADYDRVLEKLKKTATGWMTTINGKELKVEGQITYYNRYKRQNVVKDLSVELDRLSEESVNNDISSWTKGRSGEALSLLKKRFSHRPVQEKFVCLNCGFETHADEQAALNIARSWLFLRSQEYKKYQTNKTTGNTDKRAFVETWQSFYRKKLKEVWKPAV

SEQ ID NO: 31175 - protein, 978 aa, synthetic construct
  REGION 1..978: note = engineered CasX variant
QEGKRISKIRRRLVKDSNTKKAGKTGPMKTLLVRVMTPDLRERLENLRKKPENIPQPISNTSRANLNKLLTDYTEMKKAILHVYWEEFQKDPVGLMSRVAQPASKKIDQNKLKPEMDEKGNLTTAGFACSQCGQPLFVYKLEQVSEKGKAYTNYFGRCNVAEHEKLILLAQLKPEKDSDEAVTYSLGKFGQRALDFYSIHVTKESTHPVKPLAQIAGNRYASAPVGKALSDACMGTIASFLSKYQDIIIEHQKVVKGNQKRLESLRELAGKENLEYPSVTLPPQPHTKEGVDAYNEVIARVRMWVNLNLWQKLKLSRDDAKPLLRLKGFPSFPLVERQANEVDWWDMVCNVKKLINEKKEDGKVFWQNLAGYKRQEALRPYLSSEEDRKKGKKFARYQLGDLLLHLEKKHGEDWGKVYDEAWERIDKKVEGLSKHIKLEEERRSEDAQSKAALTDWLRAKASFVIEGLKEADKDEFCRCELKLQKWYGDLRGKPFAIEAENSILDISGFSKQYNCAFIWQKDGVKKLNLYLIINYFKGGKLRFKKIKPEAFEANRFYTVINKKSGEIVPMEVNFNFDDPNLIILPLAFGKRQGREFIWNDLLSLETGSLKLANGRVIEKTLYNRRTRQDEPALFVALTFERREVLDSSNIKPMNLIGVDRGENIPAVIALTDPEGCPLSRFKDSLGNPTHILRIGESYKEKQRTIQAKKEVEQRRAGGYSRKYASKAKNLADDMVRNTARDLLYYAVTQDAMLIFENLSRGFGRQGKRTFMAERQYTRMEDWLTAKLAYEGLPSKTYLSKTLAQYTSKTCSNCGFTITSADYDRVLEKLKKTATGWMTTINGKELKVEGQITYYNRYKRQNVVKDLSVELDRLSEESVNNDISSWTKGRSGEALSLLKKRFSHRPVQEKFVCLNCGFETHADEQAALNIARSWLFLRSQEYKKYQTNKTTGNTDKRAFVETWQSFYRKKLKEVWKPAV

SEQ ID NO: 31176 - protein, 978 aa, synthetic construct
  REGION 1..978: note = engineered CasX variant
QEGKRISKIRRRLVKDSNTKKAGKTGPMKTLLVRVMTPDLRERLENLRKKPENIPQPISNTSRANLNKLLTDYTEMKKAILHVYWEEFQKDPVGLMSRVAQPASKKIDQNKLKPEMDEKGNLTTAGFACSQCGQPLFVYKLEQVSEKGKAYTNYFGRCNVAEHEKLILLAQLKPEKDSDEAVTYSLGKFGQRALDFYSIHVTKESTHPVKPLAQIAGNRYASVPVGKALSDACMGTIASFLSKYQDIIIEHQKVVKGNQKRLESLRELAGKENLEYPSVTLPPQPHTKEGVDAYNEVIARVRMWVNLNLWQKLKLSRDDAKPLLRLKGFPSFPLVERQANEVDWWDMVCNVKKLINEKKEDGKVFWQNLAGYKRQEALRPYLSSEEDRKKGKKFARYQLGDLLLHLEKKHGEDWGKVYDEAWERIDKKVEGLSKHIKLEEERRSEDAQSKAALTDWLRAKASFVIEGLKEADKDEFCRCELKLQKWYGDLRGKPFAIEAENSILDISGFSKQYNCAFIWQKDGVKKLNLYLIINYFKGGKLRFKKIKPEAFEANRFYTVINKKSGEIVPMEVNFNFDDPNLIILPLAFGKRQGREFIWNDLLSLETGSLKLANGRVIEKTLYNRRTRQDEPALFVALTFERREVLDSSNIKPMNLIGVDRGENIPAVIALTDPEGCPLSRFKDSLGNPTHILRIGESYKEKQRTIQAKKEVEQRRAGGYSRKYASKAKNLADDMVRNTARDLLYYAVTQDAMLIFENLSRGFGRQGKRTFMAERQYTRMEDWLTAKLAYEGLPSKTYLSKTLAQYTSKTCSNCGFTITSADYDRVLEKLKKTATGWMTTINGKELKVEGQITYYNRYKRQNVVKDLSVELDRLSEESVNNDISSWTKGRSGEALSLLKKRFSHRPVQEKFVCLNCGFETHADEQAALNIARSWLFLRSQEYKKYQTNKTTGNTDKRAFVETWQSFYRKKLKEVWKPAV

SEQ ID NO: 31177 - protein, 978 aa, synthetic construct
  REGION 1..978: note = engineered CasX variant
QEGKRISKIRRRLVKDSNTKKAGKTGPMKTLLVRVMTPDLRERLENLRKKPENIPQPISNTSRANLNKLLTDYTEMKKAILHVYWEEFQKDPVGLMSRVAQPASKKIDQNKLKPEMDEKGNLTTAGFACSQCGQPLFVYKLEQVSEKGKAYTNYFGRCNVAEHEKLIKLAQLKPEKDSDEAVTYSLGKFGQRALDFYSIHVTKESTHPVKPLAQIAGNRYASGPVGKALSDACMGTIASFLSKYQDIIIEHQKVVKGNQKRLESLRELAGKENLEYPSVTLPPQPHTKEGVDAYNEVIARVRMWVNLNLWQKLKLSRDDAKPLLRLKGFPSFPLVERQANEVDWWDMVCNVKKLINEKKEDGKVFWQNLAGYKRQEALRPYLSSEEDRKKGKKFARYQLGDLLLHLEKKHGEDWGKVYDEAWERIDKKVEGLSKHIKLEEERRSEDAQSKAALTDWLRAKASFVIEGLKEADKDEFCRCELKLQKWYGDLRGKPFAIEAENSILDISGFSKQYNCAFIWQKDGVKKLNLYLIINYFKGGKLRFKKIKPEAFEANRFYTVINKKSGEIVPMEVNFNFDDPNLIILPLAFGKRQGREFIWNDLLSLETGSLKLANGRVIEKTLYNRRTRQDEPALFVALTFERREVLDSSNIKPMNLIGVDRGENIPAVIALTDPEGCPLSRFKDSLGNPTHILRIGESYKEKQRTIQAKKEVEQRRAGGYSRKYASKAKNLADDMVRNTARDLLYYAVTQDAMLIFENLSRGFGRQGKRTFMAERQYTRMEDWLTAKLAYEGLPSKTYLSKTLAQYTSKTCSNCGFTITSADYDRVLEKLKKTATGWMTTINGKELKVEGQITYYNRYKRQNVVKDLSVELDRLSEESVNNDISSWTKGRSGEALSLLKKRFSHRPVQEKFVCLNCGFETHADEQAALNIARSWLFLRSQEYKKYQTNKTTGNTDKRAFVETWQSFYRKKLKEVWKPAV

SEQ ID NO: 31178 - protein, 977 aa, synthetic construct
  REGION 1..977: note = engineered CasX variant
QEGKRISKIRRRLVKDSNTKKAGKTGPMKTLLVRVMTPDLRERLENLRKKPENIPQPISNTSRANLNKLLTDYTEMKKAILHVYWEEFQKDPVGLMSRVAQPASKKIDQNKLKPEMDEKGNLTTAGFACSQCGQPLFVYKLEQVSEKGKAYTNYFGRCNVAEHEKLILLAQLKPEKDSDEAVTYSLGKFGQRALDFYSIHVTKESTHPVKPLAQIAGNRYASPVGKALSDACMGTIASFLSKYQDIIIEHQKVVKGNQKRLESLRELAGKENLEYPSVTLPPQPHTKEGVDAYNEVIARVRMWVNLNLWQKLKLSRDDAKPLLRLKGFPSFPLVERQANEVDWWDMVCNVKKLINEKKEDGKVFWQNLAGYKRQEALRPYLSSEEDRKKGKKFARYQLGDLLLHLEKKHGEDWGKVYDEAWERIDKKVEGLSKHIKLEEERRSEDAQSKAALTDWLRAKASFVIEGLKEADKDEFCRCELKLQKWYGDLRGKPFAIEAENSILDISGFSKQYNCAFIWQKDGVKKLNLYLIINYFKGGKLRFKKIKPEAFEANRFYTVINKKSGEIVPMEVNFNFDDPNLIILPLAFGKRQGREFIWNDLLSLETGSLKLANGRVIEKTLYNRRTRQDEPALFVALTFERREVLDSSNIKPMNLIGVDRGENIPAVIALTDPEGCPLSRFKDSLGNPTHILRIGESYKEKQRTIQAKKEVEQRRAGGYSRKYASKAKNLADDMVRNTARDLLYYAVTQDAMLIFENLSRGFGRQGKRTFMAERQYTRMEDWLTAKLAYEGLPSKTYLSKTLAQYTSKTCSNCGFTITSADYDRVLEKLKKTATGWMTTINGKELKVEGQITYYNRYKRQNVVKDLSVELDRLSEESVNNDISSWTKGRSGEALSLLKKRFSHRPVQEKFVCLNCGFETHADEQAALNIARSWLFLRSQEYKKYQTNKTTGNTDKRAFVETWQSFYRKKLKEVWKPAV

SEQ ID NO: 31179 - protein, 978 aa, synthetic construct
  REGION 1..978: note = engineered CasX variant
QEGKRINGIRRRLVKDSNTKKAGKTGPMKTLLVRVMTPDLRERLENLRKKPENIPQPISNTSRANLNKLLTDYTEMKKAILHVYWEEFQKDPVGLMSRVAQPASKKIDQNKLKPEMDEKGNLTTAGFACSQCGQPLFVYKLEQVSEKGKAYTNYFGRCNVAEHEKLILLAQLKPEKDSDEAVTYSLGKFGQRALDFYSIHVTKESTHPVKPLAQIAGNRYASYPVGKALSDACMGTIASFLSKYQDIIIEHQKVVKGNQKRLESLRELAGKENLEYPSVTLPPQPHTKEGVDAYNEVIARVRMWVNLNLWQKLKLSRDDAKPLLRLKGFPSFPLVERQANEVDWWDMVCNVKKLINEKKEDGKVFWQNLAGYKRQEALRPYLSSEEDRKKGKKFARYQLGDLLLHLEKKHGEDWGKVYDEAWERIDKKVEGLSKHIKLEEERRSEDAQSKAALTDWLRAKASFVIEGLKEADKDEFCRCELKLQKWYGDLRGKPFAIEAENSILDISGFSKQYNCAFIWQKDGVKKLNLYLIINYFKGGKLRFKKIKPEAFEANRFYTVINKKSGEIVPMEVNFNFDDPNLIILPLAFGKRQGREFIWNDLLSLETGSLKLANGRVIEKTLYNRRTRQDEPALFVALTFERREVLDSSNIKPMNLIGVDRGENIPAVIALTDPEGCPLSRFKDSLGNPTHILRIGESYKEKQRTIQAKKEVEQRRAGGYSRKYASKAKNLADDMVRNTARDLLYYAVTQDAMLIFENLSRGFGRQGKRTFMAERQYTRMEDWLTAKLAYEGLPSKTYLSKTLAQYTSKTCSNCGFTITSADYDRVLEKLKKTATGWMTTINGKELKVEGQITYYNRYKRQNVVKDLSVELDRLSEESVNNDISSWTKGRSGEALSLLKKRFSHRPVQEKFVCLNCGFETHADEQAALNIARSWLFLRSQEYKKYQTNKTTGNTDKRAFVETWQSFYRKKLKEVWKPAV

SEQ ID NO: 31180 - protein, 978 aa, synthetic construct
  REGION 1..978: note = engineered CasX variant
QEGKRINGIRRRLVKDSNTKKAGKTGPMKTLLVRVMTPDLRERLENLRKKPENIPQPISNTSRANLNKLLTDYTEMKKAILHVYWEEFQKDPVGLMSRVAQPASKKIDQNKLKPEMDEKGNLTTAGFACSQCGQPLFVYKLEQVSEKGKAYTNYFGRCNVAEHEKLILLAQLKPEKDSDEAVTYSLGKFGQRALDFYSIHVTKESTHPVKPLAQIAGNRYASHPVGKALSDACMGTIASFLSKYQDIIIEHQKVVKGNQKRLESLRELAGKENLEYPSVTLPPQPHTKEGVDAYNEVIARVRMWVNLNLWQKLKLSRDDAKPLLRLKGFPSFPLVERQANEVDWWDMVCNVKKLINEKKEDGKVFWQNLAGYKRQEALRPYLSSEEDRKKGKKFARYQLGDLLLHLEKKHGEDWGKVYDEAWERIDKKVEGLSKHIKLEEERRSEDAQSKAALTDWLRAKASFVIEGLKEADKDEFCRCELKLQKWYGDLRGKPFAIEAENSILDISGFSKQYNCAFIWQKDGVKKLNLYLIINYFKGGKLRFKKIKPEAFEANRFYTVINKKSGEIVPMEVNFNFDDPNLIILPLAFGKRQGREFIWNDLLSLETGSLKLANGRVIEKTLYNRRTRQDEPALFVALTFERREVLDSSNIKPMNLIGVDRGENIPAVIALTDPEGCPLSRFKDSLGNPTHILRIGESYKEKQRTIQAKKEVEQRRAGGYSRKYASKAKNLADDMVRNTARDLLYYAVTQDAMLIFENLSRGFGRQGKRTFMAERQYTRMEDWLTAKLAYEGLPSKTYLSKTLAQYTSKTCSNCGFTITSADYDRVLEKLKKTATGWMTTINGKELKVEGQITYYNRYKRQNVVKDLSVELDRLSEESVNNDISSWTKGRSGEALSLLKKRFSHRPVQEKFVCLNCGFETHADEQAALNIARSWLFLRSQEYKKYQTNKTTGNTDKRAFVETWQSFYRKKLKEVWKPAV

SEQ ID NO: 31181 - protein, 978 aa, synthetic construct
  REGION 1..978: note = engineered CasX variant
QEGKRINGIRRRLVKDSNTKKAGKTGPMKTLLVRVMTPDLRERLENLRKKPENIPQPISNTSRANLNKLLTDYTEMKKAILHVYWEEFQKDPVGLMSRVAQPASKKIDQNKLKPEMDEKGNLTTAGFACSQCGQPLFVYKLEQVSEKGKAYTNYFGRCNVAEHEKLILLAQLKPEKDSDEAVTYSLGKFGQRALDFYSIHVTKESTHPVKPLAQIAGNRYASSPVGKALSDACMGTIASFLSKYQDIIIEHQKVVKGNQKRLESLRELAGKENLEYPSVTLPPQPHTKEGVDAYNEVIARVRMWVNLNLWQKLKLSRDDAKPLLRLKGFPSFPLVERQANEVDWWDMVCNVKKLINEKKEDGKVFWQNLAGYKRQEALRPYLSSEEDRKKGKKFARYQLGDLLLHLEKKHGEDWGKVYDEAWERIDKKVEGLSKHIKLEEERRSEDAQSKAALTDWLRAKASFVIEGLKEADKDEFCRCELKLQKWYGDLRGKPFAIEAENSILDISGFSKQYNCAFIWQKDGVKKLNLYLIINYFKGGKLRFKKIKPEAFEANRFYTVINKKSGEIVPMEVNFNFDDPNLIILPLAFGKRQGREFIWNDLLSLETGSLKLANGRVIEKTLYNRRTRQDEPALFVALTFERREVLDSSNIKPMNLIGVDRGENIPAVIALTDPEGCPLSRFKDSLGNPTHILRIGESYKEKQRTIQAKKEVEQRRAGGYSRKYASKAKNLADDMVRNTARDLLYYAVTQDAMLIFENLSRGFGRQGKRTFMAERQYTRMEDWLTAKLAYEGLPSKTYLSKTLAQYTSKTCSNCGFTITSADYDRVLEKLKKTATGWMTTINGKELKVEGQITYYNRYKRQNVVKDLSVELDRLSEESVNNDISSWTKGRSGEALSLLKKRFSHRPVQEKFVCLNCGFETHADEQAALNIARSWLFLRSQEYKKYQTNKTTGNTDKRAFVETWQSFYRKKLKEVWKPAV

SEQ ID NO: 31182 - protein, 978 aa, synthetic construct
  REGION 1..978: note = engineered CasX variant
QEGKRINGIRRRLVKDSNTKKAGKTGPMKTLLVRVMTPDLRERLENLRKKPENIPQPISNTSRANLNKLLTDYTEMKKAILHVYWEEFQKDPVGLMSRVAQPASKKIDQNKLKPEMDEKGNLTTAGFACSQCGQPLFVYKLEQVSEKGKAYTNYFGRCNVAEHEKLILLAQLKPEKDSDEAVTYSLGKFGQRALDFYSIHVTKESTHPVKPLAQIAGNRYASTPVGKALSDACMGTIASFLSKYQDIIIEHQKVVKGNQKRLESLRELAGKENLEYPSVTLPPQPHTKEGVDAYNEVIARVRMWVNLNLWQKLKLSRDDAKPLLRLKGFPSFPLVERQANEVDWWDMVCNVKKLINEKKEDGKVFWQNLAGYKRQEALRPYLSSEEDRKKGKKFARYQLGDLLLHLEKKHGEDWGKVYDEAWERIDKKVEGLSKHIKLEEERRSEDAQSKAALTDWLRAKASFVIEGLKEADKDEFCRCELKLQKWYGDLRGKPFAIEAENSILDISGFSKQYNCAFIWQKDGVKKLNLYLIINYFKGGKLRFKKIKPEAFEANRFYTVINKKSGEIVPMEVNFNFDDPNLIILPLAFGKRQGREFIWNDLLSLETGSLKLANGRVIEKTLYNRRTRQDEPALFVALTFERREVLDSSNIKPMNLIGVDRGENIPAVIALTDPEGCPLSRFKDSLGNPTHILRIGESYKEKQRTIQAKKEVEQRRAGGYSRKYASKAKNLADDMVRNTARDLLYYAVTQDAMLIFENLSRGFGRQGKRTFMAERQYTRMEDWLTAKLAYEGLPSKTYLSKTLAQYTSKTCSNCGFTITSADYDRVLEKLKKTATGWMTTINGKELKVEGQITYYNRYKRQNVVKDLSVELDRLSEESVNNDISSWTKGRSGEALSLLKKRFSHRPVQEKFVCLNCGFETHADEQAALNIARSWLFLRSQEYKKYQTNKTTGNTDKRAFVETWQSFYRKKLKEVWKPAV

SEQ ID NO: 31183 - protein, 978 aa, synthetic construct
  REGION 1..978: note = engineered CasX variant
QEGKRINGIRRRLVKDSNTKKAGKTGPMKTLLVRVMTPDLRERLENLRKKPENIPQPISNTSRANLNKLLTDYTEMKKAILHVYWEEFQKDPVGLMSRVAQPASKKIDQNKLKPEMDEKGNLTTAGFACSQCGQPLFVYKLEQVSEKGKAYTNYFGRCNVAEHEKLILLAQLKPEKDSDEAVTYSLGKFGQRALDFYSIHVTKESTHPVKPLAQIAGNRYASAPVGKALSDACMGTIASFLSKYQDIIIEHQKVVKGNQKRLESLRELAGKENLEYPSVTLPPQPHTKEGVDAYNEVIARVRMWVNLNLWQKLKLSRDDAKPLLRLKGFPSFPLVERQANEVDWWDMVCNVKKLINEKKEDGKVFWQNLAGYKRQEALRPYLSSEEDRKKGKKFARYQLGDLLLHLEKKHGEDWGKVYDEAWERIDKKVEGLSKHIKLEEERRSEDAQSKAALTDWLRAKASFVIEGLKEADKDEFCRCELKLQKWYGDLRGKPFAIEAENSILDISGFSKQYNCAFIWQKDGVKKLNLYLIINYFKGGKLRFKKIKPEAFEANRFYTVINKKSGEIVPMEVNFNFDDPNLIILPLAFGKRQGREFIWNDLLSLETGSLKLANGRVIEKTLYNRRTRQDEPALFVALTFERREVLDSSNIKPMNLIGVDRGENIPAVIALTDPEGCPLSRFKDSLGNPTHILRIGESYKEKQRTIQAKKEVEQRRAGGYSRKYASKAKNLADDMVRNTARDLLYYAVTQDAMLIFENLSRGFGRQGKRTFMAERQYTRMEDWLTAKLAYEGLPSKTYLSKTLAQYTSKTCSNCGFTITSADYDRVLEKLKKTATGWMTTINGKELKVEGQITYYNRYKRQNVVKDLSVELDRLSEESVNNDISSWTKGRSGEALSLLKKRFSHRPVQEKFVCLNCGFETHADEQAALNIARSWLFLRSQEYKKYQTNKTTGNTDKRAFVETWQSFYRKKLKEVWKPAV

SEQ ID NO: 31184 - protein, 978 aa, synthetic construct
  REGION 1..978: note = engineered CasX variant
QEGKRINGIRRRLVKDSNTKKAGKTGPMKTLLVRVMTPDLRERLENLRKKPENIPQPISNTSRANLNKLLTDYTEMKKAILHVYWEEFQKDPVGLMSRVAQPASKKIDQNKLKPEMDEKGNLTTAGFACSQCGQPLFVYKLEQVSEKGKAYTNYFGRCNVAEHEKLILLAQLKPEKDSDEAVTYSLGKFGQRALDFYSIHVTKESTHPVKPLAQIAGNRYASVPVGKALSDACMGTIASFLSKYQDIIIEHQKVVKGNQKRLESLRELAGKENLEYPSVTLPPQPHTKEGVDAYNEVIARVRMWVNLNLWQKLKLSRDDAKPLLRLKGFPSFPLVERQANEVDWWDMVCNVKKLINEKKEDGKVFWQNLAGYKRQEALRPYLSSEEDRKKGKKFARYQLGDLLLHLEKKHGEDWGKVYDEAWERIDKKVEGLSKHIKLEEERRSEDAQSKAALTDWLRAKASFVIEGLKEADKDEFCRCELKLQKWYGDLRGKPFAIEAENSILDISGFSKQYNCAFIWQKDGVKKLNLYLIINYFKGGKLRFKKIKPEAFEANRFYTVINKKSGEIVPMEVNFNFDDPNLIILPLAFGKRQGREFIWNDLLSLETGSLKLANGRVIEKTLYNRRTRQDEPALFVALTFERREVLDSSNIKPMNLIGVDRGENIPAVIALTDPEGCPLSRFKDSLGNPTHILRIGESYKEKQRTIQAKKEVEQRRAGGYSRKYASKAKNLADDMVRNTARDLLYYAVTQDAMLIFENLSRGFGRQGKRTFMAERQYTRMEDWLTAKLAYEGLPSKTYLSKTLAQYTSKTCSNCGFTITSADYDRVLEKLKKTATGWMTTINGKELKVEGQITYYNRYKRQNVVKDLSVELDRLSEESVNNDISSWTKGRSGEALSLLKKRFSHRPVQEKFVCLNCGFETHADEQAALNIARSWLFLRSQEYKKYQTNKTTGNTDKRAFVETWQSFYRKKLKEVWKPAV

SEQ ID NO: 31185 - protein, 978 aa, synthetic construct
  REGION 1..978: note = engineered CasX variant
QEGKRINGIRRRLVKDSNTKKAGKTGPMKTLLVRVMTPDLRERLENLRKKPENIPQPISNTSRANLNKLLTDYTEMKKAILHVYWEEFQKDPVGLMSRVAQPASKKIDQNKLKPEMDEKGNLTTAGFACSQCGQPLFVYKLEQVSEKGKAYTNYFGRCNVAEHEKLIKLAQLKPEKDSDEAVTYSLGKFGQRALDFYSIHVTKESTHPVKPLAQIAGNRYASGPVGKALSDACMGTIASFLSKYQDIIIEHQKVVKGNQKRLESLRELAGKENLEYPSVTLPPQPHTKEGVDAYNEVIARVRMWVNLNLWQKLKLSRDDAKPLLRLKGFPSFPLVERQANEVDWWDMVCNVKKLINEKKEDGKVFWQNLAGYKRQEALRPYLSSEEDRKKGKKFARYQLGDLLLHLEKKHGEDWGKVYDEAWERIDKKVEGLSKHIKLEEERRSEDAQSKAALTDWLRAKASFVIEGLKEADKDEFCRCELKLQKWYGDLRGKPFAIEAENSILDISGFSKQYNCAFIWQKDGVKKLNLYLIINYFKGGKLRFKKIKPEAFEANRFYTVINKKSGEIVPMEVNFNFDDPNLIILPLAFGKRQGREFIWNDLLSLETGSLKLANGRVIEKTLYNRRTRQDEPALFVALTFERREVLDSSNIKPMNLIGVDRGENIPAVIALTDPEGCPLSRFKDSLGNPTHILRIGESYKEKQRTIQAKKEVEQRRAGGYSRKYASKAKNLADDMVRNTARDLLYYAVTQDAMLIFENLSRGFGRQGKRTFMAERQYTRMEDWLTAKLAYEGLPSKTYLSKTLAQYTSKTCSNCGFTITSADYDRVLEKLKKTATGWMTTINGKELKVEGQITYYNRYKRQNVVKDLSVELDRLSEESVNNDISSWTKGRSGEALSLLKKRFSHRPVQEKFVCLNCGFETHADEQAALNIARSWLFLRSQEYKKYQTNKTTGNTDKRAFVETWQSFYRKKLKEVWKPAV

SEQ ID NO: 31186 - protein, 977 aa, synthetic construct
  REGION 1..977: note = engineered CasX variant
QEGKRINGIRRRLVKDSNTKKAGKTGPMKTLLVRVMTPDLRERLENLRKKPENIPQPISNTSRANLNKLLTDYTEMKKAILHVYWEEFQKDPVGLMSRVAQPASKKIDQNKLKPEMDEKGNLTTAGFACSQCGQPLFVYKLEQVSEKGKAYTNYFGRCNVAEHEKLILLAQLKPEKDSDEAVTYSLGKFGQRALDFYSIHVTKESTHPVKPLAQIAGNRYASPVGKALSDACMGTIASFLSKYQDIIIEHQKVVKGNQKRLESLRELAGKENLEYPSVTLPPQPHTKEGVDAYNEVIARVRMWVNLNLWQKLKLSRDDAKPLLRLKGFPSFPLVERQANEVDWWDMVCNVKKLINEKKEDGKVFWQNLAGYKRQEALRPYLSSEEDRKKGKKFARYQLGDLLLHLEKKHGEDWGKVYDEAWERIDKKVEGLSKHIKLEEERRSEDAQSKAALTDWLRAKASFVIEGLKEADKDEFCRCELKLQKWYGDLRGKPFAIEAENSILDISGFSKQYNCAFIWQKDGVKKLNLYLIINYFKGGKLRFKKIKPEAFEANRFYTVINKKSGEIVPMEVNFNFDDPNLIILPLAFGKRQGREFIWNDLLSLETGSLKLANGRVIEKTLYNRRTRQDEPALFVALTFERREVLDSSNIKPMNLIGVDRGENIPAVIALTDPEGCPLSRFKDSLGNPTHILRIGESYKEKQRTIQAKKEVEQRRAGGYSRKYASKAKNLADDMVRNTARDLLYYAVTQDAMLIFENLSRGFGRQGKRTFMAERQYTRMEDWLTAKLAYEGLPSKTYLSKTLAQYTSKTCSNCGFTITSADYDRVLEKLKKTATGWMTTINGKELKVEGQITYYNRYKRQNVVKDLSVELDRLSEESVNNDISSWTKGRSGEALSLLKKRFSHRPVQEKFVCLNCGFETHADEQAALNIARSWLFLRSQEYKKYQTNKTTGNTDKRAFVETWQSFYRKKLKEVWKPAV

SEQ ID NO: 31187 - protein, 978 aa, synthetic construct
  REGION 1..978: note = engineered CasX variant
QEGKRINKIRRRLVKDSNTKKAGKTGPMKTLLVPVMTPDLRERLENLRKKPENIPQPISNTSRANLNKLLTDYTEMKKAILHVYWEEFQKDPVGLMSRVAQPASKKIDQNKLKPEMDEKGNLTTAGFACSQCGQPLFVYKLEQVSEKGKAYTNYFGRCNVAEHEKLILLAQLKPEKDSDEAVTYSLGKFGQRALDFYSIHVTKESTHPVKPLAQIAGNRYASYPVGKALSDACMGTIASFLSKYQDIIIEHQKVVKGNQKRLESLRELAGKENLEYPSVTLPPQPHTKEGVDAYNEVIARVRMWVNLNLWQKLKLSRDDAKPLLRLKGFPSFPLVERQANEVDWWDMVCNVKKLINEKKEDGKVFWQNLAGYKRQEALRPYLSSEEDRKKGKKFARYQLGDLLLHLEKKHGEDWGKVYDEAWERIDKKVEGLSKHIKLEEERRSEDAQSKAALTDWLRAKASFVIEGLKEADKDEFCRCELKLQKWYGDLRGKPFAIEAENSILDISGFSKQYNCAFIWQKDGVKKLNLYLIINYFKGGKLRFKKIKPEAFEANRFYTVINKKSGEIVPMEVNFNFDDPNLIILPLAFGKRQGREFIWNDLLSLETGSLKLANGRVIEKTLYNRRTRQDEPALFVALTFERREVLDSSNIKPMNLIGVDRGENIPAVIALTDPEGCPLSRFKDSLGNPTHILRIGESYKEKQRTIQAKKEVEQRRAGGYSRKYASKAKNLADDMVRNTARDLLYYAVTQDAMLIFENLSRGFGRQGKRTFMAERQYTRMEDWLTAKLAYEGLPSKTYLSKTLAQYTSKTCSNCGFTITSADYDRVLEKLKKTATGWMTTINGKELKVEGQITYYNRYKRQNVVKDLSVELDRLSEESVNNDISSWTKGRSGEALSLLKKRFSHRPVQEKFVCLNCGFETHADEQAALNIARSWLFLRSQEYKKYQTNKTTGNTDKRAFVETWQSFYRKKLKEVWKPAV

SEQ ID NO: 31188 - protein, 978 aa, synthetic construct
  REGION 1..978: note = engineered CasX variant
QEGKRINKIRRRLVKDSNTKKAGKTGPMKTLLVPVMTPDLRERLENLRKKPENIPQPISNTSRANLNKLLTDYTEMKKAILHVYWEEFQKDPVGLMSRVAQPASKKIDQNKLKPEMDEKGNLTTAGFACSQCGQPLFVYKLEQVSEKGKAYTNYFGRCNVAEHEKLILLAQLKPEKDSDEAVTYSLGKFGQRALDFYSIHVTKESTHPVKPLAQIAGNRYASHPVGKALSDACMGTIASFLSKYQDIIIEHQKVVKGNQKRLESLRELAGKENLEYPSVTLPPQPHTKEGVDAYNEVIARVRMWVNLNLWQKLKLSRDDAKPLLRLKGFPSFPLVERQANEVDWWDMVCNVKKLINEKKEDGKVFWQNLAGYKRQEALRPYLSSEEDRKKGKKFARYQLGDLLLHLEKKHGEDWGKVYDEAWERIDKKVEGLSKHIKLEEERRSEDAQSKAALTDWLRAKASFVIEGLKEADKDEFCRCELKLQKWYGDLRGKPFAIEAENSILDISGFSKQYNCAFIWQKDGVKKLNLYLIINYFKGGKLRFKKIKPEAFEANRFYTVINKKSGEIVPMEVNFNFDDPNLIILPLAFGKRQGREFIWNDLLSLETGSLKLANGRVIEKTLYNRRTRQDEPALFVALTFERREVLDSSNIKPMNLIGVDRGENIPAVIALTDPEGCPLSRFKDSLGNPTHILRIGESYKEKQRTIQAKKEVEQRRAGGYSRKYASKAKNLADDMVRNTARDLLYYAVTQDAMLIFENLSRGFGRQGKRTFMAERQYTRMEDWLTAKLAYEGLPSKTYLSKTLAQYTSKTCSNCGFTITSADYDRVLEKLKKTATGWMTTINGKELKVEGQITYYNRYKRQNVVKDLSVELDRLSEESVNNDISSWTKGRSGEALSLLKKRFSHRPVQEKFVCLNCGFETHADEQAALNIARSWLFLRSQEYKKYQTNKTTGNTDKRAFVETWQSFYRKKLKEVWKPAV

SEQ ID NO: 31189 - protein, 978 aa, synthetic construct
  REGION 1..978: note = engineered CasX variant
QEGKRINKIRRRLVKDSNTKKAGKTGPMKTLLVPVMTPDLRERLENLRKKPENIPQPISNTSRANLNKLLTDYTEMKKAILHVYWEEFQKDPVGLMSRVAQPASKKIDQNKLKPEMDEKGNLTTAGFACSQCGQPLFVYKLEQVSEKGKAYTNYFGRCNVAEHEKLILLAQLKPEKDSDEAVTYSLGKFGQRALDFYSIHVTKESTHPVKPLAQIAGNRYASSPVGKALSDACMGTIASFLSKYQDIIIEHQKVVKGNQKRLESLRELAGKENLEYPSVTLPPQPHTKEGVDAYNEVIARVRMWVNLNLWQKLKLSRDDAKPLLRLKGFPSFPLVERQANEVDWWDMVCNVKKLINEKKEDGKVFWQNLAGYKRQEALRPYLSSEEDRKKGKKFARYQLGDLLLHLEKKHGEDWGKVYDEAWERIDKKVEGLSKHIKLEEERRSEDAQSKAALTDWLRAKASFVIEGLKEADKDEFCRCELKLQKWYGDLRGKPFAIEAENSILDISGFSKQYNCAFIWQKDGVKKLNLYLIINYFKGGKLRFKKIKPEAFEANRFYTVINKKSGEIVPMEVNFNFDDPNLIILPLAFGKRQGREFIWNDLLSLETGSLKLANGRVIEKTLYNRRTRQDEPALFVALTFERREVLDSSNIKPMNLIGVDRGENIPAVIALTDPEGCPLSRFKDSLGNPTHILRIGESYKEKQRTIQAKKEVEQRRAGGYSRKYASKAKNLADDMVRNTARDLLYYAVTQDAMLIFENLSRGFGRQGKRTFMAERQYTRMEDWLTAKLAYEGLPSKTYLSKTLAQYTSKTCSNCGFTITSADYDRVLEKLKKTATGWMTTINGKELKVEGQITYYNRYKRQNVVKDLSVELDRLSEESVNNDISSWTKGRSGEALSLLKKRFSHRPVQEKFVCLNCGFETHADEQAALNIARSWLFLRSQEYKKYQTNKTTGNTDKRAFVETWQSFYRKKLKEVWKPAV

SEQ ID NO: 31190 - protein, 978 aa, synthetic construct
  REGION 1..978: note = engineered CasX variant
QEGKRINKIRRRLVKDSNTKKAGKTGPMKTLLVPVMTPDLRERLENLRKKPENIPQPISNTSRANLNKLLTDYTEMKKAILHVYWEEFQKDPVGLMSRVAQPASKKIDQNKLKPEMDEKGNLTTAGFACSQCGQPLFVYKLEQVSEKGKAYTNYFGRCNVAEHEKLILLAQLKPEKDSDEAVTYSLGKFGQRALDFYSIHVTKESTHPVKPLAQIAGNRYASTPVGKALSDACMGTIASFLSKYQDIIIEHQKVVKGNQKRLESLRELAGKENLEYPSVTLPPQPHTKEGVDAYNEVIARVRMWVNLNLWQKLKLSRDDAKPLLRLKGFPSFPLVERQANEVDWWDMVCNVKKLINEKKEDGKVFWQNLAGYKRQEALRPYLSSEEDRKKGKKFARYQLGDLLLHLEKKHGEDWGKVYDEAWERIDKKVEGLSKHIKLEEERRSEDAQSKAALTDWLRAKASFVIEGLKEADKDEFCRCELKLQKWYGDLRGKPFAIEAENSILDISGFSKQYNCAFIWQKDGVKKLNLYLIINYFKGGKLRFKKIKPEAFEANRFYTVINKKSGEIVPMEVNFNFDDPNLIILPLAFGKRQGREFIWNDLLSLETGSLKLANGRVIEKTLYNRRTRQDEPALFVALTFERREVLDSSNIKPMNLIGVDRGENIPAVIALTDPEGCPLSRFKDSLGNPTHILRIGESYKEKQRTIQAKKEVEQRRAGGYSRKYASKAKNLADDMVRNTARDLLYYAVTQDAMLIFENLSRGFGRQGKRTFMAERQYTRMEDWLTAKLAYEGLPSKTYLSKTLAQYTSKTCSNCGFTITSADYDRVLEKLKKTATGWMTTINGKELKVEGQITYYNRYKRQNVVKDLSVELDRLSEESVNNDISSWTKGRSGEALSLLKKRFSHRPVQEKFVCLNCGFETHADEQAALNIARSWLFLRSQEYKKYQTNKTTGNTDKRAFVETWQSFYRKKLKEVWKPAV

SEQ ID NO: 31191 - protein, 978 aa, synthetic construct
  REGION 1..978: note = engineered CasX variant
QEGKRINKIRRRLVKDSNTKKAGKTGPMKTLLVPVMTPDLRERLENLRKKPENIPQPISNTSRANLNKLLTDYTEMKKAILHVYWEEFQKDPVGLMSRVAQPASKKIDQNKLKPEMDEKGNLTTAGFACSQCGQPLFVYKLEQVSEKGKAYTNYFGRCNVAEHEKLILLAQLKPEKDSDEAVTYSLGKFGQRALDFYSIHVTKESTHPVKPLAQIAGNRYASAPVGKALSDACMGTIASFLSKYQDIIIEHQKVVKGNQKRLESLRELAGKENLEYPSVTLPPQPHTKEGVDAYNEVIARVRMWVNLNLWQKLKLSRDDAKPLLRLKGFPSFPLVERQANEVDWWDMVCNVKKLINEKKEDGKVFWQNLAGYKRQEALRPYLSSEEDRKKGKKFARYQLGDLLLHLEKKHGEDWGKVYDEAWERIDKKVEGLSKHIKLEEERRSEDAQSKAALTDWLRAKASFVIEGLKEADKDEFCRCELKLQKWYGDLRGKPFAIEAENSILDISGFSKQYNCAFIWQKDGVKKLNLYLIINYFKGGKLRFKKIKPEAFEANRFYTVINKKSGEIVPMEVNFNFDDPNLIILPLAFGKRQGREFIWNDLLSLETGSLKLANGRVIEKTLYNRRTRQDEPALFVALTFERREVLDSSNIKPMNLIGVDRGENIPAVIALTDPEGCPLSRFKDSLGNPTHILRIGESYKEKQRTIQAKKEVEQRRAGGYSRKYASKAKNLADDMVRNTARDLLYYAVTQDAMLIFENLSRGFGRQGKRTFMAERQYTRMEDWLTAKLAYEGLPSKTYLSKTLAQYTSKTCSNCGFTITSADYDRVLEKLKKTATGWMTTINGKELKVEGQITYYNRYKRQNVVKDLSVELDRLSEESVNNDISSWTKGRSGEALSLLKKRFSHRPVQEKFVCLNCGFETHADEQAALNIARSWLFLRSQEYKKYQTNKTTGNTDKRAFVETWQSFYRKKLKEVWKPAV

SEQ ID NO: 31192 - protein, 978 aa, synthetic construct
  REGION 1..978: note = engineered CasX variant
QEGKRINKIRRRLVKDSNTKKAGKTGPMKTLLVPVMTPDLRERLENLRKKPENIPQPISNTSRANLNKLLTDYTEMKKAILHVYWEEFQKDPVGLMSRVAQPASKKIDQNKLKPEMDEKGNLTTAGFACSQCGQPLFVYKLEQVSEKGKAYTNYFGRCNVAEHEKLILLAQLKPEKDSDEAVTYSLGKFGQRALDFYSIHVTKESTHPVKPLAQIAGNRYASVPVGKALSDACMGTIASFLSKYQDIIIEHQKVVKGNQKRLESLRELAGKENLEYPSVTLPPQPHTKEGVDAYNEVIARVRMWVNLNLWQKLKLSRDDAKPLLRLKGFPSFPLVERQANEVDWWDMVCNVKKLINEKKEDGKVFWQNLAGYKRQEALRPYLSSEEDRKKGKKFARYQLGDLLLHLEKKHGEDWGKVYDEAWERIDKKVEGLSKHIKLEEERRSEDAQSKAALTDWLRAKASFVIEGLKEADKDEFCRCELKLQKWYGDLRGKPFAIEAENSILDISGFSKQYNCAFIWQKDGVKKLNLYLIINYFKGGKLRFKKIKPEAFEANRFYTVINKKSGEIVPMEVNFNFDDPNLIILPLAFGKRQGREFIWNDLLSLETGSLKLANGRVIEKTLYNRRTRQDEPALFVALTFERREVLDSSNIKPMNLIGVDRGENIPAVIALTDPEGCPLSRFKDSLGNPTHILRIGESYKEKQRTIQAKKEVEQRRAGGYSRKYASKAKNLADDMVRNTARDLLYYAVTQDAMLIFENLSRGFGRQGKRTFMAERQYTRMEDWLTAKLAYEGLPSKTYLSKTLAQYTSKTCSNCGFTITSADYDRVLEKLKKTATGWMTTINGKELKVEGQITYYNRYKRQNVVKDLSVELDRLSEESVNNDISSWTKGRSGEALSLLKKRFSHRPVQEKFVCLNCGFETHADEQAALNIARSWLFLRSQEYKKYQTNKTTGNTDKRAFVETWQSFYRKKLKEVWKPAV

SEQ ID NO: 31193 - protein, 978 aa, synthetic construct
  REGION 1..978: note = engineered CasX variant
QEGKRINKIRRRLVKDSNTKKAGKTGPMKTLLVPVMTPDLRERLENLRKKPENIPQPISNTSRANLNKLLTDYTEMKKAILHVYWEEFQKDPVGLMSRVAQPASKKIDQNKLKPEMDEKGNLTTAGFACSQCGQPLFVYKLEQVSEKGKAYTNYFGRCNVAEHEKLIKLAQLKPEKDSDEAVTYSLGKFGQRALDFYSIHVTKESTHPVKPLAQIAGNRYASGPVGKALSDACMGTIASFLSKYQDIIIEHQKVVKGNQKRLESLRELAGKENLEYPSVTLPPQPHTKEGVDAYNEVIARVRMWVNLNLWQKLKLSRDDAKPLLRLKGFPSFPLVERQANEVDWWDMVCNVKKLINEKKEDGKVFWQNLAGYKRQEALRPYLSSEEDRKKGKKFARYQLGDLLLHLEKKHGEDWGKVYDEAWERIDKKVEGLSKHIKLEEERRSEDAQSKAALTDWLRAKASFVIEGLKEADKDEFCRCELKLQKWYGDLRGKPFAIEAENSILDISGFSKQYNCAFIWQKDGVKKLNLYLIINYFKGGKLRFKKIKPEAFEANRFYTVINKKSGEIVPMEVNFNFDDPNLIILPLAFGKRQGREFIWNDLLSLETGSLKLANGRVIEKTLYNRRTRQDEPALFVALTFERREVLDSSNIKPMNLIGVDRGENIPAVIALTDPEGCPLSRFKDSLGNPTHILRIGESYKEKQRTIQAKKEVEQRRAGGYSRKYASKAKNLADDMVRNTARDLLYYAVTQDAMLIFENLSRGFGRQGKRTFMAERQYTRMEDWLTAKLAYEGLPSKTYLSKTLAQYTSKTCSNCGFTITSADYDRVLEKLKKTATGWMTTINGKELKVEGQITYYNRYKRQNVVKDLSVELDRLSEESVNNDISSWTKGRSGEALSLLKKRFSHRPVQEKFVCLNCGFETHADEQAALNIARSWLFLRSQEYKKYQTNKTTGNTDKRAFVETWQSFYRKKLKEVWKPAV

SEQ ID NO: 31194 - protein, 977 aa, synthetic construct
  REGION 1..977: note = engineered CasX variant
QEGKRINKIRRRLVKDSNTKKAGKTGPMKTLLVPVMTPDLRERLENLRKKPENIPQPISNTSRANLNKLLTDYTEMKKAILHVYWEEFQKDPVGLMSRVAQPASKKIDQNKLKPEMDEKGNLTTAGFACSQCGQPLFVYKLEQVSEKGKAYTNYFGRCNVAEHEKLILLAQLKPEKDSDEAVTYSLGKFGQRALDFYSIHVTKESTHPVKPLAQIAGNRYASPVGKALSDACMGTIASFLSKYQDIIIEHQKVVKGNQKRLESLRELAGKENLEYPSVTLPPQPHTKEGVDAYNEVIARVRMWVNLNLWQKLKLSRDDAKPLLRLKGFPSFPLVERQANEVDWWDMVCNVKKLINEKKEDGKVFWQNLAGYKRQEALRPYLSSEEDRKKGKKFARYQLGDLLLHLEKKHGEDWGKVYDEAWERIDKKVEGLSKHIKLEEERRSEDAQSKAALTDWLRAKASFVIEGLKEADKDEFCRCELKLQKWYGDLRGKPFAIEAENSILDISGFSKQYNCAFIWQKDGVKKLNLYLIINYFKGGKLRFKKIKPEAFEANRFYTVINKKSGEIVPMEVNFNFDDPNLIILPLAFGKRQGREFIWNDLLSLETGSLKLANGRVIEKTLYNRRTRQDEPALFVALTFERREVLDSSNIKPMNLIGVDRGENIPAVIALTDPEGCPLSRFKDSLGNPTHILRIGESYKEKQRTIQAKKEVEQRRAGGYSRKYASKAKNLADDMVRNTARDLLYYAVTQDAMLIFENLSRGFGRQGKRTFMAERQYTRMEDWLTAKLAYEGLPSKTYLSKTLAQYTSKTCSNCGFTITSADYDRVLEKLKKTATGWMTTINGKELKVEGQITYYNRYKRQNVVKDLSVELDRLSEESVNNDISSWTKGRSGEALSLLKKRFSHRPVQEKFVCLNCGFETHADEQAALNIARSWLFLRSQEYKKYQTNKTTGNTDKRAFVETWQSFYRKKLKEVWKPAV

SEQ ID NO: 31195 - protein, 978 aa, synthetic construct
  REGION 1..978: note = engineered CasX variant
QEGKRINKIRRRLVKDSNTKKAGKTGPMKTLLVRVMTPDLRERLENLRKKPPNIPQPISNTSRANLNKLLTDYTEMKKAILHVYWEEFQKDPVGLMSRVAQPASKKIDQNKLKPEMDEKGNLTTAGFACSQCGQPLFVYKLEQVSEKGKAYTNYFGRCNVAEHEKLILLAQLKPEKDSDEAVTYSLGKFGQRALDFYSIHVTKESTHPVKPLAQIAGNRYASYPVGKALSDACMGTIASFLSKYQDIIIEHQKVVKGNQKRLESLRELAGKENLEYPSVTLPPQPHTKEGVDAYNEVIARVRMWVNLNLWQKLKLSRDDAKPLLRLKGFPSFPLVERQANEVDWWDMVCNVKKLINEKKEDGKVFWQNLAGYKRQEALRPYLSSEEDRKKGKKFARYQLGDLLLHLEKKHGEDWGKVYDEAWERIDKKVEGLSKHIKLEEERRSEDAQSKAALTDWLRAKASFVIEGLKEADKDEFCRCELKLQKWYGDLRGKPFAIEAENSILDISGFSKQYNCAFIWQKDGVKKLNLYLIINYFKGGKLRFKKIKPEAFEANRFYTVINKKSGEIVPMEVNFNFDDPNLIILPLAFGKRQGREFIWNDLLSLETGSLKLANGRVIEKTLYNRRTRQDEPALFVALTFERREVLDSSNIKPMNLIGVDRGENIPAVIALTDPEGCPLSRFKDSLGNPTHILRIGESYKEKQRTIQAKKEVEQRRAGGYSRKYASKAKNLADDMVRNTARDLLYYAVTQDAMLIFENLSRGFGRQGKRTFMAERQYTRMEDWLTAKLAYEGLPSKTYLSKTLAQYTSKTCSNCGFTITSADYDRVLEKLKKTATGWMTTINGKELKVEGQITYYNRYKRQNVVKDLSVELDRLSEESVNNDISSWTKGRSGEALSLLKKRFSHRPVQEKFVCLNCGFETHADEQAALNIARSWLFLRSQEYKKYQTNKTTGNTDKRAFVETWQSFYRKKLKEVWKPAV

SEQ ID NO: 31196 - protein, 978 aa, synthetic construct
  REGION 1..978: note = engineered CasX variant
QEGKRINKIRRRLVKDSNTKKAGKTGPMKTLLVRVMTPDLRERLENLRKKPPNIPQPISNTSRANLNKLLTDYTEMKKAILHVYWEEFQKDPVGLMSRVAQPASKKIDQNKLKPEMDEKGNLTTAGFACSQCGQPLFVYKLEQVSEKGKAYTNYFGRCNVAEHEKLILLAQLKPEKDSDEAVTYSLGKFGQRALDFYSIHVTKESTHPVKPLAQIAGNRYASHPVGKALSDACMGTIASFLSKYQDIIIEHQKVVKGNQKRLESLRELAGKENLEYPSVTLPPQPHTKEGVDAYNEVIARVRMWVNLNLWQKLKLSRDDAKPLLRLKGFPSFPLVERQANEVDWWDMVCNVKKLINEKKEDGKVFWQNLAGYKRQEALRPYLSSEEDRKKGKKFARYQLGDLLLHLEKKHGEDWGKVYDEAWERIDKKVEGLSKHIKLEEERRSEDAQSKAALTDWLRAKASFVIEGLKEADKDEFCRCELKLQKWYGDLRGKPFAIEAENSILDISGFSKQYNCAFIWQKDGVKKLNLYLIINYFKGGKLRFKKIKPEAFEANRFYTVINKKSGEIVPMEVNFNFDDPNLIILPLAFGKRQGREFIWNDLLSLETGSLKLANGRVIEKTLYNRRTRQDEPALFVALTFERREVLDSSNIKPMNLIGVDRGENIPAVIALTDPEGCPLSRFKDSLGNPTHILRIGESYKEKQRTIQAKKEVEQRRAGGYSRKYASKAKNLADDMVRNTARDLLYYAVTQDAMLIFENLSRGFGRQGKRTFMAERQYTRMEDWLTAKLAYEGLPSKTYLSKTLAQYTSKTCSNCGFTITSADYDRVLEKLKKTATGWMTTINGKELKVEGQITYYNRYKRQNVVKDLSVELDRLSEESVNNDISSWTKGRSGEALSLLKKRFSHRPVQEKFVCLNCGFETHADEQAALNIARSWLFLRSQEYKKYQTNKTTGNTDKRAFVETWQSFYRKKLKEVWKPAV

SEQ ID NO: 31197 - protein, 978 aa, synthetic construct
  REGION 1..978: note = engineered CasX variant
QEGKRINKIRRRLVKDSNTKKAGKTGPMKTLLVRVMTPDLRERLENLRKKPPNIPQPISNTSRANLNKLLTDYTEMKKAILHVYWEEFQKDPVGLMSRVAQPASKKIDQNKLKPEMDEKGNLTTAGFACSQCGQPLFVYKLEQVSEKGKAYTNYFGRCNVAEHEKLILLAQLKPEKDSDEAVTYSLGKFGQRALDFYSIHVTKESTHPVKPLAQIAGNRYASSPVGKALSDACMGTIASFLSKYQDIIIEHQKVVKGNQKRLESLRELAGKENLEYPSVTLPPQPHTKEGVDAYNEVIARVRMWVNLNLWQKLKLSRDDAKPLLRLKGFPSFPLVERQANEVDWWDMVCNVKKLINEKKEDGKVFWQNLAGYKRQEALRPYLSSEEDRKKGKKFARYQLGDLLLHLEKKHGEDWGKVYDEAWERIDKKVEGLSKHIKLEEERRSEDAQSKAALTDWLRAKASFVIEGLKEADKDEFCRCELKLQKWYGDLRGKPFAIEAENSILDISGFSKQYNCAFIWQKDGVKKLNLYLIINYFKGGKLRFKKIKPEAFEANRFYTVINKKSGEIVPMEVNFNFDDPNLIILPLAFGKRQGREFIWNDLLSLETGSLKLANGRVIEKTLYNRRTRQDEPALFVALTFERREVLDSSNIKPMNLIGVDRGENIPAVIALTDPEGCPLSRFKDSLGNPTHILRIGESYKEKQRTIQAKKEVEQRRAGGYSRKYASKAKNLADDMVRNTARDLLYYAVTQDAMLIFENLSRGFGRQGKRTFMAERQYTRMEDWLTAKLAYEGLPSKTYLSKTLAQYTSKTCSNCGFTITSADYDRVLEKLKKTATGWMTTINGKELKVEGQITYYNRYKRQNVVKDLSVELDRLSEESVNNDISSWTKGRSGEALSLLKKRFSHRPVQEKFVCLNCGFETHADEQAALNIARSWLFLRSQEYKKYQTNKTTGNTDKRAFVETWQSFYRKKLKEVWKPAV

SEQ ID NO: 31198 - protein, 978 aa, synthetic construct
  REGION 1..978: note = engineered CasX variant
QEGKRINKIRRRLVKDSNTKKAGKTGPMKTLLVRVMTPDLRERLENLRKKPPNIPQPISNTSRANLNKLLTDYTEMKKAILHVYWEEFQKDPVGLMSRVAQPASKKIDQNKLKPEMDEKGNLTTAGFACSQCGQPLFVYKLEQVSEKGKAYTNYFGRCNVAEHEKLILLAQLKPEKDSDEAVTYSLGKFGQRALDFYSIHVTKESTHPVKPLAQIAGNRYASTPVGKALSDACMGTIASFLSKYQDIIIEHQKVVKGNQKRLESLRELAGKENLEYPSVTLPPQPHTKEGVDAYNEVIARVRMWVNLNLWQKLKLSRDDAKPLLRLKGFPSFPLVERQANEVDWWDMVCNVKKLINEKKEDGKVFWQNLAGYKRQEALRPYLSSEEDRKKGKKFARYQLGDLLLHLEKKHGEDWGKVYDEAWERIDKKVEGLSKHIKLEEERRSEDAQSKAALTDWLRAKASFVIEGLKEADKDEFCRCELKLQKWYGDLRGKPFAIEAENSILDISGFSKQYNCAFIWQKDGVKKLNLYLIINYFKGGKLRFKKIKPEAFEANRFYTVINKKSGEIVPMEVNFNFDDPNLIILPLAFGKRQGREFIWNDLLSLETGSLKLANGRVIEKTLYNRRTRQDEPALFVALTFERREVLDSSNIKPMNLIGVDRGENIPAVIALTDPEGCPLSRFKDSLGNPTHILRIGESYKEKQRTIQAKKEVEQRRAGGYSRKYASKAKNLADDMVRNTARDLLYYAVTQDAMLIFENLSRGFGRQGKRTFMAERQYTRMEDWLTAKLAYEGLPSKTYLSKTLAQYTSKTCSNCGFTITSADYDRVLEKLKKTATGWMTTINGKELKVEGQITYYNRYKRQNVVKDLSVELDRLSEESVNNDISSWTKGRSGEALSLLKKRFSHRPVQEKFVCLNCGFETHADEQAALNIARSWLFLRSQEYKKYQTNKTTGNTDKRAFVETWQSFYRKKLKEVWKPAV

SEQ ID NO: 31199 - protein, 978 aa, synthetic construct
  REGION 1..978: note = engineered CasX variant
QEGKRINKIRRRLVKDSNTKKAGKTGPMKTLLVRVMTPDLRERLENLRKKPPNIPQPISNTSRANLNKLLTDYTEMKKAILHVYWEEFQKDPVGLMSRVAQPASKKIDQNKLKPEMDEKGNLTTAGFACSQCGQPLFVYKLEQVSEKGKAYTNYFGRCNVAEHEKLILLAQLKPEKDSDEAVTYSLGKFGQRALDFYSIHVTKESTHPVKPLAQIAGNRYASAPVGKALSDACMGTIASFLSKYQDIIIEHQKVVKGNQKRLESLRELAGKENLEYPSVTLPPQPHTKEGVDAYNEVIARVRMWVNLNLWQKLKLSRDDAKPLLRLKGFPSFPLVERQANEVDWWDMVCNVKKLINEKKEDGKVFWQNLAGYKRQEALRPYLSSEEDRKKGKKFARYQLGDLLLHLEKKHGEDWGKVYDEAWERIDKKVEGLSKHIKLEEERRSEDAQSKAALTDWLRAKASFVIEGLKEADKDEFCRCELKLQKWYGDLRGKPFAIEAENSILDISGFSKQYNCAFIWQKDGVKKLNLYLIINYFKGGKLRFKKIKPEAFEANRFYTVINKKSGEIVPMEVNFNFDDPNLIILPLAFGKRQGREFIWNDLLSLETGSLKLANGRVIEKTLYNRRTRQDEPALFVALTFERREVLDSSNIKPMNLIGVDRGENIPAVIALTDPEGCPLSRFKDSLGNPTHILRIGESYKEKQRTIQAKKEVEQRRAGGYSRKYASKAKNLADDMVRNTARDLLYYAVTQDAMLIFENLSRGFGRQGKRTFMAERQYTRMEDWLTAKLAYEGLPSKTYLSKTLAQYTSKTCSNCGFTITSADYDRVLEKLKKTATGWMTTINGKELKVEGQITYYNRYKRQNVVKDLSVELDRLSEESVNNDISSWTKGRSGEALSLLKKRFSHRPVQEKFVCLNCGFETHADEQAALNIARSWLFLRSQEYKKYQTNKTTGNTDKRAFVETWQSFYRKKLKEVWKPAV

SEQ ID NO: 31200 - protein, 978 aa, synthetic construct
  REGION 1..978: note = engineered CasX variant
QEGKRINKIRRRLVKDSNTKKAGKTGPMKTLLVRVMTPDLRERLENLRKKPPNIPQPISNTSRANLNKLLTDYTEMKKAILHVYWEEFQKDPVGLMSRVAQPASKKIDQNKLKPEMDEKGNLTTAGFACSQCGQPLFVYKLEQVSEKGKAYTNYFGRCNVAEHEKLILLAQLKPEKDSDEAVTYSLGKFGQRALDFYSIHVTKESTHPVKPLAQIAGNRYASVPVGKALSDACMGTIASFLSKYQDIIIEHQKVVKGNQKRLESLRELAGKENLEYPSVTLPPQPHTKEGVDAYNEVIARVRMWVNLNLWQKLKLSRDDAKPLLRLKGFPSFPLVERQANEVDWWDMVCNVKKLINEKKEDGKVFWQNLAGYKRQEALRPYLSSEEDRKKGKKFARYQLGDLLLHLEKKHGEDWGKVYDEAWERIDKKVEGLSKHIKLEEERRSEDAQSKAALTDWLRAKASFVIEGLKEADKDEFCRCELKLQKWYGDLRGKPFAIEAENSILDISGFSKQYNCAFIWQKDGVKKLNLYLIINYFKGGKLRFKKIKPEAFEANRFYTVINKKSGEIVPMEVNFNFDDPNLIILPLAFGKRQGREFIWNDLLSLETGSLKLANGRVIEKTLYNRRTRQDEPALFVALTFERREVLDSSNIKPMNLIGVDRGENIPAVIALTDPEGCPLSRFKDSLGNPTHILRIGESYKEKQRTIQAKKEVEQRRAGGYSRKYASKAKNLADDMVRNTARDLLYYAVTQDAMLIFENLSRGFGRQGKRTFMAERQYTRMEDWLTAKLAYEGLPSKTYLSKTLAQYTSKTCSNCGFTITSADYDRVLEKLKKTATGWMTTINGKELKVEGQITYYNRYKRQNVVKDLSVELDRLSEESVNNDISSWTKGRSGEALSLLKKRFSHRPVQEKFVCLNCGFETHADEQAALNIARSWLFLRSQEYKKYQTNKTTGNTDKRAFVETWQSFYRKKLKEVWKPAV

SEQ ID NO: 31201 - protein, 978 aa, synthetic construct
  REGION 1..978: note = engineered CasX variant
QEGKRINKIRRRLVKDSNTKKAGKTGPMKTLLVRVMTPDLRERLENLRKKPPNIPQPISNTSRANLNKLLTDYTEMKKAILHVYWEEFQKDPVGLMSRVAQPASKKIDQNKLKPEMDEKGNLTTAGFACSQCGQPLFVYKLEQVSEKGKAYTNYFGRCNVAEHEKLIKLAQLKPEKDSDEAVTYSLGKFGQRALDFYSIHVTKESTHPVKPLAQIAGNRYASGPVGKALSDACMGTIASFLSKYQDIIIEHQKVVKGNQKRLESLRELAGKENLEYPSVTLPPQPHTKEGVDAYNEVIARVRMWVNLNLWQKLKLSRDDAKPLLRLKGFPSFPLVERQANEVDWWDMVCNVKKLINEKKEDGKVFWQNLAGYKRQEALRPYLSSEEDRKKGKKFARYQLGDLLLHLEKKHGEDWGKVYDEAWERIDKKVEGLSKHIKLEEERRSEDAQSKAALTDWLRAKASFVIEGLKEADKDEFCRCELKLQKWYGDLRGKPFAIEAENSILDISGFSKQYNCAFIWQKDGVKKLNLYLIINYFKGGKLRFKKIKPEAFEANRFYTVINKKSGEIVPMEVNFNFDDPNLIILPLAFGKRQGREFIWNDLLSLETGSLKLANGRVIEKTLYNRRTRQDEPALFVALTFERREVLDSSNIKPMNLIGVDRGENIPAVIALTDPEGCPLSRFKDSLGNPTHILRIGESYKEKQRTIQAKKEVEQRRAGGYSRKYASKAKNLADDMVRNTARDLLYYAVTQDAMLIFENLSRGFGRQGKRTFMAERQYTRMEDWLTAKLAYEGLPSKTYLSKTLAQYTSKTCSNCGFTITSADYDRVLEKLKKTATGWMTTINGKELKVEGQITYYNRYKRQNVVKDLSVELDRLSEESVNNDISSWTKGRSGEALSLLKKRFSHRPVQEKFVCLNCGFETHADEQAALNIARSWLFLRSQEYKKYQTNKTTGNTDKRAFVETWQSFYRKKLKEVWKPAV

SEQ ID NO: 31202 - protein, 977 aa, synthetic construct
  REGION 1..977: note = engineered CasX variant
QEGKRINKIRRRLVKDSNTKKAGKTGPMKTLLVRVMTPDLRERLENLRKKPPNIPQPISNTSRANLNKLLTDYTEMKKAILHVYWEEFQKDPVGLMSRVAQPASKKIDQNKLKPEMDEKGNLTTAGFACSQCGQPLFVYKLEQVSEKGKAYTNYFGRCNVAEHEKLILLAQLKPEKDSDEAVTYSLGKFGQRALDFYSIHVTKESTHPVKPLAQIAGNRYASPVGKALSDACMGTIASFLSKYQDIIIEHQKVVKGNQKRLESLRELAGKENLEYPSVTLPPQPHTKEGVDAYNEVIARVRMWVNLNLWQKLKLSRDDAKPLLRLKGFPSFPLVERQANEVDWWDMVCNVKKLINEKKEDGKVFWQNLAGYKRQEALRPYLSSEEDRKKGKKFARYQLGDLLLHLEKKHGEDWGKVYDEAWERIDKKVEGLSKHIKLEEERRSEDAQSKAALTDWLRAKASFVIEGLKEADKDEFCRCELKLQKWYGDLRGKPFAIEAENSILDISGFSKQYNCAFIWQKDGVKKLNLYLIINYFKGGKLRFKKIKPEAFEANRFYTVINKKSGEIVPMEVNFNFDDPNLIILPLAFGKRQGREFIWNDLLSLETGSLKLANGRVIEKTLYNRRTRQDEPALFVALTFERREVLDSSNIKPMNLIGVDRGENIPAVIALTDPEGCPLSRFKDSLGNPTHILRIGESYKEKQRTIQAKKEVEQRRAGGYSRKYASKAKNLADDMVRNTARDLLYYAVTQDAMLIFENLSRGFGRQGKRTFMAERQYTRMEDWLTAKLAYEGLPSKTYLSKTLAQYTSKTCSNCGFTITSADYDRVLEKLKKTATGWMTTINGKELKVEGQITYYNRYKRQNVVKDLSVELDRLSEESVNNDISSWTKGRSGEALSLLKKRFSHRPVQEKFVCLNCGFETHADEQAALNIARSWLFLRSQEYKKYQTNKTTGNTDKRAFVETWQSFYRKKLKEVWKPAV

SEQ ID NO: 31203 - protein, 978 aa, synthetic construct
  REGION 1..978: note = engineered CasX variant
QEGKRINKIRRRLVKDSNTKKAGKTGPMKTLLVRVMTPDLRERLENLRKKPENIPQPISNTSQANLNKLLTDYTEMKKAILHVYWEEFQKDPVGLMSRVAQPASKKIDQNKLKPEMDEKGNLTTAGFACSQCGQPLFVYKLEQVSEKGKAYTNYFGRCNVAEHEKLILLAQLKPEKDSDEAVTYSLGKFGQRALDFYSIHVTKESTHPVKPLAQIAGNRYASYPVGKALSDACMGTIASFLSKYQDIIIEHQKVVKGNQKRLESLRELAGKENLEYPSVTLPPQPHTKEGVDAYNEVIARVRMWVNLNLWQKLKLSRDDAKPLLRLKGFPSFPLVERQANEVDWWDMVCNVKKLINEKKEDGKVFWQNLAGYKRQEALRPYLSSEEDRKKGKKFARYQLGDLLLHLEKKHGEDWGKVYDEAWERIDKKVEGLSKHIKLEEERRSEDAQSKAALTDWLRAKASFVIEGLKEADKDEFCRCELKLQKWYGDLRGKPFAIEAENSILDISGFSKQYNCAFIWQKDGVKKLNLYLIINYFKGGKLRFKKIKPEAFEANRFYTVINKKSGEIVPMEVNFNFDDPNLIILPLAFGKRQGREFIWNDLLSLETGSLKLANGRVIEKTLYNRRTRQDEPALFVALTFERREVLDSSNIKPMNLIGVDRGENIPAVIALTDPEGCPLSRFKDSLGNPTHILRIGESYKEKQRTIQAKKEVEQRRAGGYSRKYASKAKNLADDMVRNTARDLLYYAVTQDAMLIFENLSRGFGRQGKRTFMAERQYTRMEDWLTAKLAYEGLPSKTYLSKTLAQYTSKTCSNCGFTITSADYDRVLEKLKKTATGWMTTINGKELKVEGQITYYNRYKRQNVVKDLSVELDRLSEESVNNDISSWTKGRSGEALSLLKKRFSHRPVQEKFVCLNCGFETHADEQAALNIARSWLFLRSQEYKKYQTNKTTGNTDKRAFVETWQSFYRKKLKEVWKPAV

SEQ ID NO: 31204 - protein, 978 aa, synthetic construct
  REGION 1..978: note = engineered CasX variant
QEGKRINKIRRRLVKDSNTKKAGKTGPMKTLLVRVMTPDLRERLENLRKKPENIPQPISNTSQANLNKLLTDYTEMKKAILHVYWEEFQKDPVGLMSRVAQPASKKIDQNKLKPEMDEKGNLTTAGFACSQCGQPLFVYKLEQVSEKGKAYTNYFGRCNVAEHEKLILLAQLKPEKDSDEAVTYSLGKFGQRALDFYSIHVTKESTHPVKPLAQIAGNRYASHPVGKALSDACMGTIASFLSKYQDIIIEHQKVVKGNQKRLESLRELAGKENLEYPSVTLPPQPHTKEGVDAYNEVIARVRMWVNLNLWQKLKLSRDDAKPLLRLKGFPSFPLVERQANEVDWWDMVCNVKKLINEKKEDGKVFWQNLAGYKRQEALRPYLSSEEDRKKGKKFARYQLGDLLLHLEKKHGEDWGKVYDEAWERIDKKVEGLSKHIKLEEERRSEDAQSKAALTDWLRAKASFVIEGLKEADKDEFCRCELKLQKWYGDLRGKPFAIEAENSILDISGFSKQYNCAFIWQKDGVKKLNLYLIINYFKGGKLRFKKIKPEAFEANRFYTVINKKSGEIVPMEVNFNFDDPNLIILPLAFGKRQGREFIWNDLLSLETGSLKLANGRVIEKTLYNRRTRQDEPALFVALTFERREVLDSSNIKPMNLIGVDRGENIPAVIALTDPEGCPLSRFKDSLGNPTHILRIGESYKEKQRTIQAKKEVEQRRAGGYSRKYASKAKNLADDMVRNTARDLLYYAVTQDAMLIFENLSRGFGRQGKRTFMAERQYTRMEDWLTAKLAYEGLPSKTYLSKTLAQYTSKTCSNCGFTITSADYDRVLEKLKKTATGWMTTINGKELKVEGQITYYNRYKRQNVVKDLSVELDRLSEESVNNDISSWTKGRSGEALSLLKKRFSHRPVQEKFVCLNCGFETHADEQAALNIARSWLFLRSQEYKKYQTNKTTGNTDKRAFVETWQSFYRKKLKEVWKPAV

SEQ ID NO: 31205 - protein, 978 aa, synthetic construct
  REGION 1..978: note = engineered CasX variant
QEGKRINKIRRRLVKDSNTKKAGKTGPMKTLLVRVMTPDLRERLENLRKKPENIPQPISNTSQANLNKLLTDYTEMKKAILHVYWEEFQKDPVGLMSRVAQPASKKIDQNKLKPEMDEKGNLTTAGFACSQCGQPLFVYKLEQVSEKGKAYTNYFGRCNVAEHEKLILLAQLKPEKDSDEAVTYSLGKFGQRALDFYSIHVTKESTHPVKPLAQIAGNRYASSPVGKALSDACMGTIASFLSKYQDIIIEHQKVVKGNQKRLESLRELAGKENLEYPSVTLPPQPHTKEGVDAYNEVIARVRMWVNLNLWQKLKLSRDDAKPLLRLKGFPSFPLVERQANEVDWWDMVCNVKKLINEKKEDGKVFWQNLAGYKRQEALRPYLSSEEDRKKGKKFARYQLGDLLLHLEKKHGEDWGKVYDEAWERIDKKVEGLSKHIKLEEERRSEDAQSKAALTDWLRAKASFVIEGLKEADKDEFCRCELKLQKWYGDLRGKPFAIEAENSILDISGFSKQYNCAFIWQKDGVKKLNLYLIINYFKGGKLRFKKIKPEAFEANRFYTVINKKSGEIVPMEVNFNFDDPNLIILPLAFGKRQGREFIWNDLLSLETGSLKLANGRVIEKTLYNRRTRQDEPALFVALTFERREVLDSSNIKPMNLIGVDRGENIPAVIALTDPEGCPLSRFKDSLGNPTHILRIGESYKEKQRTIQAKKEVEQRRAGGYSRKYASKAKNLADDMVRNTARDLLYYAVTQDAMLIFENLSRGFGRQGKRTFMAERQYTRMEDWLTAKLAYEGLPSKTYLSKTLAQYTSKTCSNCGFTITSADYDRVLEKLKKTATGWMTTINGKELKVEGQITYYNRYKRQNVVKDLSVELDRLSEESVNNDISSWTKGRSGEALSLLKKRFSHRPVQEKFVCLNCGFETHADEQAALNIARSWLFLRSQEYKKYQTNKTTGNTDKRAFVETWQSFYRKKLKEVWKPAV

SEQ ID NO: 31206 - protein, 978 aa, synthetic construct
  REGION 1..978: note = engineered CasX variant
QEGKRINKIRRRLVKDSNTKKAGKTGPMKTLLVRVMTPDLRERLENLRKKPENIPQPISNTSQANLNKLLTDYTEMKKAILHVYWEEFQKDPVGLMSRVAQPASKKIDQNKLKPEMDEKGNLTTAGFACSQCGQPLFVYKLEQVSEKGKAYTNYFGRCNVAEHEKLILLAQLKPEKDSDEAVTYSLGKFGQRALDFYSIHVTKESTHPVKPLAQIAGNRYASTPVGKALSDACMGTIASFLSKYQDIIIEHQKVVKGNQKRLESLRELAGKENLEYPSVTLPPQPHTKEGVDAYNEVIARVRMWVNLNLWQKLKLSRDDAKPLLRLKGFPSFPLVERQANEVDWWDMVCNVKKLINEKKEDGKVFWQNLAGYKRQEALRPYLSSEEDRKKGKKFARYQLGDLLLHLEKKHGEDWGKVYDEAWERIDKKVEGLSKHIKLEEERRSEDAQSKAALTDWLRAKASFVIEGLKEADKDEFCRCELKLQKWYGDLRGKPFAIEAENSILDISGFSKQYNCAFIWQKDGVKKLNLYLIINYFKGGKLRFKKIKPEAFEANRFYTVINKKSGEIVPMEVNFNFDDPNLIILPLAFGKRQGREFIWNDLLSLETGSLKLANGRVIEKTLYNRRTRQDEPALFVALTFERREVLDSSNIKPMNLIGVDRGENIPAVIALTDPEGCPLSRFKDSLGNPTHILRIGESYKEKQRTIQAKKEVEQRRAGGYSRKYASKAKNLADDMVRNTARDLLYYAVTQDAMLIFENLSRGFGRQGKRTFMAERQYTRMEDWLTAKLAYEGLPSKTYLSKTLAQYTSKTCSNCGFTITSADYDRVLEKLKKTATGWMTTINGKELKVEGQITYYNRYKRQNVVKDLSVELDRLSEESVNNDISSWTKGRSGEALSLLKKRFSHRPVQEKFVCLNCGFETHADEQAALNIARSWLFLRSQEYKKYQTNKTTGNTDKRAFVETWQSFYRKKLKEVWKPAV

SEQ ID NO: 31207 - protein, 978 aa, synthetic construct
  REGION 1..978: note = engineered CasX variant
QEGKRINKIRRRLVKDSNTKKAGKTGPMKTLLVRVMTPDLRERLENLRKKPENIPQPISNTSQANLNKLLTDYTEMKKAILHVYWEEFQKDPVGLMSRVAQPASKKIDQNKLKPEMDEKGNLTTAGFACSQCGQPLFVYKLEQVSEKGKAYTNYFGRCNVAEHEKLILLAQLKPEKDSDEAVTYSLGKFGQRALDFYSIHVTKESTHPVKPLAQIAGNRYASAPVGKALSDACMGTIASFLSKYQDIIIEHQKVVKGNQKRLESLRELAGKENLEYPSVTLPPQPHTKEGVDAYNEVIARVRMWVNLNLWQKLKLSRDDAKPLLRLKGFPSFPLVERQANEVDWWDMVCNVKKLINEKKEDGKVFWQNLAGYKRQEALRPYLSSEEDRKKGKKFARYQLGDLLLHLEKKHGEDWGKVYDEAWERIDKKVEGLSKHIKLEEERRSEDAQSKAALTDWLRAKASFVIEGLKEADKDEFCRCELKLQKWYGDLRGKPFAIEAENSILDISGFSKQYNCAFIWQKDGVKKLNLYLIINYFKGGKLRFKKIKPEAFEANRFYTVINKKSGEIVPMEVNFNFDDPNLIILPLAFGKRQGREFIWNDLLSLETGSLKLANGRVIEKTLYNRRTRQDEPALFVALTFERREVLDSSNIKPMNLIGVDRGENIPAVIALTDPEGCPLSRFKDSLGNPTHILRIGESYKEKQRTIQAKKEVEQRRAGGYSRKYASKAKNLADDMVRNTARDLLYYAVTQDAMLIFENLSRGFGRQGKRTFMAERQYTRMEDWLTAKLAYEGLPSKTYLSKTLAQYTSKTCSNCGFTITSADYDRVLEKLKKTATGWMTTINGKELKVEGQITYYNRYKRQNVVKDLSVELDRLSEESVNNDISSWTKGRSGEALSLLKKRFSHRPVQEKFVCLNCGFETHADEQAALNIARSWLFLRSQEYKKYQTNKTTGNTDKRAFVETWQSFYRKKLKEVWKPAV

SEQ ID NO: 31208 - protein, 978 aa, synthetic construct
  REGION 1..978: note = engineered CasX variant
QEGKRINKIRRRLVKDSNTKKAGKTGPMKTLLVRVMTPDLRERLENLRKKPENIPQPISNTSQANLNKLLTDYTEMKKAILHVYWEEFQKDPVGLMSRVAQPASKKIDQNKLKPEMDEKGNLTTAGFACSQCGQPLFVYKLEQVSEKGKAYTNYFGRCNVAEHEKLILLAQLKPEKDSDEAVTYSLGKFGQRALDFYSIHVTKESTHPVKPLAQIAGNRYASVPVGKALSDACMGTIASFLSKYQDIIIEHQKVVKGNQKRLESLRELAGKENLEYPSVTLPPQPHTKEGVDAYNEVIARVRMWVNLNLWQKLKLSRDDAKPLLRLKGFPSFPLVERQANEVDWWDMVCNVKKLINEKKEDGKVFWQNLAGYKRQEALRPYLSSEEDRKKGKKFARYQLGDLLLHLEKKHGEDWGKVYDEAWERIDKKVEGLSKHIKLEEERRSEDAQSKAALTDWLRAKASFVIEGLKEADKDEFCRCELKLQKWYGDLRGKPFAIEAENSILDISGFSKQYNCAFIWQKDGVKKLNLYLIINYFKGGKLRFKKIKPEAFEANRFYTVINKKSGEIVPMEVNFNFDDPNLIILPLAFGKRQGREFIWNDLLSLETGSLKLANGRVIEKTLYNRRTRQDEPALFVALTFERREVLDSSNIKPMNLIGVDRGENIPAVIALTDPEGCPLSRFKDSLGNPTHILRIGESYKEKQRTIQAKKEVEQRRAGGYSRKYASKAKNLADDMVRNTARDLLYYAVTQDAMLIFENLSRGFGRQGKRTFMAERQYTRMEDWLTAKLAYEGLPSKTYLSKTLAQYTSKTCSNCGFTITSADYDRVLEKLKKTATGWMTTINGKELKVEGQITYYNRYKRQNVVKDLSVELDRLSEESVNNDISSWTKGRSGEALSLLKKRFSHRPVQEKFVCLNCGFETHADEQAALNIARSWLFLRSQEYKKYQTNKTTGNTDKRAFVETWQSFYRKKLKEVWKPAV

SEQ ID NO: 31209 - protein, 978 aa, synthetic construct
  REGION 1..978: note = engineered CasX variant
QEGKRINKIRRRLVKDSNTKKAGKTGPMKTLLVRVMTPDLRERLENLRKKPENIPQPISNTSQANLNKLLTDYTEMKKAILHVYWEEFQKDPVGLMSRVAQPASKKIDQNKLKPEMDEKGNLTTAGFACSQCGQPLFVYKLEQVSEKGKAYTNYFGRCNVAEHEKLIKLAQLKPEKDSDEAVTYSLGKFGQRALDFYSIHVTKESTHPVKPLAQIAGNRYASGPVGKALSDACMGTIASFLSKYQDIIIEHQKVVKGNQKRLESLRELAGKENLEYPSVTLPPQPHTKEGVDAYNEVIARVRMWVNLNLWQKLKLSRDDAKPLLRLKGFPSFPLVERQANEVDWWDMVCNVKKLINEKKEDGKVFWQNLAGYKRQEALRPYLSSEEDRKKGKKFARYQLGDLLLHLEKKHGEDWGKVYDEAWERIDKKVEGLSKHIKLEEERRSEDAQSKAALTDWLRAKASFVIEGLKEADKDEFCRCELKLQKWYGDLRGKPFAIEAENSILDISGFSKQYNCAFIWQKDGVKKLNLYLIINYFKGGKLRFKKIKPEAFEANRFYTVINKKSGEIVPMEVNFNFDDPNLIILPLAFGKRQGREFIWNDLLSLETGSLKLANGRVIEKTLYNRRTRQDEPALFVALTFERREVLDSSNIKPMNLIGVDRGENIPAVIALTDPEGCPLSRFKDSLGNPTHILRIGESYKEKQRTIQAKKEVEQRRAGGYSRKYASKAKNLADDMVRNTARDLLYYAVTQDAMLIFENLSRGFGRQGKRTFMAERQYTRMEDWLTAKLAYEGLPSKTYLSKTLAQYTSKTCSNCGFTITSADYDRVLEKLKKTATGWMTTINGKELKVEGQITYYNRYKRQNVVKDLSVELDRLSEESVNNDISSWTKGRSGEALSLLKKRFSHRPVQEKFVCLNCGFETHADEQAALNIARSWLFLRSQEYKKYQTNKTTGNTDKRAFVETWQSFYRKKLKEVWKPAV

SEQ ID NO: 31210 - protein, 977 aa, synthetic construct
  REGION 1..977: note = engineered CasX variant
QEGKRINKIRRRLVKDSNTKKAGKTGPMKTLLVRVMTPDLRERLENLRKKPENIPQPISNTSQANLNKLLTDYTEMKKAILHVYWEEFQKDPVGLMSRVAQPASKKIDQNKLKPEMDEKGNLTTAGFACSQCGQPLFVYKLEQVSEKGKAYTNYFGRCNVAEHEKLILLAQLKPEKDSDEAVTYSLGKFGQRALDFYSIHVTKESTHPVKPLAQIAGNRYASPVGKALSDACMGTIASFLSKYQDIIIEHQKVVKGNQKRLESLRELAGKENLEYPSVTLPPQPHTKEGVDAYNEVIARVRMWVNLNLWQKLKLSRDDAKPLLRLKGFPSFPLVERQANEVDWWDMVCNVKKLINEKKEDGKVFWQNLAGYKRQEALRPYLSSEEDRKKGKKFARYQLGDLLLHLEKKHGEDWGKVYDEAWERIDKKVEGLSKHIKLEEERRSEDAQSKAALTDWLRAKASFVIEGLKEADKDEFCRCELKLQKWYGDLRGKPFAIEAENSILDISGFSKQYNCAFIWQKDGVKKLNLYLIINYFKGGKLRFKKIKPEAFEANRFYTVINKKSGEIVPMEVNFNFDDPNLIILPLAFGKRQGREFIWNDLLSLETGSLKLANGRVIEKTLYNRRTRQDEPALFVALTFERREVLDSSNIKPMNLIGVDRGENIPAVIALTDPEGCPLSRFKDSLGNPTHILRIGESYKEKQRTIQAKKEVEQRRAGGYSRKYASKAKNLADDMVRNTARDLLYYAVTQDAMLIFENLSRGFGRQGKRTFMAERQYTRMEDWLTAKLAYEGLPSKTYLSKTLAQYTSKTCSNCGFTITSADYDRVLEKLKKTATGWMTTINGKELKVEGQITYYNRYKRQNVVKDLSVELDRLSEESVNNDISSWTKGRSGEALSLLKKRFSHRPVQEKFVCLNCGFETHADEQAALNIARSWLFLRSQEYKKYQTNKTTGNTDKRAFVETWQSFYRKKLKEVWKPAV

SEQ ID NO: 31211 - protein, 978 aa, synthetic construct
  REGION 1..978: note = engineered CasX variant
QEGKRINKIRRRLVKDSNTKKAGKTGPMKTLLVRVMTPDLRERLENLRKKPENIPQPISNTSRANLNKLLTDYTEMKKAILHVYDEEFQKDPVGLMSRVAQPASKKIDQNKLKPEMDEKGNLTTAGFACSQCGQPLFVYKLEQVSEKGKAYTNYFGRCNVAEHEKLILLAQLKPEKDSDEAVTYSLGKFGQRALDFYSIHVTKESTHPVKPLAQIAGNRYASYPVGKALSDACMGTIASFLSKYQDIIIEHQKVVKGNQKRLESLRELAGKENLEYPSVTLPPQPHTKEGVDAYNEVIARVRMWVNLNLWQKLKLSRDDAKPLLRLKGFPSFPLVERQANEVDWWDMVCNVKKLINEKKEDGKVFWQNLAGYKRQEALRPYLSSEEDRKKGKKFARYQLGDLLLHLEKKHGEDWGKVYDEAWERIDKKVEGLSKHIKLEEERRSEDAQSKAALTDWLRAKASFVIEGLKEADKDEFCRCELKLQKWYGDLRGKPFAIEAENSILDISGFSKQYNCAFIWQKDGVKKLNLYLIINYFKGGKLRFKKIKPEAFEANRFYTVINKKSGEIVPMEVNFNFDDPNLIILPLAFGKRQGREFIWNDLLSLETGSLKLANGRVIEKTLYNRRTRQDEPALFVALTFERREVLDSSNIKPMNLIGVDRGENIPAVIALTDPEGCPLSRFKDSLGNPTHILRIGESYKEKQRTIQAKKEVEQRRAGGYSRKYASKAKNLADDMVRNTARDLLYYAVTQDAMLIFENLSRGFGRQGKRTFMAERQYTRMEDWLTAKLAYEGLPSKTYLSKTLAQYTSKTCSNCGFTITSADYDRVLEKLKKTATGWMTTINGKELKVEGQITYYNRYKRQNVVKDLSVELDRLSEESVNNDISSWTKGRSGEALSLLKKRFSHRPVQEKFVCLNCGFETHADEQAALNIARSWLFLRSQEYKKYQTNKTTGNTDKRAFVETWQSFYRKKLKEVWKPAV

SEQ ID NO: 31212 - protein, 978 aa, synthetic construct
  REGION 1..978: note = engineered CasX variant
QEGKRINKIRRRLVKDSNTKKAGKTGPMKTLLVRVMTPDLRERLENLRKKPENIPQPISNTSRANLNKLLTDYTEMKKAILHVYDEEFQKDPVGLMSRVAQPASKKIDQNKLKPEMDEKGNLTTAGFACSQCGQPLFVYKLEQVSEKGKAYTNYFGRCNVAEHEKLILLAQLKPEKDSDEAVTYSLGKFGQRALDFYSIHVTKESTHPVKPLAQIAGNRYASHPVGKALSDACMGTIASFLSKYQDIIIEHQKVVKGNQKRLESLRELAGKENLEYPSVTLPPQPHTKEGVDAYNEVIARVRMWVNLNLWQKLKLSRDDAKPLLRLKGFPSFPLVERQANEVDWWDMVCNVKKLINEKKEDGKVFWQNLAGYKRQEALRPYLSSEEDRKKGKKFARYQLGDLLLHLEKKHGEDWGKVYDEAWERIDKKVEGLSKHIKLEEERRSEDAQSKAALTDWLRAKASFVIEGLKEADKDEFCRCELKLQKWYGDLRGKPFAIEAENSILDISGFSKQYNCAFIWQKDGVKKLNLYLIINYFKGGKLRFKKIKPEAFEANRFYTVINKKSGEIVPMEVNFNFDDPNLIILPLAFGKRQGREFIWNDLLSLETGSLKLANGRVIEKTLYNRRTRQDEPALFVALTFERREVLDSSNIKPMNLIGVDRGENIPAVIALTDPEGCPLSRFKDSLGNPTHILRIGESYKEKQRTIQAKKEVEQRRAGGYSRKYASKAKNLADDMVRNTARDLLYYAVTQDAMLIFENLSRGFGRQGKRTFMAERQYTRMEDWLTAKLAYEGLPSKTYLSKTLAQYTSKTCSNCGFTITSADYDRVLEKLKKTATGWMTTINGKELKVEGQITYYNRYKRQNVVKDLSVELDRLSEESVNNDISSWTKGRSGEALSLLKKRFSHRPVQEKFVCLNCGFETHADEQAALNIARSWLFLRSQEYKKYQTNKTTGNTDKRAFVETWQSFYRKKLKEVWKPAV

SEQ ID NO: 31213 - protein, 978 aa, synthetic construct
  REGION 1..978: note = engineered CasX variant
QEGKRINKIRRRLVKDSNTKKAGKTGPMKTLLVRVMTPDLRERLENLRKKPENIPQPISNTSRANLNKLLTDYTEMKKAILHVYDEEFQKDPVGLMSRVAQPASKKIDQNKLKPEMDEKGNLTTAGFACSQCGQPLFVYKLEQVSEKGKAYTNYFGRCNVAEHEKLILLAQLKPEKDSDEAVTYSLGKFGQRALDFYSIHVTKESTHPVKPLAQIAGNRYASSPVGKALSDACMGTIASFLSKYQDIIIEHQKVVKGNQKRLESLRELAGKENLEYPSVTLPPQPHTKEGVDAYNEVIARVRMWVNLNLWQKLKLSRDDAKPLLRLKGFPSFPLVERQANEVDWWDMVCNVKKLINEKKEDGKVFWQNLAGYKRQEALRPYLSSEEDRKKGKKFARYQLGDLLLHLEKKHGEDWGKVYDEAWERIDKKVEGLSKHIKLEEERRSEDAQSKAALTDWLRAKASFVIEGLKEADKDEFCRCELKLQKWYGDLRGKPFAIEAENSILDISGFSKQYNCAFIWQKDGVKKLNLYLIINYFKGGKLRFKKIKPEAFEANRFYTVINKKSGEIVPMEVNFNFDDPNLIILPLAFGKRQGREFIWNDLLSLETGSLKLANGRVIEKTLYNRRTRQDEPALFVALTFERREVLDSSNIKPMNLIGVDRGENIPAVIALTDPEGCPLSRFKDSLGNPTHILRIGESYKEKQRTIQAKKEVEQRRAGGYSRKYASKAKNLADDMVRNTARDLLYYAVTQDAMLIFENLSRGFGRQGKRTFMAERQYTRMEDWLTAKLAYEGLPSKTYLSKTLAQYTSKTCSNCGFTITSADYDRVLEKLKKTATGWMTTINGKELKVEGQITYYNRYKRQNVVKDLSVELDRLSEESVNNDISSWTKGRSGEALSLLKKRFSHRPVQEKFVCLNCGFETHADEQAALNIARSWLFLRSQEYKKYQTNKTTGNTDKRAFVETWQSFYRKKLKEVWKPAV

SEQ ID NO: 31214 - protein, 978 aa, synthetic construct
  REGION 1..978: note = engineered CasX variant
QEGKRINKIRRRLVKDSNTKKAGKTGPMKTLLVRVMTPDLRERLENLRKKPENIPQPISNTSRANLNKLLTDYTEMKKAILHVYDEEFQKDPVGLMSRVAQPASKKIDQNKLKPEMDEKGNLTTAGFACSQCGQPLFVYKLEQVSEKGKAYTNYFGRCNVAEHEKLILLAQLKPEKDSDEAVTYSLGKFGQRALDFYSIHVTKESTHPVKPLAQIAGNRYASTPVGKALSDACMGTIASFLSKYQDIIIEHQKVVKGNQKRLESLRELAGKENLEYPSVTLPPQPHTKEGVDAYNEVIARVRMWVNLNLWQKLKLSRDDAKPLLRLKGFPSFPLVERQANEVDWWDMVCNVKKLINEKKEDGKVFWQNLAGYKRQEALRPYLSSEEDRKKGKKFARYQLGDLLLHLEKKHGEDWGKVYDEAWERIDKKVEGLSKHIKLEEERRSEDAQSKAALTDWLRAKASFVIEGLKEADKDEFCRCELKLQKWYGDLRGKPFAIEAENSILDISGFSKQYNCAFIWQKDGVKKLNLYLIINYFKGGKLRFKKIKPEAFEANRFYTVINKKSGEIVPMEVNFNFDDPNLIILPLAFGKRQGREFIWNDLLSLETGSLKLANGRVIEKTLYNRRTRQDEPALFVALTFERREVLDSSNIKPMNLIGVDRGENIPAVIALTDPEGCPLSRFKDSLGNPTHILRIGESYKEKQRTIQAKKEVEQRRAGGYSRKYASKAKNLADDMVRNTARDLLYYAVTQDAMLIFENLSRGFGRQGKRTFMAERQYTRMEDWLTAKLAYEGLPSKTYLSKTLAQYTSKTCSNCGFTITSADYDRVLEKLKKTATGWMTTINGKELKVEGQITYYNRYKRQNVVKDLSVELDRLSEESVNNDISSWTKGRSGEALSLLKKRFSHRPVQEKFVCLNCGFETHADEQAALNIARSWLFLRSQEYKKYQTNKTTGNTDKRAFVETWQSFYRKKLKEVWKPAV

SEQ ID NO: 31215 - protein, 978 aa, synthetic construct
  REGION 1..978: note = engineered CasX variant
QEGKRINKIRRRLVKDSNTKKAGKTGPMKTLLVRVMTPDLRERLENLRKKPENIPQPISNTSRANLNKLLTDYTEMKKAILHVYDEEFQKDPVGLMSRVAQPASKKIDQNKLKPEMDEKGNLTTAGFACSQCGQPLFVYKLEQVSEKGKAYTNYFGRCNVAEHEKLILLAQLKPEKDSDEAVTYSLGKFGQRALDFYSIHVTKESTHPVKPLAQIAGNRYASAPVGKALSDACMGTIASFLSKYQDIIIEHQKVVKGNQKRLESLRELAGKENLEYPSVTLPPQPHTKEGVDAYNEVIARVRMWVNLNLWQKLKLSRDDAKPLLRLKGFPSFPLVERQANEVDWWDMVCNVKKLINEKKEDGKVFWQNLAGYKRQEALRPYLSSEEDRKKGKKFARYQLGDLLLHLEKKHGEDWGKVYDEAWERIDKKVEGLSKHIKLEEERRSEDAQSKAALTDWLRAKASFVIEGLKEADKDEFCRCELKLQKWYGDLRGKPFAIEAENSILDISGFSKQYNCAFIWQKDGVKKLNLYLIINYFKGGKLRFKKIKPEAFEANRFYTVINKKSGEIVPMEVNFNFDDPNLIILPLAFGKRQGREFIWNDLLSLETGSLKLANGRVIEKTLYNRRTRQDEPALFVALTFERREVLDSSNIKPMNLIGVDRGENIPAVIALTDPEGCPLSRFKDSLGNPTHILRIGESYKEKQRTIQAKKEVEQRRAGGYSRKYASKAKNLADDMVRNTARDLLYYAVTQDAMLIFENLSRGFGRQGKRTFMAERQYTRMEDWLTAKLAYEGLPSKTYLSKTLAQYTSKTCSNCGFTITSADYDRVLEKLKKTATGWMTTINGKELKVEGQITYYNRYKRQNVVKDLSVELDRLSEESVNNDISSWTKGRSGEALSLLKKRFSHRPVQEKFVCLNCGFETHADEQAALNIARSWLFLRSQEYKKYQTNKTTGNTDKRAFVETWQSFYRKKLKEVWKPAV

SEQ ID NO: 31216 - protein, 978 aa, synthetic construct
  REGION 1..978: note = engineered CasX variant
QEGKRINKIRRRLVKDSNTKKAGKTGPMKTLLVRVMTPDLRERLENLRKKPENIPQPISNTSRANLNKLLTDYTEMKKAILHVYDEEFQKDPVGLMSRVAQPASKKIDQNKLKPEMDEKGNLTTAGFACSQCGQPLFVYKLEQVSEKGKAYTNYFGRCNVAEHEKLILLAQLKPEKDSDEAVTYSLGKFGQRALDFYSIHVTKESTHPVKPLAQIAGNRYASVPVGKALSDACMGTIASFLSKYQDIIIEHQKVVKGNQKRLESLRELAGKENLEYPSVTLPPQPHTKEGVDAYNEVIARVRMWVNLNLWQKLKLSRDDAKPLLRLKGFPSFPLVERQANEVDWWDMVCNVKKLINEKKEDGKVFWQNLAGYKRQEALRPYLSSEEDRKKGKKFARYQLGDLLLHLEKKHGEDWGKVYDEAWERIDKKVEGLSKHIKLEEERRSEDAQSKAALTDWLRAKASFVIEGLKEADKDEFCRCELKLQKWYGDLRGKPFAIEAENSILDISGFSKQYNCAFIWQKDGVKKLNLYLIINYFKGGKLRFKKIKPEAFEANRFYTVINKKSGEIVPMEVNFNFDDPNLIILPLAFGKRQGREFIWNDLLSLETGSLKLANGRVIEKTLYNRRTRQDEPALFVALTFERREVLDSSNIKPMNLIGVDRGENIPAVIALTDPEGCPLSRFKDSLGNPTHILRIGESYKEKQRTIQAKKEVEQRRAGGYSRKYASKAKNLADDMVRNTARDLLYYAVTQDAMLIFENLSRGFGRQGKRTFMAERQYTRMEDWLTAKLAYEGLPSKTYLSKTLAQYTSKTCSNCGFTITSADYDRVLEKLKKTATGWMTTINGKELKVEGQITYYNRYKRQNVVKDLSVELDRLSEESVNNDISSWTKGRSGEALSLLKKRFSHRPVQEKFVCLNCGFETHADEQAALNIARSWLFLRSQEYKKYQTNKTTGNTDKRAFVETWQSFYRKKLKEVWKPAV

SEQ ID NO: 31217 - protein, 978 aa, synthetic construct
  REGION 1..978: note = engineered CasX variant
QEGKRINKIRRRLVKDSNTKKAGKTGPMKTLLVRVMTPDLRERLENLRKKPENIPQPISNTSRANLNKLLTDYTEMKKAILHVYDEEFQKDPVGLMSRVAQPASKKIDQNKLKPEMDEKGNLTTAGFACSQCGQPLFVYKLEQVSEKGKAYTNYFGRCNVAEHEKLIKLAQLKPEKDSDEAVTYSLGKFGQRALDFYSIHVTKESTHPVKPLAQIAGNRYASGPVGKALSDACMGTIASFLSKYQDIIIEHQKVVKGNQKRLESLRELAGKENLEYPSVTLPPQPHTKEGVDAYNEVIARVRMWVNLNLWQKLKLSRDDAKPLLRLKGFPSFPLVERQANEVDWWDMVCNVKKLINEKKEDGKVFWQNLAGYKRQEALRPYLSSEEDRKKGKKFARYQLGDLLLHLEKKHGEDWGKVYDEAWERIDKKVEGLSKHIKLEEERRSEDAQSKAALTDWLRAKASFVIEGLKEADKDEFCRCELKLQKWYGDLRGKPFAIEAENSILDISGFSKQYNCAFIWQKDGVKKLNLYLIINYFKGGKLRFKKIKPEAFEANRFYTVINKKSGEIVPMEVNFNFDDPNLIILPLAFGKRQGREFIWNDLLSLETGSLKLANGRVIEKTLYNRRTRQDEPALFVALTFERREVLDSSNIKPMNLIGVDRGENIPAVIALTDPEGCPLSRFKDSLGNPTHILRIGESYKEKQRTIQAKKEVEQRRAGGYSRKYASKAKNLADDMVRNTARDLLYYAVTQDAMLIFENLSRGFGRQGKRTFMAERQYTRMEDWLTAKLAYEGLPSKTYLSKTLAQYTSKTCSNCGFTITSADYDRVLEKLKKTATGWMTTINGKELKVEGQITYYNRYKRQNVVKDLSVELDRLSEESVNNDISSWTKGRSGEALSLLKKRFSHRPVQEKFVCLNCGFETHADEQAALNIARSWLFLRSQEYKKYQTNKTTGNTDKRAFVETWQSFYRKKLKEVWKPAV

SEQ ID NO: 31218 - protein, 977 aa, synthetic construct
  REGION 1..977: note = engineered CasX variant
QEGKRINKIRRRLVKDSNTKKAGKTGPMKTLLVRVMTPDLRERLENLRKKPENIPQPISNTSRANLNKLLTDYTEMKKAILHVYDEEFQKDPVGLMSRVAQPASKKIDQNKLKPEMDEKGNLTTAGFACSQCGQPLFVYKLEQVSEKGKAYTNYFGRCNVAEHEKLILLAQLKPEKDSDEAVTYSLGKFGQRALDFYSIHVTKESTHPVKPLAQIAGNRYASPVGKALSDACMGTIASFLSKYQDIIIEHQKVVKGNQKRLESLRELAGKENLEYPSVTLPPQPHTKEGVDAYNEVIARVRMWVNLNLWQKLKLSRDDAKPLLRLKGFPSFPLVERQANEVDWWDMVCNVKKLINEKKEDGKVFWQNLAGYKRQEALRPYLSSEEDRKKGKKFARYQLGDLLLHLEKKHGEDWGKVYDEAWERIDKKVEGLSKHIKLEEERRSEDAQSKAALTDWLRAKASFVIEGLKEADKDEFCRCELKLQKWYGDLRGKPFAIEAENSILDISGFSKQYNCAFIWQKDGVKKLNLYLIINYFKGGKLRFKKIKPEAFEANRFYTVINKKSGEIVPMEVNFNFDDPNLIILPLAFGKRQGREFIWNDLLSLETGSLKLANGRVIEKTLYNRRTRQDEPALFVALTFERREVLDSSNIKPMNLIGVDRGENIPAVIALTDPEGCPLSRFKDSLGNPTHILRIGESYKEKQRTIQAKKEVEQRRAGGYSRKYASKAKNLADDMVRNTARDLLYYAVTQDAMLIFENLSRGFGRQGKRTFMAERQYTRMEDWLTAKLAYEGLPSKTYLSKTLAQYTSKTCSNCGFTITSADYDRVLEKLKKTATGWMTTINGKELKVEGQITYYNRYKRQNVVKDLSVELDRLSEESVNNDISSWTKGRSGEALSLLKKRFSHRPVQEKFVCLNCGFETHADEQAALNIARSWLFLRSQEYKKYQTNKTTGNTDKRAFVETWQSFYRKKLKEVWKPAV

SEQ ID NO: 31219 - protein, 978 aa, synthetic construct
  REGION 1..978: note = engineered CasX variant
QEGKRINKIRRRLVKDSNTKKAGKTGPMKTLLVRVMTPDLRERLENLRKKPENIPQPISNTSRANLNKLLTDYTEMKKAILHVYWEEFQKDPVGLMSRVAQPASKKIDQNKLKPEMDEKGNLTTAGFACSQCGQPLFVYKLEQVSEKGKAYTNYFGRCNVAEHEKLIKLAQLKPEKDSDEAVTYSLGKFGQRALDFYSIHVTKESTHPVKPLAQIAGNRYASYPVGKALSDACMGTIASFLSKYQDIIIEHQKVVKGNQKRLESLRELAGKENLEYPSVTLPPQPHTKEGVDAYNEVIARVRMWVNLNLWQKLKLSRDDAKPLLRLKGFPSFPLVERQANEVDWWDMVCNVKKLINEKKEDGKVFWQNLAGYKRQEALRPYLSSEEDRKKGKKFARYQLGDLLLHLEKKHGEDWGKVYDEAWERIDKKVEGLSKHIKLEEERRSEDAQSKAALTDWLRAKASFVIEGLKEADKDEFCRCELKLQKWYGDLRGKPFAIEAENSILDISGFSKQYNCAFIWQKDGVKKLNLYLIINYFKGGKLRFKKIKPEAFEANRFYTVINKKSGEIVPMEVNFNFDDPNLIILPLAFGKRQGREFIWNDLLSLETGSLKLANGRVIEKTLYNRRTRQDEPALFVALTFERREVLDSSNIKPMNLIGVDRGENIPAVIALTDPEGCPLSRFKDSLGNPTHILRIGESYKEKQRTIQAKKEVEQRRAGGYSRKYASKAKNLADDMVRNTARDLLYYAVTQDAMLIFENLSRGFGRQGKRTFMAERQYTRMEDWLTAKLAYEGLPSKTYLSKTLAQYTSKTCSNCGFTITSADYDRVLEKLKKTATGWMTTINGKELKVEGQITYYNRYKRQNVVKDLSVELDRLSEESVNNDISSWTKGRSGEALSLLKKRFSHRPVQEKFVCLNCGFETHADEQAALNIARSWLFLRSQEYKKYQTNKTTGNTDKRAFVETWQSFYRKKLKEVWKPAV

SEQ ID NO: 31220 - protein, 978 aa, synthetic construct
  REGION 1..978: note = engineered CasX variant
QEGKRINKIRRRLVKDSNTKKAGKTGPMKTLLVRVMTPDLRERLENLRKKPENIPQPISNTSRANLNKLLTDYTEMKKAILHVYWEEFQKDPVGLMSRVAQPASKKIDQNKLKPEMDEKGNLTTAGFACSQCGQPLFVYKLEQVSEKGKAYTNYFGRCNVAEHEKLIKLAQLKPEKDSDEAVTYSLGKFGQRALDFYSIHVTKESTHPVKPLAQIAGNRYASHPVGKALSDACMGTIASFLSKYQDIIIEHQKVVKGNQKRLESLRELAGKENLEYPSVTLPPQPHTKEGVDAYNEVIARVRMWVNLNLWQKLKLSRDDAKPLLRLKGFPSFPLVERQANEVDWWDMVCNVKKLINEKKEDGKVFWQNLAGYKRQEALRPYLSSEEDRKKGKKFARYQLGDLLLHLEKKHGEDWGKVYDEAWERIDKKVEGLSKHIKLEEERRSEDAQSKAALTDWLRAKASFVIEGLKEADKDEFCRCELKLQKWYGDLRGKPFAIEAENSILDISGFSKQYNCAFIWQKDGVKKLNLYLIINYFKGGKLRFKKIKPEAFEANRFYTVINKKSGEIVPMEVNFNFDDPNLIILPLAFGKRQGREFIWNDLLSLETGSLKLANGRVIEKTLYNRRTRQDEPALFVALTFERREVLDSSNIKPMNLIGVDRGENIPAVIALTDPEGCPLSRFKDSLGNPTHILRIGESYKEKQRTIQAKKEVEQRRAGGYSRKYASKAKNLADDMVRNTARDLLYYAVTQDAMLIFENLSRGFGRQGKRTFMAERQYTRMEDWLTAKLAYEGLPSKTYLSKTLAQYTSKTCSNCGFTITSADYDRVLEKLKKTATGWMTTINGKELKVEGQITYYNRYKRQNVVKDLSVELDRLSEESVNNDISSWTKGRSGEALSLLKKRFSHRPVQEKFVCLNCGFETHADEQAALNIARSWLFLRSQEYKKYQTNKTTGNTDKRAFVETWQSFYRKKLKEVWKPAV

SEQ ID NO: 31221 - protein, 978 aa, synthetic construct
  REGION 1..978: note = engineered CasX variant
QEGKRINKIRRRLVKDSNTKKAGKTGPMKTLLVRVMTPDLRERLENLRKKPENIPQPISNTSRANLNKLLTDYTEMKKAILHVYWEEFQKDPVGLMSRVAQPASKKIDQNKLKPEMDEKGNLTTAGFACSQCGQPLFVYKLEQVSEKGKAYTNYFGRCNVAEHEKLIKLAQLKPEKDSDEAVTYSLGKFGQRALDFYSIHVTKESTHPVKPLAQIAGNRYASTPVGKALSDACMGTIASFLSKYQDIIIEHQKVVKGNQKRLESLRELAGKENLEYPSVTLPPQPHTKEGVDAYNEVIARVRMWVNLNLWQKLKLSRDDAKPLLRLKGFPSFPLVERQANEVDWWDMVCNVKKLINEKKEDGKVFWQNLAGYKRQEALRPYLSSEEDRKKGKKFARYQLGDLLLHLEKKHGEDWGKVYDEAWERIDKKVEGLSKHIKLEEERRSEDAQSKAALTDWLRAKASFVIEGLKEADKDEFCRCELKLQKWYGDLRGKPFAIEAENSILDISGFSKQYNCAFIWQKDGVKKLNLYLIINYFKGGKLRFKKIKPEAFEANRFYTVINKKSGEIVPMEVNFNFDDPNLIILPLAFGKRQGREFIWNDLLSLETGSLKLANGRVIEKTLYNRRTRQDEPALFVALTFERREVLDSSNIKPMNLIGVDRGENIPAVIALTDPEGCPLSRFKDSLGNPTHILRIGESYKEKQRTIQAKKEVEQRRAGGYSRKYASKAKNLADDMVRNTARDLLYYAVTQDAMLIFENLSRGFGRQGKRTFMAERQYTRMEDWLTAKLAYEGLPSKTYLSKTLAQYTSKTCSNCGFTITSADYDRVLEKLKKTATGWMTTINGKELKVEGQITYYNRYKRQNVVKDLSVELDRLSEESVNNDISSWTKGRSGEALSLLKKRFSHRPVQEKFVCLNCGFETHADEQAALNIARSWLFLRSQEYKKYQTNKTTGNTDKRAFVETWQSFYRKKLKEVWKPAV

SEQ ID NO: 31222 - protein, 978 aa, synthetic construct
  REGION 1..978: note = engineered CasX variant
QEGKRINKIRRRLVKDSNTKKAGKTGPMKTLLVRVMTPDLRERLENLRKKPENIPQPISNTSRANLNKLLTDYTEMKKAILHVYWEEFQKDPVGLMSRVAQPASKKIDQNKLKPEMDEKGNLTTAGFACSQCGQPLFVYKLEQVSEKGKAYTNYFGRCNVAEHEKLIKLAQLKPEKDSDEAVTYSLGKFGQRALDFYSIHVTKESTHPVKPLAQIAGNRYASAPVGKALSDACMGTIASFLSKYQDIIIEHQKVVKGNQKRLESLRELAGKENLEYPSVTLPPQPHTKEGVDAYNEVIARVRMWVNLNLWQKLKLSRDDAKPLLRLKGFPSFPLVERQANEVDWWDMVCNVKKLINEKKEDGKVFWQNLAGYKRQEALRPYLSSEEDRKKGKKFARYQLGDLLLHLEKKHGEDWGKVYDEAWERIDKKVEGLSKHIKLEEERRSEDAQSKAALTDWLRAKASFVIEGLKEADKDEFCRCELKLQKWYGDLRGKPFAIEAENSILDISGFSKQYNCAFIWQKDGVKKLNLYLIINYFKGGKLRFKKIKPEAFEANRFYTVINKKSGEIVPMEVNFNFDDPNLIILPLAFGKRQGREFIWNDLLSLETGSLKLANGRVIEKTLYNRRTRQDEPALFVALTFERREVLDSSNIKPMNLIGVDRGENIPAVIALTDPEGCPLSRFKDSLGNPTHILRIGESYKEKQRTIQAKKEVEQRRAGGYSRKYASKAKNLADDMVRNTARDLLYYAVTQDAMLIFENLSRGFGRQGKRTFMAERQYTRMEDWLTAKLAYEGLPSKTYLSKTLAQYTSKTCSNCGFTITSADYDRVLEKLKKTATGWMTTINGKELKVEGQITYYNRYKRQNVVKDLSVELDRLSEESVNNDISSWTKGRSGEALSLLKKRFSHRPVQEKFVCLNCGFETHADEQAALNIARSWLFLRSQEYKKYQTNKTTGNTDKRAFVETWQSFYRKKLKEVWKPAV

SEQ ID NO: 31223 - protein, 978 aa, synthetic construct
  REGION 1..978: note = engineered CasX variant
QEGKRINKIRRRLVKDSNTKKAGKTGPMKTLLVRVMTPDLRERLENLRKKPENIPQPISNTSRANLNKLLTDYTEMKKAILHVYWEEFQKDPVGLMSRVAQPASKKIDQNKLKPEMDEKGNLTTAGFACSQCGQPLFVYKLEQVSEKGKAYTNYFGRCNVAEHEKLIKLAQLKPEKDSDEAVTYSLGKFGQRALDFYSIHVTKESTHPVKPLAQIAGNRYASVPVGKALSDACMGTIASFLSKYQDIIIEHQKVVKGNQKRLESLRELAGKENLEYPSVTLPPQPHTKEGVDAYNEVIARVRMWVNLNLWQKLKLSRDDAKPLLRLKGFPSFPLVERQANEVDWWDMVCNVKKLINEKKEDGKVFWQNLAGYKRQEALRPYLSSEEDRKKGKKFARYQLGDLLLHLEKKHGEDWGKVYDEAWERIDKKVEGLSKHIKLEEERRSEDAQSKAALTDWLRAKASFVIEGLKEADKDEFCRCELKLQKWYGDLRGKPFAIEAENSILDISGFSKQYNCAFIWQKDGVKKLNLYLIINYFKGGKLRFKKIKPEAFEANRFYTVINKKSGEIVPMEVNFNFDDPNLIILPLAFGKRQGREFIWNDLLSLETGSLKLANGRVIEKTLYNRRTRQDEPALFVALTFERREVLDSSNIKPMNLIGVDRGENIPAVIALTDPEGCPLSRFKDSLGNPTHILRIGESYKEKQRTIQAKKEVEQRRAGGYSRKYASKAKNLADDMVRNTARDLLYYAVTQDAMLIFENLSRGFGRQGKRTFMAERQYTRMEDWLTAKLAYEGLPSKTYLSKTLAQYTSKTCSNCGFTITSADYDRVLEKLKKTATGWMTTINGKELKVEGQITYYNRYKRQNVVKDLSVELDRLSEESVNNDISSWTKGRSGEALSLLKKRFSHRPVQEKFVCLNCGFETHADEQAALNIARSWLFLRSQEYKKYQTNKTTGNTDKRAFVETWQSFYRKKLKEVWKPAV

SEQ ID NO: 31224 - protein, 979 aa, synthetic construct
  REGION 1..979: note = engineered CasX variant
QEGKRINKIRRRLVKDSNTKKAGKTGPMKTLLVRVMTPDLRERLENLRKKPENIPQPISNTSRANLNKLLTDYTEMKKAILHVYWEEFQKDPVGLMSRVAQPASKKIDQNKLKPEMDEKGNLTTAGFACSQCGQPLFVYKLEQVSEKGKAYTNYFGRCNVAEHEKLIKKLAQLKPEKDSDEAVTYSLGKFGQRALDFYSIHVTKESTHPVKPLAQIAGNRYASGPVGKALSDACMGTIASFLSKYQDIIIEHQKVVKGNQKRLESLRELAGKENLEYPSVTLPPQPHTKEGVDAYNEVIARVRMWVNLNLWQKLKLSRDDAKPLLRLKGFPSFPLVERQANEVDWWDMVCNVKKLINEKKEDGKVFWQNLAGYKRQEALRPYLSSEEDRKKGKKFARYQLGDLLLHLEKKHGEDWGKVYDEAWERIDKKVEGLSKHIKLEEERRSEDAQSKAALTDWLRAKASFVIEGLKEADKDEFCRCELKLQKWYGDLRGKPFAIEAENSILDISGFSKQYNCAFIWQKDGVKKLNLYLIINYFKGGKLRFKKIKPEAFEANRFYTVINKKSGEIVPMEVNFNFDDPNLIILPLAFGKRQGREFIWNDLLSLETGSLKLANGRVIEKTLYNRRTRQDEPALFVALTFERREVLDSSNIKPMNLIGVDRGENIPAVIALTDPEGCPLSRFKDSLGNPTHILRIGESYKEKQRTIQAKKEVEQRRAGGYSRKYASKAKNLADDMVRNTARDLLYYAVTQDAMLIFENLSRGFGRQGKRTFMAERQYTRMEDWLTAKLAYEGLPSKTYLSKTLAQYTSKTCSNCGFTITSADYDRVLEKLKKTATGWMTTINGKELKVEGQITYYNRYKRQNVVKDLSVELDRLSEESVNNDISSWTKGRSGEALSLLKKRFSHRPVQEKFVCLNCGFETHADEQAALNIARSWLFLRSQEYKKYQTNKTTGNTDKRAFVETWQSFYRKKLKEVWKPAV

SEQ ID NO: 31225 - protein, 977 aa, synthetic construct
  REGION 1..977: note = engineered CasX variant
QEGKRINKIRRRLVKDSNTKKAGKTGPMKTLLVRVMTPDLRERLENLRKKPENIPQPISNTSRANLNKLLTDYTEMKKAILHVYWEEFQKDPVGLMSRVAQPASKKIDQNKLKPEMDEKGNLTTAGFACSQCGQPLFVYKLEQVSEKGKAYTNYFGRCNVAEHEKLIKLAQLKPEKDSDEAVTYSLGKFGQRALDFYSIHVTKESTHPVKPLAQIAGNRYASPVGKALSDACMGTIASFLSKYQDIIIEHQKVVKGNQKRLESLRELAGKENLEYPSVTLPPQPHTKEGVDAYNEVIARVRMWVNLNLWQKLKLSRDDAKPLLRLKGFPSFPLVERQANEVDWWDMVCNVKKLINEKKEDGKVFWQNLAGYKRQEALRPYLSSEEDRKKGKKFARYQLGDLLLHLEKKHGEDWGKVYDEAWERIDKKVEGLSKHIKLEEERRSEDAQSKAALTDWLRAKASFVIEGLKEADKDEFCRCELKLQKWYGDLRGKPFAIEAENSILDISGFSKQYNCAFIWQKDGVKKLNLYLIINYFKGGKLRFKKIKPEAFEANRFYTVINKKSGEIVPMEVNFNFDDPNLIILPLAFGKRQGREFIWNDLLSLETGSLKLANGRVIEKTLYNRRTRQDEPALFVALTFERREVLDSSNIKPMNLIGVDRGENIPAVIALTDPEGCPLSRFKDSLGNPTHILRIGESYKEKQRTIQAKKEVEQRRAGGYSRKYASKAKNLADDMVRNTARDLLYYAVTQDAMLIFENLSRGFGRQGKRTFMAERQYTRMEDWLTAKLAYEGLPSKTYLSKTLAQYTSKTCSNCGFTITSADYDRVLEKLKKTATGWMTTINGKELKVEGQITYYNRYKRQNVVKDLSVELDRLSEESVNNDISSWTKGRSGEALSLLKKRFSHRPVQEKFVCLNCGFETHADEQAALNIARSWLFLRSQEYKKYQTNKTTGNTDKRAFVETWQSFYRKKLKEVWKPAV

SEQ ID NO: 31226 - protein, 978 aa, synthetic construct
  REGION 1..978: note = engineered CasX variant
QEGKRINKIRRRLVKDSNTKKAGKTGPMKTLLVRVMTPDLRERLENLRKKPENIPQPISNTSRANLNKLLTDYTEMKKAILHVYWEEFQKDPVGLMSRVAQPASKKIDQNKLKPEMDEKGNLTTAGFACSQCGQPLFVYKLEQVSEKGKAYTNYFGRCNVAEHEKLILLYQLKPEKDSDEAVTYSLGKFGQRALDFYSIHVTKESTHPVKPLAQIAGNRYASYPVGKALSDACMGTIASFLSKYQDIIIEHQKVVKGNQKRLESLRELAGKENLEYPSVTLPPQPHTKEGVDAYNEVIARVRMWVNLNLWQKLKLSRDDAKPLLRLKGFPSFPLVERQANEVDWWDMVCNVKKLINEKKEDGKVFWQNLAGYKRQEALRPYLSSEEDRKKGKKFARYQLGDLLLHLEKKHGEDWGKVYDEAWERIDKKVEGLSKHIKLEEERRSEDAQSKAALTDWLRAKASFVIEGLKEADKDEFCRCELKLQKWYGDLRGKPFAIEAENSILDISGFSKQYNCAFIWQKDGVKKLNLYLIINYFKGGKLRFKKIKPEAFEANRFYTVINKKSGEIVPMEVNFNFDDPNLIILPLAFGKRQGREFIWNDLLSLETGSLKLANGRVIEKTLYNRRTRQDEPALFVALTFERREVLDSSNIKPMNLIGVDRGENIPAVIALTDPEGCPLSRFKDSLGNPTHILRIGESYKEKQRTIQAKKEVEQRRAGGYSRKYASKAKNLADDMVRNTARDLLYYAVTQDAMLIFENLSRGFGRQGKRTFMAERQYTRMEDWLTAKLAYEGLPSKTYLSKTLAQYTSKTCSNCGFTITSADYDRVLEKLKKTATGWMTTINGKELKVEGQITYYNRYKRQNVVKDLSVELDRLSEESVNNDISSWTKGRSGEALSLLKKRFSHRPVQEKFVCLNCGFETHADEQAALNIARSWLFLRSQEYKKYQTNKTTGNTDKRAFVETWQSFYRKKLKEVWKPAV

SEQ ID NO: 31227 - protein, 978 aa, synthetic construct
  REGION 1..978: note = engineered CasX variant
QEGKRINKIRRRLVKDSNTKKAGKTGPMKTLLVRVMTPDLRERLENLRKKPENIPQPISNTSRANLNKLLTDYTEMKKAILHVYWEEFQKDPVGLMSRVAQPASKKIDQNKLKPEMDEKGNLTTAGFACSQCGQPLFVYKLEQVSEKGKAYTNYFGRCNVAEHEKLILLYQLKPEKDSDEAVTYSLGKFGQRALDFYSIHVTKESTHPVKPLAQIAGNRYASHPVGKALSDACMGTIASFLSKYQDIIIEHQKVVKGNQKRLESLRELAGKENLEYPSVTLPPQPHTKEGVDAYNEVIARVRMWVNLNLWQKLKLSRDDAKPLLRLKGFPSFPLVERQANEVDWWDMVCNVKKLINEKKEDGKVFWQNLAGYKRQEALRPYLSSEEDRKKGKKFARYQLGDLLLHLEKKHGEDWGKVYDEAWERIDKKVEGLSKHIKLEEERRSEDAQSKAALTDWLRAKASFVIEGLKEADKDEFCRCELKLQKWYGDLRGKPFAIEAENSILDISGFSKQYNCAFIWQKDGVKKLNLYLIINYFKGGKLRFKKIKPEAFEANRFYTVINKKSGEIVPMEVNFNFDDPNLIILPLAFGKRQGREFIWNDLLSLETGSLKLANGRVIEKTLYNRRTRQDEPALFVALTFERREVLDSSNIKPMNLIGVDRGENIPAVIALTDPEGCPLSRFKDSLGNPTHILRIGESYKEKQRTIQAKKEVEQRRAGGYSRKYASKAKNLADDMVRNTARDLLYYAVTQDAMLIFENLSRGFGRQGKRTFMAERQYTRMEDWLTAKLAYEGLPSKTYLSKTLAQYTSKTCSNCGFTITSADYDRVLEKLKKTATGWMTTINGKELKVEGQITYYNRYKRQNVVKDLSVELDRLSEESVNNDISSWTKGRSGEALSLLKKRFSHRPVQEKFVCLNCGFETHADEQAALNIARSWLFLRSQEYKKYQTNKTTGNTDKRAFVETWQSFYRKKLKEVWKPAV

SEQ ID NO: 31228 - protein, 978 aa, synthetic construct
  REGION 1..978: note = engineered CasX variant
QEGKRINKIRRRLVKDSNTKKAGKTGPMKTLLVRVMTPDLRERLENLRKKPENIPQPISNTSRANLNKLLTDYTEMKKAILHVYWEEFQKDPVGLMSRVAQPASKKIDQNKLKPEMDEKGNLTTAGFACSQCGQPLFVYKLEQVSEKGKAYTNYFGRCNVAEHEKLILLYQLKPEKDSDEAVTYSLGKFGQRALDFYSIHVTKESTHPVKPLAQIAGNRYASSPVGKALSDACMGTIASFLSKYQDIIIEHQKVVKGNQKRLESLRELAGKENLEYPSVTLPPQPHTKEGVDAYNEVIARVRMWVNLNLWQKLKLSRDDAKPLLRLKGFPSFPLVERQANEVDWWDMVCNVKKLINEKKEDGKVFWQNLAGYKRQEALRPYLSSEEDRKKGKKFARYQLGDLLLHLEKKHGEDWGKVYDEAWERIDKKVEGLSKHIKLEEERRSEDAQSKAALTDWLRAKASFVIEGLKEADKDEFCRCELKLQKWYGDLRGKPFAIEAENSILDISGFSKQYNCAFIWQKDGVKKLNLYLIINYFKGGKLRFKKIKPEAFEANRFYTVINKKSGEIVPMEVNFNFDDPNLIILPLAFGKRQGREFIWNDLLSLETGSLKLANGRVIEKTLYNRRTRQDEPALFVALTFERREVLDSSNIKPMNLIGVDRGENIPAVIALTDPEGCPLSRFKDSLGNPTHILRIGESYKEKQRTIQAKKEVEQRRAGGYSRKYASKAKNLADDMVRNTARDLLYYAVTQDAMLIFENLSRGFGRQGKRTFMAERQYTRMEDWLTAKLAYEGLPSKTYLSKTLAQYTSKTCSNCGFTITSADYDRVLEKLKKTATGWMTTINGKELKVEGQITYYNRYKRQNVVKDLSVELDRLSEESVNNDISSWTKGRSGEALSLLKKRFSHRPVQEKFVCLNCGFETHADEQAALNIARSWLFLRSQEYKKYQTNKTTGNTDKRAFVETWQSFYRKKLKEVWKPAV

SEQ ID NO: 31229 - protein, 978 aa, synthetic construct
  REGION 1..978: note = engineered CasX variant
QEGKRINKIRRRLVKDSNTKKAGKTGPMKTLLVRVMTPDLRERLENLRKKPENIPQPISNTSRANLNKLLTDYTEMKKAILHVYWEEFQKDPVGLMSRVAQPASKKIDQNKLKPEMDEKGNLTTAGFACSQCGQPLFVYKLEQVSEKGKAYTNYFGRCNVAEHEKLILLYQLKPEKDSDEAVTYSLGKFGQRALDFYSIHVTKESTHPVKPLAQIAGNRYASTPVGKALSDACMGTIASFLSKYQDIIIEHQKVVKGNQKRLESLRELAGKENLEYPSVTLPPQPHTKEGVDAYNEVIARVRMWVNLNLWQKLKLSRDDAKPLLRLKGFPSFPLVERQANEVDWWDMVCNVKKLINEKKEDGKVFWQNLAGYKRQEALRPYLSSEEDRKKGKKFARYQLGDLLLHLEKKHGEDWGKVYDEAWERIDKKVEGLSKHIKLEEERRSEDAQSKAALTDWLRAKASFVIEGLKEADKDEFCRCELKLQKWYGDLRGKPFAIEAENSILDISGFSKQYNCAFIWQKDGVKKLNLYLIINYFKGGKLRFKKIKPEAFEANRFYTVINKKSGEIVPMEVNFNFDDPNLIILPLAFGKRQGREFIWNDLLSLETGSLKLANGRVIEKTLYNRRTRQDEPALFVALTFERREVLDSSNIKPMNLIGVDRGENIPAVIALTDPEGCPLSRFKDSLGNPTHILRIGESYKEKQRTIQAKKEVEQRRAGGYSRKYASKAKNLADDMVRNTARDLLYYAVTQDAMLIFENLSRGFGRQGKRTFMAERQYTRMEDWLTAKLAYEGLPSKTYLSKTLAQYTSKTCSNCGFTITSADYDRVLEKLKKTATGWMTTINGKELKVEGQITYYNRYKRQNVVKDLSVELDRLSEESVNNDISSWTKGRSGEALSLLKKRFSHRPVQEKFVCLNCGFETHADEQAALNIARSWLFLRSQEYKKYQTNKTTGNTDKRAFVETWQSFYRKKLKEVWKPAV

SEQ ID NO: 31230 - protein, 978 aa, synthetic construct
  REGION 1..978: note = engineered CasX variant
QEGKRINKIRRRLVKDSNTKKAGKTGPMKTLLVRVMTPDLRERLENLRKKPENIPQPISNTSRANLNKLLTDYTEMKKAILHVYWEEFQKDPVGLMSRVAQPASKKIDQNKLKPEMDEKGNLTTAGFACSQCGQPLFVYKLEQVSEKGKAYTNYFGRCNVAEHEKLILLYQLKPEKDSDEAVTYSLGKFGQRALDFYSIHVTKESTHPVKPLAQIAGNRYASAPVGKALSDACMGTIASFLSKYQDIIIEHQKVVKGNQKRLESLRELAGKENLEYPSVTLPPQPHTKEGVDAYNEVIARVRMWVNLNLWQKLKLSRDDAKPLLRLKGFPSFPLVERQANEVDWWDMVCNVKKLINEKKEDGKVFWQNLAGYKRQEALRPYLSSEEDRKKGKKFARYQLGDLLLHLEKKHGEDWGKVYDEAWERIDKKVEGLSKHIKLEEERRSEDAQSKAALTDWLRAKASFVIEGLKEADKDEFCRCELKLQKWYGDLRGKPFAIEAENSILDISGFSKQYNCAFIWQKDGVKKLNLYLIINYFKGGKLRFKKIKPEAFEANRFYTVINKKSGEIVPMEVNFNFDDPNLIILPLAFGKRQGREFIWNDLLSLETGSLKLANGRVIEKTLYNRRTRQDEPALFVALTFERREVLDSSNIKPMNLIGVDRGENIPAVIALTDPEGCPLSRFKDSLGNPTHILRIGESYKEKQRTIQAKKEVEQRRAGGYSRKYASKAKNLADDMVRNTARDLLYYAVTQDAMLIFENLSRGFGRQGKRTFMAERQYTRMEDWLTAKLAYEGLPSKTYLSKTLAQYTSKTCSNCGFTITSADYDRVLEKLKKTATGWMTTINGKELKVEGQITYYNRYKRQNVVKDLSVELDRLSEESVNNDISSWTKGRSGEALSLLKKRFSHRPVQEKFVCLNCGFETHADEQAALNIARSWLFLRSQEYKKYQTNKTTGNTDKRAFVETWQSFYRKKLKEVWKPAV

SEQ ID NO: 31231 - protein, 978 aa, synthetic construct
  REGION 1..978: note = engineered CasX variant
QEGKRINKIRRRLVKDSNTKKAGKTGPMKTLLVRVMTPDLRERLENLRKKPENIPQPISNTSRANLNKLLTDYTEMKKAILHVYWEEFQKDPVGLMSRVAQPASKKIDQNKLKPEMDEKGNLTTAGFACSQCGQPLFVYKLEQVSEKGKAYTNYFGRCNVAEHEKLILLYQLKPEKDSDEAVTYSLGKFGQRALDFYSIHVTKESTHPVKPLAQIAGNRYASVPVGKALSDACMGTIASFLSKYQDIIIEHQKVVKGNQKRLESLRELAGKENLEYPSVTLPPQPHTKEGVDAYNEVIARVRMWVNLNLWQKLKLSRDDAKPLLRLKGFPSFPLVERQANEVDWWDMVCNVKKLINEKKEDGKVFWQNLAGYKRQEALRPYLSSEEDRKKGKKFARYQLGDLLLHLEKKHGEDWGKVYDEAWERIDKKVEGLSKHIKLEEERRSEDAQSKAALTDWLRAKASFVIEGLKEADKDEFCRCELKLQKWYGDLRGKPFAIEAENSILDISGFSKQYNCAFIWQKDGVKKLNLYLIINYFKGGKLRFKKIKPEAFEANRFYTVINKKSGEIVPMEVNFNFDDPNLIILPLAFGKRQGREFIWNDLLSLETGSLKLANGRVIEKTLYNRRTRQDEPALFVALTFERREVLDSSNIKPMNLIGVDRGENIPAVIALTDPEGCPLSRFKDSLGNPTHILRIGESYKEKQRTIQAKKEVEQRRAGGYSRKYASKAKNLADDMVRNTARDLLYYAVTQDAMLIFENLSRGFGRQGKRTFMAERQYTRMEDWLTAKLAYEGLPSKTYLSKTLAQYTSKTCSNCGFTITSADYDRVLEKLKKTATGWMTTINGKELKVEGQITYYNRYKRQNVVKDLSVELDRLSEESVNNDISSWTKGRSGEALSLLKKRFSHRPVQEKFVCLNCGFETHADEQAALNIARSWLFLRSQEYKKYQTNKTTGNTDKRAFVETWQSFYRKKLKEVWKPAV

SEQ ID NO: 31232 - protein, 978 aa, synthetic construct
  REGION 1..978: note = engineered CasX variant
QEGKRINKIRRRLVKDSNTKKAGKTGPMKTLLVRVMTPDLRERLENLRKKPENIPQPISNTSRANLNKLLTDYTEMKKAILHVYWEEFQKDPVGLMSRVAQPASKKIDQNKLKPEMDEKGNLTTAGFACSQCGQPLFVYKLEQVSEKGKAYTNYFGRCNVAEHEKLIKLYQLKPEKDSDEAVTYSLGKFGQRALDFYSIHVTKESTHPVKPLAQIAGNRYASGPVGKALSDACMGTIASFLSKYQDIIIEHQKVVKGNQKRLESLRELAGKENLEYPSVTLPPQPHTKEGVDAYNEVIARVRMWVNLNLWQKLKLSRDDAKPLLRLKGFPSFPLVERQANEVDWWDMVCNVKKLINEKKEDGKVFWQNLAGYKRQEALRPYLSSEEDRKKGKKFARYQLGDLLLHLEKKHGEDWGKVYDEAWERIDKKVEGLSKHIKLEEERRSEDAQSKAALTDWLRAKASFVIEGLKEADKDEFCRCELKLQKWYGDLRGKPFAIEAENSILDISGFSKQYNCAFIWQKDGVKKLNLYLIINYFKGGKLRFKKIKPEAFEANRFYTVINKKSGEIVPMEVNFNFDDPNLIILPLAFGKRQGREFIWNDLLSLETGSLKLANGRVIEKTLYNRRTRQDEPALFVALTFERREVLDSSNIKPMNLIGVDRGENIPAVIALTDPEGCPLSRFKDSLGNPTHILRIGESYKEKQRTIQAKKEVEQRRAGGYSRKYASKAKNLADDMVRNTARDLLYYAVTQDAMLIFENLSRGFGRQGKRTFMAERQYTRMEDWLTAKLAYEGLPSKTYLSKTLAQYTSKTCSNCGFTITSADYDRVLEKLKKTATGWMTTINGKELKVEGQITYYNRYKRQNVVKDLSVELDRLSEESVNNDISSWTKGRSGEALSLLKKRFSHRPVQEKFVCLNCGFETHADEQAALNIARSWLFLRSQEYKKYQTNKTTGNTDKRAFVETWQSFYRKKLKEVWKPAV

SEQ ID NO: 31233 - protein, 977 aa, synthetic construct
  REGION 1..977: note = engineered CasX variant
QEGKRINKIRRRLVKDSNTKKAGKTGPMKTLLVRVMTPDLRERLENLRKKPENIPQPISNTSRANLNKLLTDYTEMKKAILHVYWEEFQKDPVGLMSRVAQPASKKIDQNKLKPEMDEKGNLTTAGFACSQCGQPLFVYKLEQVSEKGKAYTNYFGRCNVAEHEKLILLYQLKPEKDSDEAVTYSLGKFGQRALDFYSIHVTKESTHPVKPLAQIAGNRYASPVGKALSDACMGTIASFLSKYQDIIIEHQKVVKGNQKRLESLRELAGKENLEYPSVTLPPQPHTKEGVDAYNEVIARVRMWVNLNLWQKLKLSRDDAKPLLRLKGFPSFPLVERQANEVDWWDMVCNVKKLINEKKEDGKVFWQNLAGYKRQEALRPYLSSEEDRKKGKKFARYQLGDLLLHLEKKHGEDWGKVYDEAWERIDKKVEGLSKHIKLEEERRSEDAQSKAALTDWLRAKASFVIEGLKEADKDEFCRCELKLQKWYGDLRGKPFAIEAENSILDISGFSKQYNCAFIWQKDGVKKLNLYLIINYFKGGKLRFKKIKPEAFEANRFYTVINKKSGEIVPMEVNFNFDDPNLIILPLAFGKRQGREFIWNDLLSLETGSLKLANGRVIEKTLYNRRTRQDEPALFVALTFERREVLDSSNIKPMNLIGVDRGENIPAVIALTDPEGCPLSRFKDSLGNPTHILRIGESYKEKQRTIQAKKEVEQRRAGGYSRKYASKAKNLADDMVRNTARDLLYYAVTQDAMLIFENLSRGFGRQGKRTFMAERQYTRMEDWLTAKLAYEGLPSKTYLSKTLAQYTSKTCSNCGFTITSADYDRVLEKLKKTATGWMTTINGKELKVEGQITYYNRYKRQNVVKDLSVELDRLSEESVNNDISSWTKGRSGEALSLLKKRFSHRPVQEKFVCLNCGFETHADEQAALNIARSWLFLRSQEYKKYQTNKTTGNTDKRAFVETWQSFYRKKLKEVWKPAV

SEQ ID NO: 31234 - protein, 978 aa, synthetic construct
  REGION 1..978: note = engineered CasX variant
QEGKRINKIRRRLVKDSNTKKAGKTGPMKTLLVRVMTPDLRERLENLRKKPENIPQPISNTSRANLNKLLTDYTEMKKAILHVYWEEFQKDPVGLMSRVAQPASKKIDQNKLKPEMDEKGNLTTAGFACSQCGQPLFVYKLEQVSEKGKAYTNYFGRCNVAEHEKLILLSQLKPEKDSDEAVTYSLGKFGQRALDFYSIHVTKESTHPVKPLAQIAGNRYASYPVGKALSDACMGTIASFLSKYQDIIIEHQKVVKGNQKRLESLRELAGKENLEYPSVTLPPQPHTKEGVDAYNEVIARVRMWVNLNLWQKLKLSRDDAKPLLRLKGFPSFPLVERQANEVDWWDMVCNVKKLINEKKEDGKVFWQNLAGYKRQEALRPYLSSEEDRKKGKKFARYQLGDLLLHLEKKHGEDWGKVYDEAWERIDKKVEGLSKHIKLEEERRSEDAQSKAALTDWLRAKASFVIEGLKEADKDEFCRCELKLQKWYGDLRGKPFAIEAENSILDISGFSKQYNCAFIWQKDGVKKLNLYLIINYFKGGKLRFKKIKPEAFEANRFYTVINKKSGEIVPMEVNFNFDDPNLIILPLAFGKRQGREFIWNDLLSLETGSLKLANGRVIEKTLYNRRTRQDEPALFVALTFERREVLDSSNIKPMNLIGVDRGENIPAVIALTDPEGCPLSRFKDSLGNPTHILRIGESYKEKQRTIQAKKEVEQRRAGGYSRKYASKAKNLADDMVRNTARDLLYYAVTQDAMLIFENLSRGFGRQGKRTFMAERQYTRMEDWLTAKLAYEGLPSKTYLSKTLAQYTSKTCSNCGFTITSADYDRVLEKLKKTATGWMTTINGKELKVEGQITYYNRYKRQNVVKDLSVELDRLSEESVNNDISSWTKGRSGEALSLLKKRFSHRPVQEKFVCLNCGFETHADEQAALNIARSWLFLRSQEYKKYQTNKTTGNTDKRAFVETWQSFYRKKLKEVWKPAV

SEQ ID NO: 31235 - protein, 978 aa, synthetic construct
  REGION 1..978: note = engineered CasX variant
QEGKRINKIRRRLVKDSNTKKAGKTGPMKTLLVRVMTPDLRERLENLRKKPENIPQPISNTSRANLNKLLTDYTEMKKAILHVYWEEFQKDPVGLMSRVAQPASKKIDQNKLKPEMDEKGNLTTAGFACSQCGQPLFVYKLEQVSEKGKAYTNYFGRCNVAEHEKLILLSQLKPEKDSDEAVTYSLGKFGQRALDFYSIHVTKESTHPVKPLAQIAGNRYASHPVGKALSDACMGTIASFLSKYQDIIIEHQKVVKGNQKRLESLRELAGKENLEYPSVTLPPQPHTKEGVDAYNEVIARVRMWVNLNLWQKLKLSRDDAKPLLRLKGFPSFPLVERQANEVDWWDMVCNVKKLINEKKEDGKVFWQNLAGYKRQEALRPYLSSEEDRKKGKKFARYQLGDLLLHLEKKHGEDWGKVYDEAWERIDKKVEGLSKHIKLEEERRSEDAQSKAALTDWLRAKASFVIEGLKEADKDEFCRCELKLQKWYGDLRGKPFAIEAENSILDISGFSKQYNCAFIWQKDGVKKLNLYLIINYFKGGKLRFKKIKPEAFEANRFYTVINKKSGEIVPMEVNFNFDDPNLIILPLAFGKRQGREFIWNDLLSLETGSLKLANGRVIEKTLYNRRTRQDEPALFVALTFERREVLDSSNIKPMNLIGVDRGENIPAVIALTDPEGCPLSRFKDSLGNPTHILRIGESYKEKQRTIQAKKEVEQRRAGGYSRKYASKAKNLADDMVRNTARDLLYYAVTQDAMLIFENLSRGFGRQGKRTFMAERQYTRMEDWLTAKLAYEGLPSKTYLSKTLAQYTSKTCSNCGFTITSADYDRVLEKLKKTATGWMTTINGKELKVEGQITYYNRYKRQNVVKDLSVELDRLSEESVNNDISSWTKGRSGEALSLLKKRFSHRPVQEKFVCLNCGFETHADEQAALNIARSWLFLRSQEYKKYQTNKTTGNTDKRAFVETWQSFYRKKLKEVWKPAV

SEQ ID NO: 31236 - protein, 978 aa, synthetic construct
  REGION 1..978: note = engineered CasX variant
QEGKRINKIRRRLVKDSNTKKAGKTGPMKTLLVRVMTPDLRERLENLRKKPENIPQPISNTSRANLNKLLTDYTEMKKAILHVYWEEFQKDPVGLMSRVAQPASKKIDQNKLKPEMDEKGNLTTAGFACSQCGQPLFVYKLEQVSEKGKAYTNYFGRCNVAEHEKLILLSQLKPEKDSDEAVTYSLGKFGQRALDFYSIHVTKESTHPVKPLAQIAGNRYASSPVGKALSDACMGTIASFLSKYQDIIIEHQKVVKGNQKRLESLRELAGKENLEYPSVTLPPQPHTKEGVDAYNEVIARVRMWVNLNLWQKLKLSRDDAKPLLRLKGFPSFPLVERQANEVDWWDMVCNVKKLINEKKEDGKVFWQNLAGYKRQEALRPYLSSEEDRKKGKKFARYQLGDLLLHLEKKHGEDWGKVYDEAWERIDKKVEGLSKHIKLEEERRSEDAQSKAALTDWLRAKASFVIEGLKEADKDEFCRCELKLQKWYGDLRGKPFAIEAENSILDISGFSKQYNCAFIWQKDGVKKLNLYLIINYFKGGKLRFKKIKPEAFEANRFYTVINKKSGEIVPMEVNFNFDDPNLIILPLAFGKRQGREFIWNDLLSLETGSLKLANGRVIEKTLYNRRTRQDEPALFVALTFERREVLDSSNIKPMNLIGVDRGENIPAVIALTDPEGCPLSRFKDSLGNPTHILRIGESYKEKQRTIQAKKEVEQRRAGGYSRKYASKAKNLADDMVRNTARDLLYYAVTQDAMLIFENLSRGFGRQGKRTFMAERQYTRMEDWLTAKLAYEGLPSKTYLSKTLAQYTSKTCSNCGFTITSADYDRVLEKLKKTATGWMTTINGKELKVEGQITYYNRYKRQNVVKDLSVELDRLSEESVNNDISSWTKGRSGEALSLLKKRFSHRPVQEKFVCLNCGFETHADEQAALNIARSWLFLRSQEYKKYQTNKTTGNTDKRAFVETWQSFYRKKLKEVWKPAV

SEQ ID NO: 31237 - protein, 978 aa, synthetic construct
  REGION 1..978: note = engineered CasX variant
QEGKRINKIRRRLVKDSNTKKAGKTGPMKTLLVRVMTPDLRERLENLRKKPENIPQPISNTSRANLNKLLTDYTEMKKAILHVYWEEFQKDPVGLMSRVAQPASKKIDQNKLKPEMDEKGNLTTAGFACSQCGQPLFVYKLEQVSEKGKAYTNYFGRCNVAEHEKLILLSQLKPEKDSDEAVTYSLGKFGQRALDFYSIHVTKESTHPVKPLAQIAGNRYASTPVGKALSDACMGTIASFLSKYQDIIIEHQKVVKGNQKRLESLRELAGKENLEYPSVTLPPQPHTKEGVDAYNEVIARVRMWVNLNLWQKLKLSRDDAKPLLRLKGFPSFPLVERQANEVDWWDMVCNVKKLINEKKEDGKVFWQNLAGYKRQEALRPYLSSEEDRKKGKKFARYQLGDLLLHLEKKHGEDWGKVYDEAWERIDKKVEGLSKHIKLEEERRSEDAQSKAALTDWLRAKASFVIEGLKEADKDEFCRCELKLQKWYGDLRGKPFAIEAENSILDISGFSKQYNCAFIWQKDGVKKLNLYLIINYFKGGKLRFKKIKPEAFEANRFYTVINKKSGEIVPMEVNFNFDDPNLIILPLAFGKRQGREFIWNDLLSLETGSLKLANGRVIEKTLYNRRTRQDEPALFVALTFERREVLDSSNIKPMNLIGVDRGENIPAVIALTDPEGCPLSRFKDSLGNPTHILRIGESYKEKQRTIQAKKEVEQRRAGGYSRKYASKAKNLADDMVRNTARDLLYYAVTQDAMLIFENLSRGFGRQGKRTFMAERQYTRMEDWLTAKLAYEGLPSKTYLSKTLAQYTSKTCSNCGFTITSADYDRVLEKLKKTATGWMTTINGKELKVEGQITYYNRYKRQNVVKDLSVELDRLSEESVNNDISSWTKGRSGEALSLLKKRFSHRPVQEKFVCLNCGFETHADEQAALNIARSWLFLRSQEYKKYQTNKTTGNTDKRAFVETWQSFYRKKLKEVWKPAV

SEQ ID NO: 31238 - protein, 978 aa, synthetic construct
  REGION 1..978: note = engineered CasX variant
QEGKRINKIRRRLVKDSNTKKAGKTGPMKTLLVRVMTPDLRERLENLRKKPENIPQPISNTSRANLNKLLTDYTEMKKAILHVYWEEFQKDPVGLMSRVAQPASKKIDQNKLKPEMDEKGNLTTAGFACSQCGQPLFVYKLEQVSEKGKAYTNYFGRCNVAEHEKLILLSQLKPEKDSDEAVTYSLGKFGQRALDFYSIHVTKESTHPVKPLAQIAGNRYASAPVGKALSDACMGTIASFLSKYQDIIIEHQKVVKGNQKRLESLRELAGKENLEYPSVTLPPQPHTKEGVDAYNEVIARVRMWVNLNLWQKLKLSRDDAKPLLRLKGFPSFPLVERQANEVDWWDMVCNVKKLINEKKEDGKVFWQNLAGYKRQEALRPYLSSEEDRKKGKKFARYQLGDLLLHLEKKHGEDWGKVYDEAWERIDKKVEGLSKHIKLEEERRSEDAQSKAALTDWLRAKASFVIEGLKEADKDEFCRCELKLQKWYGDLRGKPFAIEAENSILDISGFSKQYNCAFIWQKDGVKKLNLYLIINYFKGGKLRFKKIKPEAFEANRFYTVINKKSGEIVPMEVNFNFDDPNLIILPLAFGKRQGREFIWNDLLSLETGSLKLANGRVIEKTLYNRRTRQDEPALFVALTFERREVLDSSNIKPMNLIGVDRGENIPAVIALTDPEGCPLSRFKDSLGNPTHILRIGESYKEKQRTIQAKKEVEQRRAGGYSRKYASKAKNLADDMVRNTARDLLYYAVTQDAMLIFENLSRGFGRQGKRTFMAERQYTRMEDWLTAKLAYEGLPSKTYLSKTLAQYTSKTCSNCGFTITSADYDRVLEKLKKTATGWMTTINGKELKVEGQITYYNRYKRQNVVKDLSVELDRLSEESVNNDISSWTKGRSGEALSLLKKRFSHRPVQEKFVCLNCGFETHADEQAALNIARSWLFLRSQEYKKYQTNKTTGNTDKRAFVETWQSFYRKKLKEVWKPAV

SEQ ID NO: 31239 - protein, 978 aa, synthetic construct
  REGION 1..978: note = engineered CasX variant
QEGKRINKIRRRLVKDSNTKKAGKTGPMKTLLVRVMTPDLRERLENLRKKPENIPQPISNTSRANLNKLLTDYTEMKKAILHVYWEEFQKDPVGLMSRVAQPASKKIDQNKLKPEMDEKGNLTTAGFACSQCGQPLFVYKLEQVSEKGKAYTNYFGRCNVAEHEKLILLSQLKPEKDSDEAVTYSLGKFGQRALDFYSIHVTKESTHPVKPLAQIAGNRYASVPVGKALSDACMGTIASFLSKYQDIIIEHQKVVKGNQKRLESLRELAGKENLEYPSVTLPPQPHTKEGVDAYNEVIARVRMWVNLNLWQKLKLSRDDAKPLLRLKGFPSFPLVERQANEVDWWDMVCNVKKLINEKKEDGKVFWQNLAGYKRQEALRPYLSSEEDRKKGKKFARYQLGDLLLHLEKKHGEDWGKVYDEAWERIDKKVEGLSKHIKLEEERRSEDAQSKAALTDWLRAKASFVIEGLKEADKDEFCRCELKLQKWYGDLRGKPFAIEAENSILDISGFSKQYNCAFIWQKDGVKKLNLYLIINYFKGGKLRFKKIKPEAFEANRFYTVINKKSGEIVPMEVNFNFDDPNLIILPLAFGKRQGREFIWNDLLSLETGSLKLANGRVIEKTLYNRRTRQDEPALFVALTFERREVLDSSNIKPMNLIGVDRGENIPAVIALTDPEGCPLSRFKDSLGNPTHILRIGESYKEKQRTIQAKKEVEQRRAGGYSRKYASKAKNLADDMVRNTARDLLYYAVTQDAMLIFENLSRGFGRQGKRTFMAERQYTRMEDWLTAKLAYEGLPSKTYLSKTLAQYTSKTCSNCGFTITSADYDRVLEKLKKTATGWMTTINGKELKVEGQITYYNRYKRQNVVKDLSVELDRLSEESVNNDISSWTKGRSGEALSLLKKRFSHRPVQEKFVCLNCGFETHADEQAALNIARSWLFLRSQEYKKYQTNKTTGNTDKRAFVETWQSFYRKKLKEVWKPAV

SEQ ID NO: 31240 - protein, 978 aa, synthetic construct
  REGION 1..978: note = engineered CasX variant
QEGKRINKIRRRLVKDSNTKKAGKTGPMKTLLVRVMTPDLRERLENLRKKPENIPQPISNTSRANLNKLLTDYTEMKKAILHVYWEEFQKDPVGLMSRVAQPASKKIDQNKLKPEMDEKGNLTTAGFACSQCGQPLFVYKLEQVSEKGKAYTNYFGRCNVAEHEKLIKLSQLKPEKDSDEAVTYSLGKFGQRALDFYSIHVTKESTHPVKPLAQIAGNRYASGPVGKALSDACMGTIASFLSKYQDIIIEHQKVVKGNQKRLESLRELAGKENLEYPSVTLPPQPHTKEGVDAYNEVIARVRMWVNLNLWQKLKLSRDDAKPLLRLKGFPSFPLVERQANEVDWWDMVCNVKKLINEKKEDGKVFWQNLAGYKRQEALRPYLSSEEDRKKGKKFARYQLGDLLLHLEKKHGEDWGKVYDEAWERIDKKVEGLSKHIKLEEERRSEDAQSKAALTDWLRAKASFVIEGLKEADKDEFCRCELKLQKWYGDLRGKPFAIEAENSILDISGFSKQYNCAFIWQKDGVKKLNLYLIINYFKGGKLRFKKIKPEAFEANRFYTVINKKSGEIVPMEVNFNFDDPNLIILPLAFGKRQGREFIWNDLLSLETGSLKLANGRVIEKTLYNRRTRQDEPALFVALTFERREVLDSSNIKPMNLIGVDRGENIPAVIALTDPEGCPLSRFKDSLGNPTHILRIGESYKEKQRTIQAKKEVEQRRAGGYSRKYASKAKNLADDMVRNTARDLLYYAVTQDAMLIFENLSRGFGRQGKRTFMAERQYTRMEDWLTAKLAYEGLPSKTYLSKTLAQYTSKTCSNCGFTITSADYDRVLEKLKKTATGWMTTINGKELKVEGQITYYNRYKRQNVVKDLSVELDRLSEESVNNDISSWTKGRSGEALSLLKKRFSHRPVQEKFVCLNCGFETHADEQAALNIARSWLFLRSQEYKKYQTNKTTGNTDKRAFVETWQSFYRKKLKEVWKPAV

SEQ ID NO: 31241 - protein, 977 aa, synthetic construct
  REGION 1..977: note = engineered CasX variant
QEGKRINKIRRRLVKDSNTKKAGKTGPMKTLLVRVMTPDLRERLENLRKKPENIPQPISNTSRANLNKLLTDYTEMKKAILHVYWEEFQKDPVGLMSRVAQPASKKIDQNKLKPEMDEKGNLTTAGFACSQCGQPLFVYKLEQVSEKGKAYTNYFGRCNVAEHEKLILLSQLKPEKDSDEAVTYSLGKFGQRALDFYSIHVTKESTHPVKPLAQIAGNRYASPVGKALSDACMGTIASFLSKYQDIIIEHQKVVKGNQKRLESLRELAGKENLEYPSVTLPPQPHTKEGVDAYNEVIARVRMWVNLNLWQKLKLSRDDAKPLLRLKGFPSFPLVERQANEVDWWDMVCNVKKLINEKKEDGKVFWQNLAGYKRQEALRPYLSSEEDRKKGKKFARYQLGDLLLHLEKKHGEDWGKVYDEAWERIDKKVEGLSKHIKLEEERRSEDAQSKAALTDWLRAKASFVIEGLKEADKDEFCRCELKLQKWYGDLRGKPFAIEAENSILDISGFSKQYNCAFIWQKDGVKKLNLYLIINYFKGGKLRFKKIKPEAFEANRFYTVINKKSGEIVPMEVNFNFDDPNLIILPLAFGKRQGREFIWNDLLSLETGSLKLANGRVIEKTLYNRRTRQDEPALFVALTFERREVLDSSNIKPMNLIGVDRGENIPAVIALTDPEGCPLSRFKDSLGNPTHILRIGESYKEKQRTIQAKKEVEQRRAGGYSRKYASKAKNLADDMVRNTARDLLYYAVTQDAMLIFENLSRGFGRQGKRTFMAERQYTRMEDWLTAKLAYEGLPSKTYLSKTLAQYTSKTCSNCGFTITSADYDRVLEKLKKTATGWMTTINGKELKVEGQITYYNRYKRQNVVKDLSVELDRLSEESVNNDISSWTKGRSGEALSLLKKRFSHRPVQEKFVCLNCGFETHADEQAALNIARSWLFLRSQEYKKYQTNKTTGNTDKRAFVETWQSFYRKKLKEVWKPAV

SEQ ID NO: 31242 - protein, 978 aa, synthetic construct
  REGION 1..978: note = engineered CasX variant
QEGKRINKIRRRLVKDSNTKKAGKTGPMKTLLVRVMTPDLRERLENLRKKPENIPQPISNTSRANLNKLLTDYTEMKKAILHVYWEEFQKDPVGLMSRVAQPASKKIDQNKLKPEMDEKGNLTTAGFACSQCGQPLFVYKLEQVSEKGKAYTNYFGRCNVAEHEKLILLAQLKPEKDSDEAVTYSLGKFGQRALDFYSIHVTKESTHPVKPLAQIAGNRYASYPVGKALSDACMGTIASFLSKYQDIIIEHQKVVKGNQKRLESLRELAGKENLEYPSVTLPPQPHTKEGVDAYNEVIARVRMWVNLNLWQKLKLSRDDAKPLLRLKGFPSFPLVERQANEVDWWDMVCNVKKLINEKKEDGKVFWQNLAGYKRQEALRPYLSSEEDRKKGKKFARYQLGDLLLHLEKKHGEDWGKVYDEAWERIDKKVEGLSKHIKLEEERRSEDAQSKAALTDWLRAKASFVIEGLKEADKDEFCRCELKLQKWYGDLRGKPFAIEAENSILDISGFSKQYNCAFIWQKDGVKKLNLYLIINYFKGGKLRFKKIKPEAFEANRFYTVINKKSGEIVPMEVNFNFDDPNLIILPLAFGKRQGREFIWNDLLSLETGSLKLANGRVIEKTLYNRRTRQDEPALFVALTFERREVLDSSNIKPMNLIGVDRGENIPAVIALTDPEGCPLSRFKDSLGNPTHILRIGESYKEKQRTIQAKKEVEQRRAGGYSRKYASKAKNLADDMVRNTARDLLYYAVTQDAMLIFENLSRGFGRQGKRTFMAERQYTRMEDWLTAKLAYEGLPSKTYLSKTLAQYTSKTCSNCGFTITSADYDRVLEKLKKTATGWMTTINGKELKVEGQITYYNRYKRQNVVKDLSVELDRLSEESVNNDISSWTKGRSGEALSLLKKRFSHRPVQEKFVCLNCGFETHADEQAALNIARSWLFLRSQEYKKYQTNKTTGNTDKRAFVETWQSFYRKKLKEVWKPAV

SEQ ID NO: 31243 - protein, 978 aa, synthetic construct
  REGION 1..978: note = engineered CasX variant
QEGKRINKIRRRLVKDSNTKKAGKTGPMKTLLVRVMTPDLRERLENLRKKPENIPQPISNTSRANLNKLLTDYTEMKKAILHVYWEEFQKDPVGLMSRVAQPASKKIDQNKLKPEMDEKGNLTTAGFACSQCGQPLFVYKLEQVSEKGKAYTNYFGRCNVAEHEKLILLAQLKPEKDSDEAVTYSLGKFGQRALDFYSIHVTKESTHPVKPLAQIAGNRYASHPVGKALSDACMGTIASFLSKYQDIIIEHQKVVKGNQKRLESLRELAGKENLEYPSVTLPPQPHTKEGVDAYNEVIARVRMWVNLNLWQKLKLSRDDAKPLLRLKGFPSFPLVERQANEVDWWDMVCNVKKLINEKKEDGKVFWQNLAGYKRQEALRPYLSSEEDRKKGKKFARYQLGDLLLHLEKKHGEDWGKVYDEAWERIDKKVEGLSKHIKLEEERRSEDAQSKAALTDWLRAKASFVIEGLKEADKDEFCRCELKLQKWYGDLRGKPFAIEAENSILDISGFSKQYNCAFIWQKDGVKKLNLYLIINYFKGGKLRFKKIKPEAFEANRFYTVINKKSGEIVPMEVNFNFDDPNLIILPLAFGKRQGREFIWNDLLSLETGSLKLANGRVIEKTLYNRRTRQDEPALFVALTFERREVLDSSNIKPMNLIGVDRGENIPAVIALTDPEGCPLSRFKDSLGNPTHILRIGESYKEKQRTIQAKKEVEQRRAGGYSRKYASKAKNLADDMVRNTARDLLYYAVTQDAMLIFENLSRGFGRQGKRTFMAERQYTRMEDWLTAKLAYEGLPSKTYLSKTLAQYTSKTCSNCGFTITSADYDRVLEKLKKTATGWMTTINGKELKVEGQITYYNRYKRQNVVKDLSVELDRLSEESVNNDISSWTKGRSGEALSLLKKRFSHRPVQEKFVCLNCGFETHADEQAALNIARSWLFLRSQEYKKYQTNKTTGNTDKRAFVETWQSFYRKKLKEVWKPAV

SEQ ID NO: 31244 - protein, 978 aa, synthetic construct
  REGION 1..978: note = engineered CasX variant
QEGKRINKIRRRLVKDSNTKKAGKTGPMKTLLVRVMTPDLRERLENLRKKPENIPQPISNTSRANLNKLLTDYTEMKKAILHVYWEEFQKDPVGLMSRVAQPASKKIDQNKLKPEMDEKGNLTTAGFACSQCGQPLFVYKLEQVSEKGKAYTNYFGRCNVAEHEKLILLAQLKPEKDSDEAVTYSLGKFGQRALDFYSIHVTKESTHPVKPLAQIAGNRYASTPVGKALSDACMGTIASFLSKYQDIIIEHQKVVKGNQKRLESLRELAGKENLEYPSVTLPPQPHTKEGVDAYNEVIARVRMWVNLNLWQKLKLSRDDAKPLLRLKGFPSFPLVERQANEVDWWDMVCNVKKLINEKKEDGKVFWQNLAGYKRQEALRPYLSSEEDRKKGKKFARYQLGDLLLHLEKKHGEDWGKVYDEAWERIDKKVEGLSKHIKLEEERRSEDAQSKAALTDWLRAKASFVIEGLKEADKDEFCRCELKLQKWYGDLRGKPFAIEAENSILDISGFSKQYNCAFIWQKDGVKKLNLYLIINYFKGGKLRFKKIKPEAFEANRFYTVINKKSGEIVPMEVNFNFDDPNLIILPLAFGKRQGREFIWNDLLSLETGSLKLANGRVIEKTLYNRRTRQDEPALFVALTFERREVLDSSNIKPMNLIGVDRGENIPAVIALTDPEGCPLSRFKDSLGNPTHILRIGESYKEKQRTIQAKKEVEQRRAGGYSRKYASKAKNLADDMVRNTARDLLYYAVTQDAMLIFENLSRGFGRQGKRTFMAERQYTRMEDWLTAKLAYEGLPSKTYLSKTLAQYTSKTCSNCGFTITSADYDRVLEKLKKTATGWMTTINGKELKVEGQITYYNRYKRQNVVKDLSVELDRLSEESVNNDISSWTKGRSGEALSLLKKRFSHRPVQEKFVCLNCGFETHADEQAALNIARSWLFLRSQEYKKYQTNKTTGNTDKRAFVETWQSFYRKKLKEVWKPAV

SEQ ID NO: 31245 - protein, 978 aa, synthetic construct
  REGION 1..978: note = engineered CasX variant
QEGKRINKIRRRLVKDSNTKKAGKTGPMKTLLVRVMTPDLRERLENLRKKPENIPQPISNTSRANLNKLLTDYTEMKKAILHVYWEEFQKDPVGLMSRVAQPASKKIDQNKLKPEMDEKGNLTTAGFACSQCGQPLFVYKLEQVSEKGKAYTNYFGRCNVAEHEKLILLAQLKPEKDSDEAVTYSLGKFGQRALDFYSIHVTKESTHPVKPLAQIAGNRYASAPVGKALSDACMGTIASFLSKYQDIIIEHQKVVKGNQKRLESLRELAGKENLEYPSVTLPPQPHTKEGVDAYNEVIARVRMWVNLNLWQKLKLSRDDAKPLLRLKGFPSFPLVERQANEVDWWDMVCNVKKLINEKKEDGKVFWQNLAGYKRQEALRPYLSSEEDRKKGKKFARYQLGDLLLHLEKKHGEDWGKVYDEAWERIDKKVEGLSKHIKLEEERRSEDAQSKAALTDWLRAKASFVIEGLKEADKDEFCRCELKLQKWYGDLRGKPFAIEAENSILDISGFSKQYNCAFIWQKDGVKKLNLYLIINYFKGGKLRFKKIKPEAFEANRFYTVINKKSGEIVPMEVNFNFDDPNLIILPLAFGKRQGREFIWNDLLSLETGSLKLANGRVIEKTLYNRRTRQDEPALFVALTFERREVLDSSNIKPMNLIGVDRGENIPAVIALTDPEGCPLSRFKDSLGNPTHILRIGESYKEKQRTIQAKKEVEQRRAGGYSRKYASKAKNLADDMVRNTARDLLYYAVTQDAMLIFENLSRGFGRQGKRTFMAERQYTRMEDWLTAKLAYEGLPSKTYLSKTLAQYTSKTCSNCGFTITSADYDRVLEKLKKTATGWMTTINGKELKVEGQITYYNRYKRQNVVKDLSVELDRLSEESVNNDISSWTKGRSGEALSLLKKRFSHRPVQEKFVCLNCGFETHADEQAALNIARSWLFLRSQEYKKYQTNKTTGNTDKRAFVETWQSFYRKKLKEVWKPAV

SEQ ID NO: 31246 - protein, 978 aa, synthetic construct
  REGION 1..978: note = engineered CasX variant
QEGKRINKIRRRLVKDSNTKKAGKTGPMKTLLVRVMTPDLRERLENLRKKPENIPQPISNTSRANLNKLLTDYTEMKKAILHVYWEEFQKDPVGLMSRVAQPASKKIDQNKLKPEMDEKGNLTTAGFACSQCGQPLFVYKLEQVSEKGKAYTNYFGRCNVAEHEKLILLAQLKPEKDSDEAVTYSLGKFGQRALDFYSIHVTKESTHPVKPLAQIAGNRYASVPVGKALSDACMGTIASFLSKYQDIIIEHQKVVKGNQKRLESLRELAGKENLEYPSVTLPPQPHTKEGVDAYNEVIARVRMWVNLNLWQKLKLSRDDAKPLLRLKGFPSFPLVERQANEVDWWDMVCNVKKLINEKKEDGKVFWQNLAGYKRQEALRPYLSSEEDRKKGKKFARYQLGDLLLHLEKKHGEDWGKVYDEAWERIDKKVEGLSKHIKLEEERRSEDAQSKAALTDWLRAKASFVIEGLKEADKDEFCRCELKLQKWYGDLRGKPFAIEAENSILDISGFSKQYNCAFIWQKDGVKKLNLYLIINYFKGGKLRFKKIKPEAFEANRFYTVINKKSGEIVPMEVNFNFDDPNLIILPLAFGKRQGREFIWNDLLSLETGSLKLANGRVIEKTLYNRRTRQDEPALFVALTFERREVLDSSNIKPMNLIGVDRGENIPAVIALTDPEGCPLSRFKDSLGNPTHILRIGESYKEKQRTIQAKKEVEQRRAGGYSRKYASKAKNLADDMVRNTARDLLYYAVTQDAMLIFENLSRGFGRQGKRTFMAERQYTRMEDWLTAKLAYEGLPSKTYLSKTLAQYTSKTCSNCGFTITSADYDRVLEKLKKTATGWMTTINGKELKVEGQITYYNRYKRQNVVKDLSVELDRLSEESVNNDISSWTKGRSGEALSLLKKRFSHRPVQEKFVCLNCGFETHADEQAALNIARSWLFLRSQEYKKYQTNKTTGNTDKRAFVETWQSFYRKKLKEVWKPAV

SEQ ID NO: 31247 - protein, 978 aa, synthetic construct
  REGION 1..978: note = engineered CasX variant
QEGKRINKIRRRLVKDSNTKKAGKTGPMKTLLVRVMTPDLRERLENLRKKPENIPQPISNTSRANLNKLLTDYTEMKKAILHVYWEEFQKDPVGLMSRVAQPASKKIDQNKLKPEMDEKGNLTTAGFACSQCGQPLFVYKLEQVSEKGKAYTNYFGRCNVAEHEKLILLAQLKPEKDSDEAVTYSLGKFGQRALDFYSIHVTKESTHPVKPLAQIAGNRYASYPVGKALSDACMGTIASFLSKYQDIIIEHQKVVKGNQKRLESLRELAGKENLEYPSVTLPPQPHTSEGVDAYNEVIARVRMWVNLNLWQKLKLSRDDAKPLLRLKGFPSFPLVERQANEVDWWDMVCNVKKLINEKKEDGKVFWQNLAGYKRQEALRPYLSSEEDRKKGKKFARYQLGDLLLHLEKKHGEDWGKVYDEAWERIDKKVEGLSKHIKLEEERRSEDAQSKAALTDWLRAKASFVIEGLKEADKDEFCRCELKLQKWYGDLRGKPFAIEAENSILDISGFSKQYNCAFIWQKDGVKKLNLYLIINYFKGGKLRFKKIKPEAFEANRFYTVINKKSGEIVPMEVNFNFDDPNLIILPLAFGKRQGREFIWNDLLSLETGSLKLANGRVIEKTLYNRRTRQDEPALFVALTFERREVLDSSNIKPMNLIGVDRGENIPAVIALTDPEGCPLSRFKDSLGNPTHILRIGESYKEKQRTIQAKKEVEQRRAGGYSRKYASKAKNLADDMVRNTARDLLYYAVTQDAMLIFENLSRGFGRQGKRTFMAERQYTRMEDWLTAKLAYEGLPSKTYLSKTLAQYTSKTCSNCGFTITSADYDRVLEKLKKTATGWMTTINGKELKVEGQITYYNRYKRQNVVKDLSVELDRLSEESVNNDISSWTKGRSGEALSLLKKRFSHRPVQEKFVCLNCGFETHADEQAALNIARSWLFLRSQEYKKYQTNKTTGNTDKRAFVETWQSFYRKKLKEVWKPAV

SEQ ID NO: 31248 - protein, 978 aa, synthetic construct
  REGION 1..978: note = engineered CasX variant
QEGKRINKIRRRLVKDSNTKKAGKTGPMKTLLVRVMTPDLRERLENLRKKPENIPQPISNTSRANLNKLLTDYTEMKKAILHVYWEEFQKDPVGLMSRVAQPASKKIDQNKLKPEMDEKGNLTTAGFACSQCGQPLFVYKLEQVSEKGKAYTNYFGRCNVAEHEKLILLAQLKPEKDSDEAVTYSLGKFGQRALDFYSIHVTKESTHPVKPLAQIAGNRYASHPVGKALSDACMGTIASFLSKYQDIIIEHQKVVKGNQKRLESLRELAGKENLEYPSVTLPPQPHTSEGVDAYNEVIARVRMWVNLNLWQKLKLSRDDAKPLLRLKGFPSFPLVERQANEVDWWDMVCNVKKLINEKKEDGKVFWQNLAGYKRQEALRPYLSSEEDRKKGKKFARYQLGDLLLHLEKKHGEDWGKVYDEAWERIDKKVEGLSKHIKLEEERRSEDAQSKAALTDWLRAKASFVIEGLKEADKDEFCRCELKLQKWYGDLRGKPFAIEAENSILDISGFSKQYNCAFIWQKDGVKKLNLYLIINYFKGGKLRFKKIKPEAFEANRFYTVINKKSGEIVPMEVNFNFDDPNLIILPLAFGKRQGREFIWNDLLSLETGSLKLANGRVIEKTLYNRRTRQDEPALFVALTFERREVLDSSNIKPMNLIGVDRGENIPAVIALTDPEGCPLSRFKDSLGNPTHILRIGESYKEKQRTIQAKKEVEQRRAGGYSRKYASKAKNLADDMVRNTARDLLYYAVTQDAMLIFENLSRGFGRQGKRTFMAERQYTRMEDWLTAKLAYEGLPSKTYLSKTLAQYTSKTCSNCGFTITSADYDRVLEKLKKTATGWMTTINGKELKVEGQITYYNRYKRQNVVKDLSVELDRLSEESVNNDISSWTKGRSGEALSLLKKRFSHRPVQEKFVCLNCGFETHADEQAALNIARSWLFLRSQEYKKYQTNKTTGNTDKRAFVETWQSFYRKKLKEVWKPAV

SEQ ID NO: 31249 - protein, 978 aa, synthetic construct
  REGION 1..978: note = engineered CasX variant
QEGKRINKIRRRLVKDSNTKKAGKTGPMKTLLVRVMTPDLRERLENLRKKPENIPQPISNTSRANLNKLLTDYTEMKKAILHVYWEEFQKDPVGLMSRVAQPASKKIDQNKLKPEMDEKGNLTTAGFACSQCGQPLFVYKLEQVSEKGKAYTNYFGRCNVAEHEKLILLAQLKPEKDSDEAVTYSLGKFGQRALDFYSIHVTKESTHPVKPLAQIAGNRYASSPVGKALSDACMGTIASFLSKYQDIIIEHQKVVKGNQKRLESLRELAGKENLEYPSVTLPPQPHTSEGVDAYNEVIARVRMWVNLNLWQKLKLSRDDAKPLLRLKGFPSFPLVERQANEVDWWDMVCNVKKLINEKKEDGKVFWQNLAGYKRQEALRPYLSSEEDRKKGKKFARYQLGDLLLHLEKKHGEDWGKVYDEAWERIDKKVEGLSKHIKLEEERRSEDAQSKAALTDWLRAKASFVIEGLKEADKDEFCRCELKLQKWYGDLRGKPFAIEAENSILDISGFSKQYNCAFIWQKDGVKKLNLYLIINYFKGGKLRFKKIKPEAFEANRFYTVINKKSGEIVPMEVNFNFDDPNLIILPLAFGKRQGREFIWNDLLSLETGSLKLANGRVIEKTLYNRRTRQDEPALFVALTFERREVLDSSNIKPMNLIGVDRGENIPAVIALTDPEGCPLSRFKDSLGNPTHILRIGESYKEKQRTIQAKKEVEQRRAGGYSRKYASKAKNLADDMVRNTARDLLYYAVTQDAMLIFENLSRGFGRQGKRTFMAERQYTRMEDWLTAKLAYEGLPSKTYLSKTLAQYTSKTCSNCGFTITSADYDRVLEKLKKTATGWMTTINGKELKVEGQITYYNRYKRQNVVKDLSVELDRLSEESVNNDISSWTKGRSGEALSLLKKRFSHRPVQEKFVCLNCGFETHADEQAALNIARSWLFLRSQEYKKYQTNKTTGNTDKRAFVETWQSFYRKKLKEVWKPAV

SEQ ID NO: 31250 - protein, 978 aa, synthetic construct
  REGION 1..978: note = engineered CasX variant
QEGKRINKIRRRLVKDSNTKKAGKTGPMKTLLVRVMTPDLRERLENLRKKPENIPQPISNTSRANLNKLLTDYTEMKKAILHVYWEEFQKDPVGLMSRVAQPASKKIDQNKLKPEMDEKGNLTTAGFACSQCGQPLFVYKLEQVSEKGKAYTNYFGRCNVAEHEKLILLAQLKPEKDSDEAVTYSLGKFGQRALDFYSIHVTKESTHPVKPLAQIAGNRYASTPVGKALSDACMGTIASFLSKYQDIIIEHQKVVKGNQKRLESLRELAGKENLEYPSVTLPPQPHTSEGVDAYNEVIARVRMWVNLNLWQKLKLSRDDAKPLLRLKGFPSFPLVERQANEVDWWDMVCNVKKLINEKKEDGKVFWQNLAGYKRQEALRPYLSSEEDRKKGKKFARYQLGDLLLHLEKKHGEDWGKVYDEAWERIDKKVEGLSKHIKLEEERRSEDAQSKAALTDWLRAKASFVIEGLKEADKDEFCRCELKLQKWYGDLRGKPFAIEAENSILDISGFSKQYNCAFIWQKDGVKKLNLYLIINYFKGGKLRFKKIKPEAFEANRFYTVINKKSGEIVPMEVNFNFDDPNLIILPLAFGKRQGREFIWNDLLSLETGSLKLANGRVIEKTLYNRRTRQDEPALFVALTFERREVLDSSNIKPMNLIGVDRGENIPAVIALTDPEGCPLSRFKDSLGNPTHILRIGESYKEKQRTIQAKKEVEQRRAGGYSRKYASKAKNLADDMVRNTARDLLYYAVTQDAMLIFENLSRGFGRQGKRTFMAERQYTRMEDWLTAKLAYEGLPSKTYLSKTLAQYTSKTCSNCGFTITSADYDRVLEKLKKTATGWMTTINGKELKVEGQITYYNRYKRQNVVKDLSVELDRLSEESVNNDISSWTKGRSGEALSLLKKRFSHRPVQEKFVCLNCGFETHADEQAALNIARSWLFLRSQEYKKYQTNKTTGNTDKRAFVETWQSFYRKKLKEVWKPAV

SEQ ID NO: 31251 - protein, 978 aa, synthetic construct
  REGION 1..978: note = engineered CasX variant
QEGKRINKIRRRLVKDSNTKKAGKTGPMKTLLVRVMTPDLRERLENLRKKPENIPQPISNTSRANLNKLLTDYTEMKKAILHVYWEEFQKDPVGLMSRVAQPASKKIDQNKLKPEMDEKGNLTTAGFACSQCGQPLFVYKLEQVSEKGKAYTNYFGRCNVAEHEKLILLAQLKPEKDSDEAVTYSLGKFGQRALDFYSIHVTKESTHPVKPLAQIAGNRYASAPVGKALSDACMGTIASFLSKYQDIIIEHQKVVKGNQKRLESLRELAGKENLEYPSVTLPPQPHTSEGVDAYNEVIARVRMWVNLNLWQKLKLSRDDAKPLLRLKGFPSFPLVERQANEVDWWDMVCNVKKLINEKKEDGKVFWQNLAGYKRQEALRPYLSSEEDRKKGKKFARYQLGDLLLHLEKKHGEDWGKVYDEAWERIDKKVEGLSKHIKLEEERRSEDAQSKAALTDWLRAKASFVIEGLKEADKDEFCRCELKLQKWYGDLRGKPFAIEAENSILDISGFSKQYNCAFIWQKDGVKKLNLYLIINYFKGGKLRFKKIKPEAFEANRFYTVINKKSGEIVPMEVNFNFDDPNLIILPLAFGKRQGREFIWNDLLSLETGSLKLANGRVIEKTLYNRRTRQDEPALFVALTFERREVLDSSNIKPMNLIGVDRGENIPAVIALTDPEGCPLSRFKDSLGNPTHILRIGESYKEKQRTIQAKKEVEQRRAGGYSRKYASKAKNLADDMVRNTARDLLYYAVTQDAMLIFENLSRGFGRQGKRTFMAERQYTRMEDWLTAKLAYEGLPSKTYLSKTLAQYTSKTCSNCGFTITSADYDRVLEKLKKTATGWMTTINGKELKVEGQITYYNRYKRQNVVKDLSVELDRLSEESVNNDISSWTKGRSGEALSLLKKRFSHRPVQEKFVCLNCGFETHADEQAALNIARSWLFLRSQEYKKYQTNKTTGNTDKRAFVETWQSFYRKKLKEVWKPAV

SEQ ID NO: 31252 - protein, 978 aa, synthetic construct
  REGION 1..978: note = engineered CasX variant
QEGKRINKIRRRLVKDSNTKKAGKTGPMKTLLVRVMTPDLRERLENLRKKPENIPQPISNTSRANLNKLLTDYTEMKKAILHVYWEEFQKDPVGLMSRVAQPASKKIDQNKLKPEMDEKGNLTTAGFACSQCGQPLFVYKLEQVSEKGKAYTNYFGRCNVAEHEKLILLAQLKPEKDSDEAVTYSLGKFGQRALDFYSIHVTKESTHPVKPLAQIAGNRYASVPVGKALSDACMGTIASFLSKYQDIIIEHQKVVKGNQKRLESLRELAGKENLEYPSVTLPPQPHTSEGVDAYNEVIARVRMWVNLNLWQKLKLSRDDAKPLLRLKGFPSFPLVERQANEVDWWDMVCNVKKLINEKKEDGKVFWQNLAGYKRQEALRPYLSSEEDRKKGKKFARYQLGDLLLHLEKKHGEDWGKVYDEAWERIDKKVEGLSKHIKLEEERRSEDAQSKAALTDWLRAKASFVIEGLKEADKDEFCRCELKLQKWYGDLRGKPFAIEAENSILDISGFSKQYNCAFIWQKDGVKKLNLYLIINYFKGGKLRFKKIKPEAFEANRFYTVINKKSGEIVPMEVNFNFDDPNLIILPLAFGKRQGREFIWNDLLSLETGSLKLANGRVIEKTLYNRRTRQDEPALFVALTFERREVLDSSNIKPMNLIGVDRGENIPAVIALTDPEGCPLSRFKDSLGNPTHILRIGESYKEKQRTIQAKKEVEQRRAGGYSRKYASKAKNLADDMVRNTARDLLYYAVTQDAMLIFENLSRGFGRQGKRTFMAERQYTRMEDWLTAKLAYEGLPSKTYLSKTLAQYTSKTCSNCGFTITSADYDRVLEKLKKTATGWMTTINGKELKVEGQITYYNRYKRQNVVKDLSVELDRLSEESVNNDISSWTKGRSGEALSLLKKRFSHRPVQEKFVCLNCGFETHADEQAALNIARSWLFLRSQEYKKYQTNKTTGNTDKRAFVETWQSFYRKKLKEVWKPAV

SEQ ID NO: 31253 - protein, 978 aa, synthetic construct
  REGION 1..978: note = engineered CasX variant
QEGKRINKIRRRLVKDSNTKKAGKTGPMKTLLVRVMTPDLRERLENLRKKPENIPQPISNTSRANLNKLLTDYTEMKKAILHVYWEEFQKDPVGLMSRVAQPASKKIDQNKLKPEMDEKGNLTTAGFACSQCGQPLFVYKLEQVSEKGKAYTNYFGRCNVAEHEKLIKLAQLKPEKDSDEAVTYSLGKFGQRALDFYSIHVTKESTHPVKPLAQIAGNRYASGPVGKALSDACMGTIASFLSKYQDIIIEHQKVVKGNQKRLESLRELAGKENLEYPSVTLPPQPHTSEGVDAYNEVIARVRMWVNLNLWQKLKLSRDDAKPLLRLKGFPSFPLVERQANEVDWWDMVCNVKKLINEKKEDGKVFWQNLAGYKRQEALRPYLSSEEDRKKGKKFARYQLGDLLLHLEKKHGEDWGKVYDEAWERIDKKVEGLSKHIKLEEERRSEDAQSKAALTDWLRAKASFVIEGLKEADKDEFCRCELKLQKWYGDLRGKPFAIEAENSILDISGFSKQYNCAFIWQKDGVKKLNLYLIINYFKGGKLRFKKIKPEAFEANRFYTVINKKSGEIVPMEVNFNFDDPNLIILPLAFGKRQGREFIWNDLLSLETGSLKLANGRVIEKTLYNRRTRQDEPALFVALTFERREVLDSSNIKPMNLIGVDRGENIPAVIALTDPEGCPLSRFKDSLGNPTHILRIGESYKEKQRTIQAKKEVEQRRAGGYSRKYASKAKNLADDMVRNTARDLLYYAVTQDAMLIFENLSRGFGRQGKRTFMAERQYTRMEDWLTAKLAYEGLPSKTYLSKTLAQYTSKTCSNCGFTITSADYDRVLEKLKKTATGWMTTINGKELKVEGQITYYNRYKRQNVVKDLSVELDRLSEESVNNDISSWTKGRSGEALSLLKKRFSHRPVQEKFVCLNCGFETHADEQAALNIARSWLFLRSQEYKKYQTNKTTGNTDKRAFVETWQSFYRKKLKEVWKPAV

SEQ ID NO: 31254 - protein, 977 aa, synthetic construct
  REGION 1..977: note = engineered CasX variant
QEGKRINKIRRRLVKDSNTKKAGKTGPMKTLLVRVMTPDLRERLENLRKKPENIPQPISNTSRANLNKLLTDYTEMKKAILHVYWEEFQKDPVGLMSRVAQPASKKIDQNKLKPEMDEKGNLTTAGFACSQCGQPLFVYKLEQVSEKGKAYTNYFGRCNVAEHEKLILLAQLKPEKDSDEAVTYSLGKFGQRALDFYSIHVTKESTHPVKPLAQIAGNRYASPVGKALSDACMGTIASFLSKYQDIIIEHQKVVKGNQKRLESLRELAGKENLEYPSVTLPPQPHTSEGVDAYNEVIARVRMWVNLNLWQKLKLSRDDAKPLLRLKGFPSFPLVERQANEVDWWDMVCNVKKLINEKKEDGKVFWQNLAGYKRQEALRPYLSSEEDRKKGKKFARYQLGDLLLHLEKKHGEDWGKVYDEAWERIDKKVEGLSKHIKLEEERRSEDAQSKAALTDWLRAKASFVIEGLKEADKDEFCRCELKLQKWYGDLRGKPFAIEAENSILDISGFSKQYNCAFIWQKDGVKKLNLYLIINYFKGGKLRFKKIKPEAFEANRFYTVINKKSGEIVPMEVNFNFDDPNLIILPLAFGKRQGREFIWNDLLSLETGSLKLANGRVIEKTLYNRRTRQDEPALFVALTFERREVLDSSNIKPMNLIGVDRGENIPAVIALTDPEGCPLSRFKDSLGNPTHILRIGESYKEKQRTIQAKKEVEQRRAGGYSRKYASKAKNLADDMVRNTARDLLYYAVTQDAMLIFENLSRGFGRQGKRTFMAERQYTRMEDWLTAKLAYEGLPSKTYLSKTLAQYTSKTCSNCGFTITSADYDRVLEKLKKTATGWMTTINGKELKVEGQITYYNRYKRQNVVKDLSVELDRLSEESVNNDISSWTKGRSGEALSLLKKRFSHRPVQEKFVCLNCGFETHADEQAALNIARSWLFLRSQEYKKYQTNKTTGNTDKRAFVETWQSFYRKKLKEVWKPAV

SEQ ID NO: 31255 - protein, 978 aa, synthetic construct
  REGION 1..978: note = engineered CasX variant
QEGKRINKIRRRLVKDSNTKKAGKTGPMKTLLVRVMTPDLRERLENLRKKPENIPQPISNTSRANLNKLLTDYTEMKKAILHVYWEEFQKDPVGLMSRVAQPASKKIDQNKLKPEMDEKGNLTTAGFACSQCGQPLFVYKLEQVSEKGKAYTNYFGRCNVAEHEKLILLAQLKPEKDSDEAVTYSLGKFGQRALDFYSIHVTKESTHPVKPLAQIAGNRYASYPVGKALSDACMGTIASFLSKYQDIIIEHQKVVKGNQKRLESLRELAGKENLEYPSVTLPPQPHTKEGLDAYNEVIARVRMWVNLNLWQKLKLSRDDAKPLLRLKGFPSFPLVERQANEVDWWDMVCNVKKLINEKKEDGKVFWQNLAGYKRQEALRPYLSSEEDRKKGKKFARYQLGDLLLHLEKKHGEDWGKVYDEAWERIDKKVEGLSKHIKLEEERRSEDAQSKAALTDWLRAKASFVIEGLKEADKDEFCRCELKLQKWYGDLRGKPFAIEAENSILDISGFSKQYNCAFIWQKDGVKKLNLYLIINYFKGGKLRFKKIKPEAFEANRFYTVINKKSGEIVPMEVNFNFDDPNLIILPLAFGKRQGREFIWNDLLSLETGSLKLANGRVIEKTLYNRRTRQDEPALFVALTFERREVLDSSNIKPMNLIGVDRGENIPAVIALTDPEGCPLSRFKDSLGNPTHILRIGESYKEKQRTIQAKKEVEQRRAGGYSRKYASKAKNLADDMVRNTARDLLYYAVTQDAMLIFENLSRGFGRQGKRTFMAERQYTRMEDWLTAKLAYEGLPSKTYLSKTLAQYTSKTCSNCGFTITSADYDRVLEKLKKTATGWMTTINGKELKVEGQITYYNRYKRQNVVKDLSVELDRLSEESVNNDISSWTKGRSGEALSLLKKRFSHRPVQEKFVCLNCGFETHADEQAALNIARSWLFLRSQEYKKYQTNKTTGNTDKRAFVETWQSFYRKKLKEVWKPAV

SEQ ID NO: 31256 - protein, 978 aa, synthetic construct
  REGION 1..978: note = engineered CasX variant
QEGKRINKIRRRLVKDSNTKKAGKTGPMKTLLVRVMTPDLRERLENLRKKPENIPQPISNTSRANLNKLLTDYTEMKKAILHVYWEEFQKDPVGLMSRVAQPASKKIDQNKLKPEMDEKGNLTTAGFACSQCGQPLFVYKLEQVSEKGKAYTNYFGRCNVAEHEKLILLAQLKPEKDSDEAVTYSLGKFGQRALDFYSIHVTKESTHPVKPLAQIAGNRYASHPVGKALSDACMGTIASFLSKYQDIIIEHQKVVKGNQKRLESLRELAGKENLEYPSVTLPPQPHTKEGLDAYNEVIARVRMWVNLNLWQKLKLSRDDAKPLLRLKGFPSFPLVERQANEVDWWDMVCNVKKLINEKKEDGKVFWQNLAGYKRQEALRPYLSSEEDRKKGKKFARYQLGDLLLHLEKKHGEDWGKVYDEAWERIDKKVEGLSKHIKLEEERRSEDAQSKAALTDWLRAKASFVIEGLKEADKDEFCRCELKLQKWYGDLRGKPFAIEAENSILDISGFSKQYNCAFIWQKDGVKKLNLYLIINYFKGGKLRFKKIKPEAFEANRFYTVINKKSGEIVPMEVNFNFDDPNLIILPLAFGKRQGREFIWNDLLSLETGSLKLANGRVIEKTLYNRRTRQDEPALFVALTFERREVLDSSNIKPMNLIGVDRGENIPAVIALTDPEGCPLSRFKDSLGNPTHILRIGESYKEKQRTIQAKKEVEQRRAGGYSRKYASKAKNLADDMVRNTARDLLYYAVTQDAMLIFENLSRGFGRQGKRTFMAERQYTRMEDWLTAKLAYEGLPSKTYLSKTLAQYTSKTCSNCGFTITSADYDRVLEKLKKTATGWMTTINGKELKVEGQITYYNRYKRQNVVKDLSVELDRLSEESVNNDISSWTKGRSGEALSLLKKRFSHRPVQEKFVCLNCGFETHADEQAALNIARSWLFLRSQEYKKYQTNKTTGNTDKRAFVETWQSFYRKKLKEVWKPAV

SEQ ID NO: 31257 - protein, 978 aa, synthetic construct
  REGION 1..978: note = engineered CasX variant
QEGKRINKIRRRLVKDSNTKKAGKTGPMKTLLVRVMTPDLRERLENLRKKPENIPQPISNTSRANLNKLLTDYTEMKKAILHVYWEEFQKDPVGLMSRVAQPASKKIDQNKLKPEMDEKGNLTTAGFACSQCGQPLFVYKLEQVSEKGKAYTNYFGRCNVAEHEKLILLAQLKPEKDSDEAVTYSLGKFGQRALDFYSIHVTKESTHPVKPLAQIAGNRYASSPVGKALSDACMGTIASFLSKYQDIIIEHQKVVKGNQKRLESLRELAGKENLEYPSVTLPPQPHTKEGLDAYNEVIARVRMWVNLNLWQKLKLSRDDAKPLLRLKGFPSFPLVERQANEVDWWDMVCNVKKLINEKKEDGKVFWQNLAGYKRQEALRPYLSSEEDRKKGKKFARYQLGDLLLHLEKKHGEDWGKVYDEAWERIDKKVEGLSKHIKLEEERRSEDAQSKAALTDWLRAKASFVIEGLKEADKDEFCRCELKLQKWYGDLRGKPFAIEAENSILDISGFSKQYNCAFIWQKDGVKKLNLYLIINYFKGGKLRFKKIKPEAFEANRFYTVINKKSGEIVPMEVNFNFDDPNLIILPLAFGKRQGREFIWNDLLSLETGSLKLANGRVIEKTLYNRRTRQDEPALFVALTFERREVLDSSNIKPMNLIGVDRGENIPAVIALTDPEGCPLSRFKDSLGNPTHILRIGESYKEKQRTIQAKKEVEQRRAGGYSRKYASKAKNLADDMVRNTARDLLYYAVTQDAMLIFENLSRGFGRQGKRTFMAERQYTRMEDWLTAKLAYEGLPSKTYLSKTLAQYTSKTCSNCGFTITSADYDRVLEKLKKTATGWMTTINGKELKVEGQITYYNRYKRQNVVKDLSVELDRLSEESVNNDISSWTKGRSGEALSLLKKRFSHRPVQEKFVCLNCGFETHADEQAALNIARSWLFLRSQEYKKYQTNKTTGNTDKRAFVETWQSFYRKKLKEVWKPAV

SEQ ID NO: 31258 - protein, 978 aa, synthetic construct
  REGION 1..978: note = engineered CasX variant
QEGKRINKIRRRLVKDSNTKKAGKTGPMKTLLVRVMTPDLRERLENLRKKPENIPQPISNTSRANLNKLLTDYTEMKKAILHVYWEEFQKDPVGLMSRVAQPASKKIDQNKLKPEMDEKGNLTTAGFACSQCGQPLFVYKLEQVSEKGKAYTNYFGRCNVAEHEKLILLAQLKPEKDSDEAVTYSLGKFGQRALDFYSIHVTKESTHPVKPLAQIAGNRYASTPVGKALSDACMGTIASFLSKYQDIIIEHQKVVKGNQKRLESLRELAGKENLEYPSVTLPPQPHTKEGLDAYNEVIARVRMWVNLNLWQKLKLSRDDAKPLLRLKGFPSFPLVERQANEVDWWDMVCNVKKLINEKKEDGKVFWQNLAGYKRQEALRPYLSSEEDRKKGKKFARYQLGDLLLHLEKKHGEDWGKVYDEAWERIDKKVEGLSKHIKLEEERRSEDAQSKAALTDWLRAKASFVIEGLKEADKDEFCRCELKLQKWYGDLRGKPFAIEAENSILDISGFSKQYNCAFIWQKDGVKKLNLYLIINYFKGGKLRFKKIKPEAFEANRFYTVINKKSGEIVPMEVNFNFDDPNLIILPLAFGKRQGREFIWNDLLSLETGSLKLANGRVIEKTLYNRRTRQDEPALFVALTFERREVLDSSNIKPMNLIGVDRGENIPAVIALTDPEGCPLSRFKDSLGNPTHILRIGESYKEKQRTIQAKKEVEQRRAGGYSRKYASKAKNLADDMVRNTARDLLYYAVTQDAMLIFENLSRGFGRQGKRTFMAERQYTRMEDWLTAKLAYEGLPSKTYLSKTLAQYTSKTCSNCGFTITSADYDRVLEKLKKTATGWMTTINGKELKVEGQITYYNRYKRQNVVKDLSVELDRLSEESVNNDISSWTKGRSGEALSLLKKRFSHRPVQEKFVCLNCGFETHADEQAALNIARSWLFLRSQEYKKYQTNKTTGNTDKRAFVETWQSFYRKKLKEVWKPAV

SEQ ID NO: 31259 - protein, 978 aa, synthetic construct
  REGION 1..978: note = engineered CasX variant
QEGKRINKIRRRLVKDSNTKKAGKTGPMKTLLVRVMTPDLRERLENLRKKPENIPQPISNTSRANLNKLLTDYTEMKKAILHVYWEEFQKDPVGLMSRVAQPASKKIDQNKLKPEMDEKGNLTTAGFACSQCGQPLFVYKLEQVSEKGKAYTNYFGRCNVAEHEKLILLAQLKPEKDSDEAVTYSLGKFGQRALDFYSIHVTKESTHPVKPLAQIAGNRYASAPVGKALSDACMGTIASFLSKYQDIIIEHQKVVKGNQKRLESLRELAGKENLEYPSVTLPPQPHTKEGLDAYNEVIARVRMWVNLNLWQKLKLSRDDAKPLLRLKGFPSFPLVERQANEVDWWDMVCNVKKLINEKKEDGKVFWQNLAGYKRQEALRPYLSSEEDRKKGKKFARYQLGDLLLHLEKKHGEDWGKVYDEAWERIDKKVEGLSKHIKLEEERRSEDAQSKAALTDWLRAKASFVIEGLKEADKDEFCRCELKLQKWYGDLRGKPFAIEAENSILDISGFSKQYNCAFIWQKDGVKKLNLYLIINYFKGGKLRFKKIKPEAFEANRFYTVINKKSGEIVPMEVNFNFDDPNLIILPLAFGKRQGREFIWNDLLSLETGSLKLANGRVIEKTLYNRRTRQDEPALFVALTFERREVLDSSNIKPMNLIGVDRGENIPAVIALTDPEGCPLSRFKDSLGNPTHILRIGESYKEKQRTIQAKKEVEQRRAGGYSRKYASKAKNLADDMVRNTARDLLYYAVTQDAMLIFENLSRGFGRQGKRTFMAERQYTRMEDWLTAKLAYEGLPSKTYLSKTLAQYTSKTCSNCGFTITSADYDRVLEKLKKTATGWMTTINGKELKVEGQITYYNRYKRQNVVKDLSVELDRLSEESVNNDISSWTKGRSGEALSLLKKRFSHRPVQEKFVCLNCGFETHADEQAALNIARSWLFLRSQEYKKYQTNKTTGNTDKRAFVETWQSFYRKKLKEVWKPAV

SEQ ID NO: 31260 - protein, 978 aa, synthetic construct
  REGION 1..978: note = engineered CasX variant
QEGKRINKIRRRLVKDSNTKKAGKTGPMKTLLVRVMTPDLRERLENLRKKPENIPQPISNTSRANLNKLLTDYTEMKKAILHVYWEEFQKDPVGLMSRVAQPASKKIDQNKLKPEMDEKGNLTTAGFACSQCGQPLFVYKLEQVSEKGKAYTNYFGRCNVAEHEKLILLAQLKPEKDSDEAVTYSLGKFGQRALDFYSIHVTKESTHPVKPLAQIAGNRYASVPVGKALSDACMGTIASFLSKYQDIIIEHQKVVKGNQKRLESLRELAGKENLEYPSVTLPPQPHTKEGLDAYNEVIARVRMWVNLNLWQKLKLSRDDAKPLLRLKGFPSFPLVERQANEVDWWDMVCNVKKLINEKKEDGKVFWQNLAGYKRQEALRPYLSSEEDRKKGKKFARYQLGDLLLHLEKKHGEDWGKVYDEAWERIDKKVEGLSKHIKLEEERRSEDAQSKAALTDWLRAKASFVIEGLKEADKDEFCRCELKLQKWYGDLRGKPFAIEAENSILDISGFSKQYNCAFIWQKDGVKKLNLYLIINYFKGGKLRFKKIKPEAFEANRFYTVINKKSGEIVPMEVNFNFDDPNLIILPLAFGKRQGREFIWNDLLSLETGSLKLANGRVIEKTLYNRRTRQDEPALFVALTFERREVLDSSNIKPMNLIGVDRGENIPAVIALTDPEGCPLSRFKDSLGNPTHILRIGESYKEKQRTIQAKKEVEQRRAGGYSRKYASKAKNLADDMVRNTARDLLYYAVTQDAMLIFENLSRGFGRQGKRTFMAERQYTRMEDWLTAKLAYEGLPSKTYLSKTLAQYTSKTCSNCGFTITSADYDRVLEKLKKTATGWMTTINGKELKVEGQITYYNRYKRQNVVKDLSVELDRLSEESVNNDISSWTKGRSGEALSLLKKRFSHRPVQEKFVCLNCGFETHADEQAALNIARSWLFLRSQEYKKYQTNKTTGNTDKRAFVETWQSFYRKKLKEVWKPAV

SEQ ID NO: 31261 - protein, 978 aa, synthetic construct
  REGION 1..978: note = engineered CasX variant
QEGKRINKIRRRLVKDSNTKKAGKTGPMKTLLVRVMTPDLRERLENLRKKPENIPQPISNTSRANLNKLLTDYTEMKKAILHVYWEEFQKDPVGLMSRVAQPASKKIDQNKLKPEMDEKGNLTTAGFACSQCGQPLFVYKLEQVSEKGKAYTNYFGRCNVAEHEKLIKLAQLKPEKDSDEAVTYSLGKFGQRALDFYSIHVTKESTHPVKPLAQIAGNRYASGPVGKALSDACMGTIASFLSKYQDIIIEHQKVVKGNQKRLESLRELAGKENLEYPSVTLPPQPHTKEGLDAYNEVIARVRMWVNLNLWQKLKLSRDDAKPLLRLKGFPSFPLVERQANEVDWWDMVCNVKKLINEKKEDGKVFWQNLAGYKRQEALRPYLSSEEDRKKGKKFARYQLGDLLLHLEKKHGEDWGKVYDEAWERIDKKVEGLSKHIKLEEERRSEDAQSKAALTDWLRAKASFVIEGLKEADKDEFCRCELKLQKWYGDLRGKPFAIEAENSILDISGFSKQYNCAFIWQKDGVKKLNLYLIINYFKGGKLRFKKIKPEAFEANRFYTVINKKSGEIVPMEVNFNFDDPNLIILPLAFGKRQGREFIWNDLLSLETGSLKLANGRVIEKTLYNRRTRQDEPALFVALTFERREVLDSSNIKPMNLIGVDRGENIPAVIALTDPEGCPLSRFKDSLGNPTHILRIGESYKEKQRTIQAKKEVEQRRAGGYSRKYASKAKNLADDMVRNTARDLLYYAVTQDAMLIFENLSRGFGRQGKRTFMAERQYTRMEDWLTAKLAYEGLPSKTYLSKTLAQYTSKTCSNCGFTITSADYDRVLEKLKKTATGWMTTINGKELKVEGQITYYNRYKRQNVVKDLSVELDRLSEESVNNDISSWTKGRSGEALSLLKKRFSHRPVQEKFVCLNCGFETHADEQAALNIARSWLFLRSQEYKKYQTNKTTGNTDKRAFVETWQSFYRKKLKEVWKPAV

SEQ ID NO: 31262 - protein, 977 aa, synthetic construct
  REGION 1..977: note = engineered CasX variant
QEGKRINKIRRRLVKDSNTKKAGKTGPMKTLLVRVMTPDLRERLENLRKKPENIPQPISNTSRANLNKLLTDYTEMKKAILHVYWEEFQKDPVGLMSRVAQPASKKIDQNKLKPEMDEKGNLTTAGFACSQCGQPLFVYKLEQVSEKGKAYTNYFGRCNVAEHEKLILLAQLKPEKDSDEAVTYSLGKFGQRALDFYSIHVTKESTHPVKPLAQIAGNRYASPVGKALSDACMGTIASFLSKYQDIIIEHQKVVKGNQKRLESLRELAGKENLEYPSVTLPPQPHTKEGLDAYNEVIARVRMWVNLNLWQKLKLSRDDAKPLLRLKGFPSFPLVERQANEVDWWDMVCNVKKLINEKKEDGKVFWQNLAGYKRQEALRPYLSSEEDRKKGKKFARYQLGDLLLHLEKKHGEDWGKVYDEAWERIDKKVEGLSKHIKLEEERRSEDAQSKAALTDWLRAKASFVIEGLKEADKDEFCRCELKLQKWYGDLRGKPFAIEAENSILDISGFSKQYNCAFIWQKDGVKKLNLYLIINYFKGGKLRFKKIKPEAFEANRFYTVINKKSGEIVPMEVNFNFDDPNLIILPLAFGKRQGREFIWNDLLSLETGSLKLANGRVIEKTLYNRRTRQDEPALFVALTFERREVLDSSNIKPMNLIGVDRGENIPAVIALTDPEGCPLSRFKDSLGNPTHILRIGESYKEKQRTIQAKKEVEQRRAGGYSRKYASKAKNLADDMVRNTARDLLYYAVTQDAMLIFENLSRGFGRQGKRTFMAERQYTRMEDWLTAKLAYEGLPSKTYLSKTLAQYTSKTCSNCGFTITSADYDRVLEKLKKTATGWMTTINGKELKVEGQITYYNRYKRQNVVKDLSVELDRLSEESVNNDISSWTKGRSGEALSLLKKRFSHRPVQEKFVCLNCGFETHADEQAALNIARSWLFLRSQEYKKYQTNKTTGNTDKRAFVETWQSFYRKKLKEVWKPAV

SEQ ID NO: 31263 - protein, 978 aa, synthetic construct
  REGION 1..978: note = engineered CasX variant
QEGKRINKIRRRLVKDSNTKKAGKTGPMKTLLVRVMTPDLRERLENLRKKPENIPQPISNTSRANLNKLLTDYTEMKKAILHVYWEEFQKDPVGLMSRVAQPASKKIDQNKLKPEMDEKGNLTTAGFACSQCGQPLFVYKLEQVSEKGKAYTNYFGRCNVAEHEKLILLAQLKPEKDSDEAVTYSLGKFGQRALDFYSIHVTKESTHPVKPLAQIAGNRYASYPVGKALSDACMGTIASFLSKYQDIIIEHQKVVKGNQKRLESLRELAGKENLEYPSVTLPPQPHTKEGVDAYNEVIARVRTWVNLNLWQKLKLSRDDAKPLLRLKGFPSFPLVERQANEVDWWDMVCNVKKLINEKKEDGKVFWQNLAGYKRQEALRPYLSSEEDRKKGKKFARYQLGDLLLHLEKKHGEDWGKVYDEAWERIDKKVEGLSKHIKLEEERRSEDAQSKAALTDWLRAKASFVIEGLKEADKDEFCRCELKLQKWYGDLRGKPFAIEAENSILDISGFSKQYNCAFIWQKDGVKKLNLYLIINYFKGGKLRFKKIKPEAFEANRFYTVINKKSGEIVPMEVNFNFDDPNLIILPLAFGKRQGREFIWNDLLSLETGSLKLANGRVIEKTLYNRRTRQDEPALFVALTFERREVLDSSNIKPMNLIGVDRGENIPAVIALTDPEGCPLSRFKDSLGNPTHILRIGESYKEKQRTIQAKKEVEQRRAGGYSRKYASKAKNLADDMVRNTARDLLYYAVTQDAMLIFENLSRGFGRQGKRTFMAERQYTRMEDWLTAKLAYEGLPSKTYLSKTLAQYTSKTCSNCGFTITSADYDRVLEKLKKTATGWMTTINGKELKVEGQITYYNRYKRQNVVKDLSVELDRLSEESVNNDISSWTKGRSGEALSLLKKRFSHRPVQEKFVCLNCGFETHADEQAALNIARSWLFLRSQEYKKYQTNKTTGNTDKRAFVETWQSFYRKKLKEVWKPAV

SEQ ID NO: 31264 - protein, 978 aa, synthetic construct
  REGION 1..978: note = engineered CasX variant
QEGKRINKIRRRLVKDSNTKKAGKTGPMKTLLVRVMTPDLRERLENLRKKPENIPQPISNTSRANLNKLLTDYTEMKKAILHVYWEEFQKDPVGLMSRVAQPASKKIDQNKLKPEMDEKGNLTTAGFACSQCGQPLFVYKLEQVSEKGKAYTNYFGRCNVAEHEKLILLAQLKPEKDSDEAVTYSLGKFGQRALDFYSIHVTKESTHPVKPLAQIAGNRYASHPVGKALSDACMGTIASFLSKYQDIIIEHQKVVKGNQKRLESLRELAGKENLEYPSVTLPPQPHTKEGVDAYNEVIARVRTWVNLNLWQKLKLSRDDAKPLLRLKGFPSFPLVERQANEVDWWDMVCNVKKLINEKKEDGKVFWQNLAGYKRQEALRPYLSSEEDRKKGKKFARYQLGDLLLHLEKKHGEDWGKVYDEAWERIDKKVEGLSKHIKLEEERRSEDAQSKAALTDWLRAKASFVIEGLKEADKDEFCRCELKLQKWYGDLRGKPFAIEAENSILDISGFSKQYNCAFIWQKDGVKKLNLYLIINYFKGGKLRFKKIKPEAFEANRFYTVINKKSGEIVPMEVNFNFDDPNLIILPLAFGKRQGREFIWNDLLSLETGSLKLANGRVIEKTLYNRRTRQDEPALFVALTFERREVLDSSNIKPMNLIGVDRGENIPAVIALTDPEGCPLSRFKDSLGNPTHILRIGESYKEKQRTIQAKKEVEQRRAGGYSRKYASKAKNLADDMVRNTARDLLYYAVTQDAMLIFENLSRGFGRQGKRTFMAERQYTRMEDWLTAKLAYEGLPSKTYLSKTLAQYTSKTCSNCGFTITSADYDRVLEKLKKTATGWMTTINGKELKVEGQITYYNRYKRQNVVKDLSVELDRLSEESVNNDISSWTKGRSGEALSLLKKRFSHRPVQEKFVCLNCGFETHADEQAALNIARSWLFLRSQEYKKYQTNKTTGNTDKRAFVETWQSFYRKKLKEVWKPAV

SEQ ID NO: 31265 - protein, 978 aa, synthetic construct
  REGION 1..978: note = engineered CasX variant
QEGKRINKIRRRLVKDSNTKKAGKTGPMKTLLVRVMTPDLRERLENLRKKPENIPQPISNTSRANLNKLLTDYTEMKKAILHVYWEEFQKDPVGLMSRVAQPASKKIDQNKLKPEMDEKGNLTTAGFACSQCGQPLFVYKLEQVSEKGKAYTNYFGRCNVAEHEKLILLAQLKPEKDSDEAVTYSLGKFGQRALDFYSIHVTKESTHPVKPLAQIAGNRYASSPVGKALSDACMGTIASFLSKYQDIIIEHQKVVKGNQKRLESLRELAGKENLEYPSVTLPPQPHTKEGVDAYNEVIARVRTWVNLNLWQKLKLSRDDAKPLLRLKGFPSFPLVERQANEVDWWDMVCNVKKLINEKKEDGKVFWQNLAGYKRQEALRPYLSSEEDRKKGKKFARYQLGDLLLHLEKKHGEDWGKVYDEAWERIDKKVEGLSKHIKLEEERRSEDAQSKAALTDWLRAKASFVIEGLKEADKDEFCRCELKLQKWYGDLRGKPFAIEAENSILDISGFSKQYNCAFIWQKDGVKKLNLYLIINYFKGGKLRFKKIKPEAFEANRFYTVINKKSGEIVPMEVNFNFDDPNLIILPLAFGKRQGREFIWNDLLSLETGSLKLANGRVIEKTLYNRRTRQDEPALFVALTFERREVLDSSNIKPMNLIGVDRGENIPAVIALTDPEGCPLSRFKDSLGNPTHILRIGESYKEKQRTIQAKKEVEQRRAGGYSRKYASKAKNLADDMVRNTARDLLYYAVTQDAMLIFENLSRGFGRQGKRTFMAERQYTRMEDWLTAKLAYEGLPSKTYLSKTLAQYTSKTCSNCGFTITSADYDRVLEKLKKTATGWMTTINGKELKVEGQITYYNRYKRQNVVKDLSVELDRLSEESVNNDISSWTKGRSGEALSLLKKRFSHRPVQEKFVCLNCGFETHADEQAALNIARSWLFLRSQEYKKYQTNKTTGNTDKRAFVETWQSFYRKKLKEVWKPAV

SEQ ID NO: 31266 - protein, 978 aa, synthetic construct
  REGION 1..978: note = engineered CasX variant
QEGKRINKIRRRLVKDSNTKKAGKTGPMKTLLVRVMTPDLRERLENLRKKPENIPQPISNTSRANLNKLLTDYTEMKKAILHVYWEEFQKDPVGLMSRVAQPASKKIDQNKLKPEMDEKGNLTTAGFACSQCGQPLFVYKLEQVSEKGKAYTNYFGRCNVAEHEKLILLAQLKPEKDSDEAVTYSLGKFGQRALDFYSIHVTKESTHPVKPLAQIAGNRYASTPVGKALSDACMGTIASFLSKYQDIIIEHQKVVKGNQKRLESLRELAGKENLEYPSVTLPPQPHTKEGVDAYNEVIARVRTWVNLNLWQKLKLSRDDAKPLLRLKGFPSFPLVERQANEVDWWDMVCNVKKLINEKKEDGKVFWQNLAGYKRQEALRPYLSSEEDRKKGKKFARYQLGDLLLHLEKKHGEDWGKVYDEAWERIDKKVEGLSKHIKLEEERRSEDAQSKAALTDWLRAKASFVIEGLKEADKDEFCRCELKLQKWYGDLRGKPFAIEAENSILDISGFSKQYNCAFIWQKDGVKKLNLYLIINYFKGGKLRFKKIKPEAFEANRFYTVINKKSGEIVPMEVNFNFDDPNLIILPLAFGKRQGREFIWNDLLSLETGSLKLANGRVIEKTLYNRRTRQDEPALFVALTFERREVLDSSNIKPMNLIGVDRGENIPAVIALTDPEGCPLSRFKDSLGNPTHILRIGESYKEKQRTIQAKKEVEQRRAGGYSRKYASKAKNLADDMVRNTARDLLYYAVTQDAMLIFENLSRGFGRQGKRTFMAERQYTRMEDWLTAKLAYEGLPSKTYLSKTLAQYTSKTCSNCGFTITSADYDRVLEKLKKTATGWMTTINGKELKVEGQITYYNRYKRQNVVKDLSVELDRLSEESVNNDISSWTKGRSGEALSLLKKRFSHRPVQEKFVCLNCGFETHADEQAALNIARSWLFLRSQEYKKYQTNKTTGNTDKRAFVETWQSFYRKKLKEVWKPAV

SEQ ID NO: 31267 - protein, 978 aa, synthetic construct
  REGION 1..978: note = engineered CasX variant
QEGKRINKIRRRLVKDSNTKKAGKTGPMKTLLVRVMTPDLRERLENLRKKPENIPQPISNTSRANLNKLLTDYTEMKKAILHVYWEEFQKDPVGLMSRVAQPASKKIDQNKLKPEMDEKGNLTTAGFACSQCGQPLFVYKLEQVSEKGKAYTNYFGRCNVAEHEKLILLAQLKPEKDSDEAVTYSLGKFGQRALDFYSIHVTKESTHPVKPLAQIAGNRYASAPVGKALSDACMGTIASFLSKYQDIIIEHQKVVKGNQKRLESLRELAGKENLEYPSVTLPPQPHTKEGVDAYNEVIARVRTWVNLNLWQKLKLSRDDAKPLLRLKGFPSFPLVERQANEVDWWDMVCNVKKLINEKKEDGKVFWQNLAGYKRQEALRPYLSSEEDRKKGKKFARYQLGDLLLHLEKKHGEDWGKVYDEAWERIDKKVEGLSKHIKLEEERRSEDAQSKAALTDWLRAKASFVIEGLKEADKDEFCRCELKLQKWYGDLRGKPFAIEAENSILDISGFSKQYNCAFIWQKDGVKKLNLYLIINYFKGGKLRFKKIKPEAFEANRFYTVINKKSGEIVPMEVNFNFDDPNLIILPLAFGKRQGREFIWNDLLSLETGSLKLANGRVIEKTLYNRRTRQDEPALFVALTFERREVLDSSNIKPMNLIGVDRGENIPAVIALTDPEGCPLSRFKDSLGNPTHILRIGESYKEKQRTIQAKKEVEQRRAGGYSRKYASKAKNLADDMVRNTARDLLYYAVTQDAMLIFENLSRGFGRQGKRTFMAERQYTRMEDWLTAKLAYEGLPSKTYLSKTLAQYTSKTCSNCGFTITSADYDRVLEKLKKTATGWMTTINGKELKVEGQITYYNRYKRQNVVKDLSVELDRLSEESVNNDISSWTKGRSGEALSLLKKRFSHRPVQEKFVCLNCGFETHADEQAALNIARSWLFLRSQEYKKYQTNKTTGNTDKRAFVETWQSFYRKKLKEVWKPAV

SEQ ID NO: 31268 - protein, 978 aa, synthetic construct
  REGION 1..978: note = engineered CasX variant
QEGKRINKIRRRLVKDSNTKKAGKTGPMKTLLVRVMTPDLRERLENLRKKPENIPQPISNTSRANLNKLLTDYTEMKKAILHVYWEEFQKDPVGLMSRVAQPASKKIDQNKLKPEMDEKGNLTTAGFACSQCGQPLFVYKLEQVSEKGKAYTNYFGRCNVAEHEKLILLAQLKPEKDSDEAVTYSLGKFGQRALDFYSIHVTKESTHPVKPLAQIAGNRYASVPVGKALSDACMGTIASFLSKYQDIIIEHQKVVKGNQKRLESLRELAGKENLEYPSVTLPPQPHTKEGVDAYNEVIARVRTWVNLNLWQKLKLSRDDAKPLLRLKGFPSFPLVERQANEVDWWDMVCNVKKLINEKKEDGKVFWQNLAGYKRQEALRPYLSSEEDRKKGKKFARYQLGDLLLHLEKKHGEDWGKVYDEAWERIDKKVEGLSKHIKLEEERRSEDAQSKAALTDWLRAKASFVIEGLKEADKDEFCRCELKLQKWYGDLRGKPFAIEAENSILDISGFSKQYNCAFIWQKDGVKKLNLYLIINYFKGGKLRFKKIKPEAFEANRFYTVINKKSGEIVPMEVNFNFDDPNLIILPLAFGKRQGREFIWNDLLSLETGSLKLANGRVIEKTLYNRRTRQDEPALFVALTFERREVLDSSNIKPMNLIGVDRGENIPAVIALTDPEGCPLSRFKDSLGNPTHILRIGESYKEKQRTIQAKKEVEQRRAGGYSRKYASKAKNLADDMVRNTARDLLYYAVTQDAMLIFENLSRGFGRQGKRTFMAERQYTRMEDWLTAKLAYEGLPSKTYLSKTLAQYTSKTCSNCGFTITSADYDRVLEKLKKTATGWMTTINGKELKVEGQITYYNRYKRQNVVKDLSVELDRLSEESVNNDISSWTKGRSGEALSLLKKRFSHRPVQEKFVCLNCGFETHADEQAALNIARSWLFLRSQEYKKYQTNKTTGNTDKRAFVETWQSFYRKKLKEVWKPAV

SEQ ID NO: 31269 - protein, 978 aa, synthetic construct
  REGION 1..978: note = engineered CasX variant
QEGKRINKIRRRLVKDSNTKKAGKTGPMKTLLVRVMTPDLRERLENLRKKPENIPQPISNTSRANLNKLLTDYTEMKKAILHVYWEEFQKDPVGLMSRVAQPASKKIDQNKLKPEMDEKGNLTTAGFACSQCGQPLFVYKLEQVSEKGKAYTNYFGRCNVAEHEKLIKLAQLKPEKDSDEAVTYSLGKFGQRALDFYSIHVTKESTHPVKPLAQIAGNRYASGPVGKALSDACMGTIASFLSKYQDIIIEHQKVVKGNQKRLESLRELAGKENLEYPSVTLPPQPHTKEGVDAYNEVIARVRTWVNLNLWQKLKLSRDDAKPLLRLKGFPSFPLVERQANEVDWWDMVCNVKKLINEKKEDGKVFWQNLAGYKRQEALRPYLSSEEDRKKGKKFARYQLGDLLLHLEKKHGEDWGKVYDEAWERIDKKVEGLSKHIKLEEERRSEDAQSKAALTDWLRAKASFVIEGLKEADKDEFCRCELKLQKWYGDLRGKPFAIEAENSILDISGFSKQYNCAFIWQKDGVKKLNLYLIINYFKGGKLRFKKIKPEAFEANRFYTVINKKSGEIVPMEVNFNFDDPNLIILPLAFGKRQGREFIWNDLLSLETGSLKLANGRVIEKTLYNRRTRQDEPALFVALTFERREVLDSSNIKPMNLIGVDRGENIPAVIALTDPEGCPLSRFKDSLGNPTHILRIGESYKEKQRTIQAKKEVEQRRAGGYSRKYASKAKNLADDMVRNTARDLLYYAVTQDAMLIFENLSRGFGRQGKRTFMAERQYTRMEDWLTAKLAYEGLPSKTYLSKTLAQYTSKTCSNCGFTITSADYDRVLEKLKKTATGWMTTINGKELKVEGQITYYNRYKRQNVVKDLSVELDRLSEESVNNDISSWTKGRSGEALSLLKKRFSHRPVQEKFVCLNCGFETHADEQAALNIARSWLFLRSQEYKKYQTNKTTGNTDKRAFVETWQSFYRKKLKEVWKPAV

SEQ ID NO: 31270 - protein, 977 aa, synthetic construct
  REGION 1..977: note = engineered CasX variant
QEGKRINKIRRRLVKDSNTKKAGKTGPMKTLLVRVMTPDLRERLENLRKKPENIPQPISNTSRANLNKLLTDYTEMKKAILHVYWEEFQKDPVGLMSRVAQPASKKIDQNKLKPEMDEKGNLTTAGFACSQCGQPLFVYKLEQVSEKGKAYTNYFGRCNVAEHEKLILLAQLKPEKDSDEAVTYSLGKFGQRALDFYSIHVTKESTHPVKPLAQIAGNRYASPVGKALSDACMGTIASFLSKYQDIIIEHQKVVKGNQKRLESLRELAGKENLEYPSVTLPPQPHTKEGVDAYNEVIARVRTWVNLNLWQKLKLSRDDAKPLLRLKGFPSFPLVERQANEVDWWDMVCNVKKLINEKKEDGKVFWQNLAGYKRQEALRPYLSSEEDRKKGKKFARYQLGDLLLHLEKKHGEDWGKVYDEAWERIDKKVEGLSKHIKLEEERRSEDAQSKAALTDWLRAKASFVIEGLKEADKDEFCRCELKLQKWYGDLRGKPFAIEAENSILDISGFSKQYNCAFIWQKDGVKKLNLYLIINYFKGGKLRFKKIKPEAFEANRFYTVINKKSGEIVPMEVNFNFDDPNLIILPLAFGKRQGREFIWNDLLSLETGSLKLANGRVIEKTLYNRRTRQDEPALFVALTFERREVLDSSNIKPMNLIGVDRGENIPAVIALTDPEGCPLSRFKDSLGNPTHILRIGESYKEKQRTIQAKKEVEQRRAGGYSRKYASKAKNLADDMVRNTARDLLYYAVTQDAMLIFENLSRGFGRQGKRTFMAERQYTRMEDWLTAKLAYEGLPSKTYLSKTLAQYTSKTCSNCGFTITSADYDRVLEKLKKTATGWMTTINGKELKVEGQITYYNRYKRQNVVKDLSVELDRLSEESVNNDISSWTKGRSGEALSLLKKRFSHRPVQEKFVCLNCGFETHADEQAALNIARSWLFLRSQEYKKYQTNKTTGNTDKRAFVETWQSFYRKKLKEVWKPAV

SEQ ID NO: 31271 - protein, 978 aa, synthetic construct
  REGION 1..978: note = engineered CasX variant
QEGKRINKIRRRLVKDSNTKKAGKTGPMKTLLVRVMTPDLRERLENLRKKPENIPQPISNTSRANLNKLLTDYTEMKKAILHVYWEEFQKDPVGLMSRVAQPASKKIDQNKLKPEMDEKGNLTTAGFACSQCGQPLFVYKLEQVSEKGKAYTNYFGRCNVAEHEKLILLAQLKPEKDSDEAVTYSLGKFGQRALDFYSIHVTKESTHPVKPLAQIAGNRYASYPVGKALSDACMGTIASFLSKYQDIIIEHQKVVKGNQKRLESLRELAGKENLEYPSVTLPPQPHTKEGVDAYNEVIARVRWWVNLNLWQKLKLSRDDAKPLLRLKGFPSFPLVERQANEVDWWDMVCNVKKLINEKKEDGKVFWQNLAGYKRQEALRPYLSSEEDRKKGKKFARYQLGDLLLHLEKKHGEDWGKVYDEAWERIDKKVEGLSKHIKLEEERRSEDAQSKAALTDWLRAKASFVIEGLKEADKDEFCRCELKLQKWYGDLRGKPFAIEAENSILDISGFSKQYNCAFIWQKDGVKKLNLYLIINYFKGGKLRFKKIKPEAFEANRFYTVINKKSGEIVPMEVNFNFDDPNLIILPLAFGKRQGREFIWNDLLSLETGSLKLANGRVIEKTLYNRRTRQDEPALFVALTFERREVLDSSNIKPMNLIGVDRGENIPAVIALTDPEGCPLSRFKDSLGNPTHILRIGESYKEKQRTIQAKKEVEQRRAGGYSRKYASKAKNLADDMVRNTARDLLYYAVTQDAMLIFENLSRGFGRQGKRTFMAERQYTRMEDWLTAKLAYEGLPSKTYLSKTLAQYTSKTCSNCGFTITSADYDRVLEKLKKTATGWMTTINGKELKVEGQITYYNRYKRQNVVKDLSVELDRLSEESVNNDISSWTKGRSGEALSLLKKRFSHRPVQEKFVCLNCGFETHADEQAALNIARSWLFLRSQEYKKYQTNKTTGNTDKRAFVETWQSFYRKKLKEVWKPAV

SEQ ID NO: 31272 - protein, 978 aa, synthetic construct
  REGION 1..978: note = engineered CasX variant
QEGKRINKIRRRLVKDSNTKKAGKTGPMKTLLVRVMTPDLRERLENLRKKPENIPQPISNTSRANLNKLLTDYTEMKKAILHVYWEEFQKDPVGLMSRVAQPASKKIDQNKLKPEMDEKGNLTTAGFACSQCGQPLFVYKLEQVSEKGKAYTNYFGRCNVAEHEKLILLAQLKPEKDSDEAVTYSLGKFGQRALDFYSIHVTKESTHPVKPLAQIAGNRYASHPVGKALSDACMGTIASFLSKYQDIIIEHQKVVKGNQKRLESLRELAGKENLEYPSVTLPPQPHTKEGVDAYNEVIARVRWWVNLNLWQKLKLSRDDAKPLLRLKGFPSFPLVERQANEVDWWDMVCNVKKLINEKKEDGKVFWQNLAGYKRQEALRPYLSSEEDRKKGKKFARYQLGDLLLHLEKKHGEDWGKVYDEAWERIDKKVEGLSKHIKLEEERRSEDAQSKAALTDWLRAKASFVIEGLKEADKDEFCRCELKLQKWYGDLRGKPFAIEAENSILDISGFSKQYNCAFIWQKDGVKKLNLYLIINYFKGGKLRFKKIKPEAFEANRFYTVINKKSGEIVPMEVNFNFDDPNLIILPLAFGKRQGREFIWNDLLSLETGSLKLANGRVIEKTLYNRRTRQDEPALFVALTFERREVLDSSNIKPMNLIGVDRGENIPAVIALTDPEGCPLSRFKDSLGNPTHILRIGESYKEKQRTIQAKKEVEQRRAGGYSRKYASKAKNLADDMVRNTARDLLYYAVTQDAMLIFENLSRGFGRQGKRTFMAERQYTRMEDWLTAKLAYEGLPSKTYLSKTLAQYTSKTCSNCGFTITSADYDRVLEKLKKTATGWMTTINGKELKVEGQITYYNRYKRQNVVKDLSVELDRLSEESVNNDISSWTKGRSGEALSLLKKRFSHRPVQEKFVCLNCGFETHADEQAALNIARSWLFLRSQEYKKYQTNKTTGNTDKRAFVETWQSFYRKKLKEVWKPAV

SEQ ID NO: 31273 - protein, 978 aa, synthetic construct
  REGION 1..978: note = engineered CasX variant
QEGKRINKIRRRLVKDSNTKKAGKTGPMKTLLVRVMTPDLRERLENLRKKPENIPQPISNTSRANLNKLLTDYTEMKKAILHVYWEEFQKDPVGLMSRVAQPASKKIDQNKLKPEMDEKGNLTTAGFACSQCGQPLFVYKLEQVSEKGKAYTNYFGRCNVAEHEKLILLAQLKPEKDSDEAVTYSLGKFGQRALDFYSIHVTKESTHPVKPLAQIAGNRYASSPVGKALSDACMGTIASFLSKYQDIIIEHQKVVKGNQKRLESLRELAGKENLEYPSVTLPPQPHTKEGVDAYNEVIARVRWWVNLNLWQKLKLSRDDAKPLLRLKGFPSFPLVERQANEVDWWDMVCNVKKLINEKKEDGKVFWQNLAGYKRQEALRPYLSSEEDRKKGKKFARYQLGDLLLHLEKKHGEDWGKVYDEAWERIDKKVEGLSKHIKLEEERRSEDAQSKAALTDWLRAKASFVIEGLKEADKDEFCRCELKLQKWYGDLRGKPFAIEAENSILDISGFSKQYNCAFIWQKDGVKKLNLYLIINYFKGGKLRFKKIKPEAFEANRFYTVINKKSGEIVPMEVNFNFDDPNLIILPLAFGKRQGREFIWNDLLSLETGSLKLANGRVIEKTLYNRRTRQDEPALFVALTFERREVLDSSNIKPMNLIGVDRGENIPAVIALTDPEGCPLSRFKDSLGNPTHILRIGESYKEKQRTIQAKKEVEQRRAGGYSRKYASKAKNLADDMVRNTARDLLYYAVTQDAMLIFENLSRGFGRQGKRTFMAERQYTRMEDWLTAKLAYEGLPSKTYLSKTLAQYTSKTCSNCGFTITSADYDRVLEKLKKTATGWMTTINGKELKVEGQITYYNRYKRQNVVKDLSVELDRLSEESVNNDISSWTKGRSGEALSLLKKRFSHRPVQEKFVCLNCGFETHADEQAALNIARSWLFLRSQEYKKYQTNKTTGNTDKRAFVETWQSFYRKKLKEVWKPAV

SEQ ID NO: 31274 - protein, 978 aa, synthetic construct
  REGION 1..978: note = engineered CasX variant
QEGKRINKIRRRLVKDSNTKKAGKTGPMKTLLVRVMTPDLRERLENLRKKPENIPQPISNTSRANLNKLLTDYTEMKKAILHVYWEEFQKDPVGLMSRVAQPASKKIDQNKLKPEMDEKGNLTTAGFACSQCGQPLFVYKLEQVSEKGKAYTNYFGRCNVAEHEKLILLAQLKPEKDSDEAVTYSLGKFGQRALDFYSIHVTKESTHPVKPLAQIAGNRYASTPVGKALSDACMGTIASFLSKYQDIIIEHQKVVKGNQKRLESLRELAGKENLEYPSVTLPPQPHTKEGVDAYNEVIARVRWWVNLNLWQKLKLSRDDAKPLLRLKGFPSFPLVERQANEVDWWDMVCNVKKLINEKKEDGKVFWQNLAGYKRQEALRPYLSSEEDRKKGKKFARYQLGDLLLHLEKKHGEDWGKVYDEAWERIDKKVEGLSKHIKLEEERRSEDAQSKAALTDWLRAKASFVIEGLKEADKDEFCRCELKLQKWYGDLRGKPFAIEAENSILDISGFSKQYNCAFIWQKDGVKKLNLYLIINYFKGGKLRFKKIKPEAFEANRFYTVINKKSGEIVPMEVNFNFDDPNLIILPLAFGKRQGREFIWNDLLSLETGSLKLANGRVIEKTLYNRRTRQDEPALFVALTFERREVLDSSNIKPMNLIGVDRGENIPAVIALTDPEGCPLSRFKDSLGNPTHILRIGESYKEKQRTIQAKKEVEQRRAGGYSRKYASKAKNLADDMVRNTARDLLYYAVTQDAMLIFENLSRGFGRQGKRTFMAERQYTRMEDWLTAKLAYEGLPSKTYLSKTLAQYTSKTCSNCGFTITSADYDRVLEKLKKTATGWMTTINGKELKVEGQITYYNRYKRQNVVKDLSVELDRLSEESVNNDISSWTKGRSGEALSLLKKRFSHRPVQEKFVCLNCGFETHADEQAALNIARSWLFLRSQEYKKYQTNKTTGNTDKRAFVETWQSFYRKKLKEVWKPAV

SEQ ID NO: 31275 - protein, 978 aa, synthetic construct
  REGION 1..978: note = engineered CasX variant
QEGKRINKIRRRLVKDSNTKKAGKTGPMKTLLVRVMTPDLRERLENLRKKPENIPQPISNTSRANLNKLLTDYTEMKKAILHVYWEEFQKDPVGLMSRVAQPASKKIDQNKLKPEMDEKGNLTTAGFACSQCGQPLFVYKLEQVSEKGKAYTNYFGRCNVAEHEKLILLAQLKPEKDSDEAVTYSLGKFGQRALDFYSIHVTKESTHPVKPLAQIAGNRYASAPVGKALSDACMGTIASFLSKYQDIIIEHQKVVKGNQKRLESLRELAGKENLEYPSVTLPPQPHTKEGVDAYNEVIARVRWWVNLNLWQKLKLSRDDAKPLLRLKGFPSFPLVERQANEVDWWDMVCNVKKLINEKKEDGKVFWQNLAGYKRQEALRPYLSSEEDRKKGKKFARYQLGDLLLHLEKKHGEDWGKVYDEAWERIDKKVEGLSKHIKLEEERRSEDAQSKAALTDWLRAKASFVIEGLKEADKDEFCRCELKLQKWYGDLRGKPFAIEAENSILDISGFSKQYNCAFIWQKDGVKKLNLYLIINYFKGGKLRFKKIKPEAFEANRFYTVINKKSGEIVPMEVNFNFDDPNLIILPLAFGKRQGREFIWNDLLSLETGSLKLANGRVIEKTLYNRRTRQDEPALFVALTFERREVLDSSNIKPMNLIGVDRGENIPAVIALTDPEGCPLSRFKDSLGNPTHILRIGESYKEKQRTIQAKKEVEQRRAGGYSRKYASKAKNLADDMVRNTARDLLYYAVTQDAMLIFENLSRGFGRQGKRTFMAERQYTRMEDWLTAKLAYEGLPSKTYLSKTLAQYTSKTCSNCGFTITSADYDRVLEKLKKTATGWMTTINGKELKVEGQITYYNRYKRQNVVKDLSVELDRLSEESVNNDISSWTKGRSGEALSLLKKRFSHRPVQEKFVCLNCGFETHADEQAALNIARSWLFLRSQEYKKYQTNKTTGNTDKRAFVETWQSFYRKKLKEVWKPAV

SEQ ID NO: 31276 - protein, 978 aa, synthetic construct
  REGION 1..978: note = engineered CasX variant
QEGKRINKIRRRLVKDSNTKKAGKTGPMKTLLVRVMTPDLRERLENLRKKPENIPQPISNTSRANLNKLLTDYTEMKKAILHVYWEEFQKDPVGLMSRVAQPASKKIDQNKLKPEMDEKGNLTTAGFACSQCGQPLFVYKLEQVSEKGKAYTNYFGRCNVAEHEKLILLAQLKPEKDSDEAVTYSLGKFGQRALDFYSIHVTKESTHPVKPLAQIAGNRYASVPVGKALSDACMGTIASFLSKYQDIIIEHQKVVKGNQKRLESLRELAGKENLEYPSVTLPPQPHTKEGVDAYNEVIARVRWWVNLNLWQKLKLSRDDAKPLLRLKGFPSFPLVERQANEVDWWDMVCNVKKLINEKKEDGKVFWQNLAGYKRQEALRPYLSSEEDRKKGKKFARYQLGDLLLHLEKKHGEDWGKVYDEAWERIDKKVEGLSKHIKLEEERRSEDAQSKAALTDWLRAKASFVIEGLKEADKDEFCRCELKLQKWYGDLRGKPFAIEAENSILDISGFSKQYNCAFIWQKDGVKKLNLYLIINYFKGGKLRFKKIKPEAFEANRFYTVINKKSGEIVPMEVNFNFDDPNLIILPLAFGKRQGREFIWNDLLSLETGSLKLANGRVIEKTLYNRRTRQDEPALFVALTFERREVLDSSNIKPMNLIGVDRGENIPAVIALTDPEGCPLSRFKDSLGNPTHILRIGESYKEKQRTIQAKKEVEQRRAGGYSRKYASKAKNLADDMVRNTARDLLYYAVTQDAMLIFENLSRGFGRQGKRTFMAERQYTRMEDWLTAKLAYEGLPSKTYLSKTLAQYTSKTCSNCGFTITSADYDRVLEKLKKTATGWMTTINGKELKVEGQITYYNRYKRQNVVKDLSVELDRLSEESVNNDISSWTKGRSGEALSLLKKRFSHRPVQEKFVCLNCGFETHADEQAALNIARSWLFLRSQEYKKYQTNKTTGNTDKRAFVETWQSFYRKKLKEVWKPAV

SEQ ID NO: 31277 - protein, 978 aa, synthetic construct
  REGION 1..978: note = engineered CasX variant
QEGKRINKIRRRLVKDSNTKKAGKTGPMKTLLVRVMTPDLRERLENLRKKPENIPQPISNTSRANLNKLLTDYTEMKKAILHVYWEEFQKDPVGLMSRVAQPASKKIDQNKLKPEMDEKGNLTTAGFACSQCGQPLFVYKLEQVSEKGKAYTNYFGRCNVAEHEKLIKLAQLKPEKDSDEAVTYSLGKFGQRALDFYSIHVTKESTHPVKPLAQIAGNRYASGPVGKALSDACMGTIASFLSKYQDIIIEHQKVVKGNQKRLESLRELAGKENLEYPSVTLPPQPHTKEGVDAYNEVIARVRWWVNLNLWQKLKLSRDDAKPLLRLKGFPSFPLVERQANEVDWWDMVCNVKKLINEKKEDGKVFWQNLAGYKRQEALRPYLSSEEDRKKGKKFARYQLGDLLLHLEKKHGEDWGKVYDEAWERIDKKVEGLSKHIKLEEERRSEDAQSKAALTDWLRAKASFVIEGLKEADKDEFCRCELKLQKWYGDLRGKPFAIEAENSILDISGFSKQYNCAFIWQKDGVKKLNLYLIINYFKGGKLRFKKIKPEAFEANRFYTVINKKSGEIVPMEVNFNFDDPNLIILPLAFGKRQGREFIWNDLLSLETGSLKLANGRVIEKTLYNRRTRQDEPALFVALTFERREVLDSSNIKPMNLIGVDRGENIPAVIALTDPEGCPLSRFKDSLGNPTHILRIGESYKEKQRTIQAKKEVEQRRAGGYSRKYASKAKNLADDMVRNTARDLLYYAVTQDAMLIFENLSRGFGRQGKRTFMAERQYTRMEDWLTAKLAYEGLPSKTYLSKTLAQYTSKTCSNCGFTITSADYDRVLEKLKKTATGWMTTINGKELKVEGQITYYNRYKRQNVVKDLSVELDRLSEESVNNDISSWTKGRSGEALSLLKKRFSHRPVQEKFVCLNCGFETHADEQAALNIARSWLFLRSQEYKKYQTNKTTGNTDKRAFVETWQSFYRKKLKEVWKPAV

SEQ ID NO: 31278 - protein, 977 aa, synthetic construct
  REGION 1..977: note = engineered CasX variant
QEGKRINKIRRRLVKDSNTKKAGKTGPMKTLLVRVMTPDLRERLENLRKKPENIPQPISNTSRANLNKLLTDYTEMKKAILHVYWEEFQKDPVGLMSRVAQPASKKIDQNKLKPEMDEKGNLTTAGFACSQCGQPLFVYKLEQVSEKGKAYTNYFGRCNVAEHEKLILLAQLKPEKDSDEAVTYSLGKFGQRALDFYSIHVTKESTHPVKPLAQIAGNRYASPVGKALSDACMGTIASFLSKYQDIIIEHQKVVKGNQKRLESLRELAGKENLEYPSVTLPPQPHTKEGVDAYNEVIARVRWWVNLNLWQKLKLSRDDAKPLLRLKGFPSFPLVERQANEVDWWDMVCNVKKLINEKKEDGKVFWQNLAGYKRQEALRPYLSSEEDRKKGKKFARYQLGDLLLHLEKKHGEDWGKVYDEAWERIDKKVEGLSKHIKLEEERRSEDAQSKAALTDWLRAKASFVIEGLKEADKDEFCRCELKLQKWYGDLRGKPFAIEAENSILDISGFSKQYNCAFIWQKDGVKKLNLYLIINYFKGGKLRFKKIKPEAFEANRFYTVINKKSGEIVPMEVNFNFDDPNLIILPLAFGKRQGREFIWNDLLSLETGSLKLANGRVIEKTLYNRRTRQDEPALFVALTFERREVLDSSNIKPMNLIGVDRGENIPAVIALTDPEGCPLSRFKDSLGNPTHILRIGESYKEKQRTIQAKKEVEQRRAGGYSRKYASKAKNLADDMVRNTARDLLYYAVTQDAMLIFENLSRGFGRQGKRTFMAERQYTRMEDWLTAKLAYEGLPSKTYLSKTLAQYTSKTCSNCGFTITSADYDRVLEKLKKTATGWMTTINGKELKVEGQITYYNRYKRQNVVKDLSVELDRLSEESVNNDISSWTKGRSGEALSLLKKRFSHRPVQEKFVCLNCGFETHADEQAALNIARSWLFLRSQEYKKYQTNKTTGNTDKRAFVETWQSFYRKKLKEVWKPAV

SEQ ID NO: 31279 - protein, 979 aa, synthetic construct
  REGION 1..979: note = engineered CasX variant
QEGKRINKIRRRLVKDSNTKKAGKTGPMKTLLVRVMTPDLRERLENLRKKPENIPQPISNTSRANLNKLLTDYTEMKKAILHVYWEEFQKDPVGLMSRVAQPASKKIDQNKLKPEMDEKGNLTTAGFACSQCGQPLFVYKLEQVSEKGKAYTNYFGRCNVAEHEKLILLAQLKPEKDSDEAVTYSLGKFGQRALDFYSIHVTKESTHPVKPLAQIAGNRYASYPVGKALSDACMGTIASFLSKYQDIIIEHQKVVKGNQKRLESLRELAGKENLEYPSVTLPPQPHTKEGVDAYNEVIARVRMWVNLNLWQKLKLSRDDAKPLLRLKGFPSFPLVERQQANEVDWWDMVCNVKKLINEKKEDGKVFWQNLAGYKRQEALRPYLSSEEDRKKGKKFARYQLGDLLLHLEKKHGEDWGKVYDEAWERIDKKVEGLSKHIKLEEERRSEDAQSKAALTDWLRAKASFVIEGLKEADKDEFCRCELKLQKWYGDLRGKPFAIEAENSILDISGFSKQYNCAFIWQKDGVKKLNLYLIINYFKGGKLRFKKIKPEAFEANRFYTVINKKSGEIVPMEVNFNFDDPNLIILPLAFGKRQGREFIWNDLLSLETGSLKLANGRVIEKTLYNRRTRQDEPALFVALTFERREVLDSSNIKPMNLIGVDRGENIPAVIALTDPEGCPLSRFKDSLGNPTHILRIGESYKEKQRTIQAKKEVEQRRAGGYSRKYASKAKNLADDMVRNTARDLLYYAVTQDAMLIFENLSRGFGRQGKRTFMAERQYTRMEDWLTAKLAYEGLPSKTYLSKTLAQYTSKTCSNCGFTITSADYDRVLEKLKKTATGWMTTINGKELKVEGQITYYNRYKRQNVVKDLSVELDRLSEESVNNDISSWTKGRSGEALSLLKKRFSHRPVQEKFVCLNCGFETHADEQAALNIARSWLFLRSQEYKKYQTNKTTGNTDKRAFVETWQSFYRKKLKEVWKPAV

SEQ ID NO: 31280 - protein, 979 aa, synthetic construct
  REGION 1..979: note = engineered CasX variant
QEGKRINKIRRRLVKDSNTKKAGKTGPMKTLLVRVMTPDLRERLENLRKKPENIPQPISNTSRANLNKLLTDYTEMKKAILHVYWEEFQKDPVGLMSRVAQPASKKIDQNKLKPEMDEKGNLTTAGFACSQCGQPLFVYKLEQVSEKGKAYTNYFGRCNVAEHEKLILLAQLKPEKDSDEAVTYSLGKFGQRALDFYSIHVTKESTHPVKPLAQIAGNRYASHPVGKALSDACMGTIASFLSKYQDIIIEHQKVVKGNQKRLESLRELAGKENLEYPSVTLPPQPHTKEGVDAYNEVIARVRMWVNLNLWQKLKLSRDDAKPLLRLKGFPSFPLVERQQANEVDWWDMVCNVKKLINEKKEDGKVFWQNLAGYKRQEALRPYLSSEEDRKKGKKFARYQLGDLLLHLEKKHGEDWGKVYDEAWERIDKKVEGLSKHIKLEEERRSEDAQSKAALTDWLRAKASFVIEGLKEADKDEFCRCELKLQKWYGDLRGKPFAIEAENSILDISGFSKQYNCAFIWQKDGVKKLNLYLIINYFKGGKLRFKKIKPEAFEANRFYTVINKKSGEIVPMEVNFNFDDPNLIILPLAFGKRQGREFIWNDLLSLETGSLKLANGRVIEKTLYNRRTRQDEPALFVALTFERREVLDSSNIKPMNLIGVDRGENIPAVIALTDPEGCPLSRFKDSLGNPTHILRIGESYKEKQRTIQAKKEVEQRRAGGYSRKYASKAKNLADDMVRNTARDLLYYAVTQDAMLIFENLSRGFGRQGKRTFMAERQYTRMEDWLTAKLAYEGLPSKTYLSKTLAQYTSKTCSNCGFTITSADYDRVLEKLKKTATGWMTTINGKELKVEGQITYYNRYKRQNVVKDLSVELDRLSEESVNNDISSWTKGRSGEALSLLKKRFSHRPVQEKFVCLNCGFETHADEQAALNIARSWLFLRSQEYKKYQTNKTTGNTDKRAFVETWQSFYRKKLKEVWKPAV

SEQ ID NO: 31281 - protein, 979 aa, synthetic construct
  REGION 1..979: note = engineered CasX variant
QEGKRINKIRRRLVKDSNTKKAGKTGPMKTLLVRVMTPDLRERLENLRKKPENIPQPISNTSRANLNKLLTDYTEMKKAILHVYWEEFQKDPVGLMSRVAQPASKKIDQNKLKPEMDEKGNLTTAGFACSQCGQPLFVYKLEQVSEKGKAYTNYFGRCNVAEHEKLILLAQLKPEKDSDEAVTYSLGKFGQRALDFYSIHVTKESTHPVKPLAQIAGNRYASSPVGKALSDACMGTIASFLSKYQDIIIEHQKVVKGNQKRLESLRELAGKENLEYPSVTLPPQPHTKEGVDAYNEVIARVRMWVNLNLWQKLKLSRDDAKPLLRLKGFPSFPLVERQQANEVDWWDMVCNVKKLINEKKEDGKVFWQNLAGYKRQEALRPYLSSEEDRKKGKKFARYQLGDLLLHLEKKHGEDWGKVYDEAWERIDKKVEGLSKHIKLEEERRSEDAQSKAALTDWLRAKASFVIEGLKEADKDEFCRCELKLQKWYGDLRGKPFAIEAENSILDISGFSKQYNCAFIWQKDGVKKLNLYLIINYFKGGKLRFKKIKPEAFEANRFYTVINKKSGEIVPMEVNFNFDDPNLIILPLAFGKRQGREFIWNDLLSLETGSLKLANGRVIEKTLYNRRTRQDEPALFVALTFERREVLDSSNIKPMNLIGVDRGENIPAVIALTDPEGCPLSRFKDSLGNPTHILRIGESYKEKQRTIQAKKEVEQRRAGGYSRKYASKAKNLADDMVRNTARDLLYYAVTQDAMLIFENLSRGFGRQGKRTFMAERQYTRMEDWLTAKLAYEGLPSKTYLSKTLAQYTSKTCSNCGFTITSADYDRVLEKLKKTATGWMTTINGKELKVEGQITYYNRYKRQNVVKDLSVELDRLSEESVNNDISSWTKGRSGEALSLLKKRFSHRPVQEKFVCLNCGFETHADEQAALNIARSWLFLRSQEYKKYQTNKTTGNTDKRAFVETWQSFYRKKLKEVWKPAV

SEQ ID NO: 31282 - protein, 979 aa, synthetic construct
  REGION 1..979: note = engineered CasX variant
QEGKRINKIRRRLVKDSNTKKAGKTGPMKTLLVRVMTPDLRERLENLRKKPENIPQPISNTSRANLNKLLTDYTEMKKAILHVYWEEFQKDPVGLMSRVAQPASKKIDQNKLKPEMDEKGNLTTAGFACSQCGQPLFVYKLEQVSEKGKAYTNYFGRCNVAEHEKLILLAQLKPEKDSDEAVTYSLGKFGQRALDFYSIHVTKESTHPVKPLAQIAGNRYASTPVGKALSDACMGTIASFLSKYQDIIIEHQKVVKGNQKRLESLRELAGKENLEYPSVTLPPQPHTKEGVDAYNEVIARVRMWVNLNLWQKLKLSRDDAKPLLRLKGFPSFPLVERQQANEVDWWDMVCNVKKLINEKKEDGKVFWQNLAGYKRQEALRPYLSSEEDRKKGKKFARYQLGDLLLHLEKKHGEDWGKVYDEAWERIDKKVEGLSKHIKLEEERRSEDAQSKAALTDWLRAKASFVIEGLKEADKDEFCRCELKLQKWYGDLRGKPFAIEAENSILDISGFSKQYNCAFIWQKDGVKKLNLYLIINYFKGGKLRFKKIKPEAFEANRFYTVINKKSGEIVPMEVNFNFDDPNLIILPLAFGKRQGREFIWNDLLSLETGSLKLANGRVIEKTLYNRRTRQDEPALFVALTFERREVLDSSNIKPMNLIGVDRGENIPAVIALTDPEGCPLSRFKDSLGNPTHILRIGESYKEKQRTIQAKKEVEQRRAGGYSRKYASKAKNLADDMVRNTARDLLYYAVTQDAMLIFENLSRGFGRQGKRTFMAERQYTRMEDWLTAKLAYEGLPSKTYLSKTLAQYTSKTCSNCGFTITSADYDRVLEKLKKTATGWMTTINGKELKVEGQITYYNRYKRQNVVKDLSVELDRLSEESVNNDISSWTKGRSGEALSLLKKRFSHRPVQEKFVCLNCGFETHADEQAALNIARSWLFLRSQEYKKYQTNKTTGNTDKRAFVETWQSFYRKKLKEVWKPAV

SEQ ID NO: 31283 - protein, 979 aa, synthetic construct
  REGION 1..979: note = engineered CasX variant
QEGKRINKIRRRLVKDSNTKKAGKTGPMKTLLVRVMTPDLRERLENLRKKPENIPQPISNTSRANLNKLLTDYTEMKKAILHVYWEEFQKDPVGLMSRVAQPASKKIDQNKLKPEMDEKGNLTTAGFACSQCGQPLFVYKLEQVSEKGKAYTNYFGRCNVAEHEKLILLAQLKPEKDSDEAVTYSLGKFGQRALDFYSIHVTKESTHPVKPLAQIAGNRYASAPVGKALSDACMGTIASFLSKYQDIIIEHQKVVKGNQKRLESLRELAGKENLEYPSVTLPPQPHTKEGVDAYNEVIARVRMWVNLNLWQKLKLSRDDAKPLLRLKGFPSFPLVERQQANEVDWWDMVCNVKKLINEKKEDGKVFWQNLAGYKRQEALRPYLSSEEDRKKGKKFARYQLGDLLLHLEKKHGEDWGKVYDEAWERIDKKVEGLSKHIKLEEERRSEDAQSKAALTDWLRAKASFVIEGLKEADKDEFCRCELKLQKWYGDLRGKPFAIEAENSILDISGFSKQYNCAFIWQKDGVKKLNLYLIINYFKGGKLRFKKIKPEAFEANRFYTVINKKSGEIVPMEVNFNFDDPNLIILPLAFGKRQGREFIWNDLLSLETGSLKLANGRVIEKTLYNRRTRQDEPALFVALTFERREVLDSSNIKPMNLIGVDRGENIPAVIALTDPEGCPLSRFKDSLGNPTHILRIGESYKEKQRTIQAKKEVEQRRAGGYSRKYASKAKNLADDMVRNTARDLLYYAVTQDAMLIFENLSRGFGRQGKRTFMAERQYTRMEDWLTAKLAYEGLPSKTYLSKTLAQYTSKTCSNCGFTITSADYDRVLEKLKKTATGWMTTINGKELKVEGQITYYNRYKRQNVVKDLSVELDRLSEESVNNDISSWTKGRSGEALSLLKKRFSHRPVQEKFVCLNCGFETHADEQAALNIARSWLFLRSQEYKKYQTNKTTGNTDKRAFVETWQSFYRKKLKEVWKPAV

SEQ ID NO: 31284 - protein, 979 aa, synthetic construct
  REGION 1..979: note = engineered CasX variant
QEGKRINKIRRRLVKDSNTKKAGKTGPMKTLLVRVMTPDLRERLENLRKKPENIPQPISNTSRANLNKLLTDYTEMKKAILHVYWEEFQKDPVGLMSRVAQPASKKIDQNKLKPEMDEKGNLTTAGFACSQCGQPLFVYKLEQVSEKGKAYTNYFGRCNVAEHEKLILLAQLKPEKDSDEAVTYSLGKFGQRALDFYSIHVTKESTHPVKPLAQIAGNRYASVPVGKALSDACMGTIASFLSKYQDIIIEHQKVVKGNQKRLESLRELAGKENLEYPSVTLPPQPHTKEGVDAYNEVIARVRMWVNLNLWQKLKLSRDDAKPLLRLKGFPSFPLVERQQANEVDWWDMVCNVKKLINEKKEDGKVFWQNLAGYKRQEALRPYLSSEEDRKKGKKFARYQLGDLLLHLEKKHGEDWGKVYDEAWERIDKKVEGLSKHIKLEEERRSEDAQSKAALTDWLRAKASFVIEGLKEADKDEFCRCELKLQKWYGDLRGKPFAIEAENSILDISGFSKQYNCAFIWQKDGVKKLNLYLIINYFKGGKLRFKKIKPEAFEANRFYTVINKKSGEIVPMEVNFNFDDPNLIILPLAFGKRQGREFIWNDLLSLETGSLKLANGRVIEKTLYNRRTRQDEPALFVALTFERREVLDSSNIKPMNLIGVDRGENIPAVIALTDPEGCPLSRFKDSLGNPTHILRIGESYKEKQRTIQAKKEVEQRRAGGYSRKYASKAKNLADDMVRNTARDLLYYAVTQDAMLIFENLSRGFGRQGKRTFMAERQYTRMEDWLTAKLAYEGLPSKTYLSKTLAQYTSKTCSNCGFTITSADYDRVLEKLKKTATGWMTTINGKELKVEGQITYYNRYKRQNVVKDLSVELDRLSEESVNNDISSWTKGRSGEALSLLKKRFSHRPVQEKFVCLNCGFETHADEQAALNIARSWLFLRSQEYKKYQTNKTTGNTDKRAFVETWQSFYRKKLKEVWKPAV

SEQ ID NO: 31285 - protein, 979 aa, synthetic construct
  REGION 1..979: note = engineered CasX variant
QEGKRINKIRRRLVKDSNTKKAGKTGPMKTLLVRVMTPDLRERLENLRKKPENIPQPISNTSRANLNKLLTDYTEMKKAILHVYWEEFQKDPVGLMSRVAQPASKKIDQNKLKPEMDEKGNLTTAGFACSQCGQPLFVYKLEQVSEKGKAYTNYFGRCNVAEHEKLIKLAQLKPEKDSDEAVTYSLGKFGQRALDFYSIHVTKESTHPVKPLAQIAGNRYASGPVGKALSDACMGTIASFLSKYQDIIIEHQKVVKGNQKRLESLRELAGKENLEYPSVTLPPQPHTKEGVDAYNEVIARVRMWVNLNLWQKLKLSRDDAKPLLRLKGFPSFPLVERQQANEVDWWDMVCNVKKLINEKKEDGKVFWQNLAGYKRQEALRPYLSSEEDRKKGKKFARYQLGDLLLHLEKKHGEDWGKVYDEAWERIDKKVEGLSKHIKLEEERRSEDAQSKAALTDWLRAKASFVIEGLKEADKDEFCRCELKLQKWYGDLRGKPFAIEAENSILDISGFSKQYNCAFIWQKDGVKKLNLYLIINYFKGGKLRFKKIKPEAFEANRFYTVINKKSGEIVPMEVNFNFDDPNLIILPLAFGKRQGREFIWNDLLSLETGSLKLANGRVIEKTLYNRRTRQDEPALFVALTFERREVLDSSNIKPMNLIGVDRGENIPAVIALTDPEGCPLSRFKDSLGNPTHILRIGESYKEKQRTIQAKKEVEQRRAGGYSRKYASKAKNLADDMVRNTARDLLYYAVTQDAMLIFENLSRGFGRQGKRTFMAERQYTRMEDWLTAKLAYEGLPSKTYLSKTLAQYTSKTCSNCGFTITSADYDRVLEKLKKTATGWMTTINGKELKVEGQITYYNRYKRQNVVKDLSVELDRLSEESVNNDISSWTKGRSGEALSLLKKRFSHRPVQEKFVCLNCGFETHADEQAALNIARSWLFLRSQEYKKYQTNKTTGNTDKRAFVETWQSFYRKKLKEVWKPAV

SEQ ID NO: 31286 - protein, 978 aa, synthetic construct
  REGION 1..978: note = engineered CasX variant
QEGKRINKIRRRLVKDSNTKKAGKTGPMKTLLVRVMTPDLRERLENLRKKPENIPQPISNTSRANLNKLLTDYTEMKKAILHVYWEEFQKDPVGLMSRVAQPASKKIDQNKLKPEMDEKGNLTTAGFACSQCGQPLFVYKLEQVSEKGKAYTNYFGRCNVAEHEKLILLAQLKPEKDSDEAVTYSLGKFGQRALDFYSIHVTKESTHPVKPLAQIAGNRYASPVGKALSDACMGTIASFLSKYQDIIIEHQKVVKGNQKRLESLRELAGKENLEYPSVTLPPQPHTKEGVDAYNEVIARVRMWVNLNLWQKLKLSRDDAKPLLRLKGFPSFPLVERQQANEVDWWDMVCNVKKLINEKKEDGKVFWQNLAGYKRQEALRPYLSSEEDRKKGKKFARYQLGDLLLHLEKKHGEDWGKVYDEAWERIDKKVEGLSKHIKLEEERRSEDAQSKAALTDWLRAKASFVIEGLKEADKDEFCRCELKLQKWYGDLRGKPFAIEAENSILDISGFSKQYNCAFIWQKDGVKKLNLYLIINYFKGGKLRFKKIKPEAFEANRFYTVINKKSGEIVPMEVNFNFDDPNLIILPLAFGKRQGREFIWNDLLSLETGSLKLANGRVIEKTLYNRRTRQDEPALFVALTFERREVLDSSNIKPMNLIGVDRGENIPAVIALTDPEGCPLSRFKDSLGNPTHILRIGESYKEKQRTIQAKKEVEQRRAGGYSRKYASKAKNLADDMVRNTARDLLYYAVTQDAMLIFENLSRGFGRQGKRTFMAERQYTRMEDWLTAKLAYEGLPSKTYLSKTLAQYTSKTCSNCGFTITSADYDRVLEKLKKTATGWMTTINGKELKVEGQITYYNRYKRQNVVKDLSVELDRLSEESVNNDISSWTKGRSGEALSLLKKRFSHRPVQEKFVCLNCGFETHADEQAALNIARSWLFLRSQEYKKYQTNKTTGNTDKRAFVETWQSFYRKKLKEVWKPAV

SEQ ID NO: 31287 - protein, 979 aa, synthetic construct
  REGION 1..979: note = engineered CasX variant
QEGKRINKIRRRLVKDSNTKKAGKTGPMKTLLVRVMTPDLRERLENLRKKPENIPQPISNTSRANLNKLLTDYTEMKKAILHVYWEEFQKDPVGLMSRVAQPASKKIDQNKLKPEMDEKGNLTTAGFACSQCGQPLFVYKLEQVSEKGKAYTNYFGRCNVAEHEKLILLAQLKPEKDSDEAVTYSLGKFGQRALDFYSIHVTKESTHPVKPLAQIAGNRYASYPVGKALSDACMGTIASFLSKYQDIIIEHQKVVKGNQKRLESLRELAGKENLEYPSVTLPPQPHTKEGVDAYNEVIARVRMWVNLNLWQKLKLSRDDAKPLLRLKGFPSFPLVERQANAEVDWWDMVCNVKKLINEKKEDGKVFWQNLAGYKRQEALRPYLSSEEDRKKGKKFARYQLGDLLLHLEKKHGEDWGKVYDEAWERIDKKVEGLSKHIKLEEERRSEDAQSKAALTDWLRAKASFVIEGLKEADKDEFCRCELKLQKWYGDLRGKPFAIEAENSILDISGFSKQYNCAFIWQKDGVKKLNLYLIINYFKGGKLRFKKIKPEAFEANRFYTVINKKSGEIVPMEVNFNFDDPNLIILPLAFGKRQGREFIWNDLLSLETGSLKLANGRVIEKTLYNRRTRQDEPALFVALTFERREVLDSSNIKPMNLIGVDRGENIPAVIALTDPEGCPLSRFKDSLGNPTHILRIGESYKEKQRTIQAKKEVEQRRAGGYSRKYASKAKNLADDMVRNTARDLLYYAVTQDAMLIFENLSRGFGRQGKRTFMAERQYTRMEDWLTAKLAYEGLPSKTYLSKTLAQYTSKTCSNCGFTITSADYDRVLEKLKKTATGWMTTINGKELKVEGQITYYNRYKRQNVVKDLSVELDRLSEESVNNDISSWTKGRSGEALSLLKKRFSHRPVQEKFVCLNCGFETHADEQAALNIARSWLFLRSQEYKKYQTNKTTGNTDKRAFVETWQSFYRKKLKEVWKPAV

SEQ ID NO: 31288 - protein, 979 aa, synthetic construct
  REGION 1..979: note = engineered CasX variant
QEGKRINKIRRRLVKDSNTKKAGKTGPMKTLLVRVMTPDLRERLENLRKKPENIPQPISNTSRANLNKLLTDYTEMKKAILHVYWEEFQKDPVGLMSRVAQPASKKIDQNKLKPEMDEKGNLTTAGFACSQCGQPLFVYKLEQVSEKGKAYTNYFGRCNVAEHEKLILLAQLKPEKDSDEAVTYSLGKFGQRALDFYSIHVTKESTHPVKPLAQIAGNRYASHPVGKALSDACMGTIASFLSKYQDIIIEHQKVVKGNQKRLESLRELAGKENLEYPSVTLPPQPHTKEGVDAYNEVIARVRMWVNLNLWQKLKLSRDDAKPLLRLKGFPSFPLVERQANAEVDWWDMVCNVKKLINEKKEDGKVFWQNLAGYKRQEALRPYLSSEEDRKKGKKFARYQLGDLLLHLEKKHGEDWGKVYDEAWERIDKKVEGLSKHIKLEEERRSEDAQSKAALTDWLRAKASFVIEGLKEADKDEFCRCELKLQKWYGDLRGKPFAIEAENSILDISGFSKQYNCAFIWQKDGVKKLNLYLIINYFKGGKLRFKKIKPEAFEANRFYTVINKKSGEIVPMEVNFNFDDPNLIILPLAFGKRQGREFIWNDLLSLETGSLKLANGRVIEKTLYNRRTRQDEPALFVALTFERREVLDSSNIKPMNLIGVDRGENIPAVIALTDPEGCPLSRFKDSLGNPTHILRIGESYKEKQRTIQAKKEVEQRRAGGYSRKYASKAKNLADDMVRNTARDLLYYAVTQDAMLIFENLSRGFGRQGKRTFMAERQYTRMEDWLTAKLAYEGLPSKTYLSKTLAQYTSKTCSNCGFTITSADYDRVLEKLKKTATGWMTTINGKELKVEGQITYYNRYKRQNVVKDLSVELDRLSEESVNNDISSWTKGRSGEALSLLKKRFSHRPVQEKFVCLNCGFETHADEQAALNIARSWLFLRSQEYKKYQTNKTTGNTDKRAFVETWQSFYRKKLKEVWKPAV

SEQ ID NO: 31289 - protein, 979 aa, synthetic construct
  REGION 1..979: note = engineered CasX variant
QEGKRINKIRRRLVKDSNTKKAGKTGPMKTLLVRVMTPDLRERLENLRKKPENIPQPISNTSRANLNKLLTDYTEMKKAILHVYWEEFQKDPVGLMSRVAQPASKKIDQNKLKPEMDEKGNLTTAGFACSQCGQPLFVYKLEQVSEKGKAYTNYFGRCNVAEHEKLILLAQLKPEKDSDEAVTYSLGKFGQRALDFYSIHVTKESTHPVKPLAQIAGNRYASSPVGKALSDACMGTIASFLSKYQDIIIEHQKVVKGNQKRLESLRELAGKENLEYPSVTLPPQPHTKEGVDAYNEVIARVRMWVNLNLWQKLKLSRDDAKPLLRLKGFPSFPLVERQANAEVDWWDMVCNVKKLINEKKEDGKVFWQNLAGYKRQEALRPYLSSEEDRKKGKKFARYQLGDLLLHLEKKHGEDWGKVYDEAWERIDKKVEGLSKHIKLEEERRSEDAQSKAALTDWLRAKASFVIEGLKEADKDEFCRCELKLQKWYGDLRGKPFAIEAENSILDISGFSKQYNCAFIWQKDGVKKLNLYLIINYFKGGKLRFKKIKPEAFEANRFYTVINKKSGEIVPMEVNFNFDDPNLIILPLAFGKRQGREFIWNDLLSLETGSLKLANGRVIEKTLYNRRTRQDEPALFVALTFERREVLDSSNIKPMNLIGVDRGENIPAVIALTDPEGCPLSRFKDSLGNPTHILRIGESYKEKQRTIQAKKEVEQRRAGGYSRKYASKAKNLADDMVRNTARDLLYYAVTQDAMLIFENLSRGFGRQGKRTFMAERQYTRMEDWLTAKLAYEGLPSKTYLSKTLAQYTSKTCSNCGFTITSADYDRVLEKLKKTATGWMTTINGKELKVEGQITYYNRYKRQNVVKDLSVELDRLSEESVNNDISSWTKGRSGEALSLLKKRFSHRPVQEKFVCLNCGFETHADEQAALNIARSWLFLRSQEYKKYQTNKTTGNTDKRAFVETWQSFYRKKLKEVWKPAV

SEQ ID NO: 31290 - protein, 979 aa, synthetic construct
  REGION 1..979: note = engineered CasX variant
QEGKRINKIRRRLVKDSNTKKAGKTGPMKTLLVRVMTPDLRERLENLRKKPENIPQPISNTSRANLNKLLTDYTEMKKAILHVYWEEFQKDPVGLMSRVAQPASKKIDQNKLKPEMDEKGNLTTAGFACSQCGQPLFVYKLEQVSEKGKAYTNYFGRCNVAEHEKLILLAQLKPEKDSDEAVTYSLGKFGQRALDFYSIHVTKESTHPVKPLAQIAGNRYASTPVGKALSDACMGTIASFLSKYQDIIIEHQKVVKGNQKRLESLRELAGKENLEYPSVTLPPQPHTKEGVDAYNEVIARVRMWVNLNLWQKLKLSRDDAKPLLRLKGFPSFPLVERQANAEVDWWDMVCNVKKLINEKKEDGKVFWQNLAGYKRQEALRPYLSSEEDRKKGKKFARYQLGDLLLHLEKKHGEDWGKVYDEAWERIDKKVEGLSKHIKLEEERRSEDAQSKAALTDWLRAKASFVIEGLKEADKDEFCRCELKLQKWYGDLRGKPFAIEAENSILDISGFSKQYNCAFIWQKDGVKKLNLYLIINYFKGGKLRFKKIKPEAFEANRFYTVINKKSGEIVPMEVNFNFDDPNLIILPLAFGKRQGREFIWNDLLSLETGSLKLANGRVIEKTLYNRRTRQDEPALFVALTFERREVLDSSNIKPMNLIGVDRGENIPAVIALTDPEGCPLSRFKDSLGNPTHILRIGESYKEKQRTIQAKKEVEQRRAGGYSRKYASKAKNLADDMVRNTARDLLYYAVTQDAMLIFENLSRGFGRQGKRTFMAERQYTRMEDWLTAKLAYEGLPSKTYLSKTLAQYTSKTCSNCGFTITSADYDRVLEKLKKTATGWMTTINGKELKVEGQITYYNRYKRQNVVKDLSVELDRLSEESVNNDISSWTKGRSGEALSLLKKRFSHRPVQEKFVCLNCGFETHADEQAALNIARSWLFLRSQEYKKYQTNKTTGNTDKRAFVETWQSFYRKKLKEVWKPAV

SEQ ID NO: 31291 - protein, 979 aa, synthetic construct
  REGION 1..979: note = engineered CasX variant
QEGKRINKIRRRLVKDSNTKKAGKTGPMKTLLVRVMTPDLRERLENLRKKPENIPQPISNTSRANLNKLLTDYTEMKKAILHVYWEEFQKDPVGLMSRVAQPASKKIDQNKLKPEMDEKGNLTTAGFACSQCGQPLFVYKLEQVSEKGKAYTNYFGRCNVAEHEKLILLAQLKPEKDSDEAVTYSLGKFGQRALDFYSIHVTKESTHPVKPLAQIAGNRYASAPVGKALSDACMGTIASFLSKYQDIIIEHQKVVKGNQKRLESLRELAGKENLEYPSVTLPPQPHTKEGVDAYNEVIARVRMWVNLNLWQKLKLSRDDAKPLLRLKGFPSFPLVERQANAEVDWWDMVCNVKKLINEKKEDGKVFWQNLAGYKRQEALRPYLSSEEDRKKGKKFARYQLGDLLLHLEKKHGEDWGKVYDEAWERIDKKVEGLSKHIKLEEERRSEDAQSKAALTDWLRAKASFVIEGLKEADKDEFCRCELKLQKWYGDLRGKPFAIEAENSILDISGFSKQYNCAFIWQKDGVKKLNLYLIINYFKGGKLRFKKIKPEAFEANRFYTVINKKSGEIVPMEVNFNFDDPNLIILPLAFGKRQGREFIWNDLLSLETGSLKLANGRVIEKTLYNRRTRQDEPALFVALTFERREVLDSSNIKPMNLIGVDRGENIPAVIALTDPEGCPLSRFKDSLGNPTHILRIGESYKEKQRTIQAKKEVEQRRAGGYSRKYASKAKNLADDMVRNTARDLLYYAVTQDAMLIFENLSRGFGRQGKRTFMAERQYTRMEDWLTAKLAYEGLPSKTYLSKTLAQYTSKTCSNCGFTITSADYDRVLEKLKKTATGWMTTINGKELKVEGQITYYNRYKRQNVVKDLSVELDRLSEESVNNDISSWTKGRSGEALSLLKKRFSHRPVQEKFVCLNCGFETHADEQAALNIARSWLFLRSQEYKKYQTNKTTGNTDKRAFVETWQSFYRKKLKEVWKPAV

SEQ ID NO: 31292 - protein, 979 aa, synthetic construct
  REGION 1..979: note = engineered CasX variant
QEGKRINKIRRRLVKDSNTKKAGKTGPMKTLLVRVMTPDLRERLENLRKKPENIPQPISNTSRANLNKLLTDYTEMKKAILHVYWEEFQKDPVGLMSRVAQPASKKIDQNKLKPEMDEKGNLTTAGFACSQCGQPLFVYKLEQVSEKGKAYTNYFGRCNVAEHEKLILLAQLKPEKDSDEAVTYSLGKFGQRALDFYSIHVTKESTHPVKPLAQIAGNRYASVPVGKALSDACMGTIASFLSKYQDIIIEHQKVVKGNQKRLESLRELAGKENLEYPSVTLPPQPHTKEGVDAYNEVIARVRMWVNLNLWQKLKLSRDDAKPLLRLKGFPSFPLVERQANAEVDWWDMVCNVKKLINEKKEDGKVFWQNLAGYKRQEALRPYLSSEEDRKKGKKFARYQLGDLLLHLEKKHGEDWGKVYDEAWERIDKKVEGLSKHIKLEEERRSEDAQSKAALTDWLRAKASFVIEGLKEADKDEFCRCELKLQKWYGDLRGKPFAIEAENSILDISGFSKQYNCAFIWQKDGVKKLNLYLIINYFKGGKLRFKKIKPEAFEANRFYTVINKKSGEIVPMEVNFNFDDPNLIILPLAFGKRQGREFIWNDLLSLETGSLKLANGRVIEKTLYNRRTRQDEPALFVALTFERREVLDSSNIKPMNLIGVDRGENIPAVIALTDPEGCPLSRFKDSLGNPTHILRIGESYKEKQRTIQAKKEVEQRRAGGYSRKYASKAKNLADDMVRNTARDLLYYAVTQDAMLIFENLSRGFGRQGKRTFMAERQYTRMEDWLTAKLAYEGLPSKTYLSKTLAQYTSKTCSNCGFTITSADYDRVLEKLKKTATGWMTTINGKELKVEGQITYYNRYKRQNVVKDLSVELDRLSEESVNNDISSWTKGRSGEALSLLKKRFSHRPVQEKFVCLNCGFETHADEQAALNIARSWLFLRSQEYKKYQTNKTTGNTDKRAFVETWQSFYRKKLKEVWKPAV

SEQ ID NO: 31293 - protein, 979 aa, synthetic construct
  REGION 1..979: note = engineered CasX variant
QEGKRINKIRRRLVKDSNTKKAGKTGPMKTLLVRVMTPDLRERLENLRKKPENIPQPISNTSRANLNKLLTDYTEMKKAILHVYWEEFQKDPVGLMSRVAQPASKKIDQNKLKPEMDEKGNLTTAGFACSQCGQPLFVYKLEQVSEKGKAYTNYFGRCNVAEHEKLIKLAQLKPEKDSDEAVTYSLGKFGQRALDFYSIHVTKESTHPVKPLAQIAGNRYASGPVGKALSDACMGTIASFLSKYQDIIIEHQKVVKGNQKRLESLRELAGKENLEYPSVTLPPQPHTKEGVDAYNEVIARVRMWVNLNLWQKLKLSRDDAKPLLRLKGFPSFPLVERQANAEVDWWDMVCNVKKLINEKKEDGKVFWQNLAGYKRQEALRPYLSSEEDRKKGKKFARYQLGDLLLHLEKKHGEDWGKVYDEAWERIDKKVEGLSKHIKLEEERRSEDAQSKAALTDWLRAKASFVIEGLKEADKDEFCRCELKLQKWYGDLRGKPFAIEAENSILDISGFSKQYNCAFIWQKDGVKKLNLYLIINYFKGGKLRFKKIKPEAFEANRFYTVINKKSGEIVPMEVNFNFDDPNLIILPLAFGKRQGREFIWNDLLSLETGSLKLANGRVIEKTLYNRRTRQDEPALFVALTFERREVLDSSNIKPMNLIGVDRGENIPAVIALTDPEGCPLSRFKDSLGNPTHILRIGESYKEKQRTIQAKKEVEQRRAGGYSRKYASKAKNLADDMVRNTARDLLYYAVTQDAMLIFENLSRGFGRQGKRTFMAERQYTRMEDWLTAKLAYEGLPSKTYLSKTLAQYTSKTCSNCGFTITSADYDRVLEKLKKTATGWMTTINGKELKVEGQITYYNRYKRQNVVKDLSVELDRLSEESVNNDISSWTKGRSGEALSLLKKRFSHRPVQEKFVCLNCGFETHADEQAALNIARSWLFLRSQEYKKYQTNKTTGNTDKRAFVETWQSFYRKKLKEVWKPAV

SEQ ID NO: 31294 - protein, 978 aa, synthetic construct
  REGION 1..978: note = engineered CasX variant
QEGKRINKIRRRLVKDSNTKKAGKTGPMKTLLVRVMTPDLRERLENLRKKPENIPQPISNTSRANLNKLLTDYTEMKKAILHVYWEEFQKDPVGLMSRVAQPASKKIDQNKLKPEMDEKGNLTTAGFACSQCGQPLFVYKLEQVSEKGKAYTNYFGRCNVAEHEKLILLAQLKPEKDSDEAVTYSLGKFGQRALDFYSIHVTKESTHPVKPLAQIAGNRYASPVGKALSDACMGTIASFLSKYQDIIIEHQKVVKGNQKRLESLRELAGKENLEYPSVTLPPQPHTKEGVDAYNEVIARVRMWVNLNLWQKLKLSRDDAKPLLRLKGFPSFPLVERQANAEVDWWDMVCNVKKLINEKKEDGKVFWQNLAGYKRQEALRPYLSSEEDRKKGKKFARYQLGDLLLHLEKKHGEDWGKVYDEAWERIDKKVEGLSKHIKLEEERRSEDAQSKAALTDWLRAKASFVIEGLKEADKDEFCRCELKLQKWYGDLRGKPFAIEAENSILDISGFSKQYNCAFIWQKDGVKKLNLYLIINYFKGGKLRFKKIKPEAFEANRFYTVINKKSGEIVPMEVNFNFDDPNLIILPLAFGKRQGREFIWNDLLSLETGSLKLANGRVIEKTLYNRRTRQDEPALFVALTFERREVLDSSNIKPMNLIGVDRGENIPAVIALTDPEGCPLSRFKDSLGNPTHILRIGESYKEKQRTIQAKKEVEQRRAGGYSRKYASKAKNLADDMVRNTARDLLYYAVTQDAMLIFENLSRGFGRQGKRTFMAERQYTRMEDWLTAKLAYEGLPSKTYLSKTLAQYTSKTCSNCGFTITSADYDRVLEKLKKTATGWMTTINGKELKVEGQITYYNRYKRQNVVKDLSVELDRLSEESVNNDISSWTKGRSGEALSLLKKRFSHRPVQEKFVCLNCGFETHADEQAALNIARSWLFLRSQEYKKYQTNKTTGNTDKRAFVETWQSFYRKKLKEVWKPAV

SEQ ID NO: 31295 - protein, 978 aa, synthetic construct
  REGION 1..978: note = engineered CasX variant
QEGKRINKIRRRLVKDSNTKKAGKTGPMKTLLVRVMTPDLRERLENLRKKPENIPQPISNTSRANLNKLLTDYTEMKKAILHVYWEEFQKDPVGLMSRVAQPASKKIDQNKLKPEMDEKGNLTTAGFACSQCGQPLFVYKLEQVSEKGKAYTNYFGRCNVAEHEKLILLAQLKPEKDSDEAVTYSLGKFGQRALDFYSIHVTKESTHPVKPLAQIAGNRYASYPVGKALSDACMGTIASFLSKYQDIIIEHQKVVKGNQKRLESLRELAGKENLEYPSVTLPPQPHTKEGVDAYNEVIARVRMWVNLNLWQKLKLSRDDAKPLLRLKGFPSFPLVERQANEVDWWDMVCNVKKLINEKKEDGKVFWQNLAGYKRQEALRPYLSSEEDRKKGKKFARTQLGDLLLHLEKKHGEDWGKVYDEAWERIDKKVEGLSKHIKLEEERRSEDAQSKAALTDWLRAKASFVIEGLKEADKDEFCRCELKLQKWYGDLRGKPFAIEAENSILDISGFSKQYNCAFIWQKDGVKKLNLYLIINYFKGGKLRFKKIKPEAFEANRFYTVINKKSGEIVPMEVNFNFDDPNLIILPLAFGKRQGREFIWNDLLSLETGSLKLANGRVIEKTLYNRRTRQDEPALFVALTFERREVLDSSNIKPMNLIGVDRGENIPAVIALTDPEGCPLSRFKDSLGNPTHILRIGESYKEKQRTIQAKKEVEQRRAGGYSRKYASKAKNLADDMVRNTARDLLYYAVTQDAMLIFENLSRGFGRQGKRTFMAERQYTRMEDWLTAKLAYEGLPSKTYLSKTLAQYTSKTCSNCGFTITSADYDRVLEKLKKTATGWMTTINGKELKVEGQITYYNRYKRQNVVKDLSVELDRLSEESVNNDISSWTKGRSGEALSLLKKRFSHRPVQEKFVCLNCGFETHADEQAALNIARSWLFLRSQEYKKYQTNKTTGNTDKRAFVETWQSFYRKKLKEVWKPAV

SEQ ID NO: 31296 - protein, 978 aa, synthetic construct
  REGION 1..978: note = engineered CasX variant
QEGKRINKIRRRLVKDSNTKKAGKTGPMKTLLVRVMTPDLRERLENLRKKPENIPQPISNTSRANLNKLLTDYTEMKKAILHVYWEEFQKDPVGLMSRVAQPASKKIDQNKLKPEMDEKGNLTTAGFACSQCGQPLFVYKLEQVSEKGKAYTNYFGRCNVAEHEKLILLAQLKPEKDSDEAVTYSLGKFGQRALDFYSIHVTKESTHPVKPLAQIAGNRYASHPVGKALSDACMGTIASFLSKYQDIIIEHQKVVKGNQKRLESLRELAGKENLEYPSVTLPPQPHTKEGVDAYNEVIARVRMWVNLNLWQKLKLSRDDAKPLLRLKGFPSFPLVERQANEVDWWDMVCNVKKLINEKKEDGKVFWQNLAGYKRQEALRPYLSSEEDRKKGKKFARTQLGDLLLHLEKKHGEDWGKVYDEAWERIDKKVEGLSKHIKLEEERRSEDAQSKAALTDWLRAKASFVIEGLKEADKDEFCRCELKLQKWYGDLRGKPFAIEAENSILDISGFSKQYNCAFIWQKDGVKKLNLYLIINYFKGGKLRFKKIKPEAFEANRFYTVINKKSGEIVPMEVNFNFDDPNLIILPLAFGKRQGREFIWNDLLSLETGSLKLANGRVIEKTLYNRRTRQDEPALFVALTFERREVLDSSNIKPMNLIGVDRGENIPAVIALTDPEGCPLSRFKDSLGNPTHILRIGESYKEKQRTIQAKKEVEQRRAGGYSRKYASKAKNLADDMVRNTARDLLYYAVTQDAMLIFENLSRGFGRQGKRTFMAERQYTRMEDWLTAKLAYEGLPSKTYLSKTLAQYTSKTCSNCGFTITSADYDRVLEKLKKTATGWMTTINGKELKVEGQITYYNRYKRQNVVKDLSVELDRLSEESVNNDISSWTKGRSGEALSLLKKRFSHRPVQEKFVCLNCGFETHADEQAALNIARSWLFLRSQEYKKYQTNKTTGNTDKRAFVETWQSFYRKKLKEVWKPAV

SEQ ID NO: 31297 - protein, 978 aa, synthetic construct
  REGION 1..978: note = engineered CasX variant
QEGKRINKIRRRLVKDSNTKKAGKTGPMKTLLVRVMTPDLRERLENLRKKPENIPQPISNTSRANLNKLLTDYTEMKKAILHVYWEEFQKDPVGLMSRVAQPASKKIDQNKLKPEMDEKGNLTTAGFACSQCGQPLFVYKLEQVSEKGKAYTNYFGRCNVAEHEKLILLAQLKPEKDSDEAVTYSLGKFGQRALDFYSIHVTKESTHPVKPLAQIAGNRYASSPVGKALSDACMGTIASFLSKYQDIIIEHQKVVKGNQKRLESLRELAGKENLEYPSVTLPPQPHTKEGVDAYNEVIARVRMWVNLNLWQKLKLSRDDAKPLLRLKGFPSFPLVERQANEVDWWDMVCNVKKLINEKKEDGKVFWQNLAGYKRQEALRPYLSSEEDRKKGKKFARTQLGDLLLHLEKKHGEDWGKVYDEAWERIDKKVEGLSKHIKLEEERRSEDAQSKAALTDWLRAKASFVIEGLKEADKDEFCRCELKLQKWYGDLRGKPFAIEAENSILDISGFSKQYNCAFIWQKDGVKKLNLYLIINYFKGGKLRFKKIKPEAFEANRFYTVINKKSGEIVPMEVNFNFDDPNLIILPLAFGKRQGREFIWNDLLSLETGSLKLANGRVIEKTLYNRRTRQDEPALFVALTFERREVLDSSNIKPMNLIGVDRGENIPAVIALTDPEGCPLSRFKDSLGNPTHILRIGESYKEKQRTIQAKKEVEQRRAGGYSRKYASKAKNLADDMVRNTARDLLYYAVTQDAMLIFENLSRGFGRQGKRTFMAERQYTRMEDWLTAKLAYEGLPSKTYLSKTLAQYTSKTCSNCGFTITSADYDRVLEKLKKTATGWMTTINGKELKVEGQITYYNRYKRQNVVKDLSVELDRLSEESVNNDISSWTKGRSGEALSLLKKRFSHRPVQEKFVCLNCGFETHADEQAALNIARSWLFLRSQEYKKYQTNKTTGNTDKRAFVETWQSFYRKKLKEVWKPAV

SEQ ID NO: 31298 - protein, 978 aa, synthetic construct
  REGION 1..978: note = engineered CasX variant
QEGKRINKIRRRLVKDSNTKKAGKTGPMKTLLVRVMTPDLRERLENLRKKPENIPQPISNTSRANLNKLLTDYTEMKKAILHVYWEEFQKDPVGLMSRVAQPASKKIDQNKLKPEMDEKGNLTTAGFACSQCGQPLFVYKLEQVSEKGKAYTNYFGRCNVAEHEKLILLAQLKPEKDSDEAVTYSLGKFGQRALDFYSIHVTKESTHPVKPLAQIAGNRYASTPVGKALSDACMGTIASFLSKYQDIIIEHQKVVKGNQKRLESLRELAGKENLEYPSVTLPPQPHTKEGVDAYNEVIARVRMWVNLNLWQKLKLSRDDAKPLLRLKGFPSFPLVERQANEVDWWDMVCNVKKLINEKKEDGKVFWQNLAGYKRQEALRPYLSSEEDRKKGKKFARTQLGDLLLHLEKKHGEDWGKVYDEAWERIDKKVEGLSKHIKLEEERRSEDAQSKAALTDWLRAKASFVIEGLKEADKDEFCRCELKLQKWYGDLRGKPFAIEAENSILDISGFSKQYNCAFIWQKDGVKKLNLYLIINYFKGGKLRFKKIKPEAFEANRFYTVINKKSGEIVPMEVNFNFDDPNLIILPLAFGKRQGREFIWNDLLSLETGSLKLANGRVIEKTLYNRRTRQDEPALFVALTFERREVLDSSNIKPMNLIGVDRGENIPAVIALTDPEGCPLSRFKDSLGNPTHILRIGESYKEKQRTIQAKKEVEQRRAGGYSRKYASKAKNLADDMVRNTARDLLYYAVTQDAMLIFENLSRGFGRQGKRTFMAERQYTRMEDWLTAKLAYEGLPSKTYLSKTLAQYTSKTCSNCGFTITSADYDRVLEKLKKTATGWMTTINGKELKVEGQITYYNRYKRQNVVKDLSVELDRLSEESVNNDISSWTKGRSGEALSLLKKRFSHRPVQEKFVCLNCGFETHADEQAALNIARSWLFLRSQEYKKYQTNKTTGNTDKRAFVETWQSFYRKKLKEVWKPAV

SEQ ID NO: 31299 - protein, 978 aa, synthetic construct
  REGION 1..978: note = engineered CasX variant
QEGKRINKIRRRLVKDSNTKKAGKTGPMKTLLVRVMTPDLRERLENLRKKPENIPQPISNTSRANLNKLLTDYTEMKKAILHVYWEEFQKDPVGLMSRVAQPASKKIDQNKLKPEMDEKGNLTTAGFACSQCGQPLFVYKLEQVSEKGKAYTNYFGRCNVAEHEKLILLAQLKPEKDSDEAVTYSLGKFGQRALDFYSIHVTKESTHPVKPLAQIAGNRYASAPVGKALSDACMGTIASFLSKYQDIIIEHQKVVKGNQKRLESLRELAGKENLEYPSVTLPPQPHTKEGVDAYNEVIARVRMWVNLNLWQKLKLSRDDAKPLLRLKGFPSFPLVERQANEVDWWDMVCNVKKLINEKKEDGKVFWQNLAGYKRQEALRPYLSSEEDRKKGKKFARTQLGDLLLHLEKKHGEDWGKVYDEAWERIDKKVEGLSKHIKLEEERRSEDAQSKAALTDWLRAKASFVIEGLKEADKDEFCRCELKLQKWYGDLRGKPFAIEAENSILDISGFSKQYNCAFIWQKDGVKKLNLYLIINYFKGGKLRFKKIKPEAFEANRFYTVINKKSGEIVPMEVNFNFDDPNLIILPLAFGKRQGREFIWNDLLSLETGSLKLANGRVIEKTLYNRRTRQDEPALFVALTFERREVLDSSNIKPMNLIGVDRGENIPAVIALTDPEGCPLSRFKDSLGNPTHILRIGESYKEKQRTIQAKKEVEQRRAGGYSRKYASKAKNLADDMVRNTARDLLYYAVTQDAMLIFENLSRGFGRQGKRTFMAERQYTRMEDWLTAKLAYEGLPSKTYLSKTLAQYTSKTCSNCGFTITSADYDRVLEKLKKTATGWMTTINGKELKVEGQITYYNRYKRQNVVKDLSVELDRLSEESVNNDISSWTKGRSGEALSLLKKRFSHRPVQEKFVCLNCGFETHADEQAALNIARSWLFLRSQEYKKYQTNKTTGNTDKRAFVETWQSFYRKKLKEVWKPAV

SEQ ID NO: 31300 - protein, 978 aa, synthetic construct
  REGION 1..978: note = engineered CasX variant
QEGKRINKIRRRLVKDSNTKKAGKTGPMKTLLVRVMTPDLRERLENLRKKPENIPQPISNTSRANLNKLLTDYTEMKKAILHVYWEEFQKDPVGLMSRVAQPASKKIDQNKLKPEMDEKGNLTTAGFACSQCGQPLFVYKLEQVSEKGKAYTNYFGRCNVAEHEKLILLAQLKPEKDSDEAVTYSLGKFGQRALDFYSIHVTKESTHPVKPLAQIAGNRYASVPVGKALSDACMGTIASFLSKYQDIIIEHQKVVKGNQKRLESLRELAGKENLEYPSVTLPPQPHTKEGVDAYNEVIARVRMWVNLNLWQKLKLSRDDAKPLLRLKGFPSFPLVERQANEVDWWDMVCNVKKLINEKKEDGKVFWQNLAGYKRQEALRPYLSSEEDRKKGKKFARTQLGDLLLHLEKKHGEDWGKVYDEAWERIDKKVEGLSKHIKLEEERRSEDAQSKAALTDWLRAKASFVIEGLKEADKDEFCRCELKLQKWYGDLRGKPFAIEAENSILDISGFSKQYNCAFIWQKDGVKKLNLYLIINYFKGGKLRFKKIKPEAFEANRFYTVINKKSGEIVPMEVNFNFDDPNLIILPLAFGKRQGREFIWNDLLSLETGSLKLANGRVIEKTLYNRRTRQDEPALFVALTFERREVLDSSNIKPMNLIGVDRGENIPAVIALTDPEGCPLSRFKDSLGNPTHILRIGESYKEKQRTIQAKKEVEQRRAGGYSRKYASKAKNLADDMVRNTARDLLYYAVTQDAMLIFENLSRGFGRQGKRTFMAERQYTRMEDWLTAKLAYEGLPSKTYLSKTLAQYTSKTCSNCGFTITSADYDRVLEKLKKTATGWMTTINGKELKVEGQITYYNRYKRQNVVKDLSVELDRLSEESVNNDISSWTKGRSGEALSLLKKRFSHRPVQEKFVCLNCGFETHADEQAALNIARSWLFLRSQEYKKYQTNKTTGNTDKRAFVETWQSFYRKKLKEVWKPAV

SEQ ID NO: 31301 - protein, 978 aa, synthetic construct
  REGION 1..978: note = engineered CasX variant
QEGKRINKIRRRLVKDSNTKKAGKTGPMKTLLVRVMTPDLRERLENLRKKPENIPQPISNTSRANLNKLLTDYTEMKKAILHVYWEEFQKDPVGLMSRVAQPASKKIDQNKLKPEMDEKGNLTTAGFACSQCGQPLFVYKLEQVSEKGKAYTNYFGRCNVAEHEKLIKLAQLKPEKDSDEAVTYSLGKFGQRALDFYSIHVTKESTHPVKPLAQIAGNRYASGPVGKALSDACMGTIASFLSKYQDIIIEHQKVVKGNQKRLESLRELAGKENLEYPSVTLPPQPHTKEGVDAYNEVIARVRMWVNLNLWQKLKLSRDDAKPLLRLKGFPSFPLVERQANEVDWWDMVCNVKKLINEKKEDGKVFWQNLAGYKRQEALRPYLSSEEDRKKGKKFARTQLGDLLLHLEKKHGEDWGKVYDEAWERIDKKVEGLSKHIKLEEERRSEDAQSKAALTDWLRAKASFVIEGLKEADKDEFCRCELKLQKWYGDLRGKPFAIEAENSILDISGFSKQYNCAFIWQKDGVKKLNLYLIINYFKGGKLRFKKIKPEAFEANRFYTVINKKSGEIVPMEVNFNFDDPNLIILPLAFGKRQGREFIWNDLLSLETGSLKLANGRVIEKTLYNRRTRQDEPALFVALTFERREVLDSSNIKPMNLIGVDRGENIPAVIALTDPEGCPLSRFKDSLGNPTHILRIGESYKEKQRTIQAKKEVEQRRAGGYSRKYASKAKNLADDMVRNTARDLLYYAVTQDAMLIFENLSRGFGRQGKRTFMAERQYTRMEDWLTAKLAYEGLPSKTYLSKTLAQYTSKTCSNCGFTITSADYDRVLEKLKKTATGWMTTINGKELKVEGQITYYNRYKRQNVVKDLSVELDRLSEESVNNDISSWTKGRSGEALSLLKKRFSHRPVQEKFVCLNCGFETHADEQAALNIARSWLFLRSQEYKKYQTNKTTGNTDKRAFVETWQSFYRKKLKEVWKPAV

SEQ ID NO: 31302 - protein, 977 aa, synthetic construct
  REGION 1..977: note = engineered CasX variant
QEGKRINKIRRRLVKDSNTKKAGKTGPMKTLLVRVMTPDLRERLENLRKKPENIPQPISNTSRANLNKLLTDYTEMKKAILHVYWEEFQKDPVGLMSRVAQPASKKIDQNKLKPEMDEKGNLTTAGFACSQCGQPLFVYKLEQVSEKGKAYTNYFGRCNVAEHEKLILLAQLKPEKDSDEAVTYSLGKFGQRALDFYSIHVTKESTHPVKPLAQIAGNRYASPVGKALSDACMGTIASFLSKYQDIIIEHQKVVKGNQKRLESLRELAGKENLEYPSVTLPPQPHTKEGVDAYNEVIARVRMWVNLNLWQKLKLSRDDAKPLLRLKGFPSFPLVERQANEVDWWDMVCNVKKLINEKKEDGKVFWQNLAGYKRQEALRPYLSSEEDRKKGKKFARTQLGDLLLHLEKKHGEDWGKVYDEAWERIDKKVEGLSKHIKLEEERRSEDAQSKAALTDWLRAKASFVIEGLKEADKDEFCRCELKLQKWYGDLRGKPFAIEAENSILDISGFSKQYNCAFIWQKDGVKKLNLYLIINYFKGGKLRFKKIKPEAFEANRFYTVINKKSGEIVPMEVNFNFDDPNLIILPLAFGKRQGREFIWNDLLSLETGSLKLANGRVIEKTLYNRRTRQDEPALFVALTFERREVLDSSNIKPMNLIGVDRGENIPAVIALTDPEGCPLSRFKDSLGNPTHILRIGESYKEKQRTIQAKKEVEQRRAGGYSRKYASKAKNLADDMVRNTARDLLYYAVTQDAMLIFENLSRGFGRQGKRTFMAERQYTRMEDWLTAKLAYEGLPSKTYLSKTLAQYTSKTCSNCGFTITSADYDRVLEKLKKTATGWMTTINGKELKVEGQITYYNRYKRQNVVKDLSVELDRLSEESVNNDISSWTKGRSGEALSLLKKRFSHRPVQEKFVCLNCGFETHADEQAALNIARSWLFLRSQEYKKYQTNKTTGNTDKRAFVETWQSFYRKKLKEVWKPAV

SEQ ID NO: 31303 - protein, 979 aa, synthetic construct
  REGION 1..979: note = engineered CasX variant
QEGKRINKIRRRLVKDSNTKKAGKTGPMKTLLVRVMTPDLRERLENLRKKPENIPQPISNTSRANLNKLLTDYTEMKKAILHVYWEEFQKDPVGLMSRVAQPASKKIDQNKLKPEMDEKGNLTTAGFACSQCGQPLFVYKLEQVSEKGKAYTNYFGRCNVAEHEKLILLAQLKPEKDSDEAVTYSLGKFGQRALDFYSIHVTKESTHPVKPLAQIAGNRYASYPVGKALSDACMGTIASFLSKYQDIIIEHQKVVKGNQKRLESLRELAGKENLEYPSVTLPPQPHTKEGVDAYNEVIARVRMWVNLNLWQKLKLSRDDAKPLLRLKGFPSFPLVERQANEVDWWDMVCNVKKLINEKKEDGKVFWQNLAGYKRQEALRPYLSSEEDRKKGKKFARYQLGDLLLHLEKKHEGEDWGKVYDEAWERIDKKVEGLSKHIKLEEERRSEDAQSKAALTDWLRAKASFVIEGLKEADKDEFCRCELKLQKWYGDLRGKPFAIEAENSILDISGFSKQYNCAFIWQKDGVKKLNLYLIINYFKGGKLRFKKIKPEAFEANRFYTVINKKSGEIVPMEVNFNFDDPNLIILPLAFGKRQGREFIWNDLLSLETGSLKLANGRVIEKTLYNRRTRQDEPALFVALTFERREVLDSSNIKPMNLIGVDRGENIPAVIALTDPEGCPLSRFKDSLGNPTHILRIGESYKEKQRTIQAKKEVEQRRAGGYSRKYASKAKNLADDMVRNTARDLLYYAVTQDAMLIFENLSRGFGRQGKRTFMAERQYTRMEDWLTAKLAYEGLPSKTYLSKTLAQYTSKTCSNCGFTITSADYDRVLEKLKKTATGWMTTINGKELKVEGQITYYNRYKRQNVVKDLSVELDRLSEESVNNDISSWTKGRSGEALSLLKKRFSHRPVQEKFVCLNCGFETHADEQAALNIARSWLFLRSQEYKKYQTNKTTGNTDKRAFVETWQSFYRKKLKEVWKPAV

SEQ ID NO: 31304 - protein, 979 aa, synthetic construct
  REGION 1..979: note = engineered CasX variant
QEGKRINKIRRRLVKDSNTKKAGKTGPMKTLLVRVMTPDLRERLENLRKKPENIPQPISNTSRANLNKLLTDYTEMKKAILHVYWEEFQKDPVGLMSRVAQPASKKIDQNKLKPEMDEKGNLTTAGFACSQCGQPLFVYKLEQVSEKGKAYTNYFGRCNVAEHEKLILLAQLKPEKDSDEAVTYSLGKFGQRALDFYSIHVTKESTHPVKPLAQIAGNRYASHPVGKALSDACMGTIASFLSKYQDIIIEHQKVVKGNQKRLESLRELAGKENLEYPSVTLPPQPHTKEGVDAYNEVIARVRMWVNLNLWQKLKLSRDDAKPLLRLKGFPSFPLVERQANEVDWWDMVCNVKKLINEKKEDGKVFWQNLAGYKRQEALRPYLSSEEDRKKGKKFARYQLGDLLLHLEKKHEGEDWGKVYDEAWERIDKKVEGLSKHIKLEEERRSEDAQSKAALTDWLRAKASFVIEGLKEADKDEFCRCELKLQKWYGDLRGKPFAIEAENSILDISGFSKQYNCAFIWQKDGVKKLNLYLIINYFKGGKLRFKKIKPEAFEANRFYTVINKKSGEIVPMEVNFNFDDPNLIILPLAFGKRQGREFIWNDLLSLETGSLKLANGRVIEKTLYNRRTRQDEPALFVALTFERREVLDSSNIKPMNLIGVDRGENIPAVIALTDPEGCPLSRFKDSLGNPTHILRIGESYKEKQRTIQAKKEVEQRRAGGYSRKYASKAKNLADDMVRNTARDLLYYAVTQDAMLIFENLSRGFGRQGKRTFMAERQYTRMEDWLTAKLAYEGLPSKTYLSKTLAQYTSKTCSNCGFTITSADYDRVLEKLKKTATGWMTTINGKELKVEGQITYYNRYKRQNVVKDLSVELDRLSEESVNNDISSWTKGRSGEALSLLKKRFSHRPVQEKFVCLNCGFETHADEQAALNIARSWLFLRSQEYKKYQTNKTTGNTDKRAFVETWQSFYRKKLKEVWKPAV

SEQ ID NO: 31305 - protein, 979 aa, synthetic construct
  REGION 1..979: note = engineered CasX variant
QEGKRINKIRRRLVKDSNTKKAGKTGPMKTLLVRVMTPDLRERLENLRKKPENIPQPISNTSRANLNKLLTDYTEMKKAILHVYWEEFQKDPVGLMSRVAQPASKKIDQNKLKPEMDEKGNLTTAGFACSQCGQPLFVYKLEQVSEKGKAYTNYFGRCNVAEHEKLILLAQLKPEKDSDEAVTYSLGKFGQRALDFYSIHVTKESTHPVKPLAQIAGNRYASSPVGKALSDACMGTIASFLSKYQDIIIEHQKVVKGNQKRLESLRELAGKENLEYPSVTLPPQPHTKEGVDAYNEVIARVRMWVNLNLWQKLKLSRDDAKPLLRLKGFPSFPLVERQANEVDWWDMVCNVKKLINEKKEDGKVFWQNLAGYKRQEALRPYLSSEEDRKKGKKFARYQLGDLLLHLEKKHEGEDWGKVYDEAWERIDKKVEGLSKHIKLEEERRSEDAQSKAALTDWLRAKASFVIEGLKEADKDEFCRCELKLQKWYGDLRGKPFAIEAENSILDISGFSKQYNCAFIWQKDGVKKLNLYLIINYFKGGKLRFKKIKPEAFEANRFYTVINKKSGEIVPMEVNFNFDDPNLIILPLAFGKRQGREFIWNDLLSLETGSLKLANGRVIEKTLYNRRTRQDEPALFVALTFERREVLDSSNIKPMNLIGVDRGENIPAVIALTDPEGCPLSRFKDSLGNPTHILRIGESYKEKQRTIQAKKEVEQRRAGGYSRKYASKAKNLADDMVRNTARDLLYYAVTQDAMLIFENLSRGFGRQGKRTFMAERQYTRMEDWLTAKLAYEGLPSKTYLSKTLAQYTSKTCSNCGFTITSADYDRVLEKLKKTATGWMTTINGKELKVEGQITYYNRYKRQNVVKDLSVELDRLSEESVNNDISSWTKGRSGEALSLLKKRFSHRPVQEKFVCLNCGFETHADEQAALNIARSWLFLRSQEYKKYQTNKTTGNTDKRAFVETWQSFYRKKLKEVWKPAV

SEQ ID NO: 31306 - protein, 979 aa, synthetic construct
  REGION 1..979: note = engineered CasX variant
QEGKRINKIRRRLVKDSNTKKAGKTGPMKTLLVRVMTPDLRERLENLRKKPENIPQPISNTSRANLNKLLTDYTEMKKAILHVYWEEFQKDPVGLMSRVAQPASKKIDQNKLKPEMDEKGNLTTAGFACSQCGQPLFVYKLEQVSEKGKAYTNYFGRCNVAEHEKLILLAQLKPEKDSDEAVTYSLGKFGQRALDFYSIHVTKESTHPVKPLAQIAGNRYASTPVGKALSDACMGTIASFLSKYQDIIIEHQKVVKGNQKRLESLRELAGKENLEYPSVTLPPQPHTKEGVDAYNEVIARVRMWVNLNLWQKLKLSRDDAKPLLRLKGFPSFPLVERQANEVDWWDMVCNVKKLINEKKEDGKVFWQNLAGYKRQEALRPYLSSEEDRKKGKKFARYQLGDLLLHLEKKHEGEDWGKVYDEAWERIDKKVEGLSKHIKLEEERRSEDAQSKAALTDWLRAKASFVIEGLKEADKDEFCRCELKLQKWYGDLRGKPFAIEAENSILDISGFSKQYNCAFIWQKDGVKKLNLYLIINYFKGGKLRFKKIKPEAFEANRFYTVINKKSGEIVPMEVNFNFDDPNLIILPLAFGKRQGREFIWNDLLSLETGSLKLANGRVIEKTLYNRRTRQDEPALFVALTFERREVLDSSNIKPMNLIGVDRGENIPAVIALTDPEGCPLSRFKDSLGNPTHILRIGESYKEKQRTIQAKKEVEQRRAGGYSRKYASKAKNLADDMVRNTARDLLYYAVTQDAMLIFENLSRGFGRQGKRTFMAERQYTRMEDWLTAKLAYEGLPSKTYLSKTLAQYTSKTCSNCGFTITSADYDRVLEKLKKTATGWMTTINGKELKVEGQITYYNRYKRQNVVKDLSVELDRLSEESVNNDISSWTKGRSGEALSLLKKRFSHRPVQEKFVCLNCGFETHADEQAALNIARSWLFLRSQEYKKYQTNKTTGNTDKRAFVETWQSFYRKKLKEVWKPAV

SEQ ID NO: 31307 - protein, 979 aa, synthetic construct
  REGION 1..979: note = engineered CasX variant
QEGKRINKIRRRLVKDSNTKKAGKTGPMKTLLVRVMTPDLRERLENLRKKPENIPQPISNTSRANLNKLLTDYTEMKKAILHVYWEEFQKDPVGLMSRVAQPASKKIDQNKLKPEMDEKGNLTTAGFACSQCGQPLFVYKLEQVSEKGKAYTNYFGRCNVAEHEKLILLAQLKPEKDSDEAVTYSLGKFGQRALDFYSIHVTKESTHPVKPLAQIAGNRYASAPVGKALSDACMGTIASFLSKYQDIIIEHQKVVKGNQKRLESLRELAGKENLEYPSVTLPPQPHTKEGVDAYNEVIARVRMWVNLNLWQKLKLSRDDAKPLLRLKGFPSFPLVERQANEVDWWDMVCNVKKLINEKKEDGKVFWQNLAGYKRQEALRPYLSSEEDRKKGKKFARYQLGDLLLHLEKKHEGEDWGKVYDEAWERIDKKVEGLSKHIKLEEERRSEDAQSKAALTDWLRAKASFVIEGLKEADKDEFCRCELKLQKWYGDLRGKPFAIEAENSILDISGFSKQYNCAFIWQKDGVKKLNLYLIINYFKGGKLRFKKIKPEAFEANRFYTVINKKSGEIVPMEVNFNFDDPNLIILPLAFGKRQGREFIWNDLLSLETGSLKLANGRVIEKTLYNRRTRQDEPALFVALTFERREVLDSSNIKPMNLIGVDRGENIPAVIALTDPEGCPLSRFKDSLGNPTHILRIGESYKEKQRTIQAKKEVEQRRAGGYSRKYASKAKNLADDMVRNTARDLLYYAVTQDAMLIFENLSRGFGRQGKRTFMAERQYTRMEDWLTAKLAYEGLPSKTYLSKTLAQYTSKTCSNCGFTITSADYDRVLEKLKKTATGWMTTINGKELKVEGQITYYNRYKRQNVVKDLSVELDRLSEESVNNDISSWTKGRSGEALSLLKKRFSHRPVQEKFVCLNCGFETHADEQAALNIARSWLFLRSQEYKKYQTNKTTGNTDKRAFVETWQSFYRKKLKEVWKPAV

SEQ ID NO: 31308 - protein, 979 aa, synthetic construct
  REGION 1..979: note = engineered CasX variant
QEGKRINKIRRRLVKDSNTKKAGKTGPMKTLLVRVMTPDLRERLENLRKKPENIPQPISNTSRANLNKLLTDYTEMKKAILHVYWEEFQKDPVGLMSRVAQPASKKIDQNKLKPEMDEKGNLTTAGFACSQCGQPLFVYKLEQVSEKGKAYTNYFGRCNVAEHEKLILLAQLKPEKDSDEAVTYSLGKFGQRALDFYSIHVTKESTHPVKPLAQIAGNRYASVPVGKALSDACMGTIASFLSKYQDIIIEHQKVVKGNQKRLESLRELAGKENLEYPSVTLPPQPHTKEGVDAYNEVIARVRMWVNLNLWQKLKLSRDDAKPLLRLKGFPSFPLVERQANEVDWWDMVCNVKKLINEKKEDGKVFWQNLAGYKRQEALRPYLSSEEDRKKGKKFARYQLGDLLLHLEKKHEGEDWGKVYDEAWERIDKKVEGLSKHIKLEEERRSEDAQSKAALTDWLRAKASFVIEGLKEADKDEFCRCELKLQKWYGDLRGKPFAIEAENSILDISGFSKQYNCAFIWQKDGVKKLNLYLIINYFKGGKLRFKKIKPEAFEANRFYTVINKKSGEIVPMEVNFNFDDPNLIILPLAFGKRQGREFIWNDLLSLETGSLKLANGRVIEKTLYNRRTRQDEPALFVALTFERREVLDSSNIKPMNLIGVDRGENIPAVIALTDPEGCPLSRFKDSLGNPTHILRIGESYKEKQRTIQAKKEVEQRRAGGYSRKYASKAKNLADDMVRNTARDLLYYAVTQDAMLIFENLSRGFGRQGKRTFMAERQYTRMEDWLTAKLAYEGLPSKTYLSKTLAQYTSKTCSNCGFTITSADYDRVLEKLKKTATGWMTTINGKELKVEGQITYYNRYKRQNVVKDLSVELDRLSEESVNNDISSWTKGRSGEALSLLKKRFSHRPVQEKFVCLNCGFETHADEQAALNIARSWLFLRSQEYKKYQTNKTTGNTDKRAFVETWQSFYRKKLKEVWKPAV

SEQ ID NO: 31309 - protein, 979 aa, synthetic construct
  REGION 1..979: note = engineered CasX variant
QEGKRINKIRRRLVKDSNTKKAGKTGPMKTLLVRVMTPDLRERLENLRKKPENIPQPISNTSRANLNKLLTDYTEMKKAILHVYWEEFQKDPVGLMSRVAQPASKKIDQNKLKPEMDEKGNLTTAGFACSQCGQPLFVYKLEQVSEKGKAYTNYFGRCNVAEHEKLIKLAQLKPEKDSDEAVTYSLGKFGQRALDFYSIHVTKESTHPVKPLAQIAGNRYASGPVGKALSDACMGTIASFLSKYQDIIIEHQKVVKGNQKRLESLRELAGKENLEYPSVTLPPQPHTKEGVDAYNEVIARVRMWVNLNLWQKLKLSRDDAKPLLRLKGFPSFPLVERQANEVDWWDMVCNVKKLINEKKEDGKVFWQNLAGYKRQEALRPYLSSEEDRKKGKKFARYQLGDLLLHLEKKHEGEDWGKVYDEAWERIDKKVEGLSKHIKLEEERRSEDAQSKAALTDWLRAKASFVIEGLKEADKDEFCRCELKLQKWYGDLRGKPFAIEAENSILDISGFSKQYNCAFIWQKDGVKKLNLYLIINYFKGGKLRFKKIKPEAFEANRFYTVINKKSGEIVPMEVNFNFDDPNLIILPLAFGKRQGREFIWNDLLSLETGSLKLANGRVIEKTLYNRRTRQDEPALFVALTFERREVLDSSNIKPMNLIGVDRGENIPAVIALTDPEGCPLSRFKDSLGNPTHILRIGESYKEKQRTIQAKKEVEQRRAGGYSRKYASKAKNLADDMVRNTARDLLYYAVTQDAMLIFENLSRGFGRQGKRTFMAERQYTRMEDWLTAKLAYEGLPSKTYLSKTLAQYTSKTCSNCGFTITSADYDRVLEKLKKTATGWMTTINGKELKVEGQITYYNRYKRQNVVKDLSVELDRLSEESVNNDISSWTKGRSGEALSLLKKRFSHRPVQEKFVCLNCGFETHADEQAALNIARSWLFLRSQEYKKYQTNKTTGNTDKRAFVETWQSFYRKKLKEVWKPAV

SEQ ID NO: 31310 - protein, 978 aa, synthetic construct
  REGION 1..978: note = engineered CasX variant
QEGKRINKIRRRLVKDSNTKKAGKTGPMKTLLVRVMTPDLRERLENLRKKPENIPQPISNTSRANLNKLLTDYTEMKKAILHVYWEEFQKDPVGLMSRVAQPASKKIDQNKLKPEMDEKGNLTTAGFACSQCGQPLFVYKLEQVSEKGKAYTNYFGRCNVAEHEKLILLAQLKPEKDSDEAVTYSLGKFGQRALDFYSIHVTKESTHPVKPLAQIAGNRYASPVGKALSDACMGTIASFLSKYQDIIIEHQKVVKGNQKRLESLRELAGKENLEYPSVTLPPQPHTKEGVDAYNEVIARVRMWVNLNLWQKLKLSRDDAKPLLRLKGFPSFPLVERQANEVDWWDMVCNVKKLINEKKEDGKVFWQNLAGYKRQEALRPYLSSEEDRKKGKKFARYQLGDLLLHLEKKHEGEDWGKVYDEAWERIDKKVEGLSKHIKLEEERRSEDAQSKAALTDWLRAKASFVIEGLKEADKDEFCRCELKLQKWYGDLRGKPFAIEAENSILDISGFSKQYNCAFIWQKDGVKKLNLYLIINYFKGGKLRFKKIKPEAFEANRFYTVINKKSGEIVPMEVNFNFDDPNLIILPLAFGKRQGREFIWNDLLSLETGSLKLANGRVIEKTLYNRRTRQDEPALFVALTFERREVLDSSNIKPMNLIGVDRGENIPAVIALTDPEGCPLSRFKDSLGNPTHILRIGESYKEKQRTIQAKKEVEQRRAGGYSRKYASKAKNLADDMVRNTARDLLYYAVTQDAMLIFENLSRGFGRQGKRTFMAERQYTRMEDWLTAKLAYEGLPSKTYLSKTLAQYTSKTCSNCGFTITSADYDRVLEKLKKTATGWMTTINGKELKVEGQITYYNRYKRQNVVKDLSVELDRLSEESVNNDISSWTKGRSGEALSLLKKRFSHRPVQEKFVCLNCGFETHADEQAALNIARSWLFLRSQEYKKYQTNKTTGNTDKRAFVETWQSFYRKKLKEVWKPAV

SEQ ID NO: 31311 - protein, 978 aa, synthetic construct
  REGION 1..978: note = engineered CasX variant
QEGKRINKIRRRLVKDSNTKKAGKTGPMKTLLVRVMTPDLRERLENLRKKPENIPQPISNTSRANLNKLLTDYTEMKKAILHVYWEEFQKDPVGLMSRVAQPASKKIDQNKLKPEMDEKGNLTTAGFACSQCGQPLFVYKLEQVSEKGKAYTNYFGRCNVAEHEKLILLAQLKPEKDSDEAVTYSLGKFGQRALDFYSIHVTKESTHPVKPLAQIAGNRYASYPVGKALSDACMGTIASFLSKYQDIIIEHQKVVKGNQKRLESLRELAGKENLEYPSVTLPPQPHTKEGVDAYNEVIARVRMWVNLNLWQKLKLSRDDAKPLLRLKGFPSFPLVERQANEVDWWDMVCNVKKLINEKKEDGKVFWQNLAGYKRQEALRPYLSSEEDRKKGKKFARYQLGDLLLHLEKKHGEDWGKVYDEAWERIDKKVEGLSKHIKLEEERRSEDAQSKAALTDWLRAKASFVIEGLKEADKDEFCRCDLKLQKWYGDLRGKPFAIEAENSILDISGFSKQYNCAFIWQKDGVKKLNLYLIINYFKGGKLRFKKIKPEAFEANRFYTVINKKSGEIVPMEVNFNFDDPNLIILPLAFGKRQGREFIWNDLLSLETGSLKLANGRVIEKTLYNRRTRQDEPALFVALTFERREVLDSSNIKPMNLIGVDRGENIPAVIALTDPEGCPLSRFKDSLGNPTHILRIGESYKEKQRTIQAKKEVEQRRAGGYSRKYASKAKNLADDMVRNTARDLLYYAVTQDAMLIFENLSRGFGRQGKRTFMAERQYTRMEDWLTAKLAYEGLPSKTYLSKTLAQYTSKTCSNCGFTITSADYDRVLEKLKKTATGWMTTINGKELKVEGQITYYNRYKRQNVVKDLSVELDRLSEESVNNDISSWTKGRSGEALSLLKKRFSHRPVQEKFVCLNCGFETHADEQAALNIARSWLFLRSQEYKKYQTNKTTGNTDKRAFVETWQSFYRKKLKEVWKPAV

SEQ ID NO: 31312 - protein, 978 aa, synthetic construct
  REGION 1..978: note = engineered CasX variant
QEGKRINKIRRRLVKDSNTKKAGKTGPMKTLLVRVMTPDLRERLENLRKKPENIPQPISNTSRANLNKLLTDYTEMKKAILHVYWEEFQKDPVGLMSRVAQPASKKIDQNKLKPEMDEKGNLTTAGFACSQCGQPLFVYKLEQVSEKGKAYTNYFGRCNVAEHEKLILLAQLKPEKDSDEAVTYSLGKFGQRALDFYSIHVTKESTHPVKPLAQIAGNRYASHPVGKALSDACMGTIASFLSKYQDIIIEHQKVVKGNQKRLESLRELAGKENLEYPSVTLPPQPHTKEGVDAYNEVIARVRMWVNLNLWQKLKLSRDDAKPLLRLKGFPSFPLVERQANEVDWWDMVCNVKKLINEKKEDGKVFWQNLAGYKRQEALRPYLSSEEDRKKGKKFARYQLGDLLLHLEKKHGEDWGKVYDEAWERIDKKVEGLSKHIKLEEERRSEDAQSKAALTDWLRAKASFVIEGLKEADKDEFCRCDLKLQKWYGDLRGKPFAIEAENSILDISGFSKQYNCAFIWQKDGVKKLNLYLIINYFKGGKLRFKKIKPEAFEANRFYTVINKKSGEIVPMEVNFNFDDPNLIILPLAFGKRQGREFIWNDLLSLETGSLKLANGRVIEKTLYNRRTRQDEPALFVALTFERREVLDSSNIKPMNLIGVDRGENIPAVIALTDPEGCPLSRFKDSLGNPTHILRIGESYKEKQRTIQAKKEVEQRRAGGYSRKYASKAKNLADDMVRNTARDLLYYAVTQDAMLIFENLSRGFGRQGKRTFMAERQYTRMEDWLTAKLAYEGLPSKTYLSKTLAQYTSKTCSNCGFTITSADYDRVLEKLKKTATGWMTTINGKELKVEGQITYYNRYKRQNVVKDLSVELDRLSEESVNNDISSWTKGRSGEALSLLKKRFSHRPVQEKFVCLNCGFETHADEQAALNIARSWLFLRSQEYKKYQTNKTTGNTDKRAFVETWQSFYRKKLKEVWKPAV

SEQ ID NO: 31313 - protein, 978 aa, synthetic construct
  REGION 1..978: note = engineered CasX variant
QEGKRINKIRRRLVKDSNTKKAGKTGPMKTLLVRVMTPDLRERLENLRKKPENIPQPISNTSRANLNKLLTDYTEMKKAILHVYWEEFQKDPVGLMSRVAQPASKKIDQNKLKPEMDEKGNLTTAGFACSQCGQPLFVYKLEQVSEKGKAYTNYFGRCNVAEHEKLILLAQLKPEKDSDEAVTYSLGKFGQRALDFYSIHVTKESTHPVKPLAQIAGNRYASSPVGKALSDACMGTIASFLSKYQDIIIEHQKVVKGNQKRLESLRELAGKENLEYPSVTLPPQPHTKEGVDAYNEVIARVRMWVNLNLWQKLKLSRDDAKPLLRLKGFPSFPLVERQANEVDWWDMVCNVKKLINEKKEDGKVFWQNLAGYKRQEALRPYLSSEEDRKKGKKFARYQLGDLLLHLEKKHGEDWGKVYDEAWERIDKKVEGLSKHIKLEEERRSEDAQSKAALTDWLRAKASFVIEGLKEADKDEFCRCDLKLQKWYGDLRGKPFAIEAENSILDISGFSKQYNCAFIWQKDGVKKLNLYLIINYFKGGKLRFKKIKPEAFEANRFYTVINKKSGEIVPMEVNFNFDDPNLIILPLAFGKRQGREFIWNDLLSLETGSLKLANGRVIEKTLYNRRTRQDEPALFVALTFERREVLDSSNIKPMNLIGVDRGENIPAVIALTDPEGCPLSRFKDSLGNPTHILRIGESYKEKQRTIQAKKEVEQRRAGGYSRKYASKAKNLADDMVRNTARDLLYYAVTQDAMLIFENLSRGFGRQGKRTFMAERQYTRMEDWLTAKLAYEGLPSKTYLSKTLAQYTSKTCSNCGFTITSADYDRVLEKLKKTATGWMTTINGKELKVEGQITYYNRYKRQNVVKDLSVELDRLSEESVNNDISSWTKGRSGEALSLLKKRFSHRPVQEKFVCLNCGFETHADEQAALNIARSWLFLRSQEYKKYQTNKTTGNTDKRAFVETWQSFYRKKLKEVWKPAV

SEQ ID NO: 31314 - protein, 978 aa, synthetic construct
  REGION 1..978: note = engineered CasX variant
QEGKRINKIRRRLVKDSNTKKAGKTGPMKTLLVRVMTPDLRERLENLRKKPENIPQPISNTSRANLNKLLTDYTEMKKAILHVYWEEFQKDPVGLMSRVAQPASKKIDQNKLKPEMDEKGNLTTAGFACSQCGQPLFVYKLEQVSEKGKAYTNYFGRCNVAEHEKLILLAQLKPEKDSDEAVTYSLGKFGQRALDFYSIHVTKESTHPVKPLAQIAGNRYASTPVGKALSDACMGTIASFLSKYQDIIIEHQKVVKGNQKRLESLRELAGKENLEYPSVTLPPQPHTKEGVDAYNEVIARVRMWVNLNLWQKLKLSRDDAKPLLRLKGFPSFPLVERQANEVDWWDMVCNVKKLINEKKEDGKVFWQNLAGYKRQEALRPYLSSEEDRKKGKKFARYQLGDLLLHLEKKHGEDWGKVYDEAWERIDKKVEGLSKHIKLEEERRSEDAQSKAALTDWLRAKASFVIEGLKEADKDEFCRCDLKLQKWYGDLRGKPFAIEAENSILDISGFSKQYNCAFIWQKDGVKKLNLYLIINYFKGGKLRFKKIKPEAFEANRFYTVINKKSGEIVPMEVNFNFDDPNLIILPLAFGKRQGREFIWNDLLSLETGSLKLANGRVIEKTLYNRRTRQDEPALFVALTFERREVLDSSNIKPMNLIGVDRGENIPAVIALTDPEGCPLSRFKDSLGNPTHILRIGESYKEKQRTIQAKKEVEQRRAGGYSRKYASKAKNLADDMVRNTARDLLYYAVTQDAMLIFENLSRGFGRQGKRTFMAERQYTRMEDWLTAKLAYEGLPSKTYLSKTLAQYTSKTCSNCGFTITSADYDRVLEKLKKTATGWMTTINGKELKVEGQITYYNRYKRQNVVKDLSVELDRLSEESVNNDISSWTKGRSGEALSLLKKRFSHRPVQEKFVCLNCGFETHADEQAALNIARSWLFLRSQEYKKYQTNKTTGNTDKRAFVETWQSFYRKKLKEVWKPAV

SEQ ID NO: 31315 - protein, 978 aa, synthetic construct
  REGION 1..978: note = engineered CasX variant
QEGKRINKIRRRLVKDSNTKKAGKTGPMKTLLVRVMTPDLRERLENLRKKPENIPQPISNTSRANLNKLLTDYTEMKKAILHVYWEEFQKDPVGLMSRVAQPASKKIDQNKLKPEMDEKGNLTTAGFACSQCGQPLFVYKLEQVSEKGKAYTNYFGRCNVAEHEKLILLAQLKPEKDSDEAVTYSLGKFGQRALDFYSIHVTKESTHPVKPLAQIAGNRYASAPVGKALSDACMGTIASFLSKYQDIIIEHQKVVKGNQKRLESLRELAGKENLEYPSVTLPPQPHTKEGVDAYNEVIARVRMWVNLNLWQKLKLSRDDAKPLLRLKGFPSFPLVERQANEVDWWDMVCNVKKLINEKKEDGKVFWQNLAGYKRQEALRPYLSSEEDRKKGKKFARYQLGDLLLHLEKKHGEDWGKVYDEAWERIDKKVEGLSKHIKLEEERRSEDAQSKAALTDWLRAKASFVIEGLKEADKDEFCRCDLKLQKWYGDLRGKPFAIEAENSILDISGFSKQYNCAFIWQKDGVKKLNLYLIINYFKGGKLRFKKIKPEAFEANRFYTVINKKSGEIVPMEVNFNFDDPNLIILPLAFGKRQGREFIWNDLLSLETGSLKLANGRVIEKTLYNRRTRQDEPALFVALTFERREVLDSSNIKPMNLIGVDRGENIPAVIALTDPEGCPLSRFKDSLGNPTHILRIGESYKEKQRTIQAKKEVEQRRAGGYSRKYASKAKNLADDMVRNTARDLLYYAVTQDAMLIFENLSRGFGRQGKRTFMAERQYTRMEDWLTAKLAYEGLPSKTYLSKTLAQYTSKTCSNCGFTITSADYDRVLEKLKKTATGWMTTINGKELKVEGQITYYNRYKRQNVVKDLSVELDRLSEESVNNDISSWTKGRSGEALSLLKKRFSHRPVQEKFVCLNCGFETHADEQAALNIARSWLFLRSQEYKKYQTNKTTGNTDKRAFVETWQSFYRKKLKEVWKPAV

SEQ ID NO: 31316 - protein, 978 aa, synthetic construct
  REGION 1..978: note = engineered CasX variant
QEGKRINKIRRRLVKDSNTKKAGKTGPMKTLLVRVMTPDLRERLENLRKKPENIPQPISNTSRANLNKLLTDYTEMKKAILHVYWEEFQKDPVGLMSRVAQPASKKIDQNKLKPEMDEKGNLTTAGFACSQCGQPLFVYKLEQVSEKGKAYTNYFGRCNVAEHEKLILLAQLKPEKDSDEAVTYSLGKFGQRALDFYSIHVTKESTHPVKPLAQIAGNRYASVPVGKALSDACMGTIASFLSKYQDIIIEHQKVVKGNQKRLESLRELAGKENLEYPSVTLPPQPHTKEGVDAYNEVIARVRMWVNLNLWQKLKLSRDDAKPLLRLKGFPSFPLVERQANEVDWWDMVCNVKKLINEKKEDGKVFWQNLAGYKRQEALRPYLSSEEDRKKGKKFARYQLGDLLLHLEKKHGEDWGKVYDEAWERIDKKVEGLSKHIKLEEERRSEDAQSKAALTDWLRAKASFVIEGLKEADKDEFCRCDLKLQKWYGDLRGKPFAIEAENSILDISGFSKQYNCAFIWQKDGVKKLNLYLIINYFKGGKLRFKKIKPEAFEANRFYTVINKKSGEIVPMEVNFNFDDPNLIILPLAFGKRQGREFIWNDLLSLETGSLKLANGRVIEKTLYNRRTRQDEPALFVALTFERREVLDSSNIKPMNLIGVDRGENIPAVIALTDPEGCPLSRFKDSLGNPTHILRIGESYKEKQRTIQAKKEVEQRRAGGYSRKYASKAKNLADDMVRNTARDLLYYAVTQDAMLIFENLSRGFGRQGKRTFMAERQYTRMEDWLTAKLAYEGLPSKTYLSKTLAQYTSKTCSNCGFTITSADYDRVLEKLKKTATGWMTTINGKELKVEGQITYYNRYKRQNVVKDLSVELDRLSEESVNNDISSWTKGRSGEALSLLKKRFSHRPVQEKFVCLNCGFETHADEQAALNIARSWLFLRSQEYKKYQTNKTTGNTDKRAFVETWQSFYRKKLKEVWKPAV

SEQ ID NO: 31317 - protein, 978 aa, synthetic construct
  REGION 1..978: note = engineered CasX variant
QEGKRINKIRRRLVKDSNTKKAGKTGPMKTLLVRVMTPDLRERLENLRKKPENIPQPISNTSRANLNKLLTDYTEMKKAILHVYWEEFQKDPVGLMSRVAQPASKKIDQNKLKPEMDEKGNLTTAGFACSQCGQPLFVYKLEQVSEKGKAYTNYFGRCNVAEHEKLIKLAQLKPEKDSDEAVTYSLGKFGQRALDFYSIHVTKESTHPVKPLAQIAGNRYASGPVGKALSDACMGTIASFLSKYQDIIIEHQKVVKGNQKRLESLRELAGKENLEYPSVTLPPQPHTKEGVDAYNEVIARVRMWVNLNLWQKLKLSRDDAKPLLRLKGFPSFPLVERQANEVDWWDMVCNVKKLINEKKEDGKVFWQNLAGYKRQEALRPYLSSEEDRKKGKKFARYQLGDLLLHLEKKHGEDWGKVYDEAWERIDKKVEGLSKHIKLEEERRSEDAQSKAALTDWLRAKASFVIEGLKEADKDEFCRCDLKLQKWYGDLRGKPFAIEAENSILDISGFSKQYNCAFIWQKDGVKKLNLYLIINYFKGGKLRFKKIKPEAFEANRFYTVINKKSGEIVPMEVNFNFDDPNLIILPLAFGKRQGREFIWNDLLSLETGSLKLANGRVIEKTLYNRRTRQDEPALFVALTFERREVLDSSNIKPMNLIGVDRGENIPAVIALTDPEGCPLSRFKDSLGNPTHILRIGESYKEKQRTIQAKKEVEQRRAGGYSRKYASKAKNLADDMVRNTARDLLYYAVTQDAMLIFENLSRGFGRQGKRTFMAERQYTRMEDWLTAKLAYEGLPSKTYLSKTLAQYTSKTCSNCGFTITSADYDRVLEKLKKTATGWMTTINGKELKVEGQITYYNRYKRQNVVKDLSVELDRLSEESVNNDISSWTKGRSGEALSLLKKRFSHRPVQEKFVCLNCGFETHADEQAALNIARSWLFLRSQEYKKYQTNKTTGNTDKRAFVETWQSFYRKKLKEVWKPAV

SEQ ID NO: 31318 - protein, 977 aa, synthetic construct
  REGION 1..977: note = engineered CasX variant
QEGKRINKIRRRLVKDSNTKKAGKTGPMKTLLVRVMTPDLRERLENLRKKPENIPQPISNTSRANLNKLLTDYTEMKKAILHVYWEEFQKDPVGLMSRVAQPASKKIDQNKLKPEMDEKGNLTTAGFACSQCGQPLFVYKLEQVSEKGKAYTNYFGRCNVAEHEKLILLAQLKPEKDSDEAVTYSLGKFGQRALDFYSIHVTKESTHPVKPLAQIAGNRYASPVGKALSDACMGTIASFLSKYQDIIIEHQKVVKGNQKRLESLRELAGKENLEYPSVTLPPQPHTKEGVDAYNEVIARVRMWVNLNLWQKLKLSRDDAKPLLRLKGFPSFPLVERQANEVDWWDMVCNVKKLINEKKEDGKVFWQNLAGYKRQEALRPYLSSEEDRKKGKKFARYQLGDLLLHLEKKHGEDWGKVYDEAWERIDKKVEGLSKHIKLEEERRSEDAQSKAALTDWLRAKASFVIEGLKEADKDEFCRCDLKLQKWYGDLRGKPFAIEAENSILDISGFSKQYNCAFIWQKDGVKKLNLYLIINYFKGGKLRFKKIKPEAFEANRFYTVINKKSGEIVPMEVNFNFDDPNLIILPLAFGKRQGREFIWNDLLSLETGSLKLANGRVIEKTLYNRRTRQDEPALFVALTFERREVLDSSNIKPMNLIGVDRGENIPAVIALTDPEGCPLSRFKDSLGNPTHILRIGESYKEKQRTIQAKKEVEQRRAGGYSRKYASKAKNLADDMVRNTARDLLYYAVTQDAMLIFENLSRGFGRQGKRTFMAERQYTRMEDWLTAKLAYEGLPSKTYLSKTLAQYTSKTCSNCGFTITSADYDRVLEKLKKTATGWMTTINGKELKVEGQITYYNRYKRQNVVKDLSVELDRLSEESVNNDISSWTKGRSGEALSLLKKRFSHRPVQEKFVCLNCGFETHADEQAALNIARSWLFLRSQEYKKYQTNKTTGNTDKRAFVETWQSFYRKKLKEVWKPAV

SEQ ID NO: 31319 - protein, 978 aa, synthetic construct
  REGION 1..978: note = engineered CasX variant
QEGKRINKIRRRLVKDSNTKKAGKTGPMKTLLVRVMTPDLRERLENLRKKPENIPQPISNTSRANLNKLLTDYTEMKKAILHVYWEEFQKDPVGLMSRVAQPASKKIDQNKLKPEMDEKGNLTTAGFACSQCGQPLFVYKLEQVSEKGKAYTNYFGRCNVAEHEKLILLAQLKPEKDSDEAVTYSLGKFGQRALDFYSIHVTKESTHPVKPLAQIAGNRYASYPVGKALSDACMGTIASFLSKYQDIIIEHQKVVKGNQKRLESLRELAGKENLEYPSVTLPPQPHTKEGVDAYNEVIARVRMWVNLNLWQKLKLSRDDAKPLLRLKGFPSFPLVERQANEVDWWDMVCNVKKLINEKKEDGKVFWQNLAGYKRQEALRPYLSSEEDRKKGKKFARYQLGDLLLHLEKKHGEDWGKVYDEAWERIDKKVEGLSKHIKLEEERRSEDAQSKAALTDWLRAKASFVIEGLKEADKDEFCRCELKLQKWYGDLRGKPFAIEAENSILDISGFSKQYNCAFIWQKDGVKKLNLYLIINYFKGGKLRFKKIKPEAFEANRFYTVINKKSGEIVPMEVNFNFDDPNLIILPLAFGKRFGREFIWNDLLSLETGSLKLANGRVIEKTLYNRRTRQDEPALFVALTFERREVLDSSNIKPMNLIGVDRGENIPAVIALTDPEGCPLSRFKDSLGNPTHILRIGESYKEKQRTIQAKKEVEQRRAGGYSRKYASKAKNLADDMVRNTARDLLYYAVTQDAMLIFENLSRGFGRQGKRTFMAERQYTRMEDWLTAKLAYEGLPSKTYLSKTLAQYTSKTCSNCGFTITSADYDRVLEKLKKTATGWMTTINGKELKVEGQITYYNRYKRQNVVKDLSVELDRLSEESVNNDISSWTKGRSGEALSLLKKRFSHRPVQEKFVCLNCGFETHADEQAALNIARSWLFLRSQEYKKYQTNKTTGNTDKRAFVETWQSFYRKKLKEVWKPAV

SEQ ID NO: 31320 - protein, 978 aa, synthetic construct
  REGION 1..978: note = engineered CasX variant
QEGKRINKIRRRLVKDSNTKKAGKTGPMKTLLVRVMTPDLRERLENLRKKPENIPQPISNTSRANLNKLLTDYTEMKKAILHVYWEEFQKDPVGLMSRVAQPASKKIDQNKLKPEMDEKGNLTTAGFACSQCGQPLFVYKLEQVSEKGKAYTNYFGRCNVAEHEKLILLAQLKPEKDSDEAVTYSLGKFGQRALDFYSIHVTKESTHPVKPLAQIAGNRYASHPVGKALSDACMGTIASFLSKYQDIIIEHQKVVKGNQKRLESLRELAGKENLEYPSVTLPPQPHTKEGVDAYNEVIARVRMWVNLNLWQKLKLSRDDAKPLLRLKGFPSFPLVERQANEVDWWDMVCNVKKLINEKKEDGKVFWQNLAGYKRQEALRPYLSSEEDRKKGKKFARYQLGDLLLHLEKKHGEDWGKVYDEAWERIDKKVEGLSKHIKLEEERRSEDAQSKAALTDWLRAKASFVIEGLKEADKDEFCRCELKLQKWYGDLRGKPFAIEAENSILDISGFSKQYNCAFIWQKDGVKKLNLYLIINYFKGGKLRFKKIKPEAFEANRFYTVINKKSGEIVPMEVNFNFDDPNLIILPLAFGKRFGREFIWNDLLSLETGSLKLANGRVIEKTLYNRRTRQDEPALFVALTFERREVLDSSNIKPMNLIGVDRGENIPAVIALTDPEGCPLSRFKDSLGNPTHILRIGESYKEKQRTIQAKKEVEQRRAGGYSRKYASKAKNLADDMVRNTARDLLYYAVTQDAMLIFENLSRGFGRQGKRTFMAERQYTRMEDWLTAKLAYEGLPSKTYLSKTLAQYTSKTCSNCGFTITSADYDRVLEKLKKTATGWMTTINGKELKVEGQITYYNRYKRQNVVKDLSVELDRLSEESVNNDISSWTKGRSGEALSLLKKRFSHRPVQEKFVCLNCGFETHADEQAALNIARSWLFLRSQEYKKYQTNKTTGNTDKRAFVETWQSFYRKKLKEVWKPAV

SEQ ID NO: 31321 - protein, 978 aa, synthetic construct
  REGION 1..978: note = engineered CasX variant
QEGKRINKIRRRLVKDSNTKKAGKTGPMKTLLVRVMTPDLRERLENLRKKPENIPQPISNTSRANLNKLLTDYTEMKKAILHVYWEEFQKDPVGLMSRVAQPASKKIDQNKLKPEMDEKGNLTTAGFACSQCGQPLFVYKLEQVSEKGKAYTNYFGRCNVAEHEKLILLAQLKPEKDSDEAVTYSLGKFGQRALDFYSIHVTKESTHPVKPLAQIAGNRYASSPVGKALSDACMGTIASFLSKYQDIIIEHQKVVKGNQKRLESLRELAGKENLEYPSVTLPPQPHTKEGVDAYNEVIARVRMWVNLNLWQKLKLSRDDAKPLLRLKGFPSFPLVERQANEVDWWDMVCNVKKLINEKKEDGKVFWQNLAGYKRQEALRPYLSSEEDRKKGKKFARYQLGDLLLHLEKKHGEDWGKVYDEAWERIDKKVEGLSKHIKLEEERRSEDAQSKAALTDWLRAKASFVIEGLKEADKDEFCRCELKLQKWYGDLRGKPFAIEAENSILDISGFSKQYNCAFIWQKDGVKKLNLYLIINYFKGGKLRFKKIKPEAFEANRFYTVINKKSGEIVPMEVNFNFDDPNLIILPLAFGKRFGREFIWNDLLSLETGSLKLANGRVIEKTLYNRRTRQDEPALFVALTFERREVLDSSNIKPMNLIGVDRGENIPAVIALTDPEGCPLSRFKDSLGNPTHILRIGESYKEKQRTIQAKKEVEQRRAGGYSRKYASKAKNLADDMVRNTARDLLYYAVTQDAMLIFENLSRGFGRQGKRTFMAERQYTRMEDWLTAKLAYEGLPSKTYLSKTLAQYTSKTCSNCGFTITSADYDRVLEKLKKTATGWMTTINGKELKVEGQITYYNRYKRQNVVKDLSVELDRLSEESVNNDISSWTKGRSGEALSLLKKRFSHRPVQEKFVCLNCGFETHADEQAALNIARSWLFLRSQEYKKYQTNKTTGNTDKRAFVETWQSFYRKKLKEVWKPAV

SEQ ID NO: 31322 - protein, 978 aa, synthetic construct
  REGION 1..978: note = engineered CasX variant
QEGKRINKIRRRLVKDSNTKKAGKTGPMKTLLVRVMTPDLRERLENLRKKPENIPQPISNTSRANLNKLLTDYTEMKKAILHVYWEEFQKDPVGLMSRVAQPASKKIDQNKLKPEMDEKGNLTTAGFACSQCGQPLFVYKLEQVSEKGKAYTNYFGRCNVAEHEKLILLAQLKPEKDSDEAVTYSLGKFGQRALDFYSIHVTKESTHPVKPLAQIAGNRYASTPVGKALSDACMGTIASFLSKYQDIIIEHQKVVKGNQKRLESLRELAGKENLEYPSVTLPPQPHTKEGVDAYNEVIARVRMWVNLNLWQKLKLSRDDAKPLLRLKGFPSFPLVERQANEVDWWDMVCNVKKLINEKKEDGKVFWQNLAGYKRQEALRPYLSSEEDRKKGKKFARYQLGDLLLHLEKKHGEDWGKVYDEAWERIDKKVEGLSKHIKLEEERRSEDAQSKAALTDWLRAKASFVIEGLKEADKDEFCRCELKLQKWYGDLRGKPFAIEAENSILDISGFSKQYNCAFIWQKDGVKKLNLYLIINYFKGGKLRFKKIKPEAFEANRFYTVINKKSGEIVPMEVNFNFDDPNLIILPLAFGKRFGREFIWNDLLSLETGSLKLANGRVIEKTLYNRRTRQDEPALFVALTFERREVLDSSNIKPMNLIGVDRGENIPAVIALTDPEGCPLSRFKDSLGNPTHILRIGESYKEKQRTIQAKKEVEQRRAGGYSRKYASKAKNLADDMVRNTARDLLYYAVTQDAMLIFENLSRGFGRQGKRTFMAERQYTRMEDWLTAKLAYEGLPSKTYLSKTLAQYTSKTCSNCGFTITSADYDRVLEKLKKTATGWMTTINGKELKVEGQITYYNRYKRQNVVKDLSVELDRLSEESVNNDISSWTKGRSGEALSLLKKRFSHRPVQEKFVCLNCGFETHADEQAALNIARSWLFLRSQEYKKYQTNKTTGNTDKRAFVETWQSFYRKKLKEVWKPAV

SEQ ID NO: 31323 - protein, 978 aa, synthetic construct
  REGION 1..978: note = engineered CasX variant
QEGKRINKIRRRLVKDSNTKKAGKTGPMKTLLVRVMTPDLRERLENLRKKPENIPQPISNTSRANLNKLLTDYTEMKKAILHVYWEEFQKDPVGLMSRVAQPASKKIDQNKLKPEMDEKGNLTTAGFACSQCGQPLFVYKLEQVSEKGKAYTNYFGRCNVAEHEKLILLAQLKPEKDSDEAVTYSLGKFGQRALDFYSIHVTKESTHPVKPLAQIAGNRYASAPVGKALSDACMGTIASFLSKYQDIIIEHQKVVKGNQKRLESLRELAGKENLEYPSVTLPPQPHTKEGVDAYNEVIARVRMWVNLNLWQKLKLSRDDAKPLLRLKGFPSFPLVERQANEVDWWDMVCNVKKLINEKKEDGKVFWQNLAGYKRQEALRPYLSSEEDRKKGKKFARYQLGDLLLHLEKKHGEDWGKVYDEAWERIDKKVEGLSKHIKLEEERRSEDAQSKAALTDWLRAKASFVIEGLKEADKDEFCRCELKLQKWYGDLRGKPFAIEAENSILDISGFSKQYNCAFIWQKDGVKKLNLYLIINYFKGGKLRFKKIKPEAFEANRFYTVINKKSGEIVPMEVNFNFDDPNLIILPLAFGKRFGREFIWNDLLSLETGSLKLANGRVIEKTLYNRRTRQDEPALFVALTFERREVLDSSNIKPMNLIGVDRGENIPAVIALTDPEGCPLSRFKDSLGNPTHILRIGESYKEKQRTIQAKKEVEQRRAGGYSRKYASKAKNLADDMVRNTARDLLYYAVTQDAMLIFENLSRGFGRQGKRTFMAERQYTRMEDWLTAKLAYEGLPSKTYLSKTLAQYTSKTCSNCGFTITSADYDRVLEKLKKTATGWMTTINGKELKVEGQITYYNRYKRQNVVKDLSVELDRLSEESVNNDISSWTKGRSGEALSLLKKRFSHRPVQEKFVCLNCGFETHADEQAALNIARSWLFLRSQEYKKYQTNKTTGNTDKRAFVETWQSFYRKKLKEVWKPAV

SEQ ID NO: 31324 - protein, 978 aa, synthetic construct
  REGION 1..978: note = engineered CasX variant
QEGKRINKIRRRLVKDSNTKKAGKTGPMKTLLVRVMTPDLRERLENLRKKPENIPQPISNTSRANLNKLLTDYTEMKKAILHVYWEEFQKDPVGLMSRVAQPASKKIDQNKLKPEMDEKGNLTTAGFACSQCGQPLFVYKLEQVSEKGKAYTNYFGRCNVAEHEKLILLAQLKPEKDSDEAVTYSLGKFGQRALDFYSIHVTKESTHPVKPLAQIAGNRYASVPVGKALSDACMGTIASFLSKYQDIIIEHQKVVKGNQKRLESLRELAGKENLEYPSVTLPPQPHTKEGVDAYNEVIARVRMWVNLNLWQKLKLSRDDAKPLLRLKGFPSFPLVERQANEVDWWDMVCNVKKLINEKKEDGKVFWQNLAGYKRQEALRPYLSSEEDRKKGKKFARYQLGDLLLHLEKKHGEDWGKVYDEAWERIDKKVEGLSKHIKLEEERRSEDAQSKAALTDWLRAKASFVIEGLKEADKDEFCRCELKLQKWYGDLRGKPFAIEAENSILDISGFSKQYNCAFIWQKDGVKKLNLYLIINYFKGGKLRFKKIKPEAFEANRFYTVINKKSGEIVPMEVNFNFDDPNLIILPLAFGKRFGREFIWNDLLSLETGSLKLANGRVIEKTLYNRRTRQDEPALFVALTFERREVLDSSNIKPMNLIGVDRGENIPAVIALTDPEGCPLSRFKDSLGNPTHILRIGESYKEKQRTIQAKKEVEQRRAGGYSRKYASKAKNLADDMVRNTARDLLYYAVTQDAMLIFENLSRGFGRQGKRTFMAERQYTRMEDWLTAKLAYEGLPSKTYLSKTLAQYTSKTCSNCGFTITSADYDRVLEKLKKTATGWMTTINGKELKVEGQITYYNRYKRQNVVKDLSVELDRLSEESVNNDISSWTKGRSGEALSLLKKRFSHRPVQEKFVCLNCGFETHADEQAALNIARSWLFLRSQEYKKYQTNKTTGNTDKRAFVETWQSFYRKKLKEVWKPAV

SEQ ID NO: 31325 - protein, 978 aa, synthetic construct
  REGION 1..978: note = engineered CasX variant
QEGKRINKIRRRLVKDSNTKKAGKTGPMKTLLVRVMTPDLRERLENLRKKPENIPQPISNTSRANLNKLLTDYTEMKKAILHVYWEEFQKDPVGLMSRVAQPASKKIDQNKLKPEMDEKGNLTTAGFACSQCGQPLFVYKLEQVSEKGKAYTNYFGRCNVAEHEKLIKLAQLKPEKDSDEAVTYSLGKFGQRALDFYSIHVTKESTHPVKPLAQIAGNRYASGPVGKALSDACMGTIASFLSKYQDIIIEHQKVVKGNQKRLESLRELAGKENLEYPSVTLPPQPHTKEGVDAYNEVIARVRMWVNLNLWQKLKLSRDDAKPLLRLKGFPSFPLVERQANEVDWWDMVCNVKKLINEKKEDGKVFWQNLAGYKRQEALRPYLSSEEDRKKGKKFARYQLGDLLLHLEKKHGEDWGKVYDEAWERIDKKVEGLSKHIKLEEERRSEDAQSKAALTDWLRAKASFVIEGLKEADKDEFCRCELKLQKWYGDLRGKPFAIEAENSILDISGFSKQYNCAFIWQKDGVKKLNLYLIINYFKGGKLRFKKIKPEAFEANRFYTVINKKSGEIVPMEVNFNFDDPNLIILPLAFGKRFGREFIWNDLLSLETGSLKLANGRVIEKTLYNRRTRQDEPALFVALTFERREVLDSSNIKPMNLIGVDRGENIPAVIALTDPEGCPLSRFKDSLGNPTHILRIGESYKEKQRTIQAKKEVEQRRAGGYSRKYASKAKNLADDMVRNTARDLLYYAVTQDAMLIFENLSRGFGRQGKRTFMAERQYTRMEDWLTAKLAYEGLPSKTYLSKTLAQYTSKTCSNCGFTITSADYDRVLEKLKKTATGWMTTINGKELKVEGQITYYNRYKRQNVVKDLSVELDRLSEESVNNDISSWTKGRSGEALSLLKKRFSHRPVQEKFVCLNCGFETHADEQAALNIARSWLFLRSQEYKKYQTNKTTGNTDKRAFVETWQSFYRKKLKEVWKPAV

SEQ ID NO: 31326 - protein, 977 aa, synthetic construct
  REGION 1..977: note = engineered CasX variant
QEGKRINKIRRRLVKDSNTKKAGKTGPMKTLLVRVMTPDLRERLENLRKKPENIPQPISNTSRANLNKLLTDYTEMKKAILHVYWEEFQKDPVGLMSRVAQPASKKIDQNKLKPEMDEKGNLTTAGFACSQCGQPLFVYKLEQVSEKGKAYTNYFGRCNVAEHEKLILLAQLKPEKDSDEAVTYSLGKFGQRALDFYSIHVTKESTHPVKPLAQIAGNRYASPVGKALSDACMGTIASFLSKYQDIIIEHQKVVKGNQKRLESLRELAGKENLEYPSVTLPPQPHTKEGVDAYNEVIARVRMWVNLNLWQKLKLSRDDAKPLLRLKGFPSFPLVERQANEVDWWDMVCNVKKLINEKKEDGKVFWQNLAGYKRQEALRPYLSSEEDRKKGKKFARYQLGDLLLHLEKKHGEDWGKVYDEAWERIDKKVEGLSKHIKLEEERRSEDAQSKAALTDWLRAKASFVIEGLKEADKDEFCRCELKLQKWYGDLRGKPFAIEAENSILDISGFSKQYNCAFIWQKDGVKKLNLYLIINYFKGGKLRFKKIKPEAFEANRFYTVINKKSGEIVPMEVNFNFDDPNLIILPLAFGKRFGREFIWNDLLSLETGSLKLANGRVIEKTLYNRRTRQDEPALFVALTFERREVLDSSNIKPMNLIGVDRGENIPAVIALTDPEGCPLSRFKDSLGNPTHILRIGESYKEKQRTIQAKKEVEQRRAGGYSRKYASKAKNLADDMVRNTARDLLYYAVTQDAMLIFENLSRGFGRQGKRTFMAERQYTRMEDWLTAKLAYEGLPSKTYLSKTLAQYTSKTCSNCGFTITSADYDRVLEKLKKTATGWMTTINGKELKVEGQITYYNRYKRQNVVKDLSVELDRLSEESVNNDISSWTKGRSGEALSLLKKRFSHRPVQEKFVCLNCGFETHADEQAALNIARSWLFLRSQEYKKYQTNKTTGNTDKRAFVETWQSFYRKKLKEVWKPAV

SEQ ID NO: 31327 - protein, 978 aa, synthetic construct
  REGION 1..978: note = engineered CasX variant
QEGKRINKIRRRLVKDSNTKKAGKTGPMKTLLVRVMTPDLRERLENLRKKPENIPQPISNTSRANLNKLLTDYTEMKKAILHVYWEEFQKDPVGLMSRVAQPASKKIDQNKLKPEMDEKGNLTTAGFACSQCGQPLFVYKLEQVSEKGKAYTNYFGRCNVAEHEKLILLAQLKPEKDSDEAVTYSLGKFGQRALDFYSIHVTKESTHPVKPLAQIAGNRYASYPVGKALSDACMGTIASFLSKYQDIIIEHQKVVKGNQKRLESLRELAGKENLEYPSVTLPPQPHTKEGVDAYNEVIARVRMWVNLNLWQKLKLSRDDAKPLLRLKGFPSFPLVERQANEVDWWDMVCNVKKLINEKKEDGKVFWQNLAGYKRQEALRPYLSSEEDRKKGKKFARYQLGDLLLHLEKKHGEDWGKVYDEAWERIDKKVEGLSKHIKLEEERRSEDAQSKAALTDWLRAKASFVIEGLKEADKDEFCRCELKLQKWYGDLRGKPFAIEAENSILDISGFSKQYNCAFIWQKDGVKKLNLYLIINYFKGGKLRFKKIKPEAFEANRFYTVINKKSGEIVPMEVNFNFDDPNLIILPLAFGKRVGREFIWNDLLSLETGSLKLANGRVIEKTLYNRRTRQDEPALFVALTFERREVLDSSNIKPMNLIGVDRGENIPAVIALTDPEGCPLSRFKDSLGNPTHILRIGESYKEKQRTIQAKKEVEQRRAGGYSRKYASKAKNLADDMVRNTARDLLYYAVTQDAMLIFENLSRGFGRQGKRTFMAERQYTRMEDWLTAKLAYEGLPSKTYLSKTLAQYTSKTCSNCGFTITSADYDRVLEKLKKTATGWMTTINGKELKVEGQITYYNRYKRQNVVKDLSVELDRLSEESVNNDISSWTKGRSGEALSLLKKRFSHRPVQEKFVCLNCGFETHADEQAALNIARSWLFLRSQEYKKYQTNKTTGNTDKRAFVETWQSFYRKKLKEVWKPAV

SEQ ID NO: 31328 - protein, 978 aa, synthetic construct
  REGION 1..978: note = engineered CasX variant
QEGKRINKIRRRLVKDSNTKKAGKTGPMKTLLVRVMTPDLRERLENLRKKPENIPQPISNTSRANLNKLLTDYTEMKKAILHVYWEEFQKDPVGLMSRVAQPASKKIDQNKLKPEMDEKGNLTTAGFACSQCGQPLFVYKLEQVSEKGKAYTNYFGRCNVAEHEKLILLAQLKPEKDSDEAVTYSLGKFGQRALDFYSIHVTKESTHPVKPLAQIAGNRYASHPVGKALSDACMGTIASFLSKYQDIIIEHQKVVKGNQKRLESLRELAGKENLEYPSVTLPPQPHTKEGVDAYNEVIARVRMWVNLNLWQKLKLSRDDAKPLLRLKGFPSFPLVERQANEVDWWDMVCNVKKLINEKKEDGKVFWQNLAGYKRQEALRPYLSSEEDRKKGKKFARYQLGDLLLHLEKKHGEDWGKVYDEAWERIDKKVEGLSKHIKLEEERRSEDAQSKAALTDWLRAKASFVIEGLKEADKDEFCRCELKLQKWYGDLRGKPFAIEAENSILDISGFSKQYNCAFIWQKDGVKKLNLYLIINYFKGGKLRFKKIKPEAFEANRFYTVINKKSGEIVPMEVNFNFDDPNLIILPLAFGKRVGREFIWNDLLSLETGSLKLANGRVIEKTLYNRRTRQDEPALFVALTFERREVLDSSNIKPMNLIGVDRGENIPAVIALTDPEGCPLSRFKDSLGNPTHILRIGESYKEKQRTIQAKKEVEQRRAGGYSRKYASKAKNLADDMVRNTARDLLYYAVTQDAMLIFENLSRGFGRQGKRTFMAERQYTRMEDWLTAKLAYEGLPSKTYLSKTLAQYTSKTCSNCGFTITSADYDRVLEKLKKTATGWMTTINGKELKVEGQITYYNRYKRQNVVKDLSVELDRLSEESVNNDISSWTKGRSGEALSLLKKRFSHRPVQEKFVCLNCGFETHADEQAALNIARSWLFLRSQEYKKYQTNKTTGNTDKRAFVETWQSFYRKKLKEVWKPAV

SEQ ID NO: 31329 - protein, 978 aa, synthetic construct
  REGION 1..978: note = engineered CasX variant
QEGKRINKIRRRLVKDSNTKKAGKTGPMKTLLVRVMTPDLRERLENLRKKPENIPQPISNTSRANLNKLLTDYTEMKKAILHVYWEEFQKDPVGLMSRVAQPASKKIDQNKLKPEMDEKGNLTTAGFACSQCGQPLFVYKLEQVSEKGKAYTNYFGRCNVAEHEKLILLAQLKPEKDSDEAVTYSLGKFGQRALDFYSIHVTKESTHPVKPLAQIAGNRYASSPVGKALSDACMGTIASFLSKYQDIIIEHQKVVKGNQKRLESLRELAGKENLEYPSVTLPPQPHTKEGVDAYNEVIARVRMWVNLNLWQKLKLSRDDAKPLLRLKGFPSFPLVERQANEVDWWDMVCNVKKLINEKKEDGKVFWQNLAGYKRQEALRPYLSSEEDRKKGKKFARYQLGDLLLHLEKKHGEDWGKVYDEAWERIDKKVEGLSKHIKLEEERRSEDAQSKAALTDWLRAKASFVIEGLKEADKDEFCRCELKLQKWYGDLRGKPFAIEAENSILDISGFSKQYNCAFIWQKDGVKKLNLYLIINYFKGGKLRFKKIKPEAFEANRFYTVINKKSGEIVPMEVNFNFDDPNLIILPLAFGKRVGREFIWNDLLSLETGSLKLANGRVIEKTLYNRRTRQDEPALFVALTFERREVLDSSNIKPMNLIGVDRGENIPAVIALTDPEGCPLSRFKDSLGNPTHILRIGESYKEKQRTIQAKKEVEQRRAGGYSRKYASKAKNLADDMVRNTARDLLYYAVTQDAMLIFENLSRGFGRQGKRTFMAERQYTRMEDWLTAKLAYEGLPSKTYLSKTLAQYTSKTCSNCGFTITSADYDRVLEKLKKTATGWMTTINGKELKVEGQITYYNRYKRQNVVKDLSVELDRLSEESVNNDISSWTKGRSGEALSLLKKRFSHRPVQEKFVCLNCGFETHADEQAALNIARSWLFLRSQEYKKYQTNKTTGNTDKRAFVETWQSFYRKKLKEVWKPAV

SEQ ID NO: 31330 - protein, 978 aa, synthetic construct
  REGION 1..978: note = engineered CasX variant
QEGKRINKIRRRLVKDSNTKKAGKTGPMKTLLVRVMTPDLRERLENLRKKPENIPQPISNTSRANLNKLLTDYTEMKKAILHVYWEEFQKDPVGLMSRVAQPASKKIDQNKLKPEMDEKGNLTTAGFACSQCGQPLFVYKLEQVSEKGKAYTNYFGRCNVAEHEKLILLAQLKPEKDSDEAVTYSLGKFGQRALDFYSIHVTKESTHPVKPLAQIAGNRYASTPVGKALSDACMGTIASFLSKYQDIIIEHQKVVKGNQKRLESLRELAGKENLEYPSVTLPPQPHTKEGVDAYNEVIARVRMWVNLNLWQKLKLSRDDAKPLLRLKGFPSFPLVERQANEVDWWDMVCNVKKLINEKKEDGKVFWQNLAGYKRQEALRPYLSSEEDRKKGKKFARYQLGDLLLHLEKKHGEDWGKVYDEAWERIDKKVEGLSKHIKLEEERRSEDAQSKAALTDWLRAKASFVIEGLKEADKDEFCRCELKLQKWYGDLRGKPFAIEAENSILDISGFSKQYNCAFIWQKDGVKKLNLYLIINYFKGGKLRFKKIKPEAFEANRFYTVINKKSGEIVPMEVNFNFDDPNLIILPLAFGKRVGREFIWNDLLSLETGSLKLANGRVIEKTLYNRRTRQDEPALFVALTFERREVLDSSNIKPMNLIGVDRGENIPAVIALTDPEGCPLSRFKDSLGNPTHILRIGESYKEKQRTIQAKKEVEQRRAGGYSRKYASKAKNLADDMVRNTARDLLYYAVTQDAMLIFENLSRGFGRQGKRTFMAERQYTRMEDWLTAKLAYEGLPSKTYLSKTLAQYTSKTCSNCGFTITSADYDRVLEKLKKTATGWMTTINGKELKVEGQITYYNRYKRQNVVKDLSVELDRLSEESVNNDISSWTKGRSGEALSLLKKRFSHRPVQEKFVCLNCGFETHADEQAALNIARSWLFLRSQEYKKYQTNKTTGNTDKRAFVETWQSFYRKKLKEVWKPAV

SEQ ID NO: 31331 - protein, 978 aa, synthetic construct
  REGION 1..978: note = engineered CasX variant
QEGKRINKIRRRLVKDSNTKKAGKTGPMKTLLVRVMTPDLRERLENLRKKPENIPQPISNTSRANLNKLLTDYTEMKKAILHVYWEEFQKDPVGLMSRVAQPASKKIDQNKLKPEMDEKGNLTTAGFACSQCGQPLFVYKLEQVSEKGKAYTNYFGRCNVAEHEKLILLAQLKPEKDSDEAVTYSLGKFGQRALDFYSIHVTKESTHPVKPLAQIAGNRYASAPVGKALSDACMGTIASFLSKYQDIIIEHQKVVKGNQKRLESLRELAGKENLEYPSVTLPPQPHTKEGVDAYNEVIARVRMWVNLNLWQKLKLSRDDAKPLLRLKGFPSFPLVERQANEVDWWDMVCNVKKLINEKKEDGKVFWQNLAGYKRQEALRPYLSSEEDRKKGKKFARYQLGDLLLHLEKKHGEDWGKVYDEAWERIDKKVEGLSKHIKLEEERRSEDAQSKAALTDWLRAKASFVIEGLKEADKDEFCRCELKLQKWYGDLRGKPFAIEAENSILDISGFSKQYNCAFIWQKDGVKKLNLYLIINYFKGGKLRFKKIKPEAFEANRFYTVINKKSGEIVPMEVNFNFDDPNLIILPLAFGKRVGREFIWNDLLSLETGSLKLANGRVIEKTLYNRRTRQDEPALFVALTFERREVLDSSNIKPMNLIGVDRGENIPAVIALTDPEGCPLSRFKDSLGNPTHILRIGESYKEKQRTIQAKKEVEQRRAGGYSRKYASKAKNLADDMVRNTARDLLYYAVTQDAMLIFENLSRGFGRQGKRTFMAERQYTRMEDWLTAKLAYEGLPSKTYLSKTLAQYTSKTCSNCGFTITSADYDRVLEKLKKTATGWMTTINGKELKVEGQITYYNRYKRQNVVKDLSVELDRLSEESVNNDISSWTKGRSGEALSLLKKRFSHRPVQEKFVCLNCGFETHADEQAALNIARSWLFLRSQEYKKYQTNKTTGNTDKRAFVETWQSFYRKKLKEVWKPAV

SEQ ID NO: 31332 - protein, 978 aa, synthetic construct
  REGION 1..978: note = engineered CasX variant
QEGKRINKIRRRLVKDSNTKKAGKTGPMKTLLVRVMTPDLRERLENLRKKPENIPQPISNTSRANLNKLLTDYTEMKKAILHVYWEEFQKDPVGLMSRVAQPASKKIDQNKLKPEMDEKGNLTTAGFACSQCGQPLFVYKLEQVSEKGKAYTNYFGRCNVAEHEKLILLAQLKPEKDSDEAVTYSLGKFGQRALDFYSIHVTKESTHPVKPLAQIAGNRYASVPVGKALSDACMGTIASFLSKYQDIIIEHQKVVKGNQKRLESLRELAGKENLEYPSVTLPPQPHTKEGVDAYNEVIARVRMWVNLNLWQKLKLSRDDAKPLLRLKGFPSFPLVERQANEVDWWDMVCNVKKLINEKKEDGKVFWQNLAGYKRQEALRPYLSSEEDRKKGKKFARYQLGDLLLHLEKKHGEDWGKVYDEAWERIDKKVEGLSKHIKLEEERRSEDAQSKAALTDWLRAKASFVIEGLKEADKDEFCRCELKLQKWYGDLRGKPFAIEAENSILDISGFSKQYNCAFIWQKDGVKKLNLYLIINYFKGGKLRFKKIKPEAFEANRFYTVINKKSGEIVPMEVNFNFDDPNLIILPLAFGKRVGREFIWNDLLSLETGSLKLANGRVIEKTLYNRRTRQDEPALFVALTFERREVLDSSNIKPMNLIGVDRGENIPAVIALTDPEGCPLSRFKDSLGNPTHILRIGESYKEKQRTIQAKKEVEQRRAGGYSRKYASKAKNLADDMVRNTARDLLYYAVTQDAMLIFENLSRGFGRQGKRTFMAERQYTRMEDWLTAKLAYEGLPSKTYLSKTLAQYTSKTCSNCGFTITSADYDRVLEKLKKTATGWMTTINGKELKVEGQITYYNRYKRQNVVKDLSVELDRLSEESVNNDISSWTKGRSGEALSLLKKRFSHRPVQEKFVCLNCGFETHADEQAALNIARSWLFLRSQEYKKYQTNKTTGNTDKRAFVETWQSFYRKKLKEVWKPAV

SEQ ID NO: 31333 - protein, 978 aa, synthetic construct
  REGION 1..978: note = engineered CasX variant
QEGKRINKIRRRLVKDSNTKKAGKTGPMKTLLVRVMTPDLRERLENLRKKPENIPQPISNTSRANLNKLLTDYTEMKKAILHVYWEEFQKDPVGLMSRVAQPASKKIDQNKLKPEMDEKGNLTTAGFACSQCGQPLFVYKLEQVSEKGKAYTNYFGRCNVAEHEKLIKLAQLKPEKDSDEAVTYSLGKFGQRALDFYSIHVTKESTHPVKPLAQIAGNRYASGPVGKALSDACMGTIASFLSKYQDIIIEHQKVVKGNQKRLESLRELAGKENLEYPSVTLPPQPHTKEGVDAYNEVIARVRMWVNLNLWQKLKLSRDDAKPLLRLKGFPSFPLVERQANEVDWWDMVCNVKKLINEKKEDGKVFWQNLAGYKRQEALRPYLSSEEDRKKGKKFARYQLGDLLLHLEKKHGEDWGKVYDEAWERIDKKVEGLSKHIKLEEERRSEDAQSKAALTDWLRAKASFVIEGLKEADKDEFCRCELKLQKWYGDLRGKPFAIEAENSILDISGFSKQYNCAFIWQKDGVKKLNLYLIINYFKGGKLRFKKIKPEAFEANRFYTVINKKSGEIVPMEVNFNFDDPNLIILPLAFGKRVGREFIWNDLLSLETGSLKLANGRVIEKTLYNRRTRQDEPALFVALTFERREVLDSSNIKPMNLIGVDRGENIPAVIALTDPEGCPLSRFKDSLGNPTHILRIGESYKEKQRTIQAKKEVEQRRAGGYSRKYASKAKNLADDMVRNTARDLLYYAVTQDAMLIFENLSRGFGRQGKRTFMAERQYTRMEDWLTAKLAYEGLPSKTYLSKTLAQYTSKTCSNCGFTITSADYDRVLEKLKKTATGWMTTINGKELKVEGQITYYNRYKRQNVVKDLSVELDRLSEESVNNDISSWTKGRSGEALSLLKKRFSHRPVQEKFVCLNCGFETHADEQAALNIARSWLFLRSQEYKKYQTNKTTGNTDKRAFVETWQSFYRKKLKEVWKPAV

SEQ ID NO: 31334 - protein, 977 aa, synthetic construct
  REGION 1..977: note = engineered CasX variant
QEGKRINKIRRRLVKDSNTKKAGKTGPMKTLLVRVMTPDLRERLENLRKKPENIPQPISNTSRANLNKLLTDYTEMKKAILHVYWEEFQKDPVGLMSRVAQPASKKIDQNKLKPEMDEKGNLTTAGFACSQCGQPLFVYKLEQVSEKGKAYTNYFGRCNVAEHEKLILLAQLKPEKDSDEAVTYSLGKFGQRALDFYSIHVTKESTHPVKPLAQIAGNRYASPVGKALSDACMGTIASFLSKYQDIIIEHQKVVKGNQKRLESLRELAGKENLEYPSVTLPPQPHTKEGVDAYNEVIARVRMWVNLNLWQKLKLSRDDAKPLLRLKGFPSFPLVERQANEVDWWDMVCNVKKLINEKKEDGKVFWQNLAGYKRQEALRPYLSSEEDRKKGKKFARYQLGDLLLHLEKKHGEDWGKVYDEAWERIDKKVEGLSKHIKLEEERRSEDAQSKAALTDWLRAKASFVIEGLKEADKDEFCRCELKLQKWYGDLRGKPFAIEAENSILDISGFSKQYNCAFIWQKDGVKKLNLYLIINYFKGGKLRFKKIKPEAFEANRFYTVINKKSGEIVPMEVNFNFDDPNLIILPLAFGKRVGREFIWNDLLSLETGSLKLANGRVIEKTLYNRRTRQDEPALFVALTFERREVLDSSNIKPMNLIGVDRGENIPAVIALTDPEGCPLSRFKDSLGNPTHILRIGESYKEKQRTIQAKKEVEQRRAGGYSRKYASKAKNLADDMVRNTARDLLYYAVTQDAMLIFENLSRGFGRQGKRTFMAERQYTRMEDWLTAKLAYEGLPSKTYLSKTLAQYTSKTCSNCGFTITSADYDRVLEKLKKTATGWMTTINGKELKVEGQITYYNRYKRQNVVKDLSVELDRLSEESVNNDISSWTKGRSGEALSLLKKRFSHRPVQEKFVCLNCGFETHADEQAALNIARSWLFLRSQEYKKYQTNKTTGNTDKRAFVETWQSFYRKKLKEVWKPAV

SEQ ID NO: 31335 - protein, 979 aa, synthetic construct
  REGION 1..979: note = engineered CasX variant
QEGKRINKIRRRLVKDSNTKKAGKTGPMKTLLVRVMTPDLRERLENLRKKPENIPQPISNTSRANLNKLLTDYTEMKKAILHVYWEEFQKDPVGLMSRVAQPASKKIDQNKLKPEMDEKGNLTTAGFACSQCGQPLFVYKLEQVSEKGKAYTNYFGRCNVAEHEKLILLAQLKPEKDSDEAVTYSLGKFGQRALDFYSIHVTKESTHPVKPLAQIAGNRYASYPVGKALSDACMGTIASFLSKYQDIIIEHQKVVKGNQKRLESLRELAGKENLEYPSVTLPPQPHTKEGVDAYNEVIARVRMWVNLNLWQKLKLSRDDAKPLLRLKGFPSFPLVERQANEVDWWDMVCNVKKLINEKKEDGKVFWQNLAGYKRQEALRPYLSSEEDRKKGKKFARYQLGDLLLHLEKKHGEDWGKVYDEAWERIDKKVEGLSKHIKLEEERRSEDAQSKAALTDWLRAKASFVIEGLKEADKDEFCRCELKLQKWYGDLRGKPFAIEAENSILDISGFSKQYNCAFIWQKDGVKKLNLYLIINYFKGGKLRFKKIKPEAFEANRFYTVINKKSGEIVPMEVNFNFDDPNLIILPLAFGKRQGREFIWNDLLSLETGSLKLANGRVIEKTLYNRRTRQDEPALFVALTFERREVLDSSNIKTPMNLIGVDRGENIPAVIALTDPEGCPLSRFKDSLGNPTHILRIGESYKEKQRTIQAKKEVEQRRAGGYSRKYASKAKNLADDMVRNTARDLLYYAVTQDAMLIFENLSRGFGRQGKRTFMAERQYTRMEDWLTAKLAYEGLPSKTYLSKTLAQYTSKTCSNCGFTITSADYDRVLEKLKKTATGWMTTINGKELKVEGQITYYNRYKRQNVVKDLSVELDRLSEESVNNDISSWTKGRSGEALSLLKKRFSHRPVQEKFVCLNCGFETHADEQAALNIARSWLFLRSQEYKKYQTNKTTGNTDKRAFVETWQSFYRKKLKEVWKPAV

SEQ ID NO: 31336 - protein, 979 aa, synthetic construct
  REGION 1..979: note = engineered CasX variant
QEGKRINKIRRRLVKDSNTKKAGKTGPMKTLLVRVMTPDLRERLENLRKKPENIPQPISNTSRANLNKLLTDYTEMKKAILHVYWEEFQKDPVGLMSRVAQPASKKIDQNKLKPEMDEKGNLTTAGFACSQCGQPLFVYKLEQVSEKGKAYTNYFGRCNVAEHEKLILLAQLKPEKDSDEAVTYSLGKFGQRALDFYSIHVTKESTHPVKPLAQIAGNRYASHPVGKALSDACMGTIASFLSKYQDIIIEHQKVVKGNQKRLESLRELAGKENLEYPSVTLPPQPHTKEGVDAYNEVIARVRMWVNLNLWQKLKLSRDDAKPLLRLKGFPSFPLVERQANEVDWWDMVCNVKKLINEKKEDGKVFWQNLAGYKRQEALRPYLSSEEDRKKGKKFARYQLGDLLLHLEKKHGEDWGKVYDEAWERIDKKVEGLSKHIKLEEERRSEDAQSKAALTDWLRAKASFVIEGLKEADKDEFCRCELKLQKWYGDLRGKPFAIEAENSILDISGFSKQYNCAFIWQKDGVKKLNLYLIINYFKGGKLRFKKIKPEAFEANRFYTVINKKSGEIVPMEVNFNFDDPNLIILPLAFGKRQGREFIWNDLLSLETGSLKLANGRVIEKTLYNRRTRQDEPALFVALTFERREVLDSSNIKTPMNLIGVDRGENIPAVIALTDPEGCPLSRFKDSLGNPTHILRIGESYKEKQRTIQAKKEVEQRRAGGYSRKYASKAKNLADDMVRNTARDLLYYAVTQDAMLIFENLSRGFGRQGKRTFMAERQYTRMEDWLTAKLAYEGLPSKTYLSKTLAQYTSKTCSNCGFTITSADYDRVLEKLKKTATGWMTTINGKELKVEGQITYYNRYKRQNVVKDLSVELDRLSEESVNNDISSWTKGRSGEALSLLKKRFSHRPVQEKFVCLNCGFETHADEQAALNIARSWLFLRSQEYKKYQTNKTTGNTDKRAFVETWQSFYRKKLKEVWKPAV

SEQ ID NO: 31337 - protein, 979 aa, synthetic construct
  REGION 1..979: note = engineered CasX variant
QEGKRINKIRRRLVKDSNTKKAGKTGPMKTLLVRVMTPDLRERLENLRKKPENIPQPISNTSRANLNKLLTDYTEMKKAILHVYWEEFQKDPVGLMSRVAQPASKKIDQNKLKPEMDEKGNLTTAGFACSQCGQPLFVYKLEQVSEKGKAYTNYFGRCNVAEHEKLILLAQLKPEKDSDEAVTYSLGKFGQRALDFYSIHVTKESTHPVKPLAQIAGNRYASSPVGKALSDACMGTIASFLSKYQDIIIEHQKVVKGNQKRLESLRELAGKENLEYPSVTLPPQPHTKEGVDAYNEVIARVRMWVNLNLWQKLKLSRDDAKPLLRLKGFPSFPLVERQANEVDWWDMVCNVKKLINEKKEDGKVFWQNLAGYKRQEALRPYLSSEEDRKKGKKFARYQLGDLLLHLEKKHGEDWGKVYDEAWERIDKKVEGLSKHIKLEEERRSEDAQSKAALTDWLRAKASFVIEGLKEADKDEFCRCELKLQKWYGDLRGKPFAIEAENSILDISGFSKQYNCAFIWQKDGVKKLNLYLIINYFKGGKLRFKKIKPEAFEANRFYTVINKKSGEIVPMEVNFNFDDPNLIILPLAFGKRQGREFIWNDLLSLETGSLKLANGRVIEKTLYNRRTRQDEPALFVALTFERREVLDSSNIKTPMNLIGVDRGENIPAVIALTDPEGCPLSRFKDSLGNPTHILRIGESYKEKQRTIQAKKEVEQRRAGGYSRKYASKAKNLADDMVRNTARDLLYYAVTQDAMLIFENLSRGFGRQGKRTFMAERQYTRMEDWLTAKLAYEGLPSKTYLSKTLAQYTSKTCSNCGFTITSADYDRVLEKLKKTATGWMTTINGKELKVEGQITYYNRYKRQNVVKDLSVELDRLSEESVNNDISSWTKGRSGEALSLLKKRFSHRPVQEKFVCLNCGFETHADEQAALNIARSWLFLRSQEYKKYQTNKTTGNTDKRAFVETWQSFYRKKLKEVWKPAV

SEQ ID NO: 31338 - protein, 979 aa, synthetic construct
  REGION 1..979: note = engineered CasX variant
QEGKRINKIRRRLVKDSNTKKAGKTGPMKTLLVRVMTPDLRERLENLRKKPENIPQPISNTSRANLNKLLTDYTEMKKAILHVYWEEFQKDPVGLMSRVAQPASKKIDQNKLKPEMDEKGNLTTAGFACSQCGQPLFVYKLEQVSEKGKAYTNYFGRCNVAEHEKLILLAQLKPEKDSDEAVTYSLGKFGQRALDFYSIHVTKESTHPVKPLAQIAGNRYASTPVGKALSDACMGTIASFLSKYQDIIIEHQKVVKGNQKRLESLRELAGKENLEYPSVTLPPQPHTKEGVDAYNEVIARVRMWVNLNLWQKLKLSRDDAKPLLRLKGFPSFPLVERQANEVDWWDMVCNVKKLINEKKEDGKVFWQNLAGYKRQEALRPYLSSEEDRKKGKKFARYQLGDLLLHLEKKHGEDWGKVYDEAWERIDKKVEGLSKHIKLEEERRSEDAQSKAALTDWLRAKASFVIEGLKEADKDEFCRCELKLQKWYGDLRGKPFAIEAENSILDISGFSKQYNCAFIWQKDGVKKLNLYLIINYFKGGKLRFKKIKPEAFEANRFYTVINKKSGEIVPMEVNFNFDDPNLIILPLAFGKRQGREFIWNDLLSLETGSLKLANGRVIEKTLYNRRTRQDEPALFVALTFERREVLDSSNIKTPMNLIGVDRGENIPAVIALTDPEGCPLSRFKDSLGNPTHILRIGESYKEKQRTIQAKKEVEQRRAGGYSRKYASKAKNLADDMVRNTARDLLYYAVTQDAMLIFENLSRGFGRQGKRTFMAERQYTRMEDWLTAKLAYEGLPSKTYLSKTLAQYTSKTCSNCGFTITSADYDRVLEKLKKTATGWMTTINGKELKVEGQITYYNRYKRQNVVKDLSVELDRLSEESVNNDISSWTKGRSGEALSLLKKRFSHRPVQEKFVCLNCGFETHADEQAALNIARSWLFLRSQEYKKYQTNKTTGNTDKRAFVETWQSFYRKKLKEVWKPAV

SEQ ID NO: 31339 - protein, 979 aa, synthetic construct
  REGION 1..979: note = engineered CasX variant
QEGKRINKIRRRLVKDSNTKKAGKTGPMKTLLVRVMTPDLRERLENLRKKPENIPQPISNTSRANLNKLLTDYTEMKKAILHVYWEEFQKDPVGLMSRVAQPASKKIDQNKLKPEMDEKGNLTTAGFACSQCGQPLFVYKLEQVSEKGKAYTNYFGRCNVAEHEKLILLAQLKPEKDSDEAVTYSLGKFGQRALDFYSIHVTKESTHPVKPLAQIAGNRYASAPVGKALSDACMGTIASFLSKYQDIIIEHQKVVKGNQKRLESLRELAGKENLEYPSVTLPPQPHTKEGVDAYNEVIARVRMWVNLNLWQKLKLSRDDAKPLLRLKGFPSFPLVERQANEVDWWDMVCNVKKLINEKKEDGKVFWQNLAGYKRQEALRPYLSSEEDRKKGKKFARYQLGDLLLHLEKKHGEDWGKVYDEAWERIDKKVEGLSKHIKLEEERRSEDAQSKAALTDWLRAKASFVIEGLKEADKDEFCRCELKLQKWYGDLRGKPFAIEAENSILDISGFSKQYNCAFIWQKDGVKKLNLYLIINYFKGGKLRFKKIKPEAFEANRFYTVINKKSGEIVPMEVNFNFDDPNLIILPLAFGKRQGREFIWNDLLSLETGSLKLANGRVIEKTLYNRRTRQDEPALFVALTFERREVLDSSNIKTPMNLIGVDRGENIPAVIALTDPEGCPLSRFKDSLGNPTHILRIGESYKEKQRTIQAKKEVEQRRAGGYSRKYASKAKNLADDMVRNTARDLLYYAVTQDAMLIFENLSRGFGRQGKRTFMAERQYTRMEDWLTAKLAYEGLPSKTYLSKTLAQYTSKTCSNCGFTITSADYDRVLEKLKKTATGWMTTINGKELKVEGQITYYNRYKRQNVVKDLSVELDRLSEESVNNDISSWTKGRSGEALSLLKKRFSHRPVQEKFVCLNCGFETHADEQAALNIARSWLFLRSQEYKKYQTNKTTGNTDKRAFVETWQSFYRKKLKEVWKPAV

SEQ ID NO: 31340 - protein, 979 aa, synthetic construct
  REGION 1..979: note = engineered CasX variant
QEGKRINKIRRRLVKDSNTKKAGKTGPMKTLLVRVMTPDLRERLENLRKKPENIPQPISNTSRANLNKLLTDYTEMKKAILHVYWEEFQKDPVGLMSRVAQPASKKIDQNKLKPEMDEKGNLTTAGFACSQCGQPLFVYKLEQVSEKGKAYTNYFGRCNVAEHEKLILLAQLKPEKDSDEAVTYSLGKFGQRALDFYSIHVTKESTHPVKPLAQIAGNRYASVPVGKALSDACMGTIASFLSKYQDIIIEHQKVVKGNQKRLESLRELAGKENLEYPSVTLPPQPHTKEGVDAYNEVIARVRMWVNLNLWQKLKLSRDDAKPLLRLKGFPSFPLVERQANEVDWWDMVCNVKKLINEKKEDGKVFWQNLAGYKRQEALRPYLSSEEDRKKGKKFARYQLGDLLLHLEKKHGEDWGKVYDEAWERIDKKVEGLSKHIKLEEERRSEDAQSKAALTDWLRAKASFVIEGLKEADKDEFCRCELKLQKWYGDLRGKPFAIEAENSILDISGFSKQYNCAFIWQKDGVKKLNLYLIINYFKGGKLRFKKIKPEAFEANRFYTVINKKSGEIVPMEVNFNFDDPNLIILPLAFGKRQGREFIWNDLLSLETGSLKLANGRVIEKTLYNRRTRQDEPALFVALTFERREVLDSSNIKTPMNLIGVDRGENIPAVIALTDPEGCPLSRFKDSLGNPTHILRIGESYKEKQRTIQAKKEVEQRRAGGYSRKYASKAKNLADDMVRNTARDLLYYAVTQDAMLIFENLSRGFGRQGKRTFMAERQYTRMEDWLTAKLAYEGLPSKTYLSKTLAQYTSKTCSNCGFTITSADYDRVLEKLKKTATGWMTTINGKELKVEGQITYYNRYKRQNVVKDLSVELDRLSEESVNNDISSWTKGRSGEALSLLKKRFSHRPVQEKFVCLNCGFETHADEQAALNIARSWLFLRSQEYKKYQTNKTTGNTDKRAFVETWQSFYRKKLKEVWKPAV

SEQ ID NO: 31341 - protein, 979 aa, synthetic construct
  REGION 1..979: note = engineered CasX variant
QEGKRINKIRRRLVKDSNTKKAGKTGPMKTLLVRVMTPDLRERLENLRKKPENIPQPISNTSRANLNKLLTDYTEMKKAILHVYWEEFQKDPVGLMSRVAQPASKKIDQNKLKPEMDEKGNLTTAGFACSQCGQPLFVYKLEQVSEKGKAYTNYFGRCNVAEHEKLIKLAQLKPEKDSDEAVTYSLGKFGQRALDFYSIHVTKESTHPVKPLAQIAGNRYASGPVGKALSDACMGTIASFLSKYQDIIIEHQKVVKGNQKRLESLRELAGKENLEYPSVTLPPQPHTKEGVDAYNEVIARVRMWVNLNLWQKLKLSRDDAKPLLRLKGFPSFPLVERQANEVDWWDMVCNVKKLINEKKEDGKVFWQNLAGYKRQEALRPYLSSEEDRKKGKKFARYQLGDLLLHLEKKHGEDWGKVYDEAWERIDKKVEGLSKHIKLEEERRSEDAQSKAALTDWLRAKASFVIEGLKEADKDEFCRCELKLQKWYGDLRGKPFAIEAENSILDISGFSKQYNCAFIWQKDGVKKLNLYLIINYFKGGKLRFKKIKPEAFEANRFYTVINKKSGEIVPMEVNFNFDDPNLIILPLAFGKRQGREFIWNDLLSLETGSLKLANGRVIEKTLYNRRTRQDEPALFVALTFERREVLDSSNIKTPMNLIGVDRGENIPAVIALTDPEGCPLSRFKDSLGNPTHILRIGESYKEKQRTIQAKKEVEQRRAGGYSRKYASKAKNLADDMVRNTARDLLYYAVTQDAMLIFENLSRGFGRQGKRTFMAERQYTRMEDWLTAKLAYEGLPSKTYLSKTLAQYTSKTCSNCGFTITSADYDRVLEKLKKTATGWMTTINGKELKVEGQITYYNRYKRQNVVKDLSVELDRLSEESVNNDISSWTKGRSGEALSLLKKRFSHRPVQEKFVCLNCGFETHADEQAALNIARSWLFLRSQEYKKYQTNKTTGNTDKRAFVETWQSFYRKKLKEVWKPAV

SEQ ID NO: 31342 - protein, 978 aa, synthetic construct
  REGION 1..978: note = engineered CasX variant
QEGKRINKIRRRLVKDSNTKKAGKTGPMKTLLVRVMTPDLRERLENLRKKPENIPQPISNTSRANLNKLLTDYTEMKKAILHVYWEEFQKDPVGLMSRVAQPASKKIDQNKLKPEMDEKGNLTTAGFACSQCGQPLFVYKLEQVSEKGKAYTNYFGRCNVAEHEKLILLAQLKPEKDSDEAVTYSLGKFGQRALDFYSIHVTKESTHPVKPLAQIAGNRYASPVGKALSDACMGTIASFLSKYQDIIIEHQKVVKGNQKRLESLRELAGKENLEYPSVTLPPQPHTKEGVDAYNEVIARVRMWVNLNLWQKLKLSRDDAKPLLRLKGFPSFPLVERQANEVDWWDMVCNVKKLINEKKEDGKVFWQNLAGYKRQEALRPYLSSEEDRKKGKKFARYQLGDLLLHLEKKHGEDWGKVYDEAWERIDKKVEGLSKHIKLEEERRSEDAQSKAALTDWLRAKASFVIEGLKEADKDEFCRCELKLQKWYGDLRGKPFAIEAENSILDISGFSKQYNCAFIWQKDGVKKLNLYLIINYFKGGKLRFKKIKPEAFEANRFYTVINKKSGEIVPMEVNFNFDDPNLIILPLAFGKRQGREFIWNDLLSLETGSLKLANGRVIEKTLYNRRTRQDEPALFVALTFERREVLDSSNIKTPMNLIGVDRGENIPAVIALTDPEGCPLSRFKDSLGNPTHILRIGESYKEKQRTIQAKKEVEQRRAGGYSRKYASKAKNLADDMVRNTARDLLYYAVTQDAMLIFENLSRGFGRQGKRTFMAERQYTRMEDWLTAKLAYEGLPSKTYLSKTLAQYTSKTCSNCGFTITSADYDRVLEKLKKTATGWMTTINGKELKVEGQITYYNRYKRQNVVKDLSVELDRLSEESVNNDISSWTKGRSGEALSLLKKRFSHRPVQEKFVCLNCGFETHADEQAALNIARSWLFLRSQEYKKYQTNKTTGNTDKRAFVETWQSFYRKKLKEVWKPAV

SEQ ID NO: 31343 - protein, 979 aa, synthetic construct
  REGION 1..979: note = engineered CasX variant
QEGKRINKIRRRLVKDSNTKKAGKTGPMKTLLVRVMTPDLRERLENLRKKPENIPQPISNTSRANLNKLLTDYTEMKKAILHVYWEEFQKDPVGLMSRVAQPASKKIDQNKLKPEMDEKGNLTTAGFACSQCGQPLFVYKLEQVSEKGKAYTNYFGRCNVAEHEKLILLAQLKPEKDSDEAVTYSLGKFGQRALDFYSIHVTKESTHPVKPLAQIAGNRYASYPVGKALSDACMGTIASFLSKYQDIIIEHQKVVKGNQKRLESLRELAGKENLEYPSVTLPPQPHTKEGVDAYNEVIARVRMWVNLNLWQKLKLSRDDAKPLLRLKGFPSFPLVERQANEVDWWDMVCNVKKLINEKKEDGKVFWQNLAGYKRQEALRPYLSSEEDRKKGKKFARYQLGDLLLHLEKKHGEDWGKVYDEAWERIDKKVEGLSKHIKLEEERRSEDAQSKAALTDWLRAKASFVIEGLKEADKDEFCRCELKLQKWYGDLRGKPFAIEAENSILDISGFSKQYNCAFIWQKDGVKKLNLYLIINYFKGGKLRFKKIKPEAFEANRFYTVINKKSGEIVPMEVNFNFDDPNLIILPLAFGKRQGREFIWNDLLSLETGSLKLANGRVIEKTLYNRRTRQDEPALFVALTFERREVLDSSNIKPMSNLIGVDRGENIPAVIALTDPEGCPLSRFKDSLGNPTHILRIGESYKEKQRTIQAKKEVEQRRAGGYSRKYASKAKNLADDMVRNTARDLLYYAVTQDAMLIFENLSRGFGRQGKRTFMAERQYTRMEDWLTAKLAYEGLPSKTYLSKTLAQYTSKTCSNCGFTITSADYDRVLEKLKKTATGWMTTINGKELKVEGQITYYNRYKRQNVVKDLSVELDRLSEESVNNDISSWTKGRSGEALSLLKKRFSHRPVQEKFVCLNCGFETHADEQAALNIARSWLFLRSQEYKKYQTNKTTGNTDKRAFVETWQSFYRKKLKEVWKPAV

SEQ ID NO: 31344 - protein, 979 aa, synthetic construct
  REGION 1..979: note = engineered CasX variant
QEGKRINKIRRRLVKDSNTKKAGKTGPMKTLLVRVMTPDLRERLENLRKKPENIPQPISNTSRANLNKLLTDYTEMKKAILHVYWEEFQKDPVGLMSRVAQPASKKIDQNKLKPEMDEKGNLTTAGFACSQCGQPLFVYKLEQVSEKGKAYTNYFGRCNVAEHEKLILLAQLKPEKDSDEAVTYSLGKFGQRALDFYSIHVTKESTHPVKPLAQIAGNRYASHPVGKALSDACMGTIASFLSKYQDIIIEHQKVVKGNQKRLESLRELAGKENLEYPSVTLPPQPHTKEGVDAYNEVIARVRMWVNLNLWQKLKLSRDDAKPLLRLKGFPSFPLVERQANEVDWWDMVCNVKKLINEKKEDGKVFWQNLAGYKRQEALRPYLSSEEDRKKGKKFARYQLGDLLLHLEKKHGEDWGKVYDEAWERIDKKVEGLSKHIKLEEERRSEDAQSKAALTDWLRAKASFVIEGLKEADKDEFCRCELKLQKWYGDLRGKPFAIEAENSILDISGFSKQYNCAFIWQKDGVKKLNLYLIINYFKGGKLRFKKIKPEAFEANRFYTVINKKSGEIVPMEVNFNFDDPNLIILPLAFGKRQGREFIWNDLLSLETGSLKLANGRVIEKTLYNRRTRQDEPALFVALTFERREVLDSSNIKPMSNLIGVDRGENIPAVIALTDPEGCPLSRFKDSLGNPTHILRIGESYKEKQRTIQAKKEVEQRRAGGYSRKYASKAKNLADDMVRNTARDLLYYAVTQDAMLIFENLSRGFGRQGKRTFMAERQYTRMEDWLTAKLAYEGLPSKTYLSKTLAQYTSKTCSNCGFTITSADYDRVLEKLKKTATGWMTTINGKELKVEGQITYYNRYKRQNVVKDLSVELDRLSEESVNNDISSWTKGRSGEALSLLKKRFSHRPVQEKFVCLNCGFETHADEQAALNIARSWLFLRSQEYKKYQTNKTTGNTDKRAFVETWQSFYRKKLKEVWKPAV

SEQ ID NO: 31345 - protein, 979 aa, synthetic construct
  REGION 1..979: note = engineered CasX variant
QEGKRINKIRRRLVKDSNTKKAGKTGPMKTLLVRVMTPDLRERLENLRKKPENIPQPISNTSRANLNKLLTDYTEMKKAILHVYWEEFQKDPVGLMSRVAQPASKKIDQNKLKPEMDEKGNLTTAGFACSQCGQPLFVYKLEQVSEKGKAYTNYFGRCNVAEHEKLILLAQLKPEKDSDEAVTYSLGKFGQRALDFYSIHVTKESTHPVKPLAQIAGNRYASSPVGKALSDACMGTIASFLSKYQDIIIEHQKVVKGNQKRLESLRELAGKENLEYPSVTLPPQPHTKEGVDAYNEVIARVRMWVNLNLWQKLKLSRDDAKPLLRLKGFPSFPLVERQANEVDWWDMVCNVKKLINEKKEDGKVFWQNLAGYKRQEALRPYLSSEEDRKKGKKFARYQLGDLLLHLEKKHGEDWGKVYDEAWERIDKKVEGLSKHIKLEEERRSEDAQSKAALTDWLRAKASFVIEGLKEADKDEFCRCELKLQKWYGDLRGKPFAIEAENSILDISGFSKQYNCAFIWQKDGVKKLNLYLIINYFKGGKLRFKKIKPEAFEANRFYTVINKKSGEIVPMEVNFNFDDPNLIILPLAFGKRQGREFIWNDLLSLETGSLKLANGRVIEKTLYNRRTRQDEPALFVALTFERREVLDSSNIKPMSNLIGVDRGENIPAVIALTDPEGCPLSRFKDSLGNPTHILRIGESYKEKQRTIQAKKEVEQRRAGGYSRKYASKAKNLADDMVRNTARDLLYYAVTQDAMLIFENLSRGFGRQGKRTFMAERQYTRMEDWLTAKLAYEGLPSKTYLSKTLAQYTSKTCSNCGFTITSADYDRVLEKLKKTATGWMTTINGKELKVEGQITYYNRYKRQNVVKDLSVELDRLSEESVNNDISSWTKGRSGEALSLLKKRFSHRPVQEKFVCLNCGFETHADEQAALNIARSWLFLRSQEYKKYQTNKTTGNTDKRAFVETWQSFYRKKLKEVWKPAV

SEQ ID NO: 31346 - protein, 979 aa, synthetic construct
  REGION 1..979: note = engineered CasX variant
QEGKRINKIRRRLVKDSNTKKAGKTGPMKTLLVRVMTPDLRERLENLRKKPENIPQPISNTSRANLNKLLTDYTEMKKAILHVYWEEFQKDPVGLMSRVAQPASKKIDQNKLKPEMDEKGNLTTAGFACSQCGQPLFVYKLEQVSEKGKAYTNYFGRCNVAEHEKLILLAQLKPEKDSDEAVTYSLGKFGQRALDFYSIHVTKESTHPVKPLAQIAGNRYASTPVGKALSDACMGTIASFLSKYQDIIIEHQKVVKGNQKRLESLRELAGKENLEYPSVTLPPQPHTKEGVDAYNEVIARVRMWVNLNLWQKLKLSRDDAKPLLRLKGFPSFPLVERQANEVDWWDMVCNVKKLINEKKEDGKVFWQNLAGYKRQEALRPYLSSEEDRKKGKKFARYQLGDLLLHLEKKHGEDWGKVYDEAWERIDKKVEGLSKHIKLEEERRSEDAQSKAALTDWLRAKASFVIEGLKEADKDEFCRCELKLQKWYGDLRGKPFAIEAENSILDISGFSKQYNCAFIWQKDGVKKLNLYLIINYFKGGKLRFKKIKPEAFEANRFYTVINKKSGEIVPMEVNFNFDDPNLIILPLAFGKRQGREFIWNDLLSLETGSLKLANGRVIEKTLYNRRTRQDEPALFVALTFERREVLDSSNIKPMSNLIGVDRGENIPAVIALTDPEGCPLSRFKDSLGNPTHILRIGESYKEKQRTIQAKKEVEQRRAGGYSRKYASKAKNLADDMVRNTARDLLYYAVTQDAMLIFENLSRGFGRQGKRTFMAERQYTRMEDWLTAKLAYEGLPSKTYLSKTLAQYTSKTCSNCGFTITSADYDRVLEKLKKTATGWMTTINGKELKVEGQITYYNRYKRQNVVKDLSVELDRLSEESVNNDISSWTKGRSGEALSLLKKRFSHRPVQEKFVCLNCGFETHADEQAALNIARSWLFLRSQEYKKYQTNKTTGNTDKRAFVETWQSFYRKKLKEVWKPAV

SEQ ID NO: 31347 - protein, 979 aa, synthetic construct
  REGION 1..979: note = engineered CasX variant
QEGKRINKIRRRLVKDSNTKKAGKTGPMKTLLVRVMTPDLRERLENLRKKPENIPQPISNTSRANLNKLLTDYTEMKKAILHVYWEEFQKDPVGLMSRVAQPASKKIDQNKLKPEMDEKGNLTTAGFACSQCGQPLFVYKLEQVSEKGKAYTNYFGRCNVAEHEKLILLAQLKPEKDSDEAVTYSLGKFGQRALDFYSIHVTKESTHPVKPLAQIAGNRYASAPVGKALSDACMGTIASFLSKYQDIIIEHQKVVKGNQKRLESLRELAGKENLEYPSVTLPPQPHTKEGVDAYNEVIARVRMWVNLNLWQKLKLSRDDAKPLLRLKGFPSFPLVERQANEVDWWDMVCNVKKLINEKKEDGKVFWQNLAGYKRQEALRPYLSSEEDRKKGKKFARYQLGDLLLHLEKKHGEDWGKVYDEAWERIDKKVEGLSKHIKLEEERRSEDAQSKAALTDWLRAKASFVIEGLKEADKDEFCRCELKLQKWYGDLRGKPFAIEAENSILDISGFSKQYNCAFIWQKDGVKKLNLYLIINYFKGGKLRFKKIKPEAFEANRFYTVINKKSGEIVPMEVNFNFDDPNLIILPLAFGKRQGREFIWNDLLSLETGSLKLANGRVIEKTLYNRRTRQDEPALFVALTFERREVLDSSNIKPMSNLIGVDRGENIPAVIALTDPEGCPLSRFKDSLGNPTHILRIGESYKEKQRTIQAKKEVEQRRAGGYSRKYASKAKNLADDMVRNTARDLLYYAVTQDAMLIFENLSRGFGRQGKRTFMAERQYTRMEDWLTAKLAYEGLPSKTYLSKTLAQYTSKTCSNCGFTITSADYDRVLEKLKKTATGWMTTINGKELKVEGQITYYNRYKRQNVVKDLSVELDRLSEESVNNDISSWTKGRSGEALSLLKKRFSHRPVQEKFVCLNCGFETHADEQAALNIARSWLFLRSQEYKKYQTNKTTGNTDKRAFVETWQSFYRKKLKEVWKPAV

SEQ ID NO: 31348 - protein, 979 aa, synthetic construct
  REGION 1..979: note = engineered CasX variant
QEGKRINKIRRRLVKDSNTKKAGKTGPMKTLLVRVMTPDLRERLENLRKKPENIPQPISNTSRANLNKLLTDYTEMKKAILHVYWEEFQKDPVGLMSRVAQPASKKIDQNKLKPEMDEKGNLTTAGFACSQCGQPLFVYKLEQVSEKGKAYTNYFGRCNVAEHEKLILLAQLKPEKDSDEAVTYSLGKFGQRALDFYSIHVTKESTHPVKPLAQIAGNRYASVPVGKALSDACMGTIASFLSKYQDIIIEHQKVVKGNQKRLESLRELAGKENLEYPSVTLPPQPHTKEGVDAYNEVIARVRMWVNLNLWQKLKLSRDDAKPLLRLKGFPSFPLVERQANEVDWWDMVCNVKKLINEKKEDGKVFWQNLAGYKRQEALRPYLSSEEDRKKGKKFARYQLGDLLLHLEKKHGEDWGKVYDEAWERIDKKVEGLSKHIKLEEERRSEDAQSKAALTDWLRAKASFVIEGLKEADKDEFCRCELKLQKWYGDLRGKPFAIEAENSILDISGFSKQYNCAFIWQKDGVKKLNLYLIINYFKGGKLRFKKIKPEAFEANRFYTVINKKSGEIVPMEVNFNFDDPNLIILPLAFGKRQGREFIWNDLLSLETGSLKLANGRVIEKTLYNRRTRQDEPALFVALTFERREVLDSSNIKPMSNLIGVDRGENIPAVIALTDPEGCPLSRFKDSLGNPTHILRIGESYKEKQRTIQAKKEVEQRRAGGYSRKYASKAKNLADDMVRNTARDLLYYAVTQDAMLIFENLSRGFGRQGKRTFMAERQYTRMEDWLTAKLAYEGLPSKTYLSKTLAQYTSKTCSNCGFTITSADYDRVLEKLKKTATGWMTTINGKELKVEGQITYYNRYKRQNVVKDLSVELDRLSEESVNNDISSWTKGRSGEALSLLKKRFSHRPVQEKFVCLNCGFETHADEQAALNIARSWLFLRSQEYKKYQTNKTTGNTDKRAFVETWQSFYRKKLKEVWKPAV

SEQ ID NO: 31349 - protein, 979 aa, synthetic construct
  REGION 1..979: note = engineered CasX variant
QEGKRINKIRRRLVKDSNTKKAGKTGPMKTLLVRVMTPDLRERLENLRKKPENIPQPISNTSRANLNKLLTDYTEMKKAILHVYWEEFQKDPVGLMSRVAQPASKKIDQNKLKPEMDEKGNLTTAGFACSQCGQPLFVYKLEQVSEKGKAYTNYFGRCNVAEHEKLIKLAQLKPEKDSDEAVTYSLGKFGQRALDFYSIHVTKESTHPVKPLAQIAGNRYASGPVGKALSDACMGTIASFLSKYQDIIIEHQKVVKGNQKRLESLRELAGKENLEYPSVTLPPQPHTKEGVDAYNEVIARVRMWVNLNLWQKLKLSRDDAKPLLRLKGFPSFPLVERQANEVDWWDMVCNVKKLINEKKEDGKVFWQNLAGYKRQEALRPYLSSEEDRKKGKKFARYQLGDLLLHLEKKHGEDWGKVYDEAWERIDKKVEGLSKHIKLEEERRSEDAQSKAALTDWLRAKASFVIEGLKEADKDEFCRCELKLQKWYGDLRGKPFAIEAENSILDISGFSKQYNCAFIWQKDGVKKLNLYLIINYFKGGKLRFKKIKPEAFEANRFYTVINKKSGEIVPMEVNFNFDDPNLIILPLAFGKRQGREFIWNDLLSLETGSLKLANGRVIEKTLYNRRTRQDEPALFVALTFERREVLDSSNIKPMSNLIGVDRGENIPAVIALTDPEGCPLSRFKDSLGNPTHILRIGESYKEKQRTIQAKKEVEQRRAGGYSRKYASKAKNLADDMVRNTARDLLYYAVTQDAMLIFENLSRGFGRQGKRTFMAERQYTRMEDWLTAKLAYEGLPSKTYLSKTLAQYTSKTCSNCGFTITSADYDRVLEKLKKTATGWMTTINGKELKVEGQITYYNRYKRQNVVKDLSVELDRLSEESVNNDISSWTKGRSGEALSLLKKRFSHRPVQEKFVCLNCGFETHADEQAALNIARSWLFLRSQEYKKYQTNKTTGNTDKRAFVETWQSFYRKKLKEVWKPAV

SEQ ID NO: 31350 - protein, 978 aa, synthetic construct
  REGION 1..978: note = engineered CasX variant
QEGKRINKIRRRLVKDSNTKKAGKTGPMKTLLVRVMTPDLRERLENLRKKPENIPQPISNTSRANLNKLLTDYTEMKKAILHVYWEEFQKDPVGLMSRVAQPASKKIDQNKLKPEMDEKGNLTTAGFACSQCGQPLFVYKLEQVSEKGKAYTNYFGRCNVAEHEKLILLAQLKPEKDSDEAVTYSLGKFGQRALDFYSIHVTKESTHPVKPLAQIAGNRYASPVGKALSDACMGTIASFLSKYQDIIIEHQKVVKGNQKRLESLRELAGKENLEYPSVTLPPQPHTKEGVDAYNEVIARVRMWVNLNLWQKLKLSRDDAKPLLRLKGFPSFPLVERQANEVDWWDMVCNVKKLINEKKEDGKVFWQNLAGYKRQEALRPYLSSEEDRKKGKKFARYQLGDLLLHLEKKHGEDWGKVYDEAWERIDKKVEGLSKHIKLEEERRSEDAQSKAALTDWLRAKASFVIEGLKEADKDEFCRCELKLQKWYGDLRGKPFAIEAENSILDISGFSKQYNCAFIWQKDGVKKLNLYLIINYFKGGKLRFKKIKPEAFEANRFYTVINKKSGEIVPMEVNFNFDDPNLIILPLAFGKRQGREFIWNDLLSLETGSLKLANGRVIEKTLYNRRTRQDEPALFVALTFERREVLDSSNIKPMSNLIGVDRGENIPAVIALTDPEGCPLSRFKDSLGNPTHILRIGESYKEKQRTIQAKKEVEQRRAGGYSRKYASKAKNLADDMVRNTARDLLYYAVTQDAMLIFENLSRGFGRQGKRTFMAERQYTRMEDWLTAKLAYEGLPSKTYLSKTLAQYTSKTCSNCGFTITSADYDRVLEKLKKTATGWMTTINGKELKVEGQITYYNRYKRQNVVKDLSVELDRLSEESVNNDISSWTKGRSGEALSLLKKRFSHRPVQEKFVCLNCGFETHADEQAALNIARSWLFLRSQEYKKYQTNKTTGNTDKRAFVETWQSFYRKKLKEVWKPAV

SEQ ID NO: 31351 - protein, 978 aa, synthetic construct
  REGION 1..978: note = engineered CasX variant
QEGKRINKIRRRLVKDSNTKKAGKTGPMKTLLVRVMTPDLRERLENLRKKPENIPQPISNTSRANLNKLLTDYTEMKKAILHVYWEEFQKDPVGLMSRVAQPASKKIDQNKLKPEMDEKGNLTTAGFACSQCGQPLFVYKLEQVSEKGKAYTNYFGRCNVAEHEKLILLAQLKPEKDSDEAVTYSLGKFGQRALDFYSIHVTKESTHPVKPLAQIAGNRYASYPVGKALSDACMGTIASFLSKYQDIIIEHQKVVKGNQKRLESLRELAGKENLEYPSVTLPPQPHTKEGVDAYNEVIARVRMWVNLNLWQKLKLSRDDAKPLLRLKGFPSFPLVERQANEVDWWDMVCNVKKLINEKKEDGKVFWQNLAGYKRQEALRPYLSSEEDRKKGKKFARYQLGDLLLHLEKKHGEDWGKVYDEAWERIDKKVEGLSKHIKLEEERRSEDAQSKAALTDWLRAKASFVIEGLKEADKDEFCRCELKLQKWYGDLRGKPFAIEAENSILDISGFSKQYNCAFIWQKDGVKKLNLYLIINYFKGGKLRFKKIKPEAFEANRFYTVINKKSGEIVPMEVNFNFDDPNLIILPLAFGKRQGREFIWNDLLSLETGSLKLANGRVIEKTLYNRRTRQDEPALFVALTFERREVLDSSNIKPMNLIGVDRGENIPAVIALTDPEGCPLSRFKDSLGNPTHILRIRESYKEKQRTIQAKKEVEQRRAGGYSRKYASKAKNLADDMVRNTARDLLYYAVTQDAMLIFENLSRGFGRQGKRTFMAERQYTRMEDWLTAKLAYEGLPSKTYLSKTLAQYTSKTCSNCGFTITSADYDRVLEKLKKTATGWMTTINGKELKVEGQITYYNRYKRQNVVKDLSVELDRLSEESVNNDISSWTKGRSGEALSLLKKRFSHRPVQEKFVCLNCGFETHADEQAALNIARSWLFLRSQEYKKYQTNKTTGNTDKRAFVETWQSFYRKKLKEVWKPAV

SEQ ID NO: 31352 - protein, 978 aa, synthetic construct
  REGION 1..978: note = engineered CasX variant
QEGKRINKIRRRLVKDSNTKKAGKTGPMKTLLVRVMTPDLRERLENLRKKPENIPQPISNTSRANLNKLLTDYTEMKKAILHVYWEEFQKDPVGLMSRVAQPASKKIDQNKLKPEMDEKGNLTTAGFACSQCGQPLFVYKLEQVSEKGKAYTNYFGRCNVAEHEKLILLAQLKPEKDSDEAVTYSLGKFGQRALDFYSIHVTKESTHPVKPLAQIAGNRYASHPVGKALSDACMGTIASFLSKYQDIIIEHQKVVKGNQKRLESLRELAGKENLEYPSVTLPPQPHTKEGVDAYNEVIARVRMWVNLNLWQKLKLSRDDAKPLLRLKGFPSFPLVERQANEVDWWDMVCNVKKLINEKKEDGKVFWQNLAGYKRQEALRPYLSSEEDRKKGKKFARYQLGDLLLHLEKKHGEDWGKVYDEAWERIDKKVEGLSKHIKLEEERRSEDAQSKAALTDWLRAKASFVIEGLKEADKDEFCRCELKLQKWYGDLRGKPFAIEAENSILDISGFSKQYNCAFIWQKDGVKKLNLYLIINYFKGGKLRFKKIKPEAFEANRFYTVINKKSGEIVPMEVNFNFDDPNLIILPLAFGKRQGREFIWNDLLSLETGSLKLANGRVIEKTLYNRRTRQDEPALFVALTFERREVLDSSNIKPMNLIGVDRGENIPAVIALTDPEGCPLSRFKDSLGNPTHILRIRESYKEKQRTIQAKKEVEQRRAGGYSRKYASKAKNLADDMVRNTARDLLYYAVTQDAMLIFENLSRGFGRQGKRTFMAERQYTRMEDWLTAKLAYEGLPSKTYLSKTLAQYTSKTCSNCGFTITSADYDRVLEKLKKTATGWMTTINGKELKVEGQITYYNRYKRQNVVKDLSVELDRLSEESVNNDISSWTKGRSGEALSLLKKRFSHRPVQEKFVCLNCGFETHADEQAALNIARSWLFLRSQEYKKYQTNKTTGNTDKRAFVETWQSFYRKKLKEVWKPAV

SEQ ID NO: 31353 - protein, 978 aa, synthetic construct
  REGION 1..978: note = engineered CasX variant
QEGKRINKIRRRLVKDSNTKKAGKTGPMKTLLVRVMTPDLRERLENLRKKPENIPQPISNTSRANLNKLLTDYTEMKKAILHVYWEEFQKDPVGLMSRVAQPASKKIDQNKLKPEMDEKGNLTTAGFACSQCGQPLFVYKLEQVSEKGKAYTNYFGRCNVAEHEKLILLAQLKPEKDSDEAVTYSLGKFGQRALDFYSIHVTKESTHPVKPLAQIAGNRYASSPVGKALSDACMGTIASFLSKYQDIIIEHQKVVKGNQKRLESLRELAGKENLEYPSVTLPPQPHTKEGVDAYNEVIARVRMWVNLNLWQKLKLSRDDAKPLLRLKGFPSFPLVERQANEVDWWDMVCNVKKLINEKKEDGKVFWQNLAGYKRQEALRPYLSSEEDRKKGKKFARYQLGDLLLHLEKKHGEDWGKVYDEAWERIDKKVEGLSKHIKLEEERRSEDAQSKAALTDWLRAKASFVIEGLKEADKDEFCRCELKLQKWYGDLRGKPFAIEAENSILDISGFSKQYNCAFIWQKDGVKKLNLYLIINYFKGGKLRFKKIKPEAFEANRFYTVINKKSGEIVPMEVNFNFDDPNLIILPLAFGKRQGREFIWNDLLSLETGSLKLANGRVIEKTLYNRRTRQDEPALFVALTFERREVLDSSNIKPMNLIGVDRGENIPAVIALTDPEGCPLSRFKDSLGNPTHILRIRESYKEKQRTIQAKKEVEQRRAGGYSRKYASKAKNLADDMVRNTARDLLYYAVTQDAMLIFENLSRGFGRQGKRTFMAERQYTRMEDWLTAKLAYEGLPSKTYLSKTLAQYTSKTCSNCGFTITSADYDRVLEKLKKTATGWMTTINGKELKVEGQITYYNRYKRQNVVKDLSVELDRLSEESVNNDISSWTKGRSGEALSLLKKRFSHRPVQEKFVCLNCGFETHADEQAALNIARSWLFLRSQEYKKYQTNKTTGNTDKRAFVETWQSFYRKKLKEVWKPAV

SEQ ID NO: 31354 - protein, 978 aa, synthetic construct
  REGION 1..978: note = engineered CasX variant
QEGKRINKIRRRLVKDSNTKKAGKTGPMKTLLVRVMTPDLRERLENLRKKPENIPQPISNTSRANLNKLLTDYTEMKKAILHVYWEEFQKDPVGLMSRVAQPASKKIDQNKLKPEMDEKGNLTTAGFACSQCGQPLFVYKLEQVSEKGKAYTNYFGRCNVAEHEKLILLAQLKPEKDSDEAVTYSLGKFGQRALDFYSIHVTKESTHPVKPLAQIAGNRYASTPVGKALSDACMGTIASFLSKYQDIIIEHQKVVKGNQKRLESLRELAGKENLEYPSVTLPPQPHTKEGVDAYNEVIARVRMWVNLNLWQKLKLSRDDAKPLLRLKGFPSFPLVERQANEVDWWDMVCNVKKLINEKKEDGKVFWQNLAGYKRQEALRPYLSSEEDRKKGKKFARYQLGDLLLHLEKKHGEDWGKVYDEAWERIDKKVEGLSKHIKLEEERRSEDAQSKAALTDWLRAKASFVIEGLKEADKDEFCRCELKLQKWYGDLRGKPFAIEAENSILDISGFSKQYNCAFIWQKDGVKKLNLYLIINYFKGGKLRFKKIKPEAFEANRFYTVINKKSGEIVPMEVNFNFDDPNLIILPLAFGKRQGREFIWNDLLSLETGSLKLANGRVIEKTLYNRRTRQDEPALFVALTFERREVLDSSNIKPMNLIGVDRGENIPAVIALTDPEGCPLSRFKDSLGNPTHILRIRESYKEKQRTIQAKKEVEQRRAGGYSRKYASKAKNLADDMVRNTARDLLYYAVTQDAMLIFENLSRGFGRQGKRTFMAERQYTRMEDWLTAKLAYEGLPSKTYLSKTLAQYTSKTCSNCGFTITSADYDRVLEKLKKTATGWMTTINGKELKVEGQITYYNRYKRQNVVKDLSVELDRLSEESVNNDISSWTKGRSGEALSLLKKRFSHRPVQEKFVCLNCGFETHADEQAALNIARSWLFLRSQEYKKYQTNKTTGNTDKRAFVETWQSFYRKKLKEVWKPAV

SEQ ID NO: 31355 - protein, 978 aa, synthetic construct
  REGION 1..978: note = engineered CasX variant
QEGKRINKIRRRLVKDSNTKKAGKTGPMKTLLVRVMTPDLRERLENLRKKPENIPQPISNTSRANLNKLLTDYTEMKKAILHVYWEEFQKDPVGLMSRVAQPASKKIDQNKLKPEMDEKGNLTTAGFACSQCGQPLFVYKLEQVSEKGKAYTNYFGRCNVAEHEKLILLAQLKPEKDSDEAVTYSLGKFGQRALDFYSIHVTKESTHPVKPLAQIAGNRYASAPVGKALSDACMGTIASFLSKYQDIIIEHQKVVKGNQKRLESLRELAGKENLEYPSVTLPPQPHTKEGVDAYNEVIARVRMWVNLNLWQKLKLSRDDAKPLLRLKGFPSFPLVERQANEVDWWDMVCNVKKLINEKKEDGKVFWQNLAGYKRQEALRPYLSSEEDRKKGKKFARYQLGDLLLHLEKKHGEDWGKVYDEAWERIDKKVEGLSKHIKLEEERRSEDAQSKAALTDWLRAKASFVIEGLKEADKDEFCRCELKLQKWYGDLRGKPFAIEAENSILDISGFSKQYNCAFIWQKDGVKKLNLYLIINYFKGGKLRFKKIKPEAFEANRFYTVINKKSGEIVPMEVNFNFDDPNLIILPLAFGKRQGREFIWNDLLSLETGSLKLANGRVIEKTLYNRRTRQDEPALFVALTFERREVLDSSNIKPMNLIGVDRGENIPAVIALTDPEGCPLSRFKDSLGNPTHILRIRESYKEKQRTIQAKKEVEQRRAGGYSRKYASKAKNLADDMVRNTARDLLYYAVTQDAMLIFENLSRGFGRQGKRTFMAERQYTRMEDWLTAKLAYEGLPSKTYLSKTLAQYTSKTCSNCGFTITSADYDRVLEKLKKTATGWMTTINGKELKVEGQITYYNRYKRQNVVKDLSVELDRLSEESVNNDISSWTKGRSGEALSLLKKRFSHRPVQEKFVCLNCGFETHADEQAALNIARSWLFLRSQEYKKYQTNKTTGNTDKRAFVETWQSFYRKKLKEVWKPAV

SEQ ID NO: 31356 - protein, 978 aa, synthetic construct
  REGION 1..978: note = engineered CasX variant
QEGKRINKIRRRLVKDSNTKKAGKTGPMKTLLVRVMTPDLRERLENLRKKPENIPQPISNTSRANLNKLLTDYTEMKKAILHVYWEEFQKDPVGLMSRVAQPASKKIDQNKLKPEMDEKGNLTTAGFACSQCGQPLFVYKLEQVSEKGKAYTNYFGRCNVAEHEKLILLAQLKPEKDSDEAVTYSLGKFGQRALDFYSIHVTKESTHPVKPLAQIAGNRYASVPVGKALSDACMGTIASFLSKYQDIIIEHQKVVKGNQKRLESLRELAGKENLEYPSVTLPPQPHTKEGVDAYNEVIARVRMWVNLNLWQKLKLSRDDAKPLLRLKGFPSFPLVERQANEVDWWDMVCNVKKLINEKKEDGKVFWQNLAGYKRQEALRPYLSSEEDRKKGKKFARYQLGDLLLHLEKKHGEDWGKVYDEAWERIDKKVEGLSKHIKLEEERRSEDAQSKAALTDWLRAKASFVIEGLKEADKDEFCRCELKLQKWYGDLRGKPFAIEAENSILDISGFSKQYNCAFIWQKDGVKKLNLYLIINYFKGGKLRFKKIKPEAFEANRFYTVINKKSGEIVPMEVNFNFDDPNLIILPLAFGKRQGREFIWNDLLSLETGSLKLANGRVIEKTLYNRRTRQDEPALFVALTFERREVLDSSNIKPMNLIGVDRGENIPAVIALTDPEGCPLSRFKDSLGNPTHILRIRESYKEKQRTIQAKKEVEQRRAGGYSRKYASKAKNLADDMVRNTARDLLYYAVTQDAMLIFENLSRGFGRQGKRTFMAERQYTRMEDWLTAKLAYEGLPSKTYLSKTLAQYTSKTCSNCGFTITSADYDRVLEKLKKTATGWMTTINGKELKVEGQITYYNRYKRQNVVKDLSVELDRLSEESVNNDISSWTKGRSGEALSLLKKRFSHRPVQEKFVCLNCGFETHADEQAALNIARSWLFLRSQEYKKYQTNKTTGNTDKRAFVETWQSFYRKKLKEVWKPAV

SEQ ID NO: 31357 - protein, 978 aa, synthetic construct
  REGION 1..978: note = engineered CasX variant
QEGKRINKIRRRLVKDSNTKKAGKTGPMKTLLVRVMTPDLRERLENLRKKPENIPQPISNTSRANLNKLLTDYTEMKKAILHVYWEEFQKDPVGLMSRVAQPASKKIDQNKLKPEMDEKGNLTTAGFACSQCGQPLFVYKLEQVSEKGKAYTNYFGRCNVAEHEKLIKLAQLKPEKDSDEAVTYSLGKFGQRALDFYSIHVTKESTHPVKPLAQIAGNRYASGPVGKALSDACMGTIASFLSKYQDIIIEHQKVVKGNQKRLESLRELAGKENLEYPSVTLPPQPHTKEGVDAYNEVIARVRMWVNLNLWQKLKLSRDDAKPLLRLKGFPSFPLVERQANEVDWWDMVCNVKKLINEKKEDGKVFWQNLAGYKRQEALRPYLSSEEDRKKGKKFARYQLGDLLLHLEKKHGEDWGKVYDEAWERIDKKVEGLSKHIKLEEERRSEDAQSKAALTDWLRAKASFVIEGLKEADKDEFCRCELKLQKWYGDLRGKPFAIEAENSILDISGFSKQYNCAFIWQKDGVKKLNLYLIINYFKGGKLRFKKIKPEAFEANRFYTVINKKSGEIVPMEVNFNFDDPNLIILPLAFGKRQGREFIWNDLLSLETGSLKLANGRVIEKTLYNRRTRQDEPALFVALTFERREVLDSSNIKPMNLIGVDRGENIPAVIALTDPEGCPLSRFKDSLGNPTHILRIRESYKEKQRTIQAKKEVEQRRAGGYSRKYASKAKNLADDMVRNTARDLLYYAVTQDAMLIFENLSRGFGRQGKRTFMAERQYTRMEDWLTAKLAYEGLPSKTYLSKTLAQYTSKTCSNCGFTITSADYDRVLEKLKKTATGWMTTINGKELKVEGQITYYNRYKRQNVVKDLSVELDRLSEESVNNDISSWTKGRSGEALSLLKKRFSHRPVQEKFVCLNCGFETHADEQAALNIARSWLFLRSQEYKKYQTNKTTGNTDKRAFVETWQSFYRKKLKEVWKPAV

SEQ ID NO: 31358 - protein, 977 aa, synthetic construct
  REGION 1..977: note = engineered CasX variant
QEGKRINKIRRRLVKDSNTKKAGKTGPMKTLLVRVMTPDLRERLENLRKKPENIPQPISNTSRANLNKLLTDYTEMKKAILHVYWEEFQKDPVGLMSRVAQPASKKIDQNKLKPEMDEKGNLTTAGFACSQCGQPLFVYKLEQVSEKGKAYTNYFGRCNVAEHEKLILLAQLKPEKDSDEAVTYSLGKFGQRALDFYSIHVTKESTHPVKPLAQIAGNRYASPVGKALSDACMGTIASFLSKYQDIIIEHQKVVKGNQKRLESLRELAGKENLEYPSVTLPPQPHTKEGVDAYNEVIARVRMWVNLNLWQKLKLSRDDAKPLLRLKGFPSFPLVERQANEVDWWDMVCNVKKLINEKKEDGKVFWQNLAGYKRQEALRPYLSSEEDRKKGKKFARYQLGDLLLHLEKKHGEDWGKVYDEAWERIDKKVEGLSKHIKLEEERRSEDAQSKAALTDWLRAKASFVIEGLKEADKDEFCRCELKLQKWYGDLRGKPFAIEAENSILDISGFSKQYNCAFIWQKDGVKKLNLYLIINYFKGGKLRFKKIKPEAFEANRFYTVINKKSGEIVPMEVNFNFDDPNLIILPLAFGKRQGREFIWNDLLSLETGSLKLANGRVIEKTLYNRRTRQDEPALFVALTFERREVLDSSNIKPMNLIGVDRGENIPAVIALTDPEGCPLSRFKDSLGNPTHILRIRESYKEKQRTIQAKKEVEQRRAGGYSRKYASKAKNLADDMVRNTARDLLYYAVTQDAMLIFENLSRGFGRQGKRTFMAERQYTRMEDWLTAKLAYEGLPSKTYLSKTLAQYTSKTCSNCGFTITSADYDRVLEKLKKTATGWMTTINGKELKVEGQITYYNRYKRQNVVKDLSVELDRLSEESVNNDISSWTKGRSGEALSLLKKRFSHRPVQEKFVCLNCGFETHADEQAALNIARSWLFLRSQEYKKYQTNKTTGNTDKRAFVETWQSFYRKKLKEVWKPAV

SEQ ID NO: 31359 - protein, 978 aa, synthetic construct
  REGION 1..978: note = engineered CasX variant
QEGKRINKIRRRLVKDSNTKKAGKTGPMKTLLVRVMTPDLRERLENLRKKPENIPQPISNTSRANLNKLLTDYTEMKKAILHVYWEEFQKDPVGLMSRVAQPASKKIDQNKLKPEMDEKGNLTTAGFACSQCGQPLFVYKLEQVSEKGKAYTNYFGRCNVAEHEKLILLAQLKPEKDSDEAVTYSLGKFGQRALDFYSIHVTKESTHPVKPLAQIAGNRYASYPVGKALSDACMGTIASFLSKYQDIIIEHQKVVKGNQKRLESLRELAGKENLEYPSVTLPPQPHTKEGVDAYNEVIARVRMWVNLNLWQKLKLSRDDAKPLLRLKGFPSFPLVERQANEVDWWDMVCNVKKLINEKKEDGKVFWQNLAGYKRQEALRPYLSSEEDRKKGKKFARYQLGDLLLHLEKKHGEDWGKVYDEAWERIDKKVEGLSKHIKLEEERRSEDAQSKAALTDWLRAKASFVIEGLKEADKDEFCRCELKLQKWYGDLRGKPFAIEAENSILDISGFSKQYNCAFIWQKDGVKKLNLYLIINYFKGGKLRFKKIKPEAFEANRFYTVINKKSGEIVPMEVNFNFDDPNLIILPLAFGKRQGREFIWNDLLSLETGSLKLANGRVIEKTLYNRRTRQDEPALFVALTFERREVLDSSNIKPMNLIGVDRGENIPAVIALTDPEGCPLSRFKDSLGNPTHILRIGESYKEKQRTIQAKKEVEQRRAGGYSRKYASKAKNLADDMVRNTARDLLYYAVTQDAMLIFENLSRGFGRQGKRTFSAERQYTRMEDWLTAKLAYEGLPSKTYLSKTLAQYTSKTCSNCGFTITSADYDRVLEKLKKTATGWMTTINGKELKVEGQITYYNRYKRQNVVKDLSVELDRLSEESVNNDISSWTKGRSGEALSLLKKRFSHRPVQEKFVCLNCGFETHADEQAALNIARSWLFLRSQEYKKYQTNKTTGNTDKRAFVETWQSFYRKKLKEVWKPAV

SEQ ID NO: 31360 - protein, 978 aa, synthetic construct
  REGION 1..978: note = engineered CasX variant
QEGKRINKIRRRLVKDSNTKKAGKTGPMKTLLVRVMTPDLRERLENLRKKPENIPQPISNTSRANLNKLLTDYTEMKKAILHVYWEEFQKDPVGLMSRVAQPASKKIDQNKLKPEMDEKGNLTTAGFACSQCGQPLFVYKLEQVSEKGKAYTNYFGRCNVAEHEKLILLAQLKPEKDSDEAVTYSLGKFGQRALDFYSIHVTKESTHPVKPLAQIAGNRYASHPVGKALSDACMGTIASFLSKYQDIIIEHQKVVKGNQKRLESLRELAGKENLEYPSVTLPPQPHTKEGVDAYNEVIARVRMWVNLNLWQKLKLSRDDAKPLLRLKGFPSFPLVERQANEVDWWDMVCNVKKLINEKKEDGKVFWQNLAGYKRQEALRPYLSSEEDRKKGKKFARYQLGDLLLHLEKKHGEDWGKVYDEAWERIDKKVEGLSKHIKLEEERRSEDAQSKAALTDWLRAKASFVIEGLKEADKDEFCRCELKLQKWYGDLRGKPFAIEAENSILDISGFSKQYNCAFIWQKDGVKKLNLYLIINYFKGGKLRFKKIKPEAFEANRFYTVINKKSGEIVPMEVNFNFDDPNLIILPLAFGKRQGREFIWNDLLSLETGSLKLANGRVIEKTLYNRRTRQDEPALFVALTFERREVLDSSNIKPMNLIGVDRGENIPAVIALTDPEGCPLSRFKDSLGNPTHILRIGESYKEKQRTIQAKKEVEQRRAGGYSRKYASKAKNLADDMVRNTARDLLYYAVTQDAMLIFENLSRGFGRQGKRTFSAERQYTRMEDWLTAKLAYEGLPSKTYLSKTLAQYTSKTCSNCGFTITSADYDRVLEKLKKTATGWMTTINGKELKVEGQITYYNRYKRQNVVKDLSVELDRLSEESVNNDISSWTKGRSGEALSLLKKRFSHRPVQEKFVCLNCGFETHADEQAALNIARSWLFLRSQEYKKYQTNKTTGNTDKRAFVETWQSFYRKKLKEVWKPAV

SEQ ID NO: 31361 - protein, 978 aa, synthetic construct
  REGION 1..978: note = engineered CasX variant
QEGKRINKIRRRLVKDSNTKKAGKTGPMKTLLVRVMTPDLRERLENLRKKPENIPQPISNTSRANLNKLLTDYTEMKKAILHVYWEEFQKDPVGLMSRVAQPASKKIDQNKLKPEMDEKGNLTTAGFACSQCGQPLFVYKLEQVSEKGKAYTNYFGRCNVAEHEKLILLAQLKPEKDSDEAVTYSLGKFGQRALDFYSIHVTKESTHPVKPLAQIAGNRYASSPVGKALSDACMGTIASFLSKYQDIIIEHQKVVKGNQKRLESLRELAGKENLEYPSVTLPPQPHTKEGVDAYNEVIARVRMWVNLNLWQKLKLSRDDAKPLLRLKGFPSFPLVERQANEVDWWDMVCNVKKLINEKKEDGKVFWQNLAGYKRQEALRPYLSSEEDRKKGKKFARYQLGDLLLHLEKKHGEDWGKVYDEAWERIDKKVEGLSKHIKLEEERRSEDAQSKAALTDWLRAKASFVIEGLKEADKDEFCRCELKLQKWYGDLRGKPFAIEAENSILDISGFSKQYNCAFIWQKDGVKKLNLYLIINYFKGGKLRFKKIKPEAFEANRFYTVINKKSGEIVPMEVNFNFDDPNLIILPLAFGKRQGREFIWNDLLSLETGSLKLANGRVIEKTLYNRRTRQDEPALFVALTFERREVLDSSNIKPMNLIGVDRGENIPAVIALTDPEGCPLSRFKDSLGNPTHILRIGESYKEKQRTIQAKKEVEQRRAGGYSRKYASKAKNLADDMVRNTARDLLYYAVTQDAMLIFENLSRGFGRQGKRTFSAERQYTRMEDWLTAKLAYEGLPSKTYLSKTLAQYTSKTCSNCGFTITSADYDRVLEKLKKTATGWMTTINGKELKVEGQITYYNRYKRQNVVKDLSVELDRLSEESVNNDISSWTKGRSGEALSLLKKRFSHRPVQEKFVCLNCGFETHADEQAALNIARSWLFLRSQEYKKYQTNKTTGNTDKRAFVETWQSFYRKKLKEVWKPAV

SEQ ID NO: 31362 - protein, 978 aa, synthetic construct
  REGION 1..978: note = engineered CasX variant
QEGKRINKIRRRLVKDSNTKKAGKTGPMKTLLVRVMTPDLRERLENLRKKPENIPQPISNTSRANLNKLLTDYTEMKKAILHVYWEEFQKDPVGLMSRVAQPASKKIDQNKLKPEMDEKGNLTTAGFACSQCGQPLFVYKLEQVSEKGKAYTNYFGRCNVAEHEKLILLAQLKPEKDSDEAVTYSLGKFGQRALDFYSIHVTKESTHPVKPLAQIAGNRYASTPVGKALSDACMGTIASFLSKYQDIIIEHQKVVKGNQKRLESLRELAGKENLEYPSVTLPPQPHTKEGVDAYNEVIARVRMWVNLNLWQKLKLSRDDAKPLLRLKGFPSFPLVERQANEVDWWDMVCNVKKLINEKKEDGKVFWQNLAGYKRQEALRPYLSSEEDRKKGKKFARYQLGDLLLHLEKKHGEDWGKVYDEAWERIDKKVEGLSKHIKLEEERRSEDAQSKAALTDWLRAKASFVIEGLKEADKDEFCRCELKLQKWYGDLRGKPFAIEAENSILDISGFSKQYNCAFIWQKDGVKKLNLYLIINYFKGGKLRFKKIKPEAFEANRFYTVINKKSGEIVPMEVNFNFDDPNLIILPLAFGKRQGREFIWNDLLSLETGSLKLANGRVIEKTLYNRRTRQDEPALFVALTFERREVLDSSNIKPMNLIGVDRGENIPAVIALTDPEGCPLSRFKDSLGNPTHILRIGESYKEKQRTIQAKKEVEQRRAGGYSRKYASKAKNLADDMVRNTARDLLYYAVTQDAMLIFENLSRGFGRQGKRTFSAERQYTRMEDWLTAKLAYEGLPSKTYLSKTLAQYTSKTCSNCGFTITSADYDRVLEKLKKTATGWMTTINGKELKVEGQITYYNRYKRQNVVKDLSVELDRLSEESVNNDISSWTKGRSGEALSLLKKRFSHRPVQEKFVCLNCGFETHADEQAALNIARSWLFLRSQEYKKYQTNKTTGNTDKRAFVETWQSFYRKKLKEVWKPAV

SEQ ID NO: 31363 - protein, 978 aa, synthetic construct
  REGION 1..978: note = engineered CasX variant
QEGKRINKIRRRLVKDSNTKKAGKTGPMKTLLVRVMTPDLRERLENLRKKPENIPQPISNTSRANLNKLLTDYTEMKKAILHVYWEEFQKDPVGLMSRVAQPASKKIDQNKLKPEMDEKGNLTTAGFACSQCGQPLFVYKLEQVSEKGKAYTNYFGRCNVAEHEKLILLAQLKPEKDSDEAVTYSLGKFGQRALDFYSIHVTKESTHPVKPLAQIAGNRYASAPVGKALSDACMGTIASFLSKYQDIIIEHQKVVKGNQKRLESLRELAGKENLEYPSVTLPPQPHTKEGVDAYNEVIARVRMWVNLNLWQKLKLSRDDAKPLLRLKGFPSFPLVERQANEVDWWDMVCNVKKLINEKKEDGKVFWQNLAGYKRQEALRPYLSSEEDRKKGKKFARYQLGDLLLHLEKKHGEDWGKVYDEAWERIDKKVEGLSKHIKLEEERRSEDAQSKAALTDWLRAKASFVIEGLKEADKDEFCRCELKLQKWYGDLRGKPFAIEAENSILDISGFSKQYNCAFIWQKDGVKKLNLYLIINYFKGGKLRFKKIKPEAFEANRFYTVINKKSGEIVPMEVNFNFDDPNLIILPLAFGKRQGREFIWNDLLSLETGSLKLANGRVIEKTLYNRRTRQDEPALFVALTFERREVLDSSNIKPMNLIGVDRGENIPAVIALTDPEGCPLSRFKDSLGNPTHILRIGESYKEKQRTIQAKKEVEQRRAGGYSRKYASKAKNLADDMVRNTARDLLYYAVTQDAMLIFENLSRGFGRQGKRTFSAERQYTRMEDWLTAKLAYEGLPSKTYLSKTLAQYTSKTCSNCGFTITSADYDRVLEKLKKTATGWMTTINGKELKVEGQITYYNRYKRQNVVKDLSVELDRLSEESVNNDISSWTKGRSGEALSLLKKRFSHRPVQEKFVCLNCGFETHADEQAALNIARSWLFLRSQEYKKYQTNKTTGNTDKRAFVETWQSFYRKKLKEVWKPAV

SEQ ID NO: 31364 - protein, 978 aa, synthetic construct
  REGION 1..978: note = engineered CasX variant
QEGKRINKIRRRLVKDSNTKKAGKTGPMKTLLVRVMTPDLRERLENLRKKPENIPQPISNTSRANLNKLLTDYTEMKKAILHVYWEEFQKDPVGLMSRVAQPASKKIDQNKLKPEMDEKGNLTTAGFACSQCGQPLFVYKLEQVSEKGKAYTNYFGRCNVAEHEKLILLAQLKPEKDSDEAVTYSLGKFGQRALDFYSIHVTKESTHPVKPLAQIAGNRYASVPVGKALSDACMGTIASFLSKYQDIIIEHQKVVKGNQKRLESLRELAGKENLEYPSVTLPPQPHTKEGVDAYNEVIARVRMWVNLNLWQKLKLSRDDAKPLLRLKGFPSFPLVERQANEVDWWDMVCNVKKLINEKKEDGKVFWQNLAGYKRQEALRPYLSSEEDRKKGKKFARYQLGDLLLHLEKKHGEDWGKVYDEAWERIDKKVEGLSKHIKLEEERRSEDAQSKAALTDWLRAKASFVIEGLKEADKDEFCRCELKLQKWYGDLRGKPFAIEAENSILDISGFSKQYNCAFIWQKDGVKKLNLYLIINYFKGGKLRFKKIKPEAFEANRFYTVINKKSGEIVPMEVNFNFDDPNLIILPLAFGKRQGREFIWNDLLSLETGSLKLANGRVIEKTLYNRRTRQDEPALFVALTFERREVLDSSNIKPMNLIGVDRGENIPAVIALTDPEGCPLSRFKDSLGNPTHILRIGESYKEKQRTIQAKKEVEQRRAGGYSRKYASKAKNLADDMVRNTARDLLYYAVTQDAMLIFENLSRGFGRQGKRTFSAERQYTRMEDWLTAKLAYEGLPSKTYLSKTLAQYTSKTCSNCGFTITSADYDRVLEKLKKTATGWMTTINGKELKVEGQITYYNRYKRQNVVKDLSVELDRLSEESVNNDISSWTKGRSGEALSLLKKRFSHRPVQEKFVCLNCGFETHADEQAALNIARSWLFLRSQEYKKYQTNKTTGNTDKRAFVETWQSFYRKKLKEVWKPAV

SEQ ID NO: 31365 - protein, 978 aa, synthetic construct
  REGION 1..978: note = engineered CasX variant
QEGKRINKIRRRLVKDSNTKKAGKTGPMKTLLVRVMTPDLRERLENLRKKPENIPQPISNTSRANLNKLLTDYTEMKKAILHVYWEEFQKDPVGLMSRVAQPASKKIDQNKLKPEMDEKGNLTTAGFACSQCGQPLFVYKLEQVSEKGKAYTNYFGRCNVAEHEKLIKLAQLKPEKDSDEAVTYSLGKFGQRALDFYSIHVTKESTHPVKPLAQIAGNRYASGPVGKALSDACMGTIASFLSKYQDIIIEHQKVVKGNQKRLESLRELAGKENLEYPSVTLPPQPHTKEGVDAYNEVIARVRMWVNLNLWQKLKLSRDDAKPLLRLKGFPSFPLVERQANEVDWWDMVCNVKKLINEKKEDGKVFWQNLAGYKRQEALRPYLSSEEDRKKGKKFARYQLGDLLLHLEKKHGEDWGKVYDEAWERIDKKVEGLSKHIKLEEERRSEDAQSKAALTDWLRAKASFVIEGLKEADKDEFCRCELKLQKWYGDLRGKPFAIEAENSILDISGFSKQYNCAFIWQKDGVKKLNLYLIINYFKGGKLRFKKIKPEAFEANRFYTVINKKSGEIVPMEVNFNFDDPNLIILPLAFGKRQGREFIWNDLLSLETGSLKLANGRVIEKTLYNRRTRQDEPALFVALTFERREVLDSSNIKPMNLIGVDRGENIPAVIALTDPEGCPLSRFKDSLGNPTHILRIGESYKEKQRTIQAKKEVEQRRAGGYSRKYASKAKNLADDMVRNTARDLLYYAVTQDAMLIFENLSRGFGRQGKRTFSAERQYTRMEDWLTAKLAYEGLPSKTYLSKTLAQYTSKTCSNCGFTITSADYDRVLEKLKKTATGWMTTINGKELKVEGQITYYNRYKRQNVVKDLSVELDRLSEESVNNDISSWTKGRSGEALSLLKKRFSHRPVQEKFVCLNCGFETHADEQAALNIARSWLFLRSQEYKKYQTNKTTGNTDKRAFVETWQSFYRKKLKEVWKPAV

SEQ ID NO: 31366 - protein, 977 aa, synthetic construct
  REGION 1..977: note = engineered CasX variant
QEGKRINKIRRRLVKDSNTKKAGKTGPMKTLLVRVMTPDLRERLENLRKKPENIPQPISNTSRANLNKLLTDYTEMKKAILHVYWEEFQKDPVGLMSRVAQPASKKIDQNKLKPEMDEKGNLTTAGFACSQCGQPLFVYKLEQVSEKGKAYTNYFGRCNVAEHEKLILLAQLKPEKDSDEAVTYSLGKFGQRALDFYSIHVTKESTHPVKPLAQIAGNRYASPVGKALSDACMGTIASFLSKYQDIIIEHQKVVKGNQKRLESLRELAGKENLEYPSVTLPPQPHTKEGVDAYNEVIARVRMWVNLNLWQKLKLSRDDAKPLLRLKGFPSFPLVERQANEVDWWDMVCNVKKLINEKKEDGKVFWQNLAGYKRQEALRPYLSSEEDRKKGKKFARYQLGDLLLHLEKKHGEDWGKVYDEAWERIDKKVEGLSKHIKLEEERRSEDAQSKAALTDWLRAKASFVIEGLKEADKDEFCRCELKLQKWYGDLRGKPFAIEAENSILDISGFSKQYNCAFIWQKDGVKKLNLYLIINYFKGGKLRFKKIKPEAFEANRFYTVINKKSGEIVPMEVNFNFDDPNLIILPLAFGKRQGREFIWNDLLSLETGSLKLANGRVIEKTLYNRRTRQDEPALFVALTFERREVLDSSNIKPMNLIGVDRGENIPAVIALTDPEGCPLSRFKDSLGNPTHILRIGESYKEKQRTIQAKKEVEQRRAGGYSRKYASKAKNLADDMVRNTARDLLYYAVTQDAMLIFENLSRGFGRQGKRTFSAERQYTRMEDWLTAKLAYEGLPSKTYLSKTLAQYTSKTCSNCGFTITSADYDRVLEKLKKTATGWMTTINGKELKVEGQITYYNRYKRQNVVKDLSVELDRLSEESVNNDISSWTKGRSGEALSLLKKRFSHRPVQEKFVCLNCGFETHADEQAALNIARSWLFLRSQEYKKYQTNKTTGNTDKRAFVETWQSFYRKKLKEVWKPAV

SEQ ID NO: 31367 - protein, 978 aa, synthetic construct
  REGION 1..978: note = engineered CasX variant
QEGKRINKIRRRLVKDSNTKKAGKTGPMKTLLVRVMTPDLRERLENLRKKPENIPQPISNTSRANLNKLLTDYTEMKKAILHVYWEEFQKDPVGLMSRVAQPASKKIDQNKLKPEMDEKGNLTTAGFACSQCGQPLFVYKLEQVSEKGKAYTNYFGRCNVAEHEKLILLAQLKPEKDSDEAVTYSLGKFGQRALDFYSIHVTKESTHPVKPLAQIAGNRYASYPVGKALSDACMGTIASFLSKYQDIIIEHQKVVKGNQKRLESLRELAGKENLEYPSVTLPPQPHTKEGVDAYNEVIARVRMWVNLNLWQKLKLSRDDAKPLLRLKGFPSFPLVERQANEVDWWDMVCNVKKLINEKKEDGKVFWQNLAGYKRQEALRPYLSSEEDRKKGKKFARYQLGDLLLHLEKKHGEDWGKVYDEAWERIDKKVEGLSKHIKLEEERRSEDAQSKAALTDWLRAKASFVIEGLKEADKDEFCRCELKLQKWYGDLRGKPFAIEAENSILDISGFSKQYNCAFIWQKDGVKKLNLYLIINYFKGGKLRFKKIKPEAFEANRFYTVINKKSGEIVPMEVNFNFDDPNLIILPLAFGKRQGREFIWNDLLSLETGSLKLANGRVIEKTLYNRRTRQDEPALFVALTFERREVLDSSNIKPMNLIGVDRGENIPAVIALTDPEGCPLSRFKDSLGNPTHILRIGESYKEKQRTIQAKKEVEQRRAGGYSRKYASKAKNLADDMVRNTARDLLYYAVTQDAMLIFENLSRGFGRQGKRTFMAERQYTRMEDWLTAKLAYEGLPSKTYLSKTLAQYTSKTCSNCGFTITSADYDRVLEKLKKTATGWMTTINGKELKVEGQITYYNRYKRQNVVKDLSVELDRLSEESVNNDISSWDKGRSGEALSLLKKRFSHRPVQEKFVCLNCGFETHADEQAALNIARSWLFLRSQEYKKYQTNKTTGNTDKRAFVETWQSFYRKKLKEVWKPAV

SEQ ID NO: 31368 - protein, 978 aa, synthetic construct
  REGION 1..978: note = engineered CasX variant
QEGKRINKIRRRLVKDSNTKKAGKTGPMKTLLVRVMTPDLRERLENLRKKPENIPQPISNTSRANLNKLLTDYTEMKKAILHVYWEEFQKDPVGLMSRVAQPASKKIDQNKLKPEMDEKGNLTTAGFACSQCGQPLFVYKLEQVSEKGKAYTNYFGRCNVAEHEKLILLAQLKPEKDSDEAVTYSLGKFGQRALDFYSIHVTKESTHPVKPLAQIAGNRYASHPVGKALSDACMGTIASFLSKYQDIIIEHQKVVKGNQKRLESLRELAGKENLEYPSVTLPPQPHTKEGVDAYNEVIARVRMWVNLNLWQKLKLSRDDAKPLLRLKGFPSFPLVERQANEVDWWDMVCNVKKLINEKKEDGKVFWQNLAGYKRQEALRPYLSSEEDRKKGKKFARYQLGDLLLHLEKKHGEDWGKVYDEAWERIDKKVEGLSKHIKLEEERRSEDAQSKAALTDWLRAKASFVIEGLKEADKDEFCRCELKLQKWYGDLRGKPFAIEAENSILDISGFSKQYNCAFIWQKDGVKKLNLYLIINYFKGGKLRFKKIKPEAFEANRFYTVINKKSGEIVPMEVNFNFDDPNLIILPLAFGKRQGREFIWNDLLSLETGSLKLANGRVIEKTLYNRRTRQDEPALFVALTFERREVLDSSNIKPMNLIGVDRGENIPAVIALTDPEGCPLSRFKDSLGNPTHILRIGESYKEKQRTIQAKKEVEQRRAGGYSRKYASKAKNLADDMVRNTARDLLYYAVTQDAMLIFENLSRGFGRQGKRTFMAERQYTRMEDWLTAKLAYEGLPSKTYLSKTLAQYTSKTCSNCGFTITSADYDRVLEKLKKTATGWMTTINGKELKVEGQITYYNRYKRQNVVKDLSVELDRLSEESVNNDISSWDKGRSGEALSLLKKRFSHRPVQEKFVCLNCGFETHADEQAALNIARSWLFLRSQEYKKYQTNKTTGNTDKRAFVETWQSFYRKKLKEVWKPAV

SEQ ID NO: 31369 - protein, 978 aa, synthetic construct
  REGION 1..978: note = engineered CasX variant
QEGKRINKIRRRLVKDSNTKKAGKTGPMKTLLVRVMTPDLRERLENLRKKPENIPQPISNTSRANLNKLLTDYTEMKKAILHVYWEEFQKDPVGLMSRVAQPASKKIDQNKLKPEMDEKGNLTTAGFACSQCGQPLFVYKLEQVSEKGKAYTNYFGRCNVAEHEKLILLAQLKPEKDSDEAVTYSLGKFGQRALDFYSIHVTKESTHPVKPLAQIAGNRYASSPVGKALSDACMGTIASFLSKYQDIIIEHQKVVKGNQKRLESLRELAGKENLEYPSVTLPPQPHTKEGVDAYNEVIARVRMWVNLNLWQKLKLSRDDAKPLLRLKGFPSFPLVERQANEVDWWDMVCNVKKLINEKKEDGKVFWQNLAGYKRQEALRPYLSSEEDRKKGKKFARYQLGDLLLHLEKKHGEDWGKVYDEAWERIDKKVEGLSKHIKLEEERRSEDAQSKAALTDWLRAKASFVIEGLKEADKDEFCRCELKLQKWYGDLRGKPFAIEAENSILDISGFSKQYNCAFIWQKDGVKKLNLYLIINYFKGGKLRFKKIKPEAFEANRFYTVINKKSGEIVPMEVNFNFDDPNLIILPLAFGKRQGREFIWNDLLSLETGSLKLANGRVIEKTLYNRRTRQDEPALFVALTFERREVLDSSNIKPMNLIGVDRGENIPAVIALTDPEGCPLSRFKDSLGNPTHILRIGESYKEKQRTIQAKKEVEQRRAGGYSRKYASKAKNLADDMVRNTARDLLYYAVTQDAMLIFENLSRGFGRQGKRTFMAERQYTRMEDWLTAKLAYEGLPSKTYLSKTLAQYTSKTCSNCGFTITSADYDRVLEKLKKTATGWMTTINGKELKVEGQITYYNRYKRQNVVKDLSVELDRLSEESVNNDISSWDKGRSGEALSLLKKRFSHRPVQEKFVCLNCGFETHADEQAALNIARSWLFLRSQEYKKYQTNKTTGNTDKRAFVETWQSFYRKKLKEVWKPAV

SEQ ID NO: 31370 - protein, 978 aa, synthetic construct
  REGION 1..978: note = engineered CasX variant
QEGKRINKIRRRLVKDSNTKKAGKTGPMKTLLVRVMTPDLRERLENLRKKPENIPQPISNTSRANLNKLLTDYTEMKKAILHVYWEEFQKDPVGLMSRVAQPASKKIDQNKLKPEMDEKGNLTTAGFACSQCGQPLFVYKLEQVSEKGKAYTNYFGRCNVAEHEKLILLAQLKPEKDSDEAVTYSLGKFGQRALDFYSIHVTKESTHPVKPLAQIAGNRYASTPVGKALSDACMGTIASFLSKYQDIIIEHQKVVKGNQKRLESLRELAGKENLEYPSVTLPPQPHTKEGVDAYNEVIARVRMWVNLNLWQKLKLSRDDAKPLLRLKGFPSFPLVERQANEVDWWDMVCNVKKLINEKKEDGKVFWQNLAGYKRQEALRPYLSSEEDRKKGKKFARYQLGDLLLHLEKKHGEDWGKVYDEAWERIDKKVEGLSKHIKLEEERRSEDAQSKAALTDWLRAKASFVIEGLKEADKDEFCRCELKLQKWYGDLRGKPFAIEAENSILDISGFSKQYNCAFIWQKDGVKKLNLYLIINYFKGGKLRFKKIKPEAFEANRFYTVINKKSGEIVPMEVNFNFDDPNLIILPLAFGKRQGREFIWNDLLSLETGSLKLANGRVIEKTLYNRRTRQDEPALFVALTFERREVLDSSNIKPMNLIGVDRGENIPAVIALTDPEGCPLSRFKDSLGNPTHILRIGESYKEKQRTIQAKKEVEQRRAGGYSRKYASKAKNLADDMVRNTARDLLYYAVTQDAMLIFENLSRGFGRQGKRTFMAERQYTRMEDWLTAKLAYEGLPSKTYLSKTLAQYTSKTCSNCGFTITSADYDRVLEKLKKTATGWMTTINGKELKVEGQITYYNRYKRQNVVKDLSVELDRLSEESVNNDISSWDKGRSGEALSLLKKRFSHRPVQEKFVCLNCGFETHADEQAALNIARSWLFLRSQEYKKYQTNKTTGNTDKRAFVETWQSFYRKKLKEVWKPAV

SEQ ID NO: 31371 - protein, 978 aa, synthetic construct
  REGION 1..978: note = engineered CasX variant
QEGKRINKIRRRLVKDSNTKKAGKTGPMKTLLVRVMTPDLRERLENLRKKPENIPQPISNTSRANLNKLLTDYTEMKKAILHVYWEEFQKDPVGLMSRVAQPASKKIDQNKLKPEMDEKGNLTTAGFACSQCGQPLFVYKLEQVSEKGKAYTNYFGRCNVAEHEKLILLAQLKPEKDSDEAVTYSLGKFGQRALDFYSIHVTKESTHPVKPLAQIAGNRYASAPVGKALSDACMGTIASFLSKYQDIIIEHQKVVKGNQKRLESLRELAGKENLEYPSVTLPPQPHTKEGVDAYNEVIARVRMWVNLNLWQKLKLSRDDAKPLLRLKGFPSFPLVERQANEVDWWDMVCNVKKLINEKKEDGKVFWQNLAGYKRQEALRPYLSSEEDRKKGKKFARYQLGDLLLHLEKKHGEDWGKVYDEAWERIDKKVEGLSKHIKLEEERRSEDAQSKAALTDWLRAKASFVIEGLKEADKDEFCRCELKLQKWYGDLRGKPFAIEAENSILDISGFSKQYNCAFIWQKDGVKKLNLYLIINYFKGGKLRFKKIKPEAFEANRFYTVINKKSGEIVPMEVNFNFDDPNLIILPLAFGKRQGREFIWNDLLSLETGSLKLANGRVIEKTLYNRRTRQDEPALFVALTFERREVLDSSNIKPMNLIGVDRGENIPAVIALTDPEGCPLSRFKDSLGNPTHILRIGESYKEKQRTIQAKKEVEQRRAGGYSRKYASKAKNLADDMVRNTARDLLYYAVTQDAMLIFENLSRGFGRQGKRTFMAERQYTRMEDWLTAKLAYEGLPSKTYLSKTLAQYTSKTCSNCGFTITSADYDRVLEKLKKTATGWMTTINGKELKVEGQITYYNRYKRQNVVKDLSVELDRLSEESVNNDISSWDKGRSGEALSLLKKRFSHRPVQEKFVCLNCGFETHADEQAALNIARSWLFLRSQEYKKYQTNKTTGNTDKRAFVETWQSFYRKKLKEVWKPAV

SEQ ID NO: 31372 - protein, 978 aa, synthetic construct
  REGION 1..978: note = engineered CasX variant
QEGKRINKIRRRLVKDSNTKKAGKTGPMKTLLVRVMTPDLRERLENLRKKPENIPQPISNTSRANLNKLLTDYTEMKKAILHVYWEEFQKDPVGLMSRVAQPASKKIDQNKLKPEMDEKGNLTTAGFACSQCGQPLFVYKLEQVSEKGKAYTNYFGRCNVAEHEKLILLAQLKPEKDSDEAVTYSLGKFGQRALDFYSIHVTKESTHPVKPLAQIAGNRYASVPVGKALSDACMGTIASFLSKYQDIIIEHQKVVKGNQKRLESLRELAGKENLEYPSVTLPPQPHTKEGVDAYNEVIARVRMWVNLNLWQKLKLSRDDAKPLLRLKGFPSFPLVERQANEVDWWDMVCNVKKLINEKKEDGKVFWQNLAGYKRQEALRPYLSSEEDRKKGKKFARYQLGDLLLHLEKKHGEDWGKVYDEAWERIDKKVEGLSKHIKLEEERRSEDAQSKAALTDWLRAKASFVIEGLKEADKDEFCRCELKLQKWYGDLRGKPFAIEAENSILDISGFSKQYNCAFIWQKDGVKKLNLYLIINYFKGGKLRFKKIKPEAFEANRFYTVINKKSGEIVPMEVNFNFDDPNLIILPLAFGKRQGREFIWNDLLSLETGSLKLANGRVIEKTLYNRRTRQDEPALFVALTFERREVLDSSNIKPMNLIGVDRGENIPAVIALTDPEGCPLSRFKDSLGNPTHILRIGESYKEKQRTIQAKKEVEQRRAGGYSRKYASKAKNLADDMVRNTARDLLYYAVTQDAMLIFENLSRGFGRQGKRTFMAERQYTRMEDWLTAKLAYEGLPSKTYLSKTLAQYTSKTCSNCGFTITSADYDRVLEKLKKTATGWMTTINGKELKVEGQITYYNRYKRQNVVKDLSVELDRLSEESVNNDISSWDKGRSGEALSLLKKRFSHRPVQEKFVCLNCGFETHADEQAALNIARSWLFLRSQEYKKYQTNKTTGNTDKRAFVETWQSFYRKKLKEVWKPAV

SEQ ID NO: 31373 - protein, 978 aa, synthetic construct
  REGION 1..978: note = engineered CasX variant
QEGKRINKIRRRLVKDSNTKKAGKTGPMKTLLVRVMTPDLRERLENLRKKPENIPQPISNTSRANLNKLLTDYTEMKKAILHVYWEEFQKDPVGLMSRVAQPASKKIDQNKLKPEMDEKGNLTTAGFACSQCGQPLFVYKLEQVSEKGKAYTNYFGRCNVAEHEKLIKLAQLKPEKDSDEAVTYSLGKFGQRALDFYSIHVTKESTHPVKPLAQIAGNRYASGPVGKALSDACMGTIASFLSKYQDIIIEHQKVVKGNQKRLESLRELAGKENLEYPSVTLPPQPHTKEGVDAYNEVIARVRMWVNLNLWQKLKLSRDDAKPLLRLKGFPSFPLVERQANEVDWWDMVCNVKKLINEKKEDGKVFWQNLAGYKRQEALRPYLSSEEDRKKGKKFARYQLGDLLLHLEKKHGEDWGKVYDEAWERIDKKVEGLSKHIKLEEERRSEDAQSKAALTDWLRAKASFVIEGLKEADKDEFCRCELKLQKWYGDLRGKPFAIEAENSILDISGFSKQYNCAFIWQKDGVKKLNLYLIINYFKGGKLRFKKIKPEAFEANRFYTVINKKSGEIVPMEVNFNFDDPNLIILPLAFGKRQGREFIWNDLLSLETGSLKLANGRVIEKTLYNRRTRQDEPALFVALTFERREVLDSSNIKPMNLIGVDRGENIPAVIALTDPEGCPLSRFKDSLGNPTHILRIGESYKEKQRTIQAKKEVEQRRAGGYSRKYASKAKNLADDMVRNTARDLLYYAVTQDAMLIFENLSRGFGRQGKRTFMAERQYTRMEDWLTAKLAYEGLPSKTYLSKTLAQYTSKTCSNCGFTITSADYDRVLEKLKKTATGWMTTINGKELKVEGQITYYNRYKRQNVVKDLSVELDRLSEESVNNDISSWDKGRSGEALSLLKKRFSHRPVQEKFVCLNCGFETHADEQAALNIARSWLFLRSQEYKKYQTNKTTGNTDKRAFVETWQSFYRKKLKEVWKPAV

SEQ ID NO: 31374 - protein, 977 aa, synthetic construct
  REGION 1..977: note = engineered CasX variant
QEGKRINKIRRRLVKDSNTKKAGKTGPMKTLLVRVMTPDLRERLENLRKKPENIPQPISNTSRANLNKLLTDYTEMKKAILHVYWEEFQKDPVGLMSRVAQPASKKIDQNKLKPEMDEKGNLTTAGFACSQCGQPLFVYKLEQVSEKGKAYTNYFGRCNVAEHEKLILLAQLKPEKDSDEAVTYSLGKFGQRALDFYSIHVTKESTHPVKPLAQIAGNRYASPVGKALSDACMGTIASFLSKYQDIIIEHQKVVKGNQKRLESLRELAGKENLEYPSVTLPPQPHTKEGVDAYNEVIARVRMWVNLNLWQKLKLSRDDAKPLLRLKGFPSFPLVERQANEVDWWDMVCNVKKLINEKKEDGKVFWQNLAGYKRQEALRPYLSSEEDRKKGKKFARYQLGDLLLHLEKKHGEDWGKVYDEAWERIDKKVEGLSKHIKLEEERRSEDAQSKAALTDWLRAKASFVIEGLKEADKDEFCRCELKLQKWYGDLRGKPFAIEAENSILDISGFSKQYNCAFIWQKDGVKKLNLYLIINYFKGGKLRFKKIKPEAFEANRFYTVINKKSGEIVPMEVNFNFDDPNLIILPLAFGKRQGREFIWNDLLSLETGSLKLANGRVIEKTLYNRRTRQDEPALFVALTFERREVLDSSNIKPMNLIGVDRGENIPAVIALTDPEGCPLSRFKDSLGNPTHILRIGESYKEKQRTIQAKKEVEQRRAGGYSRKYASKAKNLADDMVRNTARDLLYYAVTQDAMLIFENLSRGFGRQGKRTFMAERQYTRMEDWLTAKLAYEGLPSKTYLSKTLAQYTSKTCSNCGFTITSADYDRVLEKLKKTATGWMTTINGKELKVEGQITYYNRYKRQNVVKDLSVELDRLSEESVNNDISSWDKGRSGEALSLLKKRFSHRPVQEKFVCLNCGFETHADEQAALNIARSWLFLRSQEYKKYQTNKTTGNTDKRAFVETWQSFYRKKLKEVWKPAV

SEQ ID NO: 31375 - protein, 978 aa, synthetic construct
  REGION 1..978: note = engineered CasX variant
QEGKRINKIRRRLVKDSNTKKAGKTGPMKTLLVRVMTPDLRERLENLRKKPENIPQPISNTSRANLNKLLTDYTEMKKAILHVYWEEFQVDPVGLMSRVAQPASKKIDQNKLKPEMDEKGNLTTAGFACSQCGQPLFVYKLEQVSEKGKAYTNYFGRCNVAEHEKLILLAQLKPEKDSDEAVTYSLGKFGQRALDFYSIHVTKESTHPVKPLAQIAGNRYASYPVGKALSDACMGTIASFLSKYQDIIIEHQKVVKGNQKRLESLRELAGKENLEYPSVTLPPQPHTKEGVDAYNEVIARVRMWVNLNLWQKLKLSRDDAKPLLRLKGFPSFPLVERQANEVDWWDMVCNVKKLINEKKEDGKVFWQNLAGYKRQEALRPYLSSEEDRKKGKKFARYQLGDLLLHLEKKHGEDWGKVYDEAWERIDKKVEGLSKHIKLEEERRSEDAQSKAALTDWLRAKASFVIEGLKEADKDEFCRCELKLQKWYGDLRGKPFAIEAENSILDISGFSKQYNCAFIWQKDGVKKLNLYLIINYFKGGKLRFKKIKPEAFEANRFYTVINKKSGEIVPMEVNFNFDDPNLIILPLAFGKRQGREFIWNDLLSLETGSLKLANGRVIEKTLYNRRTRQDEPALFVALTFERREVLDSSNIKPMNLIGVDRGENIPAVIALTDPEGCPLSRFKDSLGNPTHILRIGESYKEKQRTIQAKKEVEQRRAGGYSRKYASKAKNLADDMVRNTARDLLYYAVTQDAMLIFENLSRGFGRQGKRTFMAERQYTRMEDWLTAKLAYEGLPSKTYLSKTLAQYTSKTCSNCGFTITSADYDRVLEKLKKTATGWMTTINGKELKVEGQITYYNRYKRQNVVKDLSVELDRLSEESVNNDISSWTKGRSGEALSLLKKRFSHRPVQEKFVCLNCGFETHADEQAALNIARSWLFLRSQEYKKYQTNKTTGNTDKRAFVETWQSFYRKKLKEVWKPAV

SEQ ID NO: 31376 - protein, 978 aa, synthetic construct
  REGION 1..978: note = engineered CasX variant
QEGKRINKIRRRLVKDSNTKKAGKTGPMKTLLVRVMTPDLRERLENLRKKPENIPQPISNTSRANLNKLLTDYTEMKKAILHVYWEEFQVDPVGLMSRVAQPASKKIDQNKLKPEMDEKGNLTTAGFACSQCGQPLFVYKLEQVSEKGKAYTNYFGRCNVAEHEKLILLAQLKPEKDSDEAVTYSLGKFGQRALDFYSIHVTKESTHPVKPLAQIAGNRYASHPVGKALSDACMGTIASFLSKYQDIIIEHQKVVKGNQKRLESLRELAGKENLEYPSVTLPPQPHTKEGVDAYNEVIARVRMWVNLNLWQKLKLSRDDAKPLLRLKGFPSFPLVERQANEVDWWDMVCNVKKLINEKKEDGKVFWQNLAGYKRQEALRPYLSSEEDRKKGKKFARYQLGDLLLHLEKKHGEDWGKVYDEAWERIDKKVEGLSKHIKLEEERRSEDAQSKAALTDWLRAKASFVIEGLKEADKDEFCRCELKLQKWYGDLRGKPFAIEAENSILDISGFSKQYNCAFIWQKDGVKKLNLYLIINYFKGGKLRFKKIKPEAFEANRFYTVINKKSGEIVPMEVNFNFDDPNLIILPLAFGKRQGREFIWNDLLSLETGSLKLANGRVIEKTLYNRRTRQDEPALFVALTFERREVLDSSNIKPMNLIGVDRGENIPAVIALTDPEGCPLSRFKDSLGNPTHILRIGESYKEKQRTIQAKKEVEQRRAGGYSRKYASKAKNLADDMVRNTARDLLYYAVTQDAMLIFENLSRGFGRQGKRTFMAERQYTRMEDWLTAKLAYEGLPSKTYLSKTLAQYTSKTCSNCGFTITSADYDRVLEKLKKTATGWMTTINGKELKVEGQITYYNRYKRQNVVKDLSVELDRLSEESVNNDISSWTKGRSGEALSLLKKRFSHRPVQEKFVCLNCGFETHADEQAALNIARSWLFLRSQEYKKYQTNKTTGNTDKRAFVETWQSFYRKKLKEVWKPAV

SEQ ID NO: 31377 - protein, 978 aa, synthetic construct
  REGION 1..978: note = engineered CasX variant
QEGKRINKIRRRLVKDSNTKKAGKTGPMKTLLVRVMTPDLRERLENLRKKPENIPQPISNTSRANLNKLLTDYTEMKKAILHVYWEEFQVDPVGLMSRVAQPASKKIDQNKLKPEMDEKGNLTTAGFACSQCGQPLFVYKLEQVSEKGKAYTNYFGRCNVAEHEKLILLAQLKPEKDSDEAVTYSLGKFGQRALDFYSIHVTKESTHPVKPLAQIAGNRYASSPVGKALSDACMGTIASFLSKYQDIIIEHQKVVKGNQKRLESLRELAGKENLEYPSVTLPPQPHTKEGVDAYNEVIARVRMWVNLNLWQKLKLSRDDAKPLLRLKGFPSFPLVERQANEVDWWDMVCNVKKLINEKKEDGKVFWQNLAGYKRQEALRPYLSSEEDRKKGKKFARYQLGDLLLHLEKKHGEDWGKVYDEAWERIDKKVEGLSKHIKLEEERRSEDAQSKAALTDWLRAKASFVIEGLKEADKDEFCRCELKLQKWYGDLRGKPFAIEAENSILDISGFSKQYNCAFIWQKDGVKKLNLYLIINYFKGGKLRFKKIKPEAFEANRFYTVINKKSGEIVPMEVNFNFDDPNLIILPLAFGKRQGREFIWNDLLSLETGSLKLANGRVIEKTLYNRRTRQDEPALFVALTFERREVLDSSNIKPMNLIGVDRGENIPAVIALTDPEGCPLSRFKDSLGNPTHILRIGESYKEKQRTIQAKKEVEQRRAGGYSRKYASKAKNLADDMVRNTARDLLYYAVTQDAMLIFENLSRGFGRQGKRTFMAERQYTRMEDWLTAKLAYEGLPSKTYLSKTLAQYTSKTCSNCGFTITSADYDRVLEKLKKTATGWMTTINGKELKVEGQITYYNRYKRQNVVKDLSVELDRLSEESVNNDISSWTKGRSGEALSLLKKRFSHRPVQEKFVCLNCGFETHADEQAALNIARSWLFLRSQEYKKYQTNKTTGNTDKRAFVETWQSFYRKKLKEVWKPAV

SEQ ID NO: 31378 - protein, 978 aa, synthetic construct
  REGION 1..978: note = engineered CasX variant
QEGKRINKIRRRLVKDSNTKKAGKTGPMKTLLVRVMTPDLRERLENLRKKPENIPQPISNTSRANLNKLLTDYTEMKKAILHVYWEEFQVDPVGLMSRVAQPASKKIDQNKLKPEMDEKGNLTTAGFACSQCGQPLFVYKLEQVSEKGKAYTNYFGRCNVAEHEKLILLAQLKPEKDSDEAVTYSLGKFGQRALDFYSIHVTKESTHPVKPLAQIAGNRYASTPVGKALSDACMGTIASFLSKYQDIIIEHQKVVKGNQKRLESLRELAGKENLEYPSVTLPPQPHTKEGVDAYNEVIARVRMWVNLNLWQKLKLSRDDAKPLLRLKGFPSFPLVERQANEVDWWDMVCNVKKLINEKKEDGKVFWQNLAGYKRQEALRPYLSSEEDRKKGKKFARYQLGDLLLHLEKKHGEDWGKVYDEAWERIDKKVEGLSKHIKLEEERRSEDAQSKAALTDWLRAKASFVIEGLKEADKDEFCRCELKLQKWYGDLRGKPFAIEAENSILDISGFSKQYNCAFIWQKDGVKKLNLYLIINYFKGGKLRFKKIKPEAFEANRFYTVINKKSGEIVPMEVNFNFDDPNLIILPLAFGKRQGREFIWNDLLSLETGSLKLANGRVIEKTLYNRRTRQDEPALFVALTFERREVLDSSNIKPMNLIGVDRGENIPAVIALTDPEGCPLSRFKDSLGNPTHILRIGESYKEKQRTIQAKKEVEQRRAGGYSRKYASKAKNLADDMVRNTARDLLYYAVTQDAMLIFENLSRGFGRQGKRTFMAERQYTRMEDWLTAKLAYEGLPSKTYLSKTLAQYTSKTCSNCGFTITSADYDRVLEKLKKTATGWMTTINGKELKVEGQITYYNRYKRQNVVKDLSVELDRLSEESVNNDISSWTKGRSGEALSLLKKRFSHRPVQEKFVCLNCGFETHADEQAALNIARSWLFLRSQEYKKYQTNKTTGNTDKRAFVETWQSFYRKKLKEVWKPAV

SEQ ID NO: 31379 - protein, 978 aa, synthetic construct
  REGION 1..978: note = engineered CasX variant
QEGKRINKIRRRLVKDSNTKKAGKTGPMKTLLVRVMTPDLRERLENLRKKPENIPQPISNTSRANLNKLLTDYTEMKKAILHVYWEEFQVDPVGLMSRVAQPASKKIDQNKLKPEMDEKGNLTTAGFACSQCGQPLFVYKLEQVSEKGKAYTNYFGRCNVAEHEKLILLAQLKPEKDSDEAVTYSLGKFGQRALDFYSIHVTKESTHPVKPLAQIAGNRYASAPVGKALSDACMGTIASFLSKYQDIIIEHQKVVKGNQKRLESLRELAGKENLEYPSVTLPPQPHTKEGVDAYNEVIARVRMWVNLNLWQKLKLSRDDAKPLLRLKGFPSFPLVERQANEVDWWDMVCNVKKLINEKKEDGKVFWQNLAGYKRQEALRPYLSSEEDRKKGKKFARYQLGDLLLHLEKKHGEDWGKVYDEAWERIDKKVEGLSKHIKLEEERRSEDAQSKAALTDWLRAKASFVIEGLKEADKDEFCRCELKLQKWYGDLRGKPFAIEAENSILDISGFSKQYNCAFIWQKDGVKKLNLYLIINYFKGGKLRFKKIKPEAFEANRFYTVINKKSGEIVPMEVNFNFDDPNLIILPLAFGKRQGREFIWNDLLSLETGSLKLANGRVIEKTLYNRRTRQDEPALFVALTFERREVLDSSNIKPMNLIGVDRGENIPAVIALTDPEGCPLSRFKDSLGNPTHILRIGESYKEKQRTIQAKKEVEQRRAGGYSRKYASKAKNLADDMVRNTARDLLYYAVTQDAMLIFENLSRGFGRQGKRTFMAERQYTRMEDWLTAKLAYEGLPSKTYLSKTLAQYTSKTCSNCGFTITSADYDRVLEKLKKTATGWMTTINGKELKVEGQITYYNRYKRQNVVKDLSVELDRLSEESVNNDISSWTKGRSGEALSLLKKRFSHRPVQEKFVCLNCGFETHADEQAALNIARSWLFLRSQEYKKYQTNKTTGNTDKRAFVETWQSFYRKKLKEVWKPAV

SEQ ID NO: 31380 - protein, 978 aa, synthetic construct
  REGION 1..978: note = engineered CasX variant
QEGKRINKIRRRLVKDSNTKKAGKTGPMKTLLVRVMTPDLRERLENLRKKPENIPQPISNTSRANLNKLLTDYTEMKKAILHVYWEEFQVDPVGLMSRVAQPASKKIDQNKLKPEMDEKGNLTTAGFACSQCGQPLFVYKLEQVSEKGKAYTNYFGRCNVAEHEKLILLAQLKPEKDSDEAVTYSLGKFGQRALDFYSIHVTKESTHPVKPLAQIAGNRYASVPVGKALSDACMGTIASFLSKYQDIIIEHQKVVKGNQKRLESLRELAGKENLEYPSVTLPPQPHTKEGVDAYNEVIARVRMWVNLNLWQKLKLSRDDAKPLLRLKGFPSFPLVERQANEVDWWDMVCNVKKLINEKKEDGKVFWQNLAGYKRQEALRPYLSSEEDRKKGKKFARYQLGDLLLHLEKKHGEDWGKVYDEAWERIDKKVEGLSKHIKLEEERRSEDAQSKAALTDWLRAKASFVIEGLKEADKDEFCRCELKLQKWYGDLRGKPFAIEAENSILDISGFSKQYNCAFIWQKDGVKKLNLYLIINYFKGGKLRFKKIKPEAFEANRFYTVINKKSGEIVPMEVNFNFDDPNLIILPLAFGKRQGREFIWNDLLSLETGSLKLANGRVIEKTLYNRRTRQDEPALFVALTFERREVLDSSNIKPMNLIGVDRGENIPAVIALTDPEGCPLSRFKDSLGNPTHILRIGESYKEKQRTIQAKKEVEQRRAGGYSRKYASKAKNLADDMVRNTARDLLYYAVTQDAMLIFENLSRGFGRQGKRTFMAERQYTRMEDWLTAKLAYEGLPSKTYLSKTLAQYTSKTCSNCGFTITSADYDRVLEKLKKTATGWMTTINGKELKVEGQITYYNRYKRQNVVKDLSVELDRLSEESVNNDISSWTKGRSGEALSLLKKRFSHRPVQEKFVCLNCGFETHADEQAALNIARSWLFLRSQEYKKYQTNKTTGNTDKRAFVETWQSFYRKKLKEVWKPAV

SEQ ID NO: 31381 - protein, 978 aa, synthetic construct
  REGION 1..978: note = engineered CasX variant
QEGKRINKIRRRLVKDSNTKKAGKTGPMKTLLVRVMTPDLRERLENLRKKPENIPQPISNTSRANLNKLLTDYTEMKKAILHVYWEEFQVDPVGLMSRVAQPASKKIDQNKLKPEMDEKGNLTTAGFACSQCGQPLFVYKLEQVSEKGKAYTNYFGRCNVAEHEKLIKLAQLKPEKDSDEAVTYSLGKFGQRALDFYSIHVTKESTHPVKPLAQIAGNRYASGPVGKALSDACMGTIASFLSKYQDIIIEHQKVVKGNQKRLESLRELAGKENLEYPSVTLPPQPHTKEGVDAYNEVIARVRMWVNLNLWQKLKLSRDDAKPLLRLKGFPSFPLVERQANEVDWWDMVCNVKKLINEKKEDGKVFWQNLAGYKRQEALRPYLSSEEDRKKGKKFARYQLGDLLLHLEKKHGEDWGKVYDEAWERIDKKVEGLSKHIKLEEERRSEDAQSKAALTDWLRAKASFVIEGLKEADKDEFCRCELKLQKWYGDLRGKPFAIEAENSILDISGFSKQYNCAFIWQKDGVKKLNLYLIINYFKGGKLRFKKIKPEAFEANRFYTVINKKSGEIVPMEVNFNFDDPNLIILPLAFGKRQGREFIWNDLLSLETGSLKLANGRVIEKTLYNRRTRQDEPALFVALTFERREVLDSSNIKPMNLIGVDRGENIPAVIALTDPEGCPLSRFKDSLGNPTHILRIGESYKEKQRTIQAKKEVEQRRAGGYSRKYASKAKNLADDMVRNTARDLLYYAVTQDAMLIFENLSRGFGRQGKRTFMAERQYTRMEDWLTAKLAYEGLPSKTYLSKTLAQYTSKTCSNCGFTITSADYDRVLEKLKKTATGWMTTINGKELKVEGQITYYNRYKRQNVVKDLSVELDRLSEESVNNDISSWTKGRSGEALSLLKKRFSHRPVQEKFVCLNCGFETHADEQAALNIARSWLFLRSQEYKKYQTNKTTGNTDKRAFVETWQSFYRKKLKEVWKPAV

SEQ ID NO: 31382 - protein, 977 aa, synthetic construct
  REGION 1..977: note = engineered CasX variant
QEGKRINKIRRRLVKDSNTKKAGKTGPMKTLLVRVMTPDLRERLENLRKKPENIPQPISNTSRANLNKLLTDYTEMKKAILHVYWEEFQVDPVGLMSRVAQPASKKIDQNKLKPEMDEKGNLTTAGFACSQCGQPLFVYKLEQVSEKGKAYTNYFGRCNVAEHEKLILLAQLKPEKDSDEAVTYSLGKFGQRALDFYSIHVTKESTHPVKPLAQIAGNRYASPVGKALSDACMGTIASFLSKYQDIIIEHQKVVKGNQKRLESLRELAGKENLEYPSVTLPPQPHTKEGVDAYNEVIARVRMWVNLNLWQKLKLSRDDAKPLLRLKGFPSFPLVERQANEVDWWDMVCNVKKLINEKKEDGKVFWQNLAGYKRQEALRPYLSSEEDRKKGKKFARYQLGDLLLHLEKKHGEDWGKVYDEAWERIDKKVEGLSKHIKLEEERRSEDAQSKAALTDWLRAKASFVIEGLKEADKDEFCRCELKLQKWYGDLRGKPFAIEAENSILDISGFSKQYNCAFIWQKDGVKKLNLYLIINYFKGGKLRFKKIKPEAFEANRFYTVINKKSGEIVPMEVNFNFDDPNLIILPLAFGKRQGREFIWNDLLSLETGSLKLANGRVIEKTLYNRRTRQDEPALFVALTFERREVLDSSNIKPMNLIGVDRGENIPAVIALTDPEGCPLSRFKDSLGNPTHILRIGESYKEKQRTIQAKKEVEQRRAGGYSRKYASKAKNLADDMVRNTARDLLYYAVTQDAMLIFENLSRGFGRQGKRTFMAERQYTRMEDWLTAKLAYEGLPSKTYLSKTLAQYTSKTCSNCGFTITSADYDRVLEKLKKTATGWMTTINGKELKVEGQITYYNRYKRQNVVKDLSVELDRLSEESVNNDISSWTKGRSGEALSLLKKRFSHRPVQEKFVCLNCGFETHADEQAALNIARSWLFLRSQEYKKYQTNKTTGNTDKRAFVETWQSFYRKKLKEVWKPAV

SEQ ID NO: 31383 - protein, 978 aa, synthetic construct
  REGION 1..978: note = engineered CasX variant
QEGKRLNKIRRRLVKDSNTKKAGKTGPMKTLLVRVMTPDLRERLENLRKKPENIPQPISNTSRANLNKLLTDYTEMKKAILHVYWEEFQKDPVGLMSRVAQPASKKIDQNKLKPEMDEKGNLTTAGFACSQCGQPLFVYKLEQVSEKGKAYTNYFGRCNVAEHEKLILLAQLKPEKDSDEAVTYSLGKFGQRALDFYSIHVTKESTHPVKPLAQIAGNRYASYPVGKALSDACMGTIASFLSKYQDIIIEHQKVVKGNQKRLESLRELAGKENLEYPSVTLPPQPHTKEGVDAYNEVIARVRMWVNLNLWQKLKLSRDDAKPLLRLKGFPSFPLVERQANEVDWWDMVCNVKKLINEKKEDGKVFWQNLAGYKRQEALRPYLSSEEDRKKGKKFARYQLGDLLLHLEKKHGEDWGKVYDEAWERIDKKVEGLSKHIKLEEERRSEDAQSKAALTDWLRAKASFVIEGLKEADKDEFCRCELKLQKWYGDLRGKPFAIEAENSILDISGFSKQYNCAFIWQKDGVKKLNLYLIINYFKGGKLRFKKIKPEAFEANRFYTVINKKSGEIVPMEVNFNFDDPNLIILPLAFGKRQGREFIWNDLLSLETGSLKLANGRVIEKTLYNRRTRQDEPALFVALTFERREVLDSSNIKPMNLIGVDRGENIPAVIALTDPEGCPLSRFKDSLGNPTHILRIGESYKEKQRTIQAKKEVEQRRAGGYSRKYASKAKNLADDMVRNTARDLLYYAVTQDAMLIFENLSRGFGRQGKRTFMAERQYTRMEDWLTAKLAYEGLPSKTYLSKTLAQYTSKTCSNCGFTITSADYDRVLEKLKKTATGWMTTINGKELKVEGQITYYNRYKRQNVVKDLSVELDRLSEESVNNDISSWTKGRSGEALSLLKKRFSHRPVQEKFVCLNCGFETHADEQAALNIARSWLFLRSQEYKKYQTNKTTGNTDKRAFVETWQSFYRKKLKEVWKPAV

SEQ ID NO: 31384 - protein, 978 aa, synthetic construct
  REGION 1..978: note = engineered CasX variant
QEGKRLNKIRRRLVKDSNTKKAGKTGPMKTLLVRVMTPDLRERLENLRKKPENIPQPISNTSRANLNKLLTDYTEMKKAILHVYWEEFQKDPVGLMSRVAQPASKKIDQNKLKPEMDEKGNLTTAGFACSQCGQPLFVYKLEQVSEKGKAYTNYFGRCNVAEHEKLILLAQLKPEKDSDEAVTYSLGKFGQRALDFYSIHVTKESTHPVKPLAQIAGNRYASHPVGKALSDACMGTIASFLSKYQDIIIEHQKVVKGNQKRLESLRELAGKENLEYPSVTLPPQPHTKEGVDAYNEVIARVRMWVNLNLWQKLKLSRDDAKPLLRLKGFPSFPLVERQANEVDWWDMVCNVKKLINEKKEDGKVFWQNLAGYKRQEALRPYLSSEEDRKKGKKFARYQLGDLLLHLEKKHGEDWGKVYDEAWERIDKKVEGLSKHIKLEEERRSEDAQSKAALTDWLRAKASFVIEGLKEADKDEFCRCELKLQKWYGDLRGKPFAIEAENSILDISGFSKQYNCAFIWQKDGVKKLNLYLIINYFKGGKLRFKKIKPEAFEANRFYTVINKKSGEIVPMEVNFNFDDPNLIILPLAFGKRQGREFIWNDLLSLETGSLKLANGRVIEKTLYNRRTRQDEPALFVALTFERREVLDSSNIKPMNLIGVDRGENIPAVIALTDPEGCPLSRFKDSLGNPTHILRIGESYKEKQRTIQAKKEVEQRRAGGYSRKYASKAKNLADDMVRNTARDLLYYAVTQDAMLIFENLSRGFGRQGKRTFMAERQYTRMEDWLTAKLAYEGLPSKTYLSKTLAQYTSKTCSNCGFTITSADYDRVLEKLKKTATGWMTTINGKELKVEGQITYYNRYKRQNVVKDLSVELDRLSEESVNNDISSWTKGRSGEALSLLKKRFSHRPVQEKFVCLNCGFETHADEQAALNIARSWLFLRSQEYKKYQTNKTTGNTDKRAFVETWQSFYRKKLKEVWKPAV

SEQ ID NO: 31385 - protein, 978 aa, synthetic construct
  REGION 1..978: note = engineered CasX variant
QEGKRLNKIRRRLVKDSNTKKAGKTGPMKTLLVRVMTPDLRERLENLRKKPENIPQPISNTSRANLNKLLTDYTEMKKAILHVYWEEFQKDPVGLMSRVAQPASKKIDQNKLKPEMDEKGNLTTAGFACSQCGQPLFVYKLEQVSEKGKAYTNYFGRCNVAEHEKLILLAQLKPEKDSDEAVTYSLGKFGQRALDFYSIHVTKESTHPVKPLAQIAGNRYASSPVGKALSDACMGTIASFLSKYQDIIIEHQKVVKGNQKRLESLRELAGKENLEYPSVTLPPQPHTKEGVDAYNEVIARVRMWVNLNLWQKLKLSRDDAKPLLRLKGFPSFPLVERQANEVDWWDMVCNVKKLINEKKEDGKVFWQNLAGYKRQEALRPYLSSEEDRKKGKKFARYQLGDLLLHLEKKHGEDWGKVYDEAWERIDKKVEGLSKHIKLEEERRSEDAQSKAALTDWLRAKASFVIEGLKEADKDEFCRCELKLQKWYGDLRGKPFAIEAENSILDISGFSKQYNCAFIWQKDGVKKLNLYLIINYFKGGKLRFKKIKPEAFEANRFYTVINKKSGEIVPMEVNFNFDDPNLIILPLAFGKRQGREFIWNDLLSLETGSLKLANGRVIEKTLYNRRTRQDEPALFVALTFERREVLDSSNIKPMNLIGVDRGENIPAVIALTDPEGCPLSRFKDSLGNPTHILRIGESYKEKQRTIQAKKEVEQRRAGGYSRKYASKAKNLADDMVRNTARDLLYYAVTQDAMLIFENLSRGFGRQGKRTFMAERQYTRMEDWLTAKLAYEGLPSKTYLSKTLAQYTSKTCSNCGFTITSADYDRVLEKLKKTATGWMTTINGKELKVEGQITYYNRYKRQNVVKDLSVELDRLSEESVNNDISSWTKGRSGEALSLLKKRFSHRPVQEKFVCLNCGFETHADEQAALNIARSWLFLRSQEYKKYQTNKTTGNTDKRAFVETWQSFYRKKLKEVWKPAV

SEQ ID NO: 31386 - protein, 978 aa, synthetic construct
  REGION 1..978: note = engineered CasX variant
QEGKRLNKIRRRLVKDSNTKKAGKTGPMKTLLVRVMTPDLRERLENLRKKPENIPQPISNTSRANLNKLLTDYTEMKKAILHVYWEEFQKDPVGLMSRVAQPASKKIDQNKLKPEMDEKGNLTTAGFACSQCGQPLFVYKLEQVSEKGKAYTNYFGRCNVAEHEKLILLAQLKPEKDSDEAVTYSLGKFGQRALDFYSIHVTKESTHPVKPLAQIAGNRYASTPVGKALSDACMGTIASFLSKYQDIIIEHQKVVKGNQKRLESLRELAGKENLEYPSVTLPPQPHTKEGVDAYNEVIARVRMWVNLNLWQKLKLSRDDAKPLLRLKGFPSFPLVERQANEVDWWDMVCNVKKLINEKKEDGKVFWQNLAGYKRQEALRPYLSSEEDRKKGKKFARYQLGDLLLHLEKKHGEDWGKVYDEAWERIDKKVEGLSKHIKLEEERRSEDAQSKAALTDWLRAKASFVIEGLKEADKDEFCRCELKLQKWYGDLRGKPFAIEAENSILDISGFSKQYNCAFIWQKDGVKKLNLYLIINYFKGGKLRFKKIKPEAFEANRFYTVINKKSGEIVPMEVNFNFDDPNLIILPLAFGKRQGREFIWNDLLSLETGSLKLANGRVIEKTLYNRRTRQDEPALFVALTFERREVLDSSNIKPMNLIGVDRGENIPAVIALTDPEGCPLSRFKDSLGNPTHILRIGESYKEKQRTIQAKKEVEQRRAGGYSRKYASKAKNLADDMVRNTARDLLYYAVTQDAMLIFENLSRGFGRQGKRTFMAERQYTRMEDWLTAKLAYEGLPSKTYLSKTLAQYTSKTCSNCGFTITSADYDRVLEKLKKTATGWMTTINGKELKVEGQITYYNRYKRQNVVKDLSVELDRLSEESVNNDISSWTKGRSGEALSLLKKRFSHRPVQEKFVCLNCGFETHADEQAALNIARSWLFLRSQEYKKYQTNKTTGNTDKRAFVETWQSFYRKKLKEVWKPAV

SEQ ID NO: 31387 - protein, 978 aa, synthetic construct
  REGION 1..978: note = engineered CasX variant
QEGKRLNKIRRRLVKDSNTKKAGKTGPMKTLLVRVMTPDLRERLENLRKKPENIPQPISNTSRANLNKLLTDYTEMKKAILHVYWEEFQKDPVGLMSRVAQPASKKIDQNKLKPEMDEKGNLTTAGFACSQCGQPLFVYKLEQVSEKGKAYTNYFGRCNVAEHEKLILLAQLKPEKDSDEAVTYSLGKFGQRALDFYSIHVTKESTHPVKPLAQIAGNRYASAPVGKALSDACMGTIASFLSKYQDIIIEHQKVVKGNQKRLESLRELAGKENLEYPSVTLPPQPHTKEGVDAYNEVIARVRMWVNLNLWQKLKLSRDDAKPLLRLKGFPSFPLVERQANEVDWWDMVCNVKKLINEKKEDGKVFWQNLAGYKRQEALRPYLSSEEDRKKGKKFARYQLGDLLLHLEKKHGEDWGKVYDEAWERIDKKVEGLSKHIKLEEERRSEDAQSKAALTDWLRAKASFVIEGLKEADKDEFCRCELKLQKWYGDLRGKPFAIEAENSILDISGFSKQYNCAFIWQKDGVKKLNLYLIINYFKGGKLRFKKIKPEAFEANRFYTVINKKSGEIVPMEVNFNFDDPNLIILPLAFGKRQGREFIWNDLLSLETGSLKLANGRVIEKTLYNRRTRQDEPALFVALTFERREVLDSSNIKPMNLIGVDRGENIPAVIALTDPEGCPLSRFKDSLGNPTHILRIGESYKEKQRTIQAKKEVEQRRAGGYSRKYASKAKNLADDMVRNTARDLLYYAVTQDAMLIFENLSRGFGRQGKRTFMAERQYTRMEDWLTAKLAYEGLPSKTYLSKTLAQYTSKTCSNCGFTITSADYDRVLEKLKKTATGWMTTINGKELKVEGQITYYNRYKRQNVVKDLSVELDRLSEESVNNDISSWTKGRSGEALSLLKKRFSHRPVQEKFVCLNCGFETHADEQAALNIARSWLFLRSQEYKKYQTNKTTGNTDKRAFVETWQSFYRKKLKEVWKPAV

SEQ ID NO: 31388 - protein, 978 aa, synthetic construct
  REGION 1..978: note = engineered CasX variant
QEGKRLNKIRRRLVKDSNTKKAGKTGPMKTLLVRVMTPDLRERLENLRKKPENIPQPISNTSRANLNKLLTDYTEMKKAILHVYWEEFQKDPVGLMSRVAQPASKKIDQNKLKPEMDEKGNLTTAGFACSQCGQPLFVYKLEQVSEKGKAYTNYFGRCNVAEHEKLILLAQLKPEKDSDEAVTYSLGKFGQRALDFYSIHVTKESTHPVKPLAQIAGNRYASVPVGKALSDACMGTIASFLSKYQDIIIEHQKVVKGNQKRLESLRELAGKENLEYPSVTLPPQPHTKEGVDAYNEVIARVRMWVNLNLWQKLKLSRDDAKPLLRLKGFPSFPLVERQANEVDWWDMVCNVKKLINEKKEDGKVFWQNLAGYKRQEALRPYLSSEEDRKKGKKFARYQLGDLLLHLEKKHGEDWGKVYDEAWERIDKKVEGLSKHIKLEEERRSEDAQSKAALTDWLRAKASFVIEGLKEADKDEFCRCELKLQKWYGDLRGKPFAIEAENSILDISGFSKQYNCAFIWQKDGVKKLNLYLIINYFKGGKLRFKKIKPEAFEANRFYTVINKKSGEIVPMEVNFNFDDPNLIILPLAFGKRQGREFIWNDLLSLETGSLKLANGRVIEKTLYNRRTRQDEPALFVALTFERREVLDSSNIKPMNLIGVDRGENIPAVIALTDPEGCPLSRFKDSLGNPTHILRIGESYKEKQRTIQAKKEVEQRRAGGYSRKYASKAKNLADDMVRNTARDLLYYAVTQDAMLIFENLSRGFGRQGKRTFMAERQYTRMEDWLTAKLAYEGLPSKTYLSKTLAQYTSKTCSNCGFTITSADYDRVLEKLKKTATGWMTTINGKELKVEGQITYYNRYKRQNVVKDLSVELDRLSEESVNNDISSWTKGRSGEALSLLKKRFSHRPVQEKFVCLNCGFETHADEQAALNIARSWLFLRSQEYKKYQTNKTTGNTDKRAFVETWQSFYRKKLKEVWKPAV

SEQ ID NO: 31389 - protein, 978 aa, synthetic construct
  REGION 1..978: note = engineered CasX variant
QEGKRLNKIRRRLVKDSNTKKAGKTGPMKTLLVRVMTPDLRERLENLRKKPENIPQPISNTSRANLNKLLTDYTEMKKAILHVYWEEFQKDPVGLMSRVAQPASKKIDQNKLKPEMDEKGNLTTAGFACSQCGQPLFVYKLEQVSEKGKAYTNYFGRCNVAEHEKLIKLAQLKPEKDSDEAVTYSLGKFGQRALDFYSIHVTKESTHPVKPLAQIAGNRYASGPVGKALSDACMGTIASFLSKYQDIIIEHQKVVKGNQKRLESLRELAGKENLEYPSVTLPPQPHTKEGVDAYNEVIARVRMWVNLNLWQKLKLSRDDAKPLLRLKGFPSFPLVERQANEVDWWDMVCNVKKLINEKKEDGKVFWQNLAGYKRQEALRPYLSSEEDRKKGKKFARYQLGDLLLHLEKKHGEDWGKVYDEAWERIDKKVEGLSKHIKLEEERRSEDAQSKAALTDWLRAKASFVIEGLKEADKDEFCRCELKLQKWYGDLRGKPFAIEAENSILDISGFSKQYNCAFIWQKDGVKKLNLYLIINYFKGGKLRFKKIKPEAFEANRFYTVINKKSGEIVPMEVNFNFDDPNLIILPLAFGKRQGREFIWNDLLSLETGSLKLANGRVIEKTLYNRRTRQDEPALFVALTFERREVLDSSNIKPMNLIGVDRGENIPAVIALTDPEGCPLSRFKDSLGNPTHILRIGESYKEKQRTIQAKKEVEQRRAGGYSRKYASKAKNLADDMVRNTARDLLYYAVTQDAMLIFENLSRGFGRQGKRTFMAERQYTRMEDWLTAKLAYEGLPSKTYLSKTLAQYTSKTCSNCGFTITSADYDRVLEKLKKTATGWMTTINGKELKVEGQITYYNRYKRQNVVKDLSVELDRLSEESVNNDISSWTKGRSGEALSLLKKRFSHRPVQEKFVCLNCGFETHADEQAALNIARSWLFLRSQEYKKYQTNKTTGNTDKRAFVETWQSFYRKKLKEVWKPAV

SEQ ID NO: 31390 - protein, 977 aa, synthetic construct
  REGION 1..977: note = engineered CasX variant
QEGKRLNKIRRRLVKDSNTKKAGKTGPMKTLLVRVMTPDLRERLENLRKKPENIPQPISNTSRANLNKLLTDYTEMKKAILHVYWEEFQKDPVGLMSRVAQPASKKIDQNKLKPEMDEKGNLTTAGFACSQCGQPLFVYKLEQVSEKGKAYTNYFGRCNVAEHEKLILLAQLKPEKDSDEAVTYSLGKFGQRALDFYSIHVTKESTHPVKPLAQIAGNRYASPVGKALSDACMGTIASFLSKYQDIIIEHQKVVKGNQKRLESLRELAGKENLEYPSVTLPPQPHTKEGVDAYNEVIARVRMWVNLNLWQKLKLSRDDAKPLLRLKGFPSFPLVERQANEVDWWDMVCNVKKLINEKKEDGKVFWQNLAGYKRQEALRPYLSSEEDRKKGKKFARYQLGDLLLHLEKKHGEDWGKVYDEAWERIDKKVEGLSKHIKLEEERRSEDAQSKAALTDWLRAKASFVIEGLKEADKDEFCRCELKLQKWYGDLRGKPFAIEAENSILDISGFSKQYNCAFIWQKDGVKKLNLYLIINYFKGGKLRFKKIKPEAFEANRFYTVINKKSGEIVPMEVNFNFDDPNLIILPLAFGKRQGREFIWNDLLSLETGSLKLANGRVIEKTLYNRRTRQDEPALFVALTFERREVLDSSNIKPMNLIGVDRGENIPAVIALTDPEGCPLSRFKDSLGNPTHILRIGESYKEKQRTIQAKKEVEQRRAGGYSRKYASKAKNLADDMVRNTARDLLYYAVTQDAMLIFENLSRGFGRQGKRTFMAERQYTRMEDWLTAKLAYEGLPSKTYLSKTLAQYTSKTCSNCGFTITSADYDRVLEKLKKTATGWMTTINGKELKVEGQITYYNRYKRQNVVKDLSVELDRLSEESVNNDISSWTKGRSGEALSLLKKRFSHRPVQEKFVCLNCGFETHADEQAALNIARSWLFLRSQEYKKYQTNKTTGNTDKRAFVETWQSFYRKKLKEVWKPAV

SEQ ID NO: 31391 - protein, 978 aa, synthetic construct
  REGION 1..978: note = engineered CasX variant
QEGKRINKIRRRLVKDSNTKKAGKTGPMKTLLVRVMTPDLRERLENLRKKPENIPQPISNTSRANLNKLLTDYTEMKKAILHVYWEEFQKDPVGLMSRVAQPASKKIDQNKLKPEMDEKGNLTTAGFACSQCGQPLFVYKLEQVSEKGKAYTNYVGRCNVAEHEKLILLAQLKPEKDSDEAVTYSLGKFGQRALDFYSIHVTKESTHPVKPLAQIAGNRYASYPVGKALSDACMGTIASFLSKYQDIIIEHQKVVKGNQKRLESLRELAGKENLEYPSVTLPPQPHTKEGVDAYNEVIARVRMWVNLNLWQKLKLSRDDAKPLLRLKGFPSFPLVERQANEVDWWDMVCNVKKLINEKKEDGKVFWQNLAGYKRQEALRPYLSSEEDRKKGKKFARYQLGDLLLHLEKKHGEDWGKVYDEAWERIDKKVEGLSKHIKLEEERRSEDAQSKAALTDWLRAKASFVIEGLKEADKDEFCRCELKLQKWYGDLRGKPFAIEAENSILDISGFSKQYNCAFIWQKDGVKKLNLYLIINYFKGGKLRFKKIKPEAFEANRFYTVINKKSGEIVPMEVNFNFDDPNLIILPLAFGKRQGREFIWNDLLSLETGSLKLANGRVIEKTLYNRRTRQDEPALFVALTFERREVLDSSNIKPMNLIGVDRGENIPAVIALTDPEGCPLSRFKDSLGNPTHILRIGESYKEKQRTIQAKKEVEQRRAGGYSRKYASKAKNLADDMVRNTARDLLYYAVTQDAMLIFENLSRGFGRQGKRTFMAERQYTRMEDWLTAKLAYEGLPSKTYLSKTLAQYTSKTCSNCGFTITSADYDRVLEKLKKTATGWMTTINGKELKVEGQITYYNRYKRQNVVKDLSVELDRLSEESVNNDISSWTKGRSGEALSLLKKRFSHRPVQEKFVCLNCGFETHADEQAALNIARSWLFLRSQEYKKYQTNKTTGNTDKRAFVETWQSFYRKKLKEVWKPAV

SEQ ID NO: 31392 - protein, 978 aa, synthetic construct
  REGION 1..978: note = engineered CasX variant
QEGKRINKIRRRLVKDSNTKKAGKTGPMKTLLVRVMTPDLRERLENLRKKPENIPQPISNTSRANLNKLLTDYTEMKKAILHVYWEEFQKDPVGLMSRVAQPASKKIDQNKLKPEMDEKGNLTTAGFACSQCGQPLFVYKLEQVSEKGKAYTNYVGRCNVAEHEKLILLAQLKPEKDSDEAVTYSLGKFGQRALDFYSIHVTKESTHPVKPLAQIAGNRYASHPVGKALSDACMGTIASFLSKYQDIIIEHQKVVKGNQKRLESLRELAGKENLEYPSVTLPPQPHTKEGVDAYNEVIARVRMWVNLNLWQKLKLSRDDAKPLLRLKGFPSFPLVERQANEVDWWDMVCNVKKLINEKKEDGKVFWQNLAGYKRQEALRPYLSSEEDRKKGKKFARYQLGDLLLHLEKKHGEDWGKVYDEAWERIDKKVEGLSKHIKLEEERRSEDAQSKAALTDWLRAKASFVIEGLKEADKDEFCRCELKLQKWYGDLRGKPFAIEAENSILDISGFSKQYNCAFIWQKDGVKKLNLYLIINYFKGGKLRFKKIKPEAFEANRFYTVINKKSGEIVPMEVNFNFDDPNLIILPLAFGKRQGREFIWNDLLSLETGSLKLANGRVIEKTLYNRRTRQDEPALFVALTFERREVLDSSNIKPMNLIGVDRGENIPAVIALTDPEGCPLSRFKDSLGNPTHILRIGESYKEKQRTIQAKKEVEQRRAGGYSRKYASKAKNLADDMVRNTARDLLYYAVTQDAMLIFENLSRGFGRQGKRTFMAERQYTRMEDWLTAKLAYEGLPSKTYLSKTLAQYTSKTCSNCGFTITSADYDRVLEKLKKTATGWMTTINGKELKVEGQITYYNRYKRQNVVKDLSVELDRLSEESVNNDISSWTKGRSGEALSLLKKRFSHRPVQEKFVCLNCGFETHADEQAALNIARSWLFLRSQEYKKYQTNKTTGNTDKRAFVETWQSFYRKKLKEVWKPAV

SEQ ID NO: 31393 - protein, 978 aa, synthetic construct
  REGION 1..978: note = engineered CasX variant
QEGKRINKIRRRLVKDSNTKKAGKTGPMKTLLVRVMTPDLRERLENLRKKPENIPQPISNTSRANLNKLLTDYTEMKKAILHVYWEEFQKDPVGLMSRVAQPASKKIDQNKLKPEMDEKGNLTTAGFACSQCGQPLFVYKLEQVSEKGKAYTNYVGRCNVAEHEKLILLAQLKPEKDSDEAVTYSLGKFGQRALDFYSIHVTKESTHPVKPLAQIAGNRYASSPVGKALSDACMGTIASFLSKYQDIIIEHQKVVKGNQKRLESLRELAGKENLEYPSVTLPPQPHTKEGVDAYNEVIARVRMWVNLNLWQKLKLSRDDAKPLLRLKGFPSFPLVERQANEVDWWDMVCNVKKLINEKKEDGKVFWQNLAGYKRQEALRPYLSSEEDRKKGKKFARYQLGDLLLHLEKKHGEDWGKVYDEAWERIDKKVEGLSKHIKLEEERRSEDAQSKAALTDWLRAKASFVIEGLKEADKDEFCRCELKLQKWYGDLRGKPFAIEAENSILDISGFSKQYNCAFIWQKDGVKKLNLYLIINYFKGGKLRFKKIKPEAFEANRFYTVINKKSGEIVPMEVNFNFDDPNLIILPLAFGKRQGREFIWNDLLSLETGSLKLANGRVIEKTLYNRRTRQDEPALFVALTFERREVLDSSNIKPMNLIGVDRGENIPAVIALTDPEGCPLSRFKDSLGNPTHILRIGESYKEKQRTIQAKKEVEQRRAGGYSRKYASKAKNLADDMVRNTARDLLYYAVTQDAMLIFENLSRGFGRQGKRTFMAERQYTRMEDWLTAKLAYEGLPSKTYLSKTLAQYTSKTCSNCGFTITSADYDRVLEKLKKTATGWMTTINGKELKVEGQITYYNRYKRQNVVKDLSVELDRLSEESVNNDISSWTKGRSGEALSLLKKRFSHRPVQEKFVCLNCGFETHADEQAALNIARSWLFLRSQEYKKYQTNKTTGNTDKRAFVETWQSFYRKKLKEVWKPAV

SEQ ID NO: 31394 - protein, 978 aa, synthetic construct
  REGION 1..978: note = engineered CasX variant
QEGKRINKIRRRLVKDSNTKKAGKTGPMKTLLVRVMTPDLRERLENLRKKPENIPQPISNTSRANLNKLLTDYTEMKKAILHVYWEEFQKDPVGLMSRVAQPASKKIDQNKLKPEMDEKGNLTTAGFACSQCGQPLFVYKLEQVSEKGKAYTNYVGRCNVAEHEKLILLAQLKPEKDSDEAVTYSLGKFGQRALDFYSIHVTKESTHPVKPLAQIAGNRYASTPVGKALSDACMGTIASFLSKYQDIIIEHQKVVKGNQKRLESLRELAGKENLEYPSVTLPPQPHTKEGVDAYNEVIARVRMWVNLNLWQKLKLSRDDAKPLLRLKGFPSFPLVERQANEVDWWDMVCNVKKLINEKKEDGKVFWQNLAGYKRQEALRPYLSSEEDRKKGKKFARYQLGDLLLHLEKKHGEDWGKVYDEAWERIDKKVEGLSKHIKLEEERRSEDAQSKAALTDWLRAKASFVIEGLKEADKDEFCRCELKLQKWYGDLRGKPFAIEAENSILDISGFSKQYNCAFIWQKDGVKKLNLYLIINYFKGGKLRFKKIKPEAFEANRFYTVINKKSGEIVPMEVNFNFDDPNLIILPLAFGKRQGREFIWNDLLSLETGSLKLANGRVIEKTLYNRRTRQDEPALFVALTFERREVLDSSNIKPMNLIGVDRGENIPAVIALTDPEGCPLSRFKDSLGNPTHILRIGESYKEKQRTIQAKKEVEQRRAGGYSRKYASKAKNLADDMVRNTARDLLYYAVTQDAMLIFENLSRGFGRQGKRTFMAERQYTRMEDWLTAKLAYEGLPSKTYLSKTLAQYTSKTCSNCGFTITSADYDRVLEKLKKTATGWMTTINGKELKVEGQITYYNRYKRQNVVKDLSVELDRLSEESVNNDISSWTKGRSGEALSLLKKRFSHRPVQEKFVCLNCGFETHADEQAALNIARSWLFLRSQEYKKYQTNKTTGNTDKRAFVETWQSFYRKKLKEVWKPAV

SEQ ID NO: 31395 - protein, 978 aa, synthetic construct
  REGION 1..978: note = engineered CasX variant
QEGKRINKIRRRLVKDSNTKKAGKTGPMKTLLVRVMTPDLRERLENLRKKPENIPQPISNTSRANLNKLLTDYTEMKKAILHVYWEEFQKDPVGLMSRVAQPASKKIDQNKLKPEMDEKGNLTTAGFACSQCGQPLFVYKLEQVSEKGKAYTNYVGRCNVAEHEKLILLAQLKPEKDSDEAVTYSLGKFGQRALDFYSIHVTKESTHPVKPLAQIAGNRYASAPVGKALSDACMGTIASFLSKYQDIIIEHQKVVKGNQKRLESLRELAGKENLEYPSVTLPPQPHTKEGVDAYNEVIARVRMWVNLNLWQKLKLSRDDAKPLLRLKGFPSFPLVERQANEVDWWDMVCNVKKLINEKKEDGKVFWQNLAGYKRQEALRPYLSSEEDRKKGKKFARYQLGDLLLHLEKKHGEDWGKVYDEAWERIDKKVEGLSKHIKLEEERRSEDAQSKAALTDWLRAKASFVIEGLKEADKDEFCRCELKLQKWYGDLRGKPFAIEAENSILDISGFSKQYNCAFIWQKDGVKKLNLYLIINYFKGGKLRFKKIKPEAFEANRFYTVINKKSGEIVPMEVNFNFDDPNLIILPLAFGKRQGREFIWNDLLSLETGSLKLANGRVIEKTLYNRRTRQDEPALFVALTFERREVLDSSNIKPMNLIGVDRGENIPAVIALTDPEGCPLSRFKDSLGNPTHILRIGESYKEKQRTIQAKKEVEQRRAGGYSRKYASKAKNLADDMVRNTARDLLYYAVTQDAMLIFENLSRGFGRQGKRTFMAERQYTRMEDWLTAKLAYEGLPSKTYLSKTLAQYTSKTCSNCGFTITSADYDRVLEKLKKTATGWMTTINGKELKVEGQITYYNRYKRQNVVKDLSVELDRLSEESVNNDISSWTKGRSGEALSLLKKRFSHRPVQEKFVCLNCGFETHADEQAALNIARSWLFLRSQEYKKYQTNKTTGNTDKRAFVETWQSFYRKKLKEVWKPAV

SEQ ID NO: 31396 - protein, 978 aa, synthetic construct
  REGION 1..978: note = engineered CasX variant
QEGKRINKIRRRLVKDSNTKKAGKTGPMKTLLVRVMTPDLRERLENLRKKPENIPQPISNTSRANLNKLLTDYTEMKKAILHVYWEEFQKDPVGLMSRVAQPASKKIDQNKLKPEMDEKGNLTTAGFACSQCGQPLFVYKLEQVSEKGKAYTNYVGRCNVAEHEKLILLAQLKPEKDSDEAVTYSLGKFGQRALDFYSIHVTKESTHPVKPLAQIAGNRYASVPVGKALSDACMGTIASFLSKYQDIIIEHQKVVKGNQKRLESLRELAGKENLEYPSVTLPPQPHTKEGVDAYNEVIARVRMWVNLNLWQKLKLSRDDAKPLLRLKGFPSFPLVERQANEVDWWDMVCNVKKLINEKKEDGKVFWQNLAGYKRQEALRPYLSSEEDRKKGKKFARYQLGDLLLHLEKKHGEDWGKVYDEAWERIDKKVEGLSKHIKLEEERRSEDAQSKAALTDWLRAKASFVIEGLKEADKDEFCRCELKLQKWYGDLRGKPFAIEAENSILDISGFSKQYNCAFIWQKDGVKKLNLYLIINYFKGGKLRFKKIKPEAFEANRFYTVINKKSGEIVPMEVNFNFDDPNLIILPLAFGKRQGREFIWNDLLSLETGSLKLANGRVIEKTLYNRRTRQDEPALFVALTFERREVLDSSNIKPMNLIGVDRGENIPAVIALTDPEGCPLSRFKDSLGNPTHILRIGESYKEKQRTIQAKKEVEQRRAGGYSRKYASKAKNLADDMVRNTARDLLYYAVTQDAMLIFENLSRGFGRQGKRTFMAERQYTRMEDWLTAKLAYEGLPSKTYLSKTLAQYTSKTCSNCGFTITSADYDRVLEKLKKTATGWMTTINGKELKVEGQITYYNRYKRQNVVKDLSVELDRLSEESVNNDISSWTKGRSGEALSLLKKRFSHRPVQEKFVCLNCGFETHADEQAALNIARSWLFLRSQEYKKYQTNKTTGNTDKRAFVETWQSFYRKKLKEVWKPAV

SEQ ID NO: 31397 - protein, 978 aa, synthetic construct
  REGION 1..978: note = engineered CasX variant
QEGKRINKIRRRLVKDSNTKKAGKTGPMKTLLVRVMTPDLRERLENLRKKPENIPQPISNTSRANLNKLLTDYTEMKKAILHVYWEEFQKDPVGLMSRVAQPASKKIDQNKLKPEMDEKGNLTTAGFACSQCGQPLFVYKLEQVSEKGKAYTNYVGRCNVAEHEKLIKLAQLKPEKDSDEAVTYSLGKFGQRALDFYSIHVTKESTHPVKPLAQIAGNRYASGPVGKALSDACMGTIASFLSKYQDIIIEHQKVVKGNQKRLESLRELAGKENLEYPSVTLPPQPHTKEGVDAYNEVIARVRMWVNLNLWQKLKLSRDDAKPLLRLKGFPSFPLVERQANEVDWWDMVCNVKKLINEKKEDGKVFWQNLAGYKRQEALRPYLSSEEDRKKGKKFARYQLGDLLLHLEKKHGEDWGKVYDEAWERIDKKVEGLSKHIKLEEERRSEDAQSKAALTDWLRAKASFVIEGLKEADKDEFCRCELKLQKWYGDLRGKPFAIEAENSILDISGFSKQYNCAFIWQKDGVKKLNLYLIINYFKGGKLRFKKIKPEAFEANRFYTVINKKSGEIVPMEVNFNFDDPNLIILPLAFGKRQGREFIWNDLLSLETGSLKLANGRVIEKTLYNRRTRQDEPALFVALTFERREVLDSSNIKPMNLIGVDRGENIPAVIALTDPEGCPLSRFKDSLGNPTHILRIGESYKEKQRTIQAKKEVEQRRAGGYSRKYASKAKNLADDMVRNTARDLLYYAVTQDAMLIFENLSRGFGRQGKRTFMAERQYTRMEDWLTAKLAYEGLPSKTYLSKTLAQYTSKTCSNCGFTITSADYDRVLEKLKKTATGWMTTINGKELKVEGQITYYNRYKRQNVVKDLSVELDRLSEESVNNDISSWTKGRSGEALSLLKKRFSHRPVQEKFVCLNCGFETHADEQAALNIARSWLFLRSQEYKKYQTNKTTGNTDKRAFVETWQSFYRKKLKEVWKPAV

SEQ ID NO: 31398 - protein, 977 aa, synthetic construct
  REGION 1..977: note = engineered CasX variant
QEGKRINKIRRRLVKDSNTKKAGKTGPMKTLLVRVMTPDLRERLENLRKKPENIPQPISNTSRANLNKLLTDYTEMKKAILHVYWEEFQKDPVGLMSRVAQPASKKIDQNKLKPEMDEKGNLTTAGFACSQCGQPLFVYKLEQVSEKGKAYTNYVGRCNVAEHEKLILLAQLKPEKDSDEAVTYSLGKFGQRALDFYSIHVTKESTHPVKPLAQIAGNRYASPVGKALSDACMGTIASFLSKYQDIIIEHQKVVKGNQKRLESLRELAGKENLEYPSVTLPPQPHTKEGVDAYNEVIARVRMWVNLNLWQKLKLSRDDAKPLLRLKGFPSFPLVERQANEVDWWDMVCNVKKLINEKKEDGKVFWQNLAGYKRQEALRPYLSSEEDRKKGKKFARYQLGDLLLHLEKKHGEDWGKVYDEAWERIDKKVEGLSKHIKLEEERRSEDAQSKAALTDWLRAKASFVIEGLKEADKDEFCRCELKLQKWYGDLRGKPFAIEAENSILDISGFSKQYNCAFIWQKDGVKKLNLYLIINYFKGGKLRFKKIKPEAFEANRFYTVINKKSGEIVPMEVNFNFDDPNLIILPLAFGKRQGREFIWNDLLSLETGSLKLANGRVIEKTLYNRRTRQDEPALFVALTFERREVLDSSNIKPMNLIGVDRGENIPAVIALTDPEGCPLSRFKDSLGNPTHILRIGESYKEKQRTIQAKKEVEQRRAGGYSRKYASKAKNLADDMVRNTARDLLYYAVTQDAMLIFENLSRGFGRQGKRTFMAERQYTRMEDWLTAKLAYEGLPSKTYLSKTLAQYTSKTCSNCGFTITSADYDRVLEKLKKTATGWMTTINGKELKVEGQITYYNRYKRQNVVKDLSVELDRLSEESVNNDISSWTKGRSGEALSLLKKRFSHRPVQEKFVCLNCGFETHADEQAALNIARSWLFLRSQEYKKYQTNKTTGNTDKRAFVETWQSFYRKKLKEVWKPAV

SEQ ID NO: 31399 - protein, 978 aa, synthetic construct
  REGION 1..978: note = engineered CasX variant
QEGKRINKIRRRLVKDSNTKKAGKTGPMKTLLVRVMTPDLRERLENLRKKPENIPQPISNTSRANLNKLLTDYTEMKKAILHVYWEEFQKDPVGLMSRVAQPASKKIDQNKLKPEMDEKGNLTTAGFACSQCGQPLFVYKLEQVSEKGKAYTNYFGRCNVAEHEKLILLAQLKPEKDSDEAVTYSLGKFGQRALDFYSIHVTKESTHPVKPLAQIAGNRYASYPVGKALSDACMGTIASFLSKYQDIIIEHQKVVKGNQKRLESLRELAGKENLEYPSVTLPPQPHTKEGVDAYNEVIARVRMWVNLNLWQKLKLSRDDAKPLLRLKGFPSFPLVERQANEVDWWDMVCNVKKLINEKKEDGKVFWQNLAGYKRQEALRPYLSSEEDRKKGKKFARYQLGDLLLHLEKKHGEDWGKVYDEAWERIDKKVEGLSKHIKLEEERRSEDAQSKAALTDWLRAKASFVIEGLKEADKDEFCRCELKLQKWYGDLRGKPFAIEAENSILDISGFSKQYNCAFIWQKDGVKKLNLYLIINYFKGGKLRFKKIKPEAFEANRFYTVINKKSGEIVPMEVNFNFDDPNLIILPLAFGKRQGREFIWNDLLSLETGSLKLANGRVIEKTLYNRRTRQDEPALFVALTFERREVLDSSNIKPMNLIGVDRGENIPAVIALTDPEGCPLSRFKDSLGNPTHILRIGESYKEKQRTIQAKKEVEQRRAGGYSRKYASKAKNLADDMVRNTARDLLYYAVTQDAMLIFENLSRGFGRQGKRTFMAERQYTRMEDWLTAKLAYEGLASKTYLSKTLAQYTSKTCSNCGFTITSADYDRVLEKLKKTATGWMTTINGKELKVEGQITYYNRYKRQNVVKDLSVELDRLSEESVNNDISSWTKGRSGEALSLLKKRFSHRPVQEKFVCLNCGFETHADEQAALNIARSWLFLRSQEYKKYQTNKTTGNTDKRAFVETWQSFYRKKLKEVWKPAV

SEQ ID NO: 31400 - protein, 978 aa, synthetic construct
  REGION 1..978: note = engineered CasX variant
QEGKRINKIRRRLVKDSNTKKAGKTGPMKTLLVRVMTPDLRERLENLRKKPENIPQPISNTSRANLNKLLTDYTEMKKAILHVYWEEFQKDPVGLMSRVAQPASKKIDQNKLKPEMDEKGNLTTAGFACSQCGQPLFVYKLEQVSEKGKAYTNYFGRCNVAEHEKLILLAQLKPEKDSDEAVTYSLGKFGQRALDFYSIHVTKESTHPVKPLAQIAGNRYASHPVGKALSDACMGTIASFLSKYQDIIIEHQKVVKGNQKRLESLRELAGKENLEYPSVTLPPQPHTKEGVDAYNEVIARVRMWVNLNLWQKLKLSRDDAKPLLRLKGFPSFPLVERQANEVDWWDMVCNVKKLINEKKEDGKVFWQNLAGYKRQEALRPYLSSEEDRKKGKKFARYQLGDLLLHLEKKHGEDWGKVYDEAWERIDKKVEGLSKHIKLEEERRSEDAQSKAALTDWLRAKASFVIEGLKEADKDEFCRCELKLQKWYGDLRGKPFAIEAENSILDISGFSKQYNCAFIWQKDGVKKLNLYLIINYFKGGKLRFKKIKPEAFEANRFYTVINKKSGEIVPMEVNFNFDDPNLIILPLAFGKRQGREFIWNDLLSLETGSLKLANGRVIEKTLYNRRTRQDEPALFVALTFERREVLDSSNIKPMNLIGVDRGENIPAVIALTDPEGCPLSRFKDSLGNPTHILRIGESYKEKQRTIQAKKEVEQRRAGGYSRKYASKAKNLADDMVRNTARDLLYYAVTQDAMLIFENLSRGFGRQGKRTFMAERQYTRMEDWLTAKLAYEGLASKTYLSKTLAQYTSKTCSNCGFTITSADYDRVLEKLKKTATGWMTTINGKELKVEGQITYYNRYKRQNVVKDLSVELDRLSEESVNNDISSWTKGRSGEALSLLKKRFSHRPVQEKFVCLNCGFETHADEQAALNIARSWLFLRSQEYKKYQTNKTTGNTDKRAFVETWQSFYRKKLKEVWKPAV

SEQ ID NO: 31401 - protein, 978 aa, synthetic construct
  REGION 1..978: note = engineered CasX variant
QEGKRINKIRRRLVKDSNTKKAGKTGPMKTLLVRVMTPDLRERLENLRKKPENIPQPISNTSRANLNKLLTDYTEMKKAILHVYWEEFQKDPVGLMSRVAQPASKKIDQNKLKPEMDEKGNLTTAGFACSQCGQPLFVYKLEQVSEKGKAYTNYFGRCNVAEHEKLILLAQLKPEKDSDEAVTYSLGKFGQRALDFYSIHVTKESTHPVKPLAQIAGNRYASSPVGKALSDACMGTIASFLSKYQDIIIEHQKVVKGNQKRLESLRELAGKENLEYPSVTLPPQPHTKEGVDAYNEVIARVRMWVNLNLWQKLKLSRDDAKPLLRLKGFPSFPLVERQANEVDWWDMVCNVKKLINEKKEDGKVFWQNLAGYKRQEALRPYLSSEEDRKKGKKFARYQLGDLLLHLEKKHGEDWGKVYDEAWERIDKKVEGLSKHIKLEEERRSEDAQSKAALTDWLRAKASFVIEGLKEADKDEFCRCELKLQKWYGDLRGKPFAIEAENSILDISGFSKQYNCAFIWQKDGVKKLNLYLIINYFKGGKLRFKKIKPEAFEANRFYTVINKKSGEIVPMEVNFNFDDPNLIILPLAFGKRQGREFIWNDLLSLETGSLKLANGRVIEKTLYNRRTRQDEPALFVALTFERREVLDSSNIKPMNLIGVDRGENIPAVIALTDPEGCPLSRFKDSLGNPTHILRIGESYKEKQRTIQAKKEVEQRRAGGYSRKYASKAKNLADDMVRNTARDLLYYAVTQDAMLIFENLSRGFGRQGKRTFMAERQYTRMEDWLTAKLAYEGLASKTYLSKTLAQYTSKTCSNCGFTITSADYDRVLEKLKKTATGWMTTINGKELKVEGQITYYNRYKRQNVVKDLSVELDRLSEESVNNDISSWTKGRSGEALSLLKKRFSHRPVQEKFVCLNCGFETHADEQAALNIARSWLFLRSQEYKKYQTNKTTGNTDKRAFVETWQSFYRKKLKEVWKPAV

SEQ ID NO: 31402 - protein, 978 aa, synthetic construct
  REGION 1..978: note = engineered CasX variant
QEGKRINKIRRRLVKDSNTKKAGKTGPMKTLLVRVMTPDLRERLENLRKKPENIPQPISNTSRANLNKLLTDYTEMKKAILHVYWEEFQKDPVGLMSRVAQPASKKIDQNKLKPEMDEKGNLTTAGFACSQCGQPLFVYKLEQVSEKGKAYTNYFGRCNVAEHEKLILLAQLKPEKDSDEAVTYSLGKFGQRALDFYSIHVTKESTHPVKPLAQIAGNRYASTPVGKALSDACMGTIASFLSKYQDIIIEHQKVVKGNQKRLESLRELAGKENLEYPSVTLPPQPHTKEGVDAYNEVIARVRMWVNLNLWQKLKLSRDDAKPLLRLKGFPSFPLVERQANEVDWWDMVCNVKKLINEKKEDGKVFWQNLAGYKRQEALRPYLSSEEDRKKGKKFARYQLGDLLLHLEKKHGEDWGKVYDEAWERIDKKVEGLSKHIKLEEERRSEDAQSKAALTDWLRAKASFVIEGLKEADKDEFCRCELKLQKWYGDLRGKPFAIEAENSILDISGFSKQYNCAFIWQKDGVKKLNLYLIINYFKGGKLRFKKIKPEAFEANRFYTVINKKSGEIVPMEVNFNFDDPNLIILPLAFGKRQGREFIWNDLLSLETGSLKLANGRVIEKTLYNRRTRQDEPALFVALTFERREVLDSSNIKPMNLIGVDRGENIPAVIALTDPEGCPLSRFKDSLGNPTHILRIGESYKEKQRTIQAKKEVEQRRAGGYSRKYASKAKNLADDMVRNTARDLLYYAVTQDAMLIFENLSRGFGRQGKRTFMAERQYTRMEDWLTAKLAYEGLASKTYLSKTLAQYTSKTCSNCGFTITSADYDRVLEKLKKTATGWMTTINGKELKVEGQITYYNRYKRQNVVKDLSVELDRLSEESVNNDISSWTKGRSGEALSLLKKRFSHRPVQEKFVCLNCGFETHADEQAALNIARSWLFLRSQEYKKYQTNKTTGNTDKRAFVETWQSFYRKKLKEVWKPAV

SEQ ID NO: 31403 - protein, 978 aa, synthetic construct
  REGION 1..978: note = engineered CasX variant
QEGKRINKIRRRLVKDSNTKKAGKTGPMKTLLVRVMTPDLRERLENLRKKPENIPQPISNTSRANLNKLLTDYTEMKKAILHVYWEEFQKDPVGLMSRVAQPASKKIDQNKLKPEMDEKGNLTTAGFACSQCGQPLFVYKLEQVSEKGKAYTNYFGRCNVAEHEKLILLAQLKPEKDSDEAVTYSLGKFGQRALDFYSIHVTKESTHPVKPLAQIAGNRYASAPVGKALSDACMGTIASFLSKYQDIIIEHQKVVKGNQKRLESLRELAGKENLEYPSVTLPPQPHTKEGVDAYNEVIARVRMWVNLNLWQKLKLSRDDAKPLLRLKGFPSFPLVERQANEVDWWDMVCNVKKLINEKKEDGKVFWQNLAGYKRQEALRPYLSSEEDRKKGKKFARYQLGDLLLHLEKKHGEDWGKVYDEAWERIDKKVEGLSKHIKLEEERRSEDAQSKAALTDWLRAKASFVIEGLKEADKDEFCRCELKLQKWYGDLRGKPFAIEAENSILDISGFSKQYNCAFIWQKDGVKKLNLYLIINYFKGGKLRFKKIKPEAFEANRFYTVINKKSGEIVPMEVNFNFDDPNLIILPLAFGKRQGREFIWNDLLSLETGSLKLANGRVIEKTLYNRRTRQDEPALFVALTFERREVLDSSNIKPMNLIGVDRGENIPAVIALTDPEGCPLSRFKDSLGNPTHILRIGESYKEKQRTIQAKKEVEQRRAGGYSRKYASKAKNLADDMVRNTARDLLYYAVTQDAMLIFENLSRGFGRQGKRTFMAERQYTRMEDWLTAKLAYEGLASKTYLSKTLAQYTSKTCSNCGFTITSADYDRVLEKLKKTATGWMTTINGKELKVEGQITYYNRYKRQNVVKDLSVELDRLSEESVNNDISSWTKGRSGEALSLLKKRFSHRPVQEKFVCLNCGFETHADEQAALNIARSWLFLRSQEYKKYQTNKTTGNTDKRAFVETWQSFYRKKLKEVWKPAV

SEQ ID NO: 31404 - protein, 978 aa, synthetic construct
  REGION 1..978: note = engineered CasX variant
QEGKRINKIRRRLVKDSNTKKAGKTGPMKTLLVRVMTPDLRERLENLRKKPENIPQPISNTSRANLNKLLTDYTEMKKAILHVYWEEFQKDPVGLMSRVAQPASKKIDQNKLKPEMDEKGNLTTAGFACSQCGQPLFVYKLEQVSEKGKAYTNYFGRCNVAEHEKLILLAQLKPEKDSDEAVTYSLGKFGQRALDFYSIHVTKESTHPVKPLAQIAGNRYASVPVGKALSDACMGTIASFLSKYQDIIIEHQKVVKGNQKRLESLRELAGKENLEYPSVTLPPQPHTKEGVDAYNEVIARVRMWVNLNLWQKLKLSRDDAKPLLRLKGFPSFPLVERQANEVDWWDMVCNVKKLINEKKEDGKVFWQNLAGYKRQEALRPYLSSEEDRKKGKKFARYQLGDLLLHLEKKHGEDWGKVYDEAWERIDKKVEGLSKHIKLEEERRSEDAQSKAALTDWLRAKASFVIEGLKEADKDEFCRCELKLQKWYGDLRGKPFAIEAENSILDISGFSKQYNCAFIWQKDGVKKLNLYLIINYFKGGKLRFKKIKPEAFEANRFYTVINKKSGEIVPMEVNFNFDDPNLIILPLAFGKRQGREFIWNDLLSLETGSLKLANGRVIEKTLYNRRTRQDEPALFVALTFERREVLDSSNIKPMNLIGVDRGENIPAVIALTDPEGCPLSRFKDSLGNPTHILRIGESYKEKQRTIQAKKEVEQRRAGGYSRKYASKAKNLADDMVRNTARDLLYYAVTQDAMLIFENLSRGFGRQGKRTFMAERQYTRMEDWLTAKLAYEGLASKTYLSKTLAQYTSKTCSNCGFTITSADYDRVLEKLKKTATGWMTTINGKELKVEGQITYYNRYKRQNVVKDLSVELDRLSEESVNNDISSWTKGRSGEALSLLKKRFSHRPVQEKFVCLNCGFETHADEQAALNIARSWLFLRSQEYKKYQTNKTTGNTDKRAFVETWQSFYRKKLKEVWKPAV

SEQ ID NO: 31405 - protein, 978 aa, synthetic construct
  REGION 1..978: note = engineered CasX variant
QEGKRINKIRRRLVKDSNTKKAGKTGPMKTLLVRVMTPDLRERLENLRKKPENIPQPISNTSRANLNKLLTDYTEMKKAILHVYWEEFQKDPVGLMSRVAQPASKKIDQNKLKPEMDEKGNLTTAGFACSQCGQPLFVYKLEQVSEKGKAYTNYFGRCNVAEHEKLIKLAQLKPEKDSDEAVTYSLGKFGQRALDFYSIHVTKESTHPVKPLAQIAGNRYASGPVGKALSDACMGTIASFLSKYQDIIIEHQKVVKGNQKRLESLRELAGKENLEYPSVTLPPQPHTKEGVDAYNEVIARVRMWVNLNLWQKLKLSRDDAKPLLRLKGFPSFPLVERQANEVDWWDMVCNVKKLINEKKEDGKVFWQNLAGYKRQEALRPYLSSEEDRKKGKKFARYQLGDLLLHLEKKHGEDWGKVYDEAWERIDKKVEGLSKHIKLEEERRSEDAQSKAALTDWLRAKASFVIEGLKEADKDEFCRCELKLQKWYGDLRGKPFAIEAENSILDISGFSKQYNCAFIWQKDGVKKLNLYLIINYFKGGKLRFKKIKPEAFEANRFYTVINKKSGEIVPMEVNFNFDDPNLIILPLAFGKRQGREFIWNDLLSLETGSLKLANGRVIEKTLYNRRTRQDEPALFVALTFERREVLDSSNIKPMNLIGVDRGENIPAVIALTDPEGCPLSRFKDSLGNPTHILRIGESYKEKQRTIQAKKEVEQRRAGGYSRKYASKAKNLADDMVRNTARDLLYYAVTQDAMLIFENLSRGFGRQGKRTFMAERQYTRMEDWLTAKLAYEGLASKTYLSKTLAQYTSKTCSNCGFTITSADYDRVLEKLKKTATGWMTTINGKELKVEGQITYYNRYKRQNVVKDLSVELDRLSEESVNNDISSWTKGRSGEALSLLKKRFSHRPVQEKFVCLNCGFETHADEQAALNIARSWLFLRSQEYKKYQTNKTTGNTDKRAFVETWQSFYRKKLKEVWKPAV

SEQ ID NO: 31406 - protein, 977 aa, synthetic construct
  REGION 1..977: note = engineered CasX variant
QEGKRINKIRRRLVKDSNTKKAGKTGPMKTLLVRVMTPDLRERLENLRKKPENIPQPISNTSRANLNKLLTDYTEMKKAILHVYWEEFQKDPVGLMSRVAQPASKKIDQNKLKPEMDEKGNLTTAGFACSQCGQPLFVYKLEQVSEKGKAYTNYFGRCNVAEHEKLILLAQLKPEKDSDEAVTYSLGKFGQRALDFYSIHVTKESTHPVKPLAQIAGNRYASPVGKALSDACMGTIASFLSKYQDIIIEHQKVVKGNQKRLESLRELAGKENLEYPSVTLPPQPHTKEGVDAYNEVIARVRMWVNLNLWQKLKLSRDDAKPLLRLKGFPSFPLVERQANEVDWWDMVCNVKKLINEKKEDGKVFWQNLAGYKRQEALRPYLSSEEDRKKGKKFARYQLGDLLLHLEKKHGEDWGKVYDEAWERIDKKVEGLSKHIKLEEERRSEDAQSKAALTDWLRAKASFVIEGLKEADKDEFCRCELKLQKWYGDLRGKPFAIEAENSILDISGFSKQYNCAFIWQKDGVKKLNLYLIINYFKGGKLRFKKIKPEAFEANRFYTVINKKSGEIVPMEVNFNFDDPNLIILPLAFGKRQGREFIWNDLLSLETGSLKLANGRVIEKTLYNRRTRQDEPALFVALTFERREVLDSSNIKPMNLIGVDRGENIPAVIALTDPEGCPLSRFKDSLGNPTHILRIGESYKEKQRTIQAKKEVEQRRAGGYSRKYASKAKNLADDMVRNTARDLLYYAVTQDAMLIFENLSRGFGRQGKRTFMAERQYTRMEDWLTAKLAYEGLASKTYLSKTLAQYTSKTCSNCGFTITSADYDRVLEKLKKTATGWMTTINGKELKVEGQITYYNRYKRQNVVKDLSVELDRLSEESVNNDISSWTKGRSGEALSLLKKRFSHRPVQEKFVCLNCGFETHADEQAALNIARSWLFLRSQEYKKYQTNKTTGNTDKRAFVETWQSFYRKKLKEVWKPAV

SEQ ID NO: 31407 - protein, 978 aa, synthetic construct
  REGION 1..978: note = engineered CasX variant
QEGKRINKIRRRLVKDSNTKKAGKTGPMKTLLVRVMTPDLRERLENLRKKPENIPQPISNTSRANLNKLLTDYTEMKKAILHVYWEEFQKDPVGLMSRVAQPASKKIDQNKLKPEMDEKGNLTTAGFACSQCGQPLFVYKLEQVSEKGKAYTNYFGRCNVAEHEKLILLAQLKPEKDSDEAVTYSLGKFGQRALDFYSIHVTKESTHPVKPLAQIAGNRYASYPVGKALSDACMGTIASFLSKYQDIIIEHQKVVKGNQKRLESLRELAGKENLEYPSVTLPPQPHTKEGVDAYNEVIARVRMWVNLNLWQKLKLSRDDAKPLLRLKGFPSFPLVERQANEVDWWDMVCNVKKLINEKKEDGKVFWQNLAGYKRQEALRPYLSSEEDRKKGKKFARYQLGDLLLHLEKKHGEDWGKVYDEAWERIDKKVEGLSKHIKLEEERRSEDAQSKAALTDWLRAKASFVIEGLKEADKDEFCRCELKLQKWYGDLRGKPFAIEAENSILDISGFSKQYNCAFIWQKDGVKKLNLYLIINYFKGGKLRFKKIKPEAFEANRFYTVINKKSGEIVPMEVNFNFDDPNLIILPLAFGKRQGREFIWNDLLSLETGSLKLANGRVIEKTLYNRRTRQDEPALFVALTFERREVLDSSNIKPMNLIGVDRGENIPAVIALTDPEGCPLSRFKDSLGNPTHILRIGESYKEKQRTIQAKKEVEQRRAGGYSRKYASKAKNLADDMVRNTARDLLYYAVTQDAMLIFENLSRGFGRQGKRTFMAERQYTRMEDWLTAKLAYEGLPSKVYLSKTLAQYTSKTCSNCGFTITSADYDRVLEKLKKTATGWMTTINGKELKVEGQITYYNRYKRQNVVKDLSVELDRLSEESVNNDISSWTKGRSGEALSLLKKRFSHRPVQEKFVCLNCGFETHADEQAALNIARSWLFLRSQEYKKYQTNKTTGNTDKRAFVETWQSFYRKKLKEVWKPAV

SEQ ID NO: 31408 - protein, 978 aa, synthetic construct
  REGION 1..978: note = engineered CasX variant
QEGKRINKIRRRLVKDSNTKKAGKTGPMKTLLVRVMTPDLRERLENLRKKPENIPQPISNTSRANLNKLLTDYTEMKKAILHVYWEEFQKDPVGLMSRVAQPASKKIDQNKLKPEMDEKGNLTTAGFACSQCGQPLFVYKLEQVSEKGKAYTNYFGRCNVAEHEKLILLAQLKPEKDSDEAVTYSLGKFGQRALDFYSIHVTKESTHPVKPLAQIAGNRYASHPVGKALSDACMGTIASFLSKYQDIIIEHQKVVKGNQKRLESLRELAGKENLEYPSVTLPPQPHTKEGVDAYNEVIARVRMWVNLNLWQKLKLSRDDAKPLLRLKGFPSFPLVERQANEVDWWDMVCNVKKLINEKKEDGKVFWQNLAGYKRQEALRPYLSSEEDRKKGKKFARYQLGDLLLHLEKKHGEDWGKVYDEAWERIDKKVEGLSKHIKLEEERRSEDAQSKAALTDWLRAKASFVIEGLKEADKDEFCRCELKLQKWYGDLRGKPFAIEAENSILDISGFSKQYNCAFIWQKDGVKKLNLYLIINYFKGGKLRFKKIKPEAFEANRFYTVINKKSGEIVPMEVNFNFDDPNLIILPLAFGKRQGREFIWNDLLSLETGSLKLANGRVIEKTLYNRRTRQDEPALFVALTFERREVLDSSNIKPMNLIGVDRGENIPAVIALTDPEGCPLSRFKDSLGNPTHILRIGESYKEKQRTIQAKKEVEQRRAGGYSRKYASKAKNLADDMVRNTARDLLYYAVTQDAMLIFENLSRGFGRQGKRTFMAERQYTRMEDWLTAKLAYEGLPSKVYLSKTLAQYTSKTCSNCGFTITSADYDRVLEKLKKTATGWMTTINGKELKVEGQITYYNRYKRQNVVKDLSVELDRLSEESVNNDISSWTKGRSGEALSLLKKRFSHRPVQEKFVCLNCGFETHADEQAALNIARSWLFLRSQEYKKYQTNKTTGNTDKRAFVETWQSFYRKKLKEVWKPAV

SEQ ID NO: 31409 - protein, 978 aa, synthetic construct
  REGION 1..978: note = engineered CasX variant
QEGKRINKIRRRLVKDSNTKKAGKTGPMKTLLVRVMTPDLRERLENLRKKPENIPQPISNTSRANLNKLLTDYTEMKKAILHVYWEEFQKDPVGLMSRVAQPASKKIDQNKLKPEMDEKGNLTTAGFACSQCGQPLFVYKLEQVSEKGKAYTNYFGRCNVAEHEKLILLAQLKPEKDSDEAVTYSLGKFGQRALDFYSIHVTKESTHPVKPLAQIAGNRYASSPVGKALSDACMGTIASFLSKYQDIIIEHQKVVKGNQKRLESLRELAGKENLEYPSVTLPPQPHTKEGVDAYNEVIARVRMWVNLNLWQKLKLSRDDAKPLLRLKGFPSFPLVERQANEVDWWDMVCNVKKLINEKKEDGKVFWQNLAGYKRQEALRPYLSSEEDRKKGKKFARYQLGDLLLHLEKKHGEDWGKVYDEAWERIDKKVEGLSKHIKLEEERRSEDAQSKAALTDWLRAKASFVIEGLKEADKDEFCRCELKLQKWYGDLRGKPFAIEAENSILDISGFSKQYNCAFIWQKDGVKKLNLYLIINYFKGGKLRFKKIKPEAFEANRFYTVINKKSGEIVPMEVNFNFDDPNLIILPLAFGKRQGREFIWNDLLSLETGSLKLANGRVIEKTLYNRRTRQDEPALFVALTFERREVLDSSNIKPMNLIGVDRGENIPAVIALTDPEGCPLSRFKDSLGNPTHILRIGESYKEKQRTIQAKKEVEQRRAGGYSRKYASKAKNLADDMVRNTARDLLYYAVTQDAMLIFENLSRGFGRQGKRTFMAERQYTRMEDWLTAKLAYEGLPSKVYLSKTLAQYTSKTCSNCGFTITSADYDRVLEKLKKTATGWMTTINGKELKVEGQITYYNRYKRQNVVKDLSVELDRLSEESVNNDISSWTKGRSGEALSLLKKRFSHRPVQEKFVCLNCGFETHADEQAALNIARSWLFLRSQEYKKYQTNKTTGNTDKRAFVETWQSFYRKKLKEVWKPAV

SEQ ID NO: 31410 - protein, 978 aa, synthetic construct
  REGION 1..978: note = engineered CasX variant
QEGKRINKIRRRLVKDSNTKKAGKTGPMKTLLVRVMTPDLRERLENLRKKPENIPQPISNTSRANLNKLLTDYTEMKKAILHVYWEEFQKDPVGLMSRVAQPASKKIDQNKLKPEMDEKGNLTTAGFACSQCGQPLFVYKLEQVSEKGKAYTNYFGRCNVAEHEKLILLAQLKPEKDSDEAVTYSLGKFGQRALDFYSIHVTKESTHPVKPLAQIAGNRYASTPVGKALSDACMGTIASFLSKYQDIIIEHQKVVKGNQKRLESLRELAGKENLEYPSVTLPPQPHTKEGVDAYNEVIARVRMWVNLNLWQKLKLSRDDAKPLLRLKGFPSFPLVERQANEVDWWDMVCNVKKLINEKKEDGKVFWQNLAGYKRQEALRPYLSSEEDRKKGKKFARYQLGDLLLHLEKKHGEDWGKVYDEAWERIDKKVEGLSKHIKLEEERRSEDAQSKAALTDWLRAKASFVIEGLKEADKDEFCRCELKLQKWYGDLRGKPFAIEAENSILDISGFSKQYNCAFIWQKDGVKKLNLYLIINYFKGGKLRFKKIKPEAFEANRFYTVINKKSGEIVPMEVNFNFDDPNLIILPLAFGKRQGREFIWNDLLSLETGSLKLANGRVIEKTLYNRRTRQDEPALFVALTFERREVLDSSNIKPMNLIGVDRGENIPAVIALTDPEGCPLSRFKDSLGNPTHILRIGESYKEKQRTIQAKKEVEQRRAGGYSRKYASKAKNLADDMVRNTARDLLYYAVTQDAMLIFENLSRGFGRQGKRTFMAERQYTRMEDWLTAKLAYEGLPSKVYLSKTLAQYTSKTCSNCGFTITSADYDRVLEKLKKTATGWMTTINGKELKVEGQITYYNRYKRQNVVKDLSVELDRLSEESVNNDISSWTKGRSGEALSLLKKRFSHRPVQEKFVCLNCGFETHADEQAALNIARSWLFLRSQEYKKYQTNKTTGNTDKRAFVETWQSFYRKKLKEVWKPAV

SEQ ID NO: 31411 - protein, 978 aa, synthetic construct
  REGION 1..978: note = engineered CasX variant
QEGKRINKIRRRLVKDSNTKKAGKTGPMKTLLVRVMTPDLRERLENLRKKPENIPQPISNTSRANLNKLLTDYTEMKKAILHVYWEEFQKDPVGLMSRVAQPASKKIDQNKLKPEMDEKGNLTTAGFACSQCGQPLFVYKLEQVSEKGKAYTNYFGRCNVAEHEKLILLAQLKPEKDSDEAVTYSLGKFGQRALDFYSIHVTKESTHPVKPLAQIAGNRYASAPVGKALSDACMGTIASFLSKYQDIIIEHQKVVKGNQKRLESLRELAGKENLEYPSVTLPPQPHTKEGVDAYNEVIARVRMWVNLNLWQKLKLSRDDAKPLLRLKGFPSFPLVERQANEVDWWDMVCNVKKLINEKKEDGKVFWQNLAGYKRQEALRPYLSSEEDRKKGKKFARYQLGDLLLHLEKKHGEDWGKVYDEAWERIDKKVEGLSKHIKLEEERRSEDAQSKAALTDWLRAKASFVIEGLKEADKDEFCRCELKLQKWYGDLRGKPFAIEAENSILDISGFSKQYNCAFIWQKDGVKKLNLYLIINYFKGGKLRFKKIKPEAFEANRFYTVINKKSGEIVPMEVNFNFDDPNLIILPLAFGKRQGREFIWNDLLSLETGSLKLANGRVIEKTLYNRRTRQDEPALFVALTFERREVLDSSNIKPMNLIGVDRGENIPAVIALTDPEGCPLSRFKDSLGNPTHILRIGESYKEKQRTIQAKKEVEQRRAGGYSRKYASKAKNLADDMVRNTARDLLYYAVTQDAMLIFENLSRGFGRQGKRTFMAERQYTRMEDWLTAKLAYEGLPSKVYLSKTLAQYTSKTCSNCGFTITSADYDRVLEKLKKTATGWMTTINGKELKVEGQITYYNRYKRQNVVKDLSVELDRLSEESVNNDISSWTKGRSGEALSLLKKRFSHRPVQEKFVCLNCGFETHADEQAALNIARSWLFLRSQEYKKYQTNKTTGNTDKRAFVETWQSFYRKKLKEVWKPAV

SEQ ID NO: 31412 - protein, 978 aa, synthetic construct
  REGION 1..978: note = engineered CasX variant
QEGKRINKIRRRLVKDSNTKKAGKTGPMKTLLVRVMTPDLRERLENLRKKPENIPQPISNTSRANLNKLLTDYTEMKKAILHVYWEEFQKDPVGLMSRVAQPASKKIDQNKLKPEMDEKGNLTTAGFACSQCGQPLFVYKLEQVSEKGKAYTNYFGRCNVAEHEKLILLAQLKPEKDSDEAVTYSLGKFGQRALDFYSIHVTKESTHPVKPLAQIAGNRYASVPVGKALSDACMGTIASFLSKYQDIIIEHQKVVKGNQKRLESLRELAGKENLEYPSVTLPPQPHTKEGVDAYNEVIARVRMWVNLNLWQKLKLSRDDAKPLLRLKGFPSFPLVERQANEVDWWDMVCNVKKLINEKKEDGKVFWQNLAGYKRQEALRPYLSSEEDRKKGKKFARYQLGDLLLHLEKKHGEDWGKVYDEAWERIDKKVEGLSKHIKLEEERRSEDAQSKAALTDWLRAKASFVIEGLKEADKDEFCRCELKLQKWYGDLRGKPFAIEAENSILDISGFSKQYNCAFIWQKDGVKKLNLYLIINYFKGGKLRFKKIKPEAFEANRFYTVINKKSGEIVPMEVNFNFDDPNLIILPLAFGKRQGREFIWNDLLSLETGSLKLANGRVIEKTLYNRRTRQDEPALFVALTFERREVLDSSNIKPMNLIGVDRGENIPAVIALTDPEGCPLSRFKDSLGNPTHILRIGESYKEKQRTIQAKKEVEQRRAGGYSRKYASKAKNLADDMVRNTARDLLYYAVTQDAMLIFENLSRGFGRQGKRTFMAERQYTRMEDWLTAKLAYEGLPSKVYLSKTLAQYTSKTCSNCGFTITSADYDRVLEKLKKTATGWMTTINGKELKVEGQITYYNRYKRQNVVKDLSVELDRLSEESVNNDISSWTKGRSGEALSLLKKRFSHRPVQEKFVCLNCGFETHADEQAALNIARSWLFLRSQEYKKYQTNKTTGNTDKRAFVETWQSFYRKKLKEVWKPAV

SEQ ID NO: 31413 - protein, 978 aa, synthetic construct
  REGION 1..978: note = engineered CasX variant
QEGKRINKIRRRLVKDSNTKKAGKTGPMKTLLVRVMTPDLRERLENLRKKPENIPQPISNTSRANLNKLLTDYTEMKKAILHVYWEEFQKDPVGLMSRVAQPASKKIDQNKLKPEMDEKGNLTTAGFACSQCGQPLFVYKLEQVSEKGKAYTNYFGRCNVAEHEKLIKLAQLKPEKDSDEAVTYSLGKFGQRALDFYSIHVTKESTHPVKPLAQIAGNRYASGPVGKALSDACMGTIASFLSKYQDIIIEHQKVVKGNQKRLESLRELAGKENLEYPSVTLPPQPHTKEGVDAYNEVIARVRMWVNLNLWQKLKLSRDDAKPLLRLKGFPSFPLVERQANEVDWWDMVCNVKKLINEKKEDGKVFWQNLAGYKRQEALRPYLSSEEDRKKGKKFARYQLGDLLLHLEKKHGEDWGKVYDEAWERIDKKVEGLSKHIKLEEERRSEDAQSKAALTDWLRAKASFVIEGLKEADKDEFCRCELKLQKWYGDLRGKPFAIEAENSILDISGFSKQYNCAFIWQKDGVKKLNLYLIINYFKGGKLRFKKIKPEAFEANRFYTVINKKSGEIVPMEVNFNFDDPNLIILPLAFGKRQGREFIWNDLLSLETGSLKLANGRVIEKTLYNRRTRQDEPALFVALTFERREVLDSSNIKPMNLIGVDRGENIPAVIALTDPEGCPLSRFKDSLGNPTHILRIGESYKEKQRTIQAKKEVEQRRAGGYSRKYASKAKNLADDMVRNTARDLLYYAVTQDAMLIFENLSRGFGRQGKRTFMAERQYTRMEDWLTAKLAYEGLPSKVYLSKTLAQYTSKTCSNCGFTITSADYDRVLEKLKKTATGWMTTINGKELKVEGQITYYNRYKRQNVVKDLSVELDRLSEESVNNDISSWTKGRSGEALSLLKKRFSHRPVQEKFVCLNCGFETHADEQAALNIARSWLFLRSQEYKKYQTNKTTGNTDKRAFVETWQSFYRKKLKEVWKPAV

SEQ ID NO: 31414 - protein, 977 aa, synthetic construct
  REGION 1..977: note = engineered CasX variant
QEGKRINKIRRRLVKDSNTKKAGKTGPMKTLLVRVMTPDLRERLENLRKKPENIPQPISNTSRANLNKLLTDYTEMKKAILHVYWEEFQKDPVGLMSRVAQPASKKIDQNKLKPEMDEKGNLTTAGFACSQCGQPLFVYKLEQVSEKGKAYTNYFGRCNVAEHEKLILLAQLKPEKDSDEAVTYSLGKFGQRALDFYSIHVTKESTHPVKPLAQIAGNRYASPVGKALSDACMGTIASFLSKYQDIIIEHQKVVKGNQKRLESLRELAGKENLEYPSVTLPPQPHTKEGVDAYNEVIARVRMWVNLNLWQKLKLSRDDAKPLLRLKGFPSFPLVERQANEVDWWDMVCNVKKLINEKKEDGKVFWQNLAGYKRQEALRPYLSSEEDRKKGKKFARYQLGDLLLHLEKKHGEDWGKVYDEAWERIDKKVEGLSKHIKLEEERRSEDAQSKAALTDWLRAKASFVIEGLKEADKDEFCRCELKLQKWYGDLRGKPFAIEAENSILDISGFSKQYNCAFIWQKDGVKKLNLYLIINYFKGGKLRFKKIKPEAFEANRFYTVINKKSGEIVPMEVNFNFDDPNLIILPLAFGKRQGREFIWNDLLSLETGSLKLANGRVIEKTLYNRRTRQDEPALFVALTFERREVLDSSNIKPMNLIGVDRGENIPAVIALTDPEGCPLSRFKDSLGNPTHILRIGESYKEKQRTIQAKKEVEQRRAGGYSRKYASKAKNLADDMVRNTARDLLYYAVTQDAMLIFENLSRGFGRQGKRTFMAERQYTRMEDWLTAKLAYEGLPSKVYLSKTLAQYTSKTCSNCGFTITSADYDRVLEKLKKTATGWMTTINGKELKVEGQITYYNRYKRQNVVKDLSVELDRLSEESVNNDISSWTKGRSGEALSLLKKRFSHRPVQEKFVCLNCGFETHADEQAALNIARSWLFLRSQEYKKYQTNKTTGNTDKRAFVETWQSFYRKKLKEVWKPAV

SEQ ID NO: 31415 - protein, 979 aa, synthetic construct
  REGION 1..979: note = engineered CasX variant
QEGKRINKIRRRLVKDSNTKKAGKTGPMKTLLVRVMTPDLRERLENLRKKPENIPQPISNTSRANLNKLLTDYTEMKKAILHVYWEEFQKDPVGLMSRVAQPASKKIDQNKLKPEMDEKGNLTTAGFACSQCGQPLFVYKLEQVSEKGKAYTNYFGRCNVAEHEKLILLAQLKPEKDSDEAVTYSLGKFGQRALDFYSIHVTKESTHPVKPLAQIAGNRYASYPVGKALSDACMGTIASFLSKYQDIIIEHQKVVKGNQKRLESLRELAGKENLEYPSVTLPPQPHTKEGVDAYNEVIARVRMWVNLNLWQKLKLSRDDAKPLLRLKGFPSFPLVERQANEVDWWDMVCNVKKLINEKKEDGKVFWQNLAGYKRQEALRPYLSSEEDRKKGKKFARYQLGDLLLHLEKKHGEDWGKVYDEAWERIDKKVEGLSKHIKLEEERRSEDAQSKAALTDWLRAKASFVIEGLKEADKDEFCRCELKLQKWYGDLRGKPFAIEAENSILDISGFSKQYNCAFIWQKDGVKKLNLYLIINYFKGGKLRFKKIKPEAFEANRFYTVINKKSGEIVPMEVNFNFDDPNLIILPLAFGKRQGREFIWNDLLSLETGSLKLANGRVIEKTLYNRRTRQDEPALFVALTFERREVLDSSNIKPMNLIGVDRGENIPAVIALTDPEGCPLSRFKDSLGNPTHILRIGESYKEKQRTIQAKKEVEQRRAGGYSRKYASKAKNLADDMVRNTARDLLYYAVTQDAMLIFENLSRGFGRQGKRTFMAERQYTRMEDWLTAKLAYEGPLPSKTYLSKTLAQYTSKTCSNCGFTITSADYDRVLEKLKKTATGWMTTINGKELKVEGQITYYNRYKRQNVVKDLSVELDRLSEESVNNDISSWTKGRSGEALSLLKKRFSHRPVQEKFVCLNCGFETHADEQAALNIARSWLFLRSQEYKKYQTNKTTGNTDKRAFVETWQSFYRKKLKEVWKPAV

SEQ ID NO: 31416 - protein, 979 aa, synthetic construct
  REGION 1..979: note = engineered CasX variant
QEGKRINKIRRRLVKDSNTKKAGKTGPMKTLLVRVMTPDLRERLENLRKKPENIPQPISNTSRANLNKLLTDYTEMKKAILHVYWEEFQKDPVGLMSRVAQPASKKIDQNKLKPEMDEKGNLTTAGFACSQCGQPLFVYKLEQVSEKGKAYTNYFGRCNVAEHEKLILLAQLKPEKDSDEAVTYSLGKFGQRALDFYSIHVTKESTHPVKPLAQIAGNRYASHPVGKALSDACMGTIASFLSKYQDIIIEHQKVVKGNQKRLESLRELAGKENLEYPSVTLPPQPHTKEGVDAYNEVIARVRMWVNLNLWQKLKLSRDDAKPLLRLKGFPSFPLVERQANEVDWWDMVCNVKKLINEKKEDGKVFWQNLAGYKRQEALRPYLSSEEDRKKGKKFARYQLGDLLLHLEKKHGEDWGKVYDEAWERIDKKVEGLSKHIKLEEERRSEDAQSKAALTDWLRAKASFVIEGLKEADKDEFCRCELKLQKWYGDLRGKPFAIEAENSILDISGFSKQYNCAFIWQKDGVKKLNLYLIINYFKGGKLRFKKIKPEAFEANRFYTVINKKSGEIVPMEVNFNFDDPNLIILPLAFGKRQGREFIWNDLLSLETGSLKLANGRVIEKTLYNRRTRQDEPALFVALTFERREVLDSSNIKPMNLIGVDRGENIPAVIALTDPEGCPLSRFKDSLGNPTHILRIGESYKEKQRTIQAKKEVEQRRAGGYSRKYASKAKNLADDMVRNTARDLLYYAVTQDAMLIFENLSRGFGRQGKRTFMAERQYTRMEDWLTAKLAYEGPLPSKTYLSKTLAQYTSKTCSNCGFTITSADYDRVLEKLKKTATGWMTTINGKELKVEGQITYYNRYKRQNVVKDLSVELDRLSEESVNNDISSWTKGRSGEALSLLKKRFSHRPVQEKFVCLNCGFETHADEQAALNIARSWLFLRSQEYKKYQTNKTTGNTDKRAFVETWQSFYRKKLKEVWKPAV

SEQ ID NO: 31417 - protein, 979 aa, synthetic construct
  REGION 1..979: note = engineered CasX variant
QEGKRINKIRRRLVKDSNTKKAGKTGPMKTLLVRVMTPDLRERLENLRKKPENIPQPISNTSRANLNKLLTDYTEMKKAILHVYWEEFQKDPVGLMSRVAQPASKKIDQNKLKPEMDEKGNLTTAGFACSQCGQPLFVYKLEQVSEKGKAYTNYFGRCNVAEHEKLILLAQLKPEKDSDEAVTYSLGKFGQRALDFYSIHVTKESTHPVKPLAQIAGNRYASSPVGKALSDACMGTIASFLSKYQDIIIEHQKVVKGNQKRLESLRELAGKENLEYPSVTLPPQPHTKEGVDAYNEVIARVRMWVNLNLWQKLKLSRDDAKPLLRLKGFPSFPLVERQANEVDWWDMVCNVKKLINEKKEDGKVFWQNLAGYKRQEALRPYLSSEEDRKKGKKFARYQLGDLLLHLEKKHGEDWGKVYDEAWERIDKKVEGLSKHIKLEEERRSEDAQSKAALTDWLRAKASFVIEGLKEADKDEFCRCELKLQKWYGDLRGKPFAIEAENSILDISGFSKQYNCAFIWQKDGVKKLNLYLIINYFKGGKLRFKKIKPEAFEANRFYTVINKKSGEIVPMEVNFNFDDPNLIILPLAFGKRQGREFIWNDLLSLETGSLKLANGRVIEKTLYNRRTRQDEPALFVALTFERREVLDSSNIKPMNLIGVDRGENIPAVIALTDPEGCPLSRFKDSLGNPTHILRIGESYKEKQRTIQAKKEVEQRRAGGYSRKYASKAKNLADDMVRNTARDLLYYAVTQDAMLIFENLSRGFGRQGKRTFMAERQYTRMEDWLTAKLAYEGPLPSKTYLSKTLAQYTSKTCSNCGFTITSADYDRVLEKLKKTATGWMTTINGKELKVEGQITYYNRYKRQNVVKDLSVELDRLSEESVNNDISSWTKGRSGEALSLLKKRFSHRPVQEKFVCLNCGFETHADEQAALNIARSWLFLRSQEYKKYQTNKTTGNTDKRAFVETWQSFYRKKLKEVWKPAV

SEQ ID NO: 31418 - protein, 979 aa, synthetic construct
  REGION 1..979: note = engineered CasX variant
QEGKRINKIRRRLVKDSNTKKAGKTGPMKTLLVRVMTPDLRERLENLRKKPENIPQPISNTSRANLNKLLTDYTEMKKAILHVYWEEFQKDPVGLMSRVAQPASKKIDQNKLKPEMDEKGNLTTAGFACSQCGQPLFVYKLEQVSEKGKAYTNYFGRCNVAEHEKLILLAQLKPEKDSDEAVTYSLGKFGQRALDFYSIHVTKESTHPVKPLAQIAGNRYASTPVGKALSDACMGTIASFLSKYQDIIIEHQKVVKGNQKRLESLRELAGKENLEYPSVTLPPQPHTKEGVDAYNEVIARVRMWVNLNLWQKLKLSRDDAKPLLRLKGFPSFPLVERQANEVDWWDMVCNVKKLINEKKEDGKVFWQNLAGYKRQEALRPYLSSEEDRKKGKKFARYQLGDLLLHLEKKHGEDWGKVYDEAWERIDKKVEGLSKHIKLEEERRSEDAQSKAALTDWLRAKASFVIEGLKEADKDEFCRCELKLQKWYGDLRGKPFAIEAENSILDISGFSKQYNCAFIWQKDGVKKLNLYLIINYFKGGKLRFKKIKPEAFEANRFYTVINKKSGEIVPMEVNFNFDDPNLIILPLAFGKRQGREFIWNDLLSLETGSLKLANGRVIEKTLYNRRTRQDEPALFVALTFERREVLDSSNIKPMNLIGVDRGENIPAVIALTDPEGCPLSRFKDSLGNPTHILRIGESYKEKQRTIQAKKEVEQRRAGGYSRKYASKAKNLADDMVRNTARDLLYYAVTQDAMLIFENLSRGFGRQGKRTFMAERQYTRMEDWLTAKLAYEGPLPSKTYLSKTLAQYTSKTCSNCGFTITSADYDRVLEKLKKTATGWMTTINGKELKVEGQITYYNRYKRQNVVKDLSVELDRLSEESVNNDISSWTKGRSGEALSLLKKRFSHRPVQEKFVCLNCGFETHADEQAALNIARSWLFLRSQEYKKYQTNKTTGNTDKRAFVETWQSFYRKKLKEVWKPAV

SEQ ID NO: 31419 - protein, 979 aa, synthetic construct
  REGION 1..979: note = engineered CasX variant
QEGKRINKIRRRLVKDSNTKKAGKTGPMKTLLVRVMTPDLRERLENLRKKPENIPQPISNTSRANLNKLLTDYTEMKKAILHVYWEEFQKDPVGLMSRVAQPASKKIDQNKLKPEMDEKGNLTTAGFACSQCGQPLFVYKLEQVSEKGKAYTNYFGRCNVAEHEKLILLAQLKPEKDSDEAVTYSLGKFGQRALDFYSIHVTKESTHPVKPLAQIAGNRYASAPVGKALSDACMGTIASFLSKYQDIIIEHQKVVKGNQKRLESLRELAGKENLEYPSVTLPPQPHTKEGVDAYNEVIARVRMWVNLNLWQKLKLSRDDAKPLLRLKGFPSFPLVERQANEVDWWDMVCNVKKLINEKKEDGKVFWQNLAGYKRQEALRPYLSSEEDRKKGKKFARYQLGDLLLHLEKKHGEDWGKVYDEAWERIDKKVEGLSKHIKLEEERRSEDAQSKAALTDWLRAKASFVIEGLKEADKDEFCRCELKLQKWYGDLRGKPFAIEAENSILDISGFSKQYNCAFIWQKDGVKKLNLYLIINYFKGGKLRFKKIKPEAFEANRFYTVINKKSGEIVPMEVNFNFDDPNLIILPLAFGKRQGREFIWNDLLSLETGSLKLANGRVIEKTLYNRRTRQDEPALFVALTFERREVLDSSNIKPMNLIGVDRGENIPAVIALTDPEGCPLSRFKDSLGNPTHILRIGESYKEKQRTIQAKKEVEQRRAGGYSRKYASKAKNLADDMVRNTARDLLYYAVTQDAMLIFENLSRGFGRQGKRTFMAERQYTRMEDWLTAKLAYEGPLPSKTYLSKTLAQYTSKTCSNCGFTITSADYDRVLEKLKKTATGWMTTINGKELKVEGQITYYNRYKRQNVVKDLSVELDRLSEESVNNDISSWTKGRSGEALSLLKKRFSHRPVQEKFVCLNCGFETHADEQAALNIARSWLFLRSQEYKKYQTNKTTGNTDKRAFVETWQSFYRKKLKEVWKPAV

SEQ ID NO: 31420 - protein, 979 aa, synthetic construct
  REGION 1..979: note = engineered CasX variant
QEGKRINKIRRRLVKDSNTKKAGKTGPMKTLLVRVMTPDLRERLENLRKKPENIPQPISNTSRANLNKLLTDYTEMKKAILHVYWEEFQKDPVGLMSRVAQPASKKIDQNKLKPEMDEKGNLTTAGFACSQCGQPLFVYKLEQVSEKGKAYTNYFGRCNVAEHEKLILLAQLKPEKDSDEAVTYSLGKFGQRALDFYSIHVTKESTHPVKPLAQIAGNRYASVPVGKALSDACMGTIASFLSKYQDIIIEHQKVVKGNQKRLESLRELAGKENLEYPSVTLPPQPHTKEGVDAYNEVIARVRMWVNLNLWQKLKLSRDDAKPLLRLKGFPSFPLVERQANEVDWWDMVCNVKKLINEKKEDGKVFWQNLAGYKRQEALRPYLSSEEDRKKGKKFARYQLGDLLLHLEKKHGEDWGKVYDEAWERIDKKVEGLSKHIKLEEERRSEDAQSKAALTDWLRAKASFVIEGLKEADKDEFCRCELKLQKWYGDLRGKPFAIEAENSILDISGFSKQYNCAFIWQKDGVKKLNLYLIINYFKGGKLRFKKIKPEAFEANRFYTVINKKSGEIVPMEVNFNFDDPNLIILPLAFGKRQGREFIWNDLLSLETGSLKLANGRVIEKTLYNRRTRQDEPALFVALTFERREVLDSSNIKPMNLIGVDRGENIPAVIALTDPEGCPLSRFKDSLGNPTHILRIGESYKEKQRTIQAKKEVEQRRAGGYSRKYASKAKNLADDMVRNTARDLLYYAVTQDAMLIFENLSRGFGRQGKRTFMAERQYTRMEDWLTAKLAYEGPLPSKTYLSKTLAQYTSKTCSNCGFTITSADYDRVLEKLKKTATGWMTTINGKELKVEGQITYYNRYKRQNVVKDLSVELDRLSEESVNNDISSWTKGRSGEALSLLKKRFSHRPVQEKFVCLNCGFETHADEQAALNIARSWLFLRSQEYKKYQTNKTTGNTDKRAFVETWQSFYRKKLKEVWKPAV

SEQ ID NO: 31421 - protein, 979 aa, synthetic construct
  REGION 1..979: note = engineered CasX variant
QEGKRINKIRRRLVKDSNTKKAGKTGPMKTLLVRVMTPDLRERLENLRKKPENIPQPISNTSRANLNKLLTDYTEMKKAILHVYWEEFQKDPVGLMSRVAQPASKKIDQNKLKPEMDEKGNLTTAGFACSQCGQPLFVYKLEQVSEKGKAYTNYFGRCNVAEHEKLIKLAQLKPEKDSDEAVTYSLGKFGQRALDFYSIHVTKESTHPVKPLAQIAGNRYASGPVGKALSDACMGTIASFLSKYQDIIIEHQKVVKGNQKRLESLRELAGKENLEYPSVTLPPQPHTKEGVDAYNEVIARVRMWVNLNLWQKLKLSRDDAKPLLRLKGFPSFPLVERQANEVDWWDMVCNVKKLINEKKEDGKVFWQNLAGYKRQEALRPYLSSEEDRKKGKKFARYQLGDLLLHLEKKHGEDWGKVYDEAWERIDKKVEGLSKHIKLEEERRSEDAQSKAALTDWLRAKASFVIEGLKEADKDEFCRCELKLQKWYGDLRGKPFAIEAENSILDISGFSKQYNCAFIWQKDGVKKLNLYLIINYFKGGKLRFKKIKPEAFEANRFYTVINKKSGEIVPMEVNFNFDDPNLIILPLAFGKRQGREFIWNDLLSLETGSLKLANGRVIEKTLYNRRTRQDEPALFVALTFERREVLDSSNIKPMNLIGVDRGENIPAVIALTDPEGCPLSRFKDSLGNPTHILRIGESYKEKQRTIQAKKEVEQRRAGGYSRKYASKAKNLADDMVRNTARDLLYYAVTQDAMLIFENLSRGFGRQGKRTFMAERQYTRMEDWLTAKLAYEGPLPSKTYLSKTLAQYTSKTCSNCGFTITSADYDRVLEKLKKTATGWMTTINGKELKVEGQITYYNRYKRQNVVKDLSVELDRLSEESVNNDISSWTKGRSGEALSLLKKRFSHRPVQEKFVCLNCGFETHADEQAALNIARSWLFLRSQEYKKYQTNKTTGNTDKRAFVETWQSFYRKKLKEVWKPAV

SEQ ID NO: 31422 - protein, 978 aa, synthetic construct
  REGION 1..978: note = engineered CasX variant
QEGKRINKIRRRLVKDSNTKKAGKTGPMKTLLVRVMTPDLRERLENLRKKPENIPQPISNTSRANLNKLLTDYTEMKKAILHVYWEEFQKDPVGLMSRVAQPASKKIDQNKLKPEMDEKGNLTTAGFACSQCGQPLFVYKLEQVSEKGKAYTNYFGRCNVAEHEKLILLAQLKPEKDSDEAVTYSLGKFGQRALDFYSIHVTKESTHPVKPLAQIAGNRYASPVGKALSDACMGTIASFLSKYQDIIIEHQKVVKGNQKRLESLRELAGKENLEYPSVTLPPQPHTKEGVDAYNEVIARVRMWVNLNLWQKLKLSRDDAKPLLRLKGFPSFPLVERQANEVDWWDMVCNVKKLINEKKEDGKVFWQNLAGYKRQEALRPYLSSEEDRKKGKKFARYQLGDLLLHLEKKHGEDWGKVYDEAWERIDKKVEGLSKHIKLEEERRSEDAQSKAALTDWLRAKASFVIEGLKEADKDEFCRCELKLQKWYGDLRGKPFAIEAENSILDISGFSKQYNCAFIWQKDGVKKLNLYLIINYFKGGKLRFKKIKPEAFEANRFYTVINKKSGEIVPMEVNFNFDDPNLIILPLAFGKRQGREFIWNDLLSLETGSLKLANGRVIEKTLYNRRTRQDEPALFVALTFERREVLDSSNIKPMNLIGVDRGENIPAVIALTDPEGCPLSRFKDSLGNPTHILRIGESYKEKQRTIQAKKEVEQRRAGGYSRKYASKAKNLADDMVRNTARDLLYYAVTQDAMLIFENLSRGFGRQGKRTFMAERQYTRMEDWLTAKLAYEGPLPSKTYLSKTLAQYTSKTCSNCGFTITSADYDRVLEKLKKTATGWMTTINGKELKVEGQITYYNRYKRQNVVKDLSVELDRLSEESVNNDISSWTKGRSGEALSLLKKRFSHRPVQEKFVCLNCGFETHADEQAALNIARSWLFLRSQEYKKYQTNKTTGNTDKRAFVETWQSFYRKKLKEVWKPAV

SEQ ID NO: 31423 - protein, 979 aa, synthetic construct
  REGION 1..979: note = engineered CasX variant
QEGKRINKIRRRLVKDSNTKKAGKTGPMKTLLVRVMTPDLRERLENLRKKPENIPQPISNTSRANLNKLLTDYTEMKKAILHVYWEEFQKDPVGLMSRVAQPASKKIDQNKLKPEMDEKGNLTTAGFACSQCGQPLFVYKLEQVSEKGKAYTNYFGRCNVAEHEKLILLAQLKPEKDSDEAVTYSLGKFGQRALDFYSIHVTKESTHPVKPLAQIAGNRYASYPVGKALSDACMGTIASFLSKYQDIIIEHQKVVKGNQKRLESLRELAGKENLEYPSVTLPPQPHTKEGVDAYNEVIARVRMWVNLNLWQKLKLSRDDAKPLLRLKGFPSFPLVERQANEVDWWDMVCNVKKLINEKKEDGKVFWQNLAGYKRQEALRPYLSSEEDVRKKGKKFARYQLGDLLLHLEKKHGEDWGKVYDEAWERIDKKVEGLSKHIKLEEERRSEDAQSKAALTDWLRAKASFVIEGLKEADKDEFCRCELKLQKWYGDLRGKPFAIEAENSILDISGFSKQYNCAFIWQKDGVKKLNLYLIINYFKGGKLRFKKIKPEAFEANRFYTVINKKSGEIVPMEVNFNFDDPNLIILPLAFGKRQGREFIWNDLLSLETGSLKLANGRVIEKTLYNRRTRQDEPALFVALTFERREVLDSSNIKPMNLIGVDRGENIPAVIALTDPEGCPLSRFKDSLGNPTHILRIGESYKEKQRTIQAKKEVEQRRAGGYSRKYASKAKNLADDMVRNTARDLLYYAVTQDAMLIFENLSRGFGRQGKRTFMAERQYTRMEDWLTAKLAYEGLPSKTYLSKTLAQYTSKTCSNCGFTITSADYDRVLEKLKKTATGWMTTINGKELKVEGQITYYNRYKRQNVVKDLSVELDRLSEESVNNDISSWTKGRSGEALSLLKKRFSHRPVQEKFVCLNCGFETHADEQAALNIARSWLFLRSQEYKKYQTNKTTGNTDKRAFVETWQSFYRKKLKEVWKPAV

SEQ ID NO: 31424 - protein, 979 aa, synthetic construct
  REGION 1..979: note = engineered CasX variant
QEGKRINKIRRRLVKDSNTKKAGKTGPMKTLLVRVMTPDLRERLENLRKKPENIPQPISNTSRANLNKLLTDYTEMKKAILHVYWEEFQKDPVGLMSRVAQPASKKIDQNKLKPEMDEKGNLTTAGFACSQCGQPLFVYKLEQVSEKGKAYTNYFGRCNVAEHEKLILLAQLKPEKDSDEAVTYSLGKFGQRALDFYSIHVTKESTHPVKPLAQIAGNRYASHPVGKALSDACMGTIASFLSKYQDIIIEHQKVVKGNQKRLESLRELAGKENLEYPSVTLPPQPHTKEGVDAYNEVIARVRMWVNLNLWQKLKLSRDDAKPLLRLKGFPSFPLVERQANEVDWWDMVCNVKKLINEKKEDGKVFWQNLAGYKRQEALRPYLSSEEDVRKKGKKFARYQLGDLLLHLEKKHGEDWGKVYDEAWERIDKKVEGLSKHIKLEEERRSEDAQSKAALTDWLRAKASFVIEGLKEADKDEFCRCELKLQKWYGDLRGKPFAIEAENSILDISGFSKQYNCAFIWQKDGVKKLNLYLIINYFKGGKLRFKKIKPEAFEANRFYTVINKKSGEIVPMEVNFNFDDPNLIILPLAFGKRQGREFIWNDLLSLETGSLKLANGRVIEKTLYNRRTRQDEPALFVALTFERREVLDSSNIKPMNLIGVDRGENIPAVIALTDPEGCPLSRFKDSLGNPTHILRIGESYKEKQRTIQAKKEVEQRRAGGYSRKYASKAKNLADDMVRNTARDLLYYAVTQDAMLIFENLSRGFGRQGKRTFMAERQYTRMEDWLTAKLAYEGLPSKTYLSKTLAQYTSKTCSNCGFTITSADYDRVLEKLKKTATGWMTTINGKELKVEGQITYYNRYKRQNVVKDLSVELDRLSEESVNNDISSWTKGRSGEALSLLKKRFSHRPVQEKFVCLNCGFETHADEQAALNIARSWLFLRSQEYKKYQTNKTTGNTDKRAFVETWQSFYRKKLKEVWKPAV

SEQ ID NO: 31425 - protein, 979 aa, synthetic construct
  REGION 1..979: note = engineered CasX variant
QEGKRINKIRRRLVKDSNTKKAGKTGPMKTLLVRVMTPDLRERLENLRKKPENIPQPISNTSRANLNKLLTDYTEMKKAILHVYWEEFQKDPVGLMSRVAQPASKKIDQNKLKPEMDEKGNLTTAGFACSQCGQPLFVYKLEQVSEKGKAYTNYFGRCNVAEHEKLILLAQLKPEKDSDEAVTYSLGKFGQRALDFYSIHVTKESTHPVKPLAQIAGNRYASSPVGKALSDACMGTIASFLSKYQDIIIEHQKVVKGNQKRLESLRELAGKENLEYPSVTLPPQPHTKEGVDAYNEVIARVRMWVNLNLWQKLKLSRDDAKPLLRLKGFPSFPLVERQANEVDWWDMVCNVKKLINEKKEDGKVFWQNLAGYKRQEALRPYLSSEEDVRKKGKKFARYQLGDLLLHLEKKHGEDWGKVYDEAWERIDKKVEGLSKHIKLEEERRSEDAQSKAALTDWLRAKASFVIEGLKEADKDEFCRCELKLQKWYGDLRGKPFAIEAENSILDISGFSKQYNCAFIWQKDGVKKLNLYLIINYFKGGKLRFKKIKPEAFEANRFYTVINKKSGEIVPMEVNFNFDDPNLIILPLAFGKRQGREFIWNDLLSLETGSLKLANGRVIEKTLYNRRTRQDEPALFVALTFERREVLDSSNIKPMNLIGVDRGENIPAVIALTDPEGCPLSRFKDSLGNPTHILRIGESYKEKQRTIQAKKEVEQRRAGGYSRKYASKAKNLADDMVRNTARDLLYYAVTQDAMLIFENLSRGFGRQGKRTFMAERQYTRMEDWLTAKLAYEGLPSKTYLSKTLAQYTSKTCSNCGFTITSADYDRVLEKLKKTATGWMTTINGKELKVEGQITYYNRYKRQNVVKDLSVELDRLSEESVNNDISSWTKGRSGEALSLLKKRFSHRPVQEKFVCLNCGFETHADEQAALNIARSWLFLRSQEYKKYQTNKTTGNTDKRAFVETWQSFYRKKLKEVWKPAV

SEQ ID NO: 31426 - protein, 979 aa, synthetic construct
  REGION 1..979: note = engineered CasX variant
QEGKRINKIRRRLVKDSNTKKAGKTGPMKTLLVRVMTPDLRERLENLRKKPENIPQPISNTSRANLNKLLTDYTEMKKAILHVYWEEFQKDPVGLMSRVAQPASKKIDQNKLKPEMDEKGNLTTAGFACSQCGQPLFVYKLEQVSEKGKAYTNYFGRCNVAEHEKLILLAQLKPEKDSDEAVTYSLGKFGQRALDFYSIHVTKESTHPVKPLAQIAGNRYASTPVGKALSDACMGTIASFLSKYQDIIIEHQKVVKGNQKRLESLRELAGKENLEYPSVTLPPQPHTKEGVDAYNEVIARVRMWVNLNLWQKLKLSRDDAKPLLRLKGFPSFPLVERQANEVDWWDMVCNVKKLINEKKEDGKVFWQNLAGYKRQEALRPYLSSEEDVRKKGKKFARYQLGDLLLHLEKKHGEDWGKVYDEAWERIDKKVEGLSKHIKLEEERRSEDAQSKAALTDWLRAKASFVIEGLKEADKDEFCRCELKLQKWYGDLRGKPFAIEAENSILDISGFSKQYNCAFIWQKDGVKKLNLYLIINYFKGGKLRFKKIKPEAFEANRFYTVINKKSGEIVPMEVNFNFDDPNLIILPLAFGKRQGREFIWNDLLSLETGSLKLANGRVIEKTLYNRRTRQDEPALFVALTFERREVLDSSNIKPMNLIGVDRGENIPAVIALTDPEGCPLSRFKDSLGNPTHILRIGESYKEKQRTIQAKKEVEQRRAGGYSRKYASKAKNLADDMVRNTARDLLYYAVTQDAMLIFENLSRGFGRQGKRTFMAERQYTRMEDWLTAKLAYEGLPSKTYLSKTLAQYTSKTCSNCGFTITSADYDRVLEKLKKTATGWMTTINGKELKVEGQITYYNRYKRQNVVKDLSVELDRLSEESVNNDISSWTKGRSGEALSLLKKRFSHRPVQEKFVCLNCGFETHADEQAALNIARSWLFLRSQEYKKYQTNKTTGNTDKRAFVETWQSFYRKKLKEVWKPAV

SEQ ID NO: 31427 - protein, 979 aa, synthetic construct
  REGION 1..979: note = engineered CasX variant
QEGKRINKIRRRLVKDSNTKKAGKTGPMKTLLVRVMTPDLRERLENLRKKPENIPQPISNTSRANLNKLLTDYTEMKKAILHVYWEEFQKDPVGLMSRVAQPASKKIDQNKLKPEMDEKGNLTTAGFACSQCGQPLFVYKLEQVSEKGKAYTNYFGRCNVAEHEKLILLAQLKPEKDSDEAVTYSLGKFGQRALDFYSIHVTKESTHPVKPLAQIAGNRYASAPVGKALSDACMGTIASFLSKYQDIIIEHQKVVKGNQKRLESLRELAGKENLEYPSVTLPPQPHTKEGVDAYNEVIARVRMWVNLNLWQKLKLSRDDAKPLLRLKGFPSFPLVERQANEVDWWDMVCNVKKLINEKKEDGKVFWQNLAGYKRQEALRPYLSSEEDVRKKGKKFARYQLGDLLLHLEKKHGEDWGKVYDEAWERIDKKVEGLSKHIKLEEERRSEDAQSKAALTDWLRAKASFVIEGLKEADKDEFCRCELKLQKWYGDLRGKPFAIEAENSILDISGFSKQYNCAFIWQKDGVKKLNLYLIINYFKGGKLRFKKIKPEAFEANRFYTVINKKSGEIVPMEVNFNFDDPNLIILPLAFGKRQGREFIWNDLLSLETGSLKLANGRVIEKTLYNRRTRQDEPALFVALTFERREVLDSSNIKPMNLIGVDRGENIPAVIALTDPEGCPLSRFKDSLGNPTHILRIGESYKEKQRTIQAKKEVEQRRAGGYSRKYASKAKNLADDMVRNTARDLLYYAVTQDAMLIFENLSRGFGRQGKRTFMAERQYTRMEDWLTAKLAYEGLPSKTYLSKTLAQYTSKTCSNCGFTITSADYDRVLEKLKKTATGWMTTINGKELKVEGQITYYNRYKRQNVVKDLSVELDRLSEESVNNDISSWTKGRSGEALSLLKKRFSHRPVQEKFVCLNCGFETHADEQAALNIARSWLFLRSQEYKKYQTNKTTGNTDKRAFVETWQSFYRKKLKEVWKPAV

SEQ ID NO: 31428 - protein, 979 aa, synthetic construct
  REGION 1..979: note = engineered CasX variant
QEGKRINKIRRRLVKDSNTKKAGKTGPMKTLLVRVMTPDLRERLENLRKKPENIPQPISNTSRANLNKLLTDYTEMKKAILHVYWEEFQKDPVGLMSRVAQPASKKIDQNKLKPEMDEKGNLTTAGFACSQCGQPLFVYKLEQVSEKGKAYTNYFGRCNVAEHEKLILLAQLKPEKDSDEAVTYSLGKFGQRALDFYSIHVTKESTHPVKPLAQIAGNRYASVPVGKALSDACMGTIASFLSKYQDIIIEHQKVVKGNQKRLESLRELAGKENLEYPSVTLPPQPHTKEGVDAYNEVIARVRMWVNLNLWQKLKLSRDDAKPLLRLKGFPSFPLVERQANEVDWWDMVCNVKKLINEKKEDGKVFWQNLAGYKRQEALRPYLSSEEDVRKKGKKFARYQLGDLLLHLEKKHGEDWGKVYDEAWERIDKKVEGLSKHIKLEEERRSEDAQSKAALTDWLRAKASFVIEGLKEADKDEFCRCELKLQKWYGDLRGKPFAIEAENSILDISGFSKQYNCAFIWQKDGVKKLNLYLIINYFKGGKLRFKKIKPEAFEANRFYTVINKKSGEIVPMEVNFNFDDPNLIILPLAFGKRQGREFIWNDLLSLETGSLKLANGRVIEKTLYNRRTRQDEPALFVALTFERREVLDSSNIKPMNLIGVDRGENIPAVIALTDPEGCPLSRFKDSLGNPTHILRIGESYKEKQRTIQAKKEVEQRRAGGYSRKYASKAKNLADDMVRNTARDLLYYAVTQDAMLIFENLSRGFGRQGKRTFMAERQYTRMEDWLTAKLAYEGLPSKTYLSKTLAQYTSKTCSNCGFTITSADYDRVLEKLKKTATGWMTTINGKELKVEGQITYYNRYKRQNVVKDLSVELDRLSEESVNNDISSWTKGRSGEALSLLKKRFSHRPVQEKFVCLNCGFETHADEQAALNIARSWLFLRSQEYKKYQTNKTTGNTDKRAFVETWQSFYRKKLKEVWKPAV

SEQ ID NO: 31429 - protein, 979 aa, synthetic construct
  REGION 1..979: note = engineered CasX variant
QEGKRINKIRRRLVKDSNTKKAGKTGPMKTLLVRVMTPDLRERLENLRKKPENIPQPISNTSRANLNKLLTDYTEMKKAILHVYWEEFQKDPVGLMSRVAQPASKKIDQNKLKPEMDEKGNLTTAGFACSQCGQPLFVYKLEQVSEKGKAYTNYFGRCNVAEHEKLIKLAQLKPEKDSDEAVTYSLGKFGQRALDFYSIHVTKESTHPVKPLAQIAGNRYASGPVGKALSDACMGTIASFLSKYQDIIIEHQKVVKGNQKRLESLRELAGKENLEYPSVTLPPQPHTKEGVDAYNEVIARVRMWVNLNLWQKLKLSRDDAKPLLRLKGFPSFPLVERQANEVDWWDMVCNVKKLINEKKEDGKVFWQNLAGYKRQEALRPYLSSEEDVRKKGKKFARYQLGDLLLHLEKKHGEDWGKVYDEAWERIDKKVEGLSKHIKLEEERRSEDAQSKAALTDWLRAKASFVIEGLKEADKDEFCRCELKLQKWYGDLRGKPFAIEAENSILDISGFSKQYNCAFIWQKDGVKKLNLYLIINYFKGGKLRFKKIKPEAFEANRFYTVINKKSGEIVPMEVNFNFDDPNLIILPLAFGKRQGREFIWNDLLSLETGSLKLANGRVIEKTLYNRRTRQDEPALFVALTFERREVLDSSNIKPMNLIGVDRGENIPAVIALTDPEGCPLSRFKDSLGNPTHILRIGESYKEKQRTIQAKKEVEQRRAGGYSRKYASKAKNLADDMVRNTARDLLYYAVTQDAMLIFENLSRGFGRQGKRTFMAERQYTRMEDWLTAKLAYEGLPSKTYLSKTLAQYTSKTCSNCGFTITSADYDRVLEKLKKTATGWMTTINGKELKVEGQITYYNRYKRQNVVKDLSVELDRLSEESVNNDISSWTKGRSGEALSLLKKRFSHRPVQEKFVCLNCGFETHADEQAALNIARSWLFLRSQEYKKYQTNKTTGNTDKRAFVETWQSFYRKKLKEVWKPAV

SEQ ID NO: 31430 - protein, 978 aa, synthetic construct
  REGION 1..978: note = engineered CasX variant
QEGKRINKIRRRLVKDSNTKKAGKTGPMKTLLVRVMTPDLRERLENLRKKPENIPQPISNTSRANLNKLLTDYTEMKKAILHVYWEEFQKDPVGLMSRVAQPASKKIDQNKLKPEMDEKGNLTTAGFACSQCGQPLFVYKLEQVSEKGKAYTNYFGRCNVAEHEKLILLAQLKPEKDSDEAVTYSLGKFGQRALDFYSIHVTKESTHPVKPLAQIAGNRYASPVGKALSDACMGTIASFLSKYQDIIIEHQKVVKGNQKRLESLRELAGKENLEYPSVTLPPQPHTKEGVDAYNEVIARVRMWVNLNLWQKLKLSRDDAKPLLRLKGFPSFPLVERQANEVDWWDMVCNVKKLINEKKEDGKVFWQNLAGYKRQEALRPYLSSEEDVRKKGKKFARYQLGDLLLHLEKKHGEDWGKVYDEAWERIDKKVEGLSKHIKLEEERRSEDAQSKAALTDWLRAKASFVIEGLKEADKDEFCRCELKLQKWYGDLRGKPFAIEAENSILDISGFSKQYNCAFIWQKDGVKKLNLYLIINYFKGGKLRFKKIKPEAFEANRFYTVINKKSGEIVPMEVNFNFDDPNLIILPLAFGKRQGREFIWNDLLSLETGSLKLANGRVIEKTLYNRRTRQDEPALFVALTFERREVLDSSNIKPMNLIGVDRGENIPAVIALTDPEGCPLSRFKDSLGNPTHILRIGESYKEKQRTIQAKKEVEQRRAGGYSRKYASKAKNLADDMVRNTARDLLYYAVTQDAMLIFENLSRGFGRQGKRTFMAERQYTRMEDWLTAKLAYEGLPSKTYLSKTLAQYTSKTCSNCGFTITSADYDRVLEKLKKTATGWMTTINGKELKVEGQITYYNRYKRQNVVKDLSVELDRLSEESVNNDISSWTKGRSGEALSLLKKRFSHRPVQEKFVCLNCGFETHADEQAALNIARSWLFLRSQEYKKYQTNKTTGNTDKRAFVETWQSFYRKKLKEVWKPAV

SEQ ID NO: 31431 - protein, 978 aa, synthetic construct
  REGION 1..978: note = engineered CasX variant
QEGKRINKIRRRLVKDSNTKKAGKTGPMKTLLVRVMTPDLRERLENLRKKPENIPQPISNTSRANLNKLLTDYTEMKKAILHVYWEEFQKDPVGLMSRVAQPASKKIDQNKLKPEMDEKGNLTTAGFACSQCGQPLFVYKLEQVSEKGKAYTNYFGRCNVAEHEKLILLAQLKPEKDSDEAVTYSLGKFGQRALDFYSIHVTKESTHPVKPLAQIAGNRYASYPVGKALSDACMGTIASFLSKYQDIIIEHQKVVKGNQKRLESLRELAGKENLEYPSVTLPPQPHTKEGVDAYNEVIARVRMWVNLNLWQKLKLSRDDAKPLLRLKGFPSFPLVERQANEVDWWDMVCNVKKLINEKKEDGKVFWQNLAGYKRQEALRPYLSSEEDRKKGKKFARYQLGDLLLHLEKKHGEDWGKVYDEAWERIDKKVEGLSKHIKLEEERRSEDAQSKAALTDWLRAKASFVIEGLKEADKDEFCRCELKLQKWYGDLRGKPFAIEAENSILDISGFSKQYNCAFIWQKDGVKKLNLYLIINYFKGGKLRFKKIKPEAFEANRFYTVINKKSGEIVPMEVNFNFDDPNLIILPLAFGKRQGREFIWNDLLSLETGSLKLANGRVIEKTLYNRRTRQDEPALFVALTFERREVLDSSNIKPMNLIGVDRGENIPAVIALTDPEGCPLSRFKDSLGNPTHILRIGESYKEKQRTIQAKKEVEQRRAGGYSRKYASKAKNLADDMVRNTARDLLYYAVTQDAMLIFENLSRGFGRQGKRTFMAERQYTRMEDWLTAKLAYEGLPSKTYLSKTLAQYTSKTCSNCGFTITSADYDRMLEKLKKTATGWMTTINGKELKVEGQITYYNRYKRQNVVKDLSVELDRLSEESVNNDISSWTKGRSGEALSLLKKRFSHRPVQEKFVCLNCGFETHADEQAALNIARSWLFLRSQEYKKYQTNKTTGNTDKRAFVETWQSFYRKKLKEVWKPAV

SEQ ID NO: 31432 - protein, 978 aa, synthetic construct
  REGION 1..978: note = engineered CasX variant
QEGKRINKIRRRLVKDSNTKKAGKTGPMKTLLVRVMTPDLRERLENLRKKPENIPQPISNTSRANLNKLLTDYTEMKKAILHVYWEEFQKDPVGLMSRVAQPASKKIDQNKLKPEMDEKGNLTTAGFACSQCGQPLFVYKLEQVSEKGKAYTNYFGRCNVAEHEKLILLAQLKPEKDSDEAVTYSLGKFGQRALDFYSIHVTKESTHPVKPLAQIAGNRYASHPVGKALSDACMGTIASFLSKYQDIIIEHQKVVKGNQKRLESLRELAGKENLEYPSVTLPPQPHTKEGVDAYNEVIARVRMWVNLNLWQKLKLSRDDAKPLLRLKGFPSFPLVERQANEVDWWDMVCNVKKLINEKKEDGKVFWQNLAGYKRQEALRPYLSSEEDRKKGKKFARYQLGDLLLHLEKKHGEDWGKVYDEAWERIDKKVEGLSKHIKLEEERRSEDAQSKAALTDWLRAKASFVIEGLKEADKDEFCRCELKLQKWYGDLRGKPFAIEAENSILDISGFSKQYNCAFIWQKDGVKKLNLYLIINYFKGGKLRFKKIKPEAFEANRFYTVINKKSGEIVPMEVNFNFDDPNLIILPLAFGKRQGREFIWNDLLSLETGSLKLANGRVIEKTLYNRRTRQDEPALFVALTFERREVLDSSNIKPMNLIGVDRGENIPAVIALTDPEGCPLSRFKDSLGNPTHILRIGESYKEKQRTIQAKKEVEQRRAGGYSRKYASKAKNLADDMVRNTARDLLYYAVTQDAMLIFENLSRGFGRQGKRTFMAERQYTRMEDWLTAKLAYEGLPSKTYLSKTLAQYTSKTCSNCGFTITSADYDRMLEKLKKTATGWMTTINGKELKVEGQITYYNRYKRQNVVKDLSVELDRLSEESVNNDISSWTKGRSGEALSLLKKRFSHRPVQEKFVCLNCGFETHADEQAALNIARSWLFLRSQEYKKYQTNKTTGNTDKRAFVETWQSFYRKKLKEVWKPAV

SEQ ID NO: 31433 - protein, 978 aa, synthetic construct
  REGION 1..978: note = engineered CasX variant
QEGKRINKIRRRLVKDSNTKKAGKTGPMKTLLVRVMTPDLRERLENLRKKPENIPQPISNTSRANLNKLLTDYTEMKKAILHVYWEEFQKDPVGLMSRVAQPASKKIDQNKLKPEMDEKGNLTTAGFACSQCGQPLFVYKLEQVSEKGKAYTNYFGRCNVAEHEKLILLAQLKPEKDSDEAVTYSLGKFGQRALDFYSIHVTKESTHPVKPLAQIAGNRYASSPVGKALSDACMGTIASFLSKYQDIIIEHQKVVKGNQKRLESLRELAGKENLEYPSVTLPPQPHTKEGVDAYNEVIARVRMWVNLNLWQKLKLSRDDAKPLLRLKGFPSFPLVERQANEVDWWDMVCNVKKLINEKKEDGKVFWQNLAGYKRQEALRPYLSSEEDRKKGKKFARYQLGDLLLHLEKKHGEDWGKVYDEAWERIDKKVEGLSKHIKLEEERRSEDAQSKAALTDWLRAKASFVIEGLKEADKDEFCRCELKLQKWYGDLRGKPFAIEAENSILDISGFSKQYNCAFIWQKDGVKKLNLYLIINYFKGGKLRFKKIKPEAFEANRFYTVINKKSGEIVPMEVNFNFDDPNLIILPLAFGKRQGREFIWNDLLSLETGSLKLANGRVIEKTLYNRRTRQDEPALFVALTFERREVLDSSNIKPMNLIGVDRGENIPAVIALTDPEGCPLSRFKDSLGNPTHILRIGESYKEKQRTIQAKKEVEQRRAGGYSRKYASKAKNLADDMVRNTARDLLYYAVTQDAMLIFENLSRGFGRQGKRTFMAERQYTRMEDWLTAKLAYEGLPSKTYLSKTLAQYTSKTCSNCGFTITSADYDRMLEKLKKTATGWMTTINGKELKVEGQITYYNRYKRQNVVKDLSVELDRLSEESVNNDISSWTKGRSGEALSLLKKRFSHRPVQEKFVCLNCGFETHADEQAALNIARSWLFLRSQEYKKYQTNKTTGNTDKRAFVETWQSFYRKKLKEVWKPAV

SEQ ID NO: 31434 - protein, 978 aa, synthetic construct
  REGION 1..978: note = engineered CasX variant
QEGKRINKIRRRLVKDSNTKKAGKTGPMKTLLVRVMTPDLRERLENLRKKPENIPQPISNTSRANLNKLLTDYTEMKKAILHVYWEEFQKDPVGLMSRVAQPASKKIDQNKLKPEMDEKGNLTTAGFACSQCGQPLFVYKLEQVSEKGKAYTNYFGRCNVAEHEKLILLAQLKPEKDSDEAVTYSLGKFGQRALDFYSIHVTKESTHPVKPLAQIAGNRYASTPVGKALSDACMGTIASFLSKYQDIIIEHQKVVKGNQKRLESLRELAGKENLEYPSVTLPPQPHTKEGVDAYNEVIARVRMWVNLNLWQKLKLSRDDAKPLLRLKGFPSFPLVERQANEVDWWDMVCNVKKLINEKKEDGKVFWQNLAGYKRQEALRPYLSSEEDRKKGKKFARYQLGDLLLHLEKKHGEDWGKVYDEAWERIDKKVEGLSKHIKLEEERRSEDAQSKAALTDWLRAKASFVIEGLKEADKDEFCRCELKLQKWYGDLRGKPFAIEAENSILDISGFSKQYNCAFIWQKDGVKKLNLYLIINYFKGGKLRFKKIKPEAFEANRFYTVINKKSGEIVPMEVNFNFDDPNLIILPLAFGKRQGREFIWNDLLSLETGSLKLANGRVIEKTLYNRRTRQDEPALFVALTFERREVLDSSNIKPMNLIGVDRGENIPAVIALTDPEGCPLSRFKDSLGNPTHILRIGESYKEKQRTIQAKKEVEQRRAGGYSRKYASKAKNLADDMVRNTARDLLYYAVTQDAMLIFENLSRGFGRQGKRTFMAERQYTRMEDWLTAKLAYEGLPSKTYLSKTLAQYTSKTCSNCGFTITSADYDRMLEKLKKTATGWMTTINGKELKVEGQITYYNRYKRQNVVKDLSVELDRLSEESVNNDISSWTKGRSGEALSLLKKRFSHRPVQEKFVCLNCGFETHADEQAALNIARSWLFLRSQEYKKYQTNKTTGNTDKRAFVETWQSFYRKKLKEVWKPAV

SEQ ID NO: 31435 - protein, 978 aa, synthetic construct
  REGION 1..978: note = engineered CasX variant
QEGKRINKIRRRLVKDSNTKKAGKTGPMKTLLVRVMTPDLRERLENLRKKPENIPQPISNTSRANLNKLLTDYTEMKKAILHVYWEEFQKDPVGLMSRVAQPASKKIDQNKLKPEMDEKGNLTTAGFACSQCGQPLFVYKLEQVSEKGKAYTNYFGRCNVAEHEKLILLAQLKPEKDSDEAVTYSLGKFGQRALDFYSIHVTKESTHPVKPLAQIAGNRYASAPVGKALSDACMGTIASFLSKYQDIIIEHQKVVKGNQKRLESLRELAGKENLEYPSVTLPPQPHTKEGVDAYNEVIARVRMWVNLNLWQKLKLSRDDAKPLLRLKGFPSFPLVERQANEVDWWDMVCNVKKLINEKKEDGKVFWQNLAGYKRQEALRPYLSSEEDRKKGKKFARYQLGDLLLHLEKKHGEDWGKVYDEAWERIDKKVEGLSKHIKLEEERRSEDAQSKAALTDWLRAKASFVIEGLKEADKDEFCRCELKLQKWYGDLRGKPFAIEAENSILDISGFSKQYNCAFIWQKDGVKKLNLYLIINYFKGGKLRFKKIKPEAFEANRFYTVINKKSGEIVPMEVNFNFDDPNLIILPLAFGKRQGREFIWNDLLSLETGSLKLANGRVIEKTLYNRRTRQDEPALFVALTFERREVLDSSNIKPMNLIGVDRGENIPAVIALTDPEGCPLSRFKDSLGNPTHILRIGESYKEKQRTIQAKKEVEQRRAGGYSRKYASKAKNLADDMVRNTARDLLYYAVTQDAMLIFENLSRGFGRQGKRTFMAERQYTRMEDWLTAKLAYEGLPSKTYLSKTLAQYTSKTCSNCGFTITSADYDRMLEKLKKTATGWMTTINGKELKVEGQITYYNRYKRQNVVKDLSVELDRLSEESVNNDISSWTKGRSGEALSLLKKRFSHRPVQEKFVCLNCGFETHADEQAALNIARSWLFLRSQEYKKYQTNKTTGNTDKRAFVETWQSFYRKKLKEVWKPAV

SEQ ID NO: 31436 - protein, 978 aa, synthetic construct
  REGION 1..978: note = engineered CasX variant
QEGKRINKIRRRLVKDSNTKKAGKTGPMKTLLVRVMTPDLRERLENLRKKPENIPQPISNTSRANLNKLLTDYTEMKKAILHVYWEEFQKDPVGLMSRVAQPASKKIDQNKLKPEMDEKGNLTTAGFACSQCGQPLFVYKLEQVSEKGKAYTNYFGRCNVAEHEKLILLAQLKPEKDSDEAVTYSLGKFGQRALDFYSIHVTKESTHPVKPLAQIAGNRYASVPVGKALSDACMGTIASFLSKYQDIIIEHQKVVKGNQKRLESLRELAGKENLEYPSVTLPPQPHTKEGVDAYNEVIARVRMWVNLNLWQKLKLSRDDAKPLLRLKGFPSFPLVERQANEVDWWDMVCNVKKLINEKKEDGKVFWQNLAGYKRQEALRPYLSSEEDRKKGKKFARYQLGDLLLHLEKKHGEDWGKVYDEAWERIDKKVEGLSKHIKLEEERRSEDAQSKAALTDWLRAKASFVIEGLKEADKDEFCRCELKLQKWYGDLRGKPFAIEAENSILDISGFSKQYNCAFIWQKDGVKKLNLYLIINYFKGGKLRFKKIKPEAFEANRFYTVINKKSGEIVPMEVNFNFDDPNLIILPLAFGKRQGREFIWNDLLSLETGSLKLANGRVIEKTLYNRRTRQDEPALFVALTFERREVLDSSNIKPMNLIGVDRGENIPAVIALTDPEGCPLSRFKDSLGNPTHILRIGESYKEKQRTIQAKKEVEQRRAGGYSRKYASKAKNLADDMVRNTARDLLYYAVTQDAMLIFENLSRGFGRQGKRTFMAERQYTRMEDWLTAKLAYEGLPSKTYLSKTLAQYTSKTCSNCGFTITSADYDRMLEKLKKTATGWMTTINGKELKVEGQITYYNRYKRQNVVKDLSVELDRLSEESVNNDISSWTKGRSGEALSLLKKRFSHRPVQEKFVCLNCGFETHADEQAALNIARSWLFLRSQEYKKYQTNKTTGNTDKRAFVETWQSFYRKKLKEVWKPAV

SEQ ID NO: 31437 - protein, 978 aa, synthetic construct
  REGION 1..978: note = engineered CasX variant
QEGKRINKIRRRLVKDSNTKKAGKTGPMKTLLVRVMTPDLRERLENLRKKPENIPQPISNTSRANLNKLLTDYTEMKKAILHVYWEEFQKDPVGLMSRVAQPASKKIDQNKLKPEMDEKGNLTTAGFACSQCGQPLFVYKLEQVSEKGKAYTNYFGRCNVAEHEKLIKLAQLKPEKDSDEAVTYSLGKFGQRALDFYSIHVTKESTHPVKPLAQIAGNRYASGPVGKALSDACMGTIASFLSKYQDIIIEHQKVVKGNQKRLESLRELAGKENLEYPSVTLPPQPHTKEGVDAYNEVIARVRMWVNLNLWQKLKLSRDDAKPLLRLKGFPSFPLVERQANEVDWWDMVCNVKKLINEKKEDGKVFWQNLAGYKRQEALRPYLSSEEDRKKGKKFARYQLGDLLLHLEKKHGEDWGKVYDEAWERIDKKVEGLSKHIKLEEERRSEDAQSKAALTDWLRAKASFVIEGLKEADKDEFCRCELKLQKWYGDLRGKPFAIEAENSILDISGFSKQYNCAFIWQKDGVKKLNLYLIINYFKGGKLRFKKIKPEAFEANRFYTVINKKSGEIVPMEVNFNFDDPNLIILPLAFGKRQGREFIWNDLLSLETGSLKLANGRVIEKTLYNRRTRQDEPALFVALTFERREVLDSSNIKPMNLIGVDRGENIPAVIALTDPEGCPLSRFKDSLGNPTHILRIGESYKEKQRTIQAKKEVEQRRAGGYSRKYASKAKNLADDMVRNTARDLLYYAVTQDAMLIFENLSRGFGRQGKRTFMAERQYTRMEDWLTAKLAYEGLPSKTYLSKTLAQYTSKTCSNCGFTITSADYDRMLEKLKKTATGWMTTINGKELKVEGQITYYNRYKRQNVVKDLSVELDRLSEESVNNDISSWTKGRSGEALSLLKKRFSHRPVQEKFVCLNCGFETHADEQAALNIARSWLFLRSQEYKKYQTNKTTGNTDKRAFVETWQSFYRKKLKEVWKPAV

SEQ ID NO: 31438 - protein, 977 aa, synthetic construct
  REGION 1..977: note = engineered CasX variant
QEGKRINKIRRRLVKDSNTKKAGKTGPMKTLLVRVMTPDLRERLENLRKKPENIPQPISNTSRANLNKLLTDYTEMKKAILHVYWEEFQKDPVGLMSRVAQPASKKIDQNKLKPEMDEKGNLTTAGFACSQCGQPLFVYKLEQVSEKGKAYTNYFGRCNVAEHEKLILLAQLKPEKDSDEAVTYSLGKFGQRALDFYSIHVTKESTHPVKPLAQIAGNRYASPVGKALSDACMGTIASFLSKYQDIIIEHQKVVKGNQKRLESLRELAGKENLEYPSVTLPPQPHTKEGVDAYNEVIARVRMWVNLNLWQKLKLSRDDAKPLLRLKGFPSFPLVERQANEVDWWDMVCNVKKLINEKKEDGKVFWQNLAGYKRQEALRPYLSSEEDRKKGKKFARYQLGDLLLHLEKKHGEDWGKVYDEAWERIDKKVEGLSKHIKLEEERRSEDAQSKAALTDWLRAKASFVIEGLKEADKDEFCRCELKLQKWYGDLRGKPFAIEAENSILDISGFSKQYNCAFIWQKDGVKKLNLYLIINYFKGGKLRFKKIKPEAFEANRFYTVINKKSGEIVPMEVNFNFDDPNLIILPLAFGKRQGREFIWNDLLSLETGSLKLANGRVIEKTLYNRRTRQDEPALFVALTFERREVLDSSNIKPMNLIGVDRGENIPAVIALTDPEGCPLSRFKDSLGNPTHILRIGESYKEKQRTIQAKKEVEQRRAGGYSRKYASKAKNLADDMVRNTARDLLYYAVTQDAMLIFENLSRGFGRQGKRTFMAERQYTRMEDWLTAKLAYEGLPSKTYLSKTLAQYTSKTCSNCGFTITSADYDRMLEKLKKTATGWMTTINGKELKVEGQITYYNRYKRQNVVKDLSVELDRLSEESVNNDISSWTKGRSGEALSLLKKRFSHRPVQEKFVCLNCGFETHADEQAALNIARSWLFLRSQEYKKYQTNKTTGNTDKRAFVETWQSFYRKKLKEVWKPAV

SEQ ID NO: 31439 - protein, 978 aa, synthetic construct
  REGION 1..978: note = engineered CasX variant
QEGKRINKIRRRLVKDSNTKKAGKTGPMKTLLVRVMTPDLRERLENLRKKPENIPQPISNTSRANLNKLLTDYTEMKKAILHVYWEEFQKDPVGLMSRVAQPASKKIDQNKLKPEMDEKGNLTTAGFACSQCGQPLFVYKLEQVSEKGKAYTNYFGRCNVAEHEKLILLAQLKPEKDSDEAVTYSLGKFGQRALDFYSIHVTKESTHPVKPLAQIAGNRYASYPVGKALSDACMGTIASFLSKYQDIIIEHQKVVKGNQKRLESLRELAGKENLEYPSVTLPPQPHTKEGVDAYNEVIARVRMWVNLNLWQKLKLSRDDAKPLLRLKGFPSFPLVERQANEVDWWDMVCNVKKLINEKKEDGKVFWQNLAGYKRQEALRPYLSSEEDRKKGKKFARYQLGDLLLHLEKKHGEDWGKVYDEAWERIDKKVEGLSKHIKLEEERRSEDAQSKAALTDWLRAKASFVIEGLKEADKDEFCRCELKLQKWYGDLRGKPFAIEAENSILDISGFSKQYNCAFIWQKDGVKKLNLYLIINYFKGGKLRFKKIKPEAFEANRFYTVINKKSGEIVPMEVNFNFDDPNLIILPLAFGKRQGREFIWNDLLSLETGSLKLANGRVIEKTLYNRRTRQDEPALFVALTFERREVLDSSNIKPMNLIGVDRGENIPAVIALTDPEGCPLSRFKDSLGNPTHILRIGESYKEKQRTIQAKKEVEQRRAGGYSRKYASKAKNLADDMVRNTARDLLYYAVTQDAMLIFENLSRGFGRQGKRTFMAERQYTRMEDWLTAKLAYEGLPSKTYLSKTLAQYTSKTCSNCGFTITSADYDRVLEKLKKTATGWMTTINGKELKVEGQITYYNRYKRQNVVKDLSVELDRLSEESVNNDISSWTKGRQGEALSLLKKRFSHRPVQEKFVCLNCGFETHADEQAALNIARSWLFLRSQEYKKYQTNKTTGNTDKRAFVETWQSFYRKKLKEVWKPAV

SEQ ID NO: 31440 - protein, 978 aa, synthetic construct
  REGION 1..978: note = engineered CasX variant
QEGKRINKIRRRLVKDSNTKKAGKTGPMKTLLVRVMTPDLRERLENLRKKPENIPQPISNTSRANLNKLLTDYTEMKKAILHVYWEEFQKDPVGLMSRVAQPASKKIDQNKLKPEMDEKGNLTTAGFACSQCGQPLFVYKLEQVSEKGKAYTNYFGRCNVAEHEKLILLAQLKPEKDSDEAVTYSLGKFGQRALDFYSIHVTKESTHPVKPLAQIAGNRYASHPVGKALSDACMGTIASFLSKYQDIIIEHQKVVKGNQKRLESLRELAGKENLEYPSVTLPPQPHTKEGVDAYNEVIARVRMWVNLNLWQKLKLSRDDAKPLLRLKGFPSFPLVERQANEVDWWDMVCNVKKLINEKKEDGKVFWQNLAGYKRQEALRPYLSSEEDRKKGKKFARYQLGDLLLHLEKKHGEDWGKVYDEAWERIDKKVEGLSKHIKLEEERRSEDAQSKAALTDWLRAKASFVIEGLKEADKDEFCRCELKLQKWYGDLRGKPFAIEAENSILDISGFSKQYNCAFIWQKDGVKKLNLYLIINYFKGGKLRFKKIKPEAFEANRFYTVINKKSGEIVPMEVNFNFDDPNLIILPLAFGKRQGREFIWNDLLSLETGSLKLANGRVIEKTLYNRRTRQDEPALFVALTFERREVLDSSNIKPMNLIGVDRGENIPAVIALTDPEGCPLSRFKDSLGNPTHILRIGESYKEKQRTIQAKKEVEQRRAGGYSRKYASKAKNLADDMVRNTARDLLYYAVTQDAMLIFENLSRGFGRQGKRTFMAERQYTRMEDWLTAKLAYEGLPSKTYLSKTLAQYTSKTCSNCGFTITSADYDRVLEKLKKTATGWMTTINGKELKVEGQITYYNRYKRQNVVKDLSVELDRLSEESVNNDISSWTKGRQGEALSLLKKRFSHRPVQEKFVCLNCGFETHADEQAALNIARSWLFLRSQEYKKYQTNKTTGNTDKRAFVETWQSFYRKKLKEVWKPAV

SEQ ID NO: 31441 - protein, 978 aa, synthetic construct
  REGION 1..978: note = engineered CasX variant
QEGKRINKIRRRLVKDSNTKKAGKTGPMKTLLVRVMTPDLRERLENLRKKPENIPQPISNTSRANLNKLLTDYTEMKKAILHVYWEEFQKDPVGLMSRVAQPASKKIDQNKLKPEMDEKGNLTTAGFACSQCGQPLFVYKLEQVSEKGKAYTNYFGRCNVAEHEKLILLAQLKPEKDSDEAVTYSLGKFGQRALDFYSIHVTKESTHPVKPLAQIAGNRYASSPVGKALSDACMGTIASFLSKYQDIIIEHQKVVKGNQKRLESLRELAGKENLEYPSVTLPPQPHTKEGVDAYNEVIARVRMWVNLNLWQKLKLSRDDAKPLLRLKGFPSFPLVERQANEVDWWDMVCNVKKLINEKKEDGKVFWQNLAGYKRQEALRPYLSSEEDRKKGKKFARYQLGDLLLHLEKKHGEDWGKVYDEAWERIDKKVEGLSKHIKLEEERRSEDAQSKAALTDWLRAKASFVIEGLKEADKDEFCRCELKLQKWYGDLRGKPFAIEAENSILDISGFSKQYNCAFIWQKDGVKKLNLYLIINYFKGGKLRFKKIKPEAFEANRFYTVINKKSGEIVPMEVNFNFDDPNLIILPLAFGKRQGREFIWNDLLSLETGSLKLANGRVIEKTLYNRRTRQDEPALFVALTFERREVLDSSNIKPMNLIGVDRGENIPAVIALTDPEGCPLSRFKDSLGNPTHILRIGESYKEKQRTIQAKKEVEQRRAGGYSRKYASKAKNLADDMVRNTARDLLYYAVTQDAMLIFENLSRGFGRQGKRTFMAERQYTRMEDWLTAKLAYEGLPSKTYLSKTLAQYTSKTCSNCGFTITSADYDRVLEKLKKTATGWMTTINGKELKVEGQITYYNRYKRQNVVKDLSVELDRLSEESVNNDISSWTKGRQGEALSLLKKRFSHRPVQEKFVCLNCGFETHADEQAALNIARSWLFLRSQEYKKYQTNKTTGNTDKRAFVETWQSFYRKKLKEVWKPAV

SEQ ID NO: 31442 - protein, 978 aa, synthetic construct
  REGION 1..978: note = engineered CasX variant
QEGKRINKIRRRLVKDSNTKKAGKTGPMKTLLVRVMTPDLRERLENLRKKPENIPQPISNTSRANLNKLLTDYTEMKKAILHVYWEEFQKDPVGLMSRVAQPASKKIDQNKLKPEMDEKGNLTTAGFACSQCGQPLFVYKLEQVSEKGKAYTNYFGRCNVAEHEKLILLAQLKPEKDSDEAVTYSLGKFGQRALDFYSIHVTKESTHPVKPLAQIAGNRYASTPVGKALSDACMGTIASFLSKYQDIIIEHQKVVKGNQKRLESLRELAGKENLEYPSVTLPPQPHTKEGVDAYNEVIARVRMWVNLNLWQKLKLSRDDAKPLLRLKGFPSFPLVERQANEVDWWDMVCNVKKLINEKKEDGKVFWQNLAGYKRQEALRPYLSSEEDRKKGKKFARYQLGDLLLHLEKKHGEDWGKVYDEAWERIDKKVEGLSKHIKLEEERRSEDAQSKAALTDWLRAKASFVIEGLKEADKDEFCRCELKLQKWYGDLRGKPFAIEAENSILDISGFSKQYNCAFIWQKDGVKKLNLYLIINYFKGGKLRFKKIKPEAFEANRFYTVINKKSGEIVPMEVNFNFDDPNLIILPLAFGKRQGREFIWNDLLSLETGSLKLANGRVIEKTLYNRRTRQDEPALFVALTFERREVLDSSNIKPMNLIGVDRGENIPAVIALTDPEGCPLSRFKDSLGNPTHILRIGESYKEKQRTIQAKKEVEQRRAGGYSRKYASKAKNLADDMVRNTARDLLYYAVTQDAMLIFENLSRGFGRQGKRTFMAERQYTRMEDWLTAKLAYEGLPSKTYLSKTLAQYTSKTCSNCGFTITSADYDRVLEKLKKTATGWMTTINGKELKVEGQITYYNRYKRQNVVKDLSVELDRLSEESVNNDISSWTKGRQGEALSLLKKRFSHRPVQEKFVCLNCGFETHADEQAALNIARSWLFLRSQEYKKYQTNKTTGNTDKRAFVETWQSFYRKKLKEVWKPAV

SEQ ID NO: 31443 - protein, 978 aa, synthetic construct
  REGION 1..978: note = engineered CasX variant
QEGKRINKIRRRLVKDSNTKKAGKTGPMKTLLVRVMTPDLRERLENLRKKPENIPQPISNTSRANLNKLLTDYTEMKKAILHVYWEEFQKDPVGLMSRVAQPASKKIDQNKLKPEMDEKGNLTTAGFACSQCGQPLFVYKLEQVSEKGKAYTNYFGRCNVAEHEKLILLAQLKPEKDSDEAVTYSLGKFGQRALDFYSIHVTKESTHPVKPLAQIAGNRYASAPVGKALSDACMGTIASFLSKYQDIIIEHQKVVKGNQKRLESLRELAGKENLEYPSVTLPPQPHTKEGVDAYNEVIARVRMWVNLNLWQKLKLSRDDAKPLLRLKGFPSFPLVERQANEVDWWDMVCNVKKLINEKKEDGKVFWQNLAGYKRQEALRPYLSSEEDRKKGKKFARYQLGDLLLHLEKKHGEDWGKVYDEAWERIDKKVEGLSKHIKLEEERRSEDAQSKAALTDWLRAKASFVIEGLKEADKDEFCRCELKLQKWYGDLRGKPFAIEAENSILDISGFSKQYNCAFIWQKDGVKKLNLYLIINYFKGGKLRFKKIKPEAFEANRFYTVINKKSGEIVPMEVNFNFDDPNLIILPLAFGKRQGREFIWNDLLSLETGSLKLANGRVIEKTLYNRRTRQDEPALFVALTFERREVLDSSNIKPMNLIGVDRGENIPAVIALTDPEGCPLSRFKDSLGNPTHILRIGESYKEKQRTIQAKKEVEQRRAGGYSRKYASKAKNLADDMVRNTARDLLYYAVTQDAMLIFENLSRGFGRQGKRTFMAERQYTRMEDWLTAKLAYEGLPSKTYLSKTLAQYTSKTCSNCGFTITSADYDRVLEKLKKTATGWMTTINGKELKVEGQITYYNRYKRQNVVKDLSVELDRLSEESVNNDISSWTKGRQGEALSLLKKRFSHRPVQEKFVCLNCGFETHADEQAALNIARSWLFLRSQEYKKYQTNKTTGNTDKRAFVETWQSFYRKKLKEVWKPAV

SEQ ID NO: 31444 - protein, 978 aa, synthetic construct
  REGION 1..978: note = engineered CasX variant
QEGKRINKIRRRLVKDSNTKKAGKTGPMKTLLVRVMTPDLRERLENLRKKPENIPQPISNTSRANLNKLLTDYTEMKKAILHVYWEEFQKDPVGLMSRVAQPASKKIDQNKLKPEMDEKGNLTTAGFACSQCGQPLFVYKLEQVSEKGKAYTNYFGRCNVAEHEKLILLAQLKPEKDSDEAVTYSLGKFGQRALDFYSIHVTKESTHPVKPLAQIAGNRYASVPVGKALSDACMGTIASFLSKYQDIIIEHQKVVKGNQKRLESLRELAGKENLEYPSVTLPPQPHTKEGVDAYNEVIARVRMWVNLNLWQKLKLSRDDAKPLLRLKGFPSFPLVERQANEVDWWDMVCNVKKLINEKKEDGKVFWQNLAGYKRQEALRPYLSSEEDRKKGKKFARYQLGDLLLHLEKKHGEDWGKVYDEAWERIDKKVEGLSKHIKLEEERRSEDAQSKAALTDWLRAKASFVIEGLKEADKDEFCRCELKLQKWYGDLRGKPFAIEAENSILDISGFSKQYNCAFIWQKDGVKKLNLYLIINYFKGGKLRFKKIKPEAFEANRFYTVINKKSGEIVPMEVNFNFDDPNLIILPLAFGKRQGREFIWNDLLSLETGSLKLANGRVIEKTLYNRRTRQDEPALFVALTFERREVLDSSNIKPMNLIGVDRGENIPAVIALTDPEGCPLSRFKDSLGNPTHILRIGESYKEKQRTIQAKKEVEQRRAGGYSRKYASKAKNLADDMVRNTARDLLYYAVTQDAMLIFENLSRGFGRQGKRTFMAERQYTRMEDWLTAKLAYEGLPSKTYLSKTLAQYTSKTCSNCGFTITSADYDRVLEKLKKTATGWMTTINGKELKVEGQITYYNRYKRQNVVKDLSVELDRLSEESVNNDISSWTKGRQGEALSLLKKRFSHRPVQEKFVCLNCGFETHADEQAALNIARSWLFLRSQEYKKYQTNKTTGNTDKRAFVETWQSFYRKKLKEVWKPAV

SEQ ID NO: 31445 - protein, 978 aa, synthetic construct
  REGION 1..978: note = engineered CasX variant
QEGKRINKIRRRLVKDSNTKKAGKTGPMKTLLVRVMTPDLRERLENLRKKPENIPQPISNTSRANLNKLLTDYTEMKKAILHVYWEEFQKDPVGLMSRVAQPASKKIDQNKLKPEMDEKGNLTTAGFACSQCGQPLFVYKLEQVSEKGKAYTNYFGRCNVAEHEKLIKLAQLKPEKDSDEAVTYSLGKFGQRALDFYSIHVTKESTHPVKPLAQIAGNRYASGPVGKALSDACMGTIASFLSKYQDIIIEHQKVVKGNQKRLESLRELAGKENLEYPSVTLPPQPHTKEGVDAYNEVIARVRMWVNLNLWQKLKLSRDDAKPLLRLKGFPSFPLVERQANEVDWWDMVCNVKKLINEKKEDGKVFWQNLAGYKRQEALRPYLSSEEDRKKGKKFARYQLGDLLLHLEKKHGEDWGKVYDEAWERIDKKVEGLSKHIKLEEERRSEDAQSKAALTDWLRAKASFVIEGLKEADKDEFCRCELKLQKWYGDLRGKPFAIEAENSILDISGFSKQYNCAFIWQKDGVKKLNLYLIINYFKGGKLRFKKIKPEAFEANRFYTVINKKSGEIVPMEVNFNFDDPNLIILPLAFGKRQGREFIWNDLLSLETGSLKLANGRVIEKTLYNRRTRQDEPALFVALTFERREVLDSSNIKPMNLIGVDRGENIPAVIALTDPEGCPLSRFKDSLGNPTHILRIGESYKEKQRTIQAKKEVEQRRAGGYSRKYASKAKNLADDMVRNTARDLLYYAVTQDAMLIFENLSRGFGRQGKRTFMAERQYTRMEDWLTAKLAYEGLPSKTYLSKTLAQYTSKTCSNCGFTITSADYDRVLEKLKKTATGWMTTINGKELKVEGQITYYNRYKRQNVVKDLSVELDRLSEESVNNDISSWTKGRQGEALSLLKKRFSHRPVQEKFVCLNCGFETHADEQAALNIARSWLFLRSQEYKKYQTNKTTGNTDKRAFVETWQSFYRKKLKEVWKPAV

SEQ ID NO: 31446 - protein, 977 aa, synthetic construct
  REGION 1..977: note = engineered CasX variant
QEGKRINKIRRRLVKDSNTKKAGKTGPMKTLLVRVMTPDLRERLENLRKKPENIPQPISNTSRANLNKLLTDYTEMKKAILHVYWEEFQKDPVGLMSRVAQPASKKIDQNKLKPEMDEKGNLTTAGFACSQCGQPLFVYKLEQVSEKGKAYTNYFGRCNVAEHEKLILLAQLKPEKDSDEAVTYSLGKFGQRALDFYSIHVTKESTHPVKPLAQIAGNRYASPVGKALSDACMGTIASFLSKYQDIIIEHQKVVKGNQKRLESLRELAGKENLEYPSVTLPPQPHTKEGVDAYNEVIARVRMWVNLNLWQKLKLSRDDAKPLLRLKGFPSFPLVERQANEVDWWDMVCNVKKLINEKKEDGKVFWQNLAGYKRQEALRPYLSSEEDRKKGKKFARYQLGDLLLHLEKKHGEDWGKVYDEAWERIDKKVEGLSKHIKLEEERRSEDAQSKAALTDWLRAKASFVIEGLKEADKDEFCRCELKLQKWYGDLRGKPFAIEAENSILDISGFSKQYNCAFIWQKDGVKKLNLYLIINYFKGGKLRFKKIKPEAFEANRFYTVINKKSGEIVPMEVNFNFDDPNLIILPLAFGKRQGREFIWNDLLSLETGSLKLANGRVIEKTLYNRRTRQDEPALFVALTFERREVLDSSNIKPMNLIGVDRGENIPAVIALTDPEGCPLSRFKDSLGNPTHILRIGESYKEKQRTIQAKKEVEQRRAGGYSRKYASKAKNLADDMVRNTARDLLYYAVTQDAMLIFENLSRGFGRQGKRTFMAERQYTRMEDWLTAKLAYEGLPSKTYLSKTLAQYTSKTCSNCGFTITSADYDRVLEKLKKTATGWMTTINGKELKVEGQITYYNRYKRQNVVKDLSVELDRLSEESVNNDISSWTKGRQGEALSLLKKRFSHRPVQEKFVCLNCGFETHADEQAALNIARSWLFLRSQEYKKYQTNKTTGNTDKRAFVETWQSFYRKKLKEVWKPAV

SEQ ID NO: 31447 - protein, 978 aa, synthetic construct
  REGION 1..978: note = engineered CasX variant
QEGKRINKIRRRLVKDSNTKKAGKTGPMKTLLVRVMTPDLRERLENLRKKPENIPQPISNTSRANLNKLLTDYTEMKKAILHVYWEEFQKDPVGLMSRVAQPASKKIDQNKLKPEMDEKGNLTTAGFACSQCGQPLFVYKLEQVSEKGKAYTNYFGRCNVAEHEKLILLAQLKPEKDSDEAVTYSLGKFGQRALDFYSIHVTKESTHPVKPLAQIAGNRYASYPVGKALSDACMGTIASFLSKYQDIIIEHQKVVKGNQKRLESLRELAGKENLEYPSVTLPPQPHTKEGVDAYNEVIARVRMWVNLNLWQKLKLSRDDAKPLLRLKGFPSFPLVERQANEVDWWDMVCNVKKLINEKKEDGKVFWQNLAGYKRQEALRPYLSSEEDRKKGKKFARYQLGDLLLHLEKKHGEDWGKVYDEAWERIDKKVEGLSKHIKLEEERRSEDAQSKAALTDWLRAKASFVIEGLKEADKDEFCRCELKLQKWYGDLRGKPFAIEAENSILDISGFSKQYNCAFIWQKDGVKKLNLYLIINYFKGGKLRFKKIKPEAFEANRFYTVINKKSGEIVPMEVNFNFDDPNLIILPLAFGKRQGREFIWNDLLSLETGSLKLANGRVIEKTLYNRRTRQDEPALFVALTFERREVLDSSNIKPMNLIGVDRGENIPAVIALTDPEGCPLSRFKDSLGNPTHILRIGESYKEKQRTIQAKKEVEQRRAGGYSRKYASKAKNLADDMVRNTARDLLYYAVTQDAMLIFENLSRGFGRQGKRTFMAERQYTRMEDWLTAKLAYEGLPSKTYLSKTLAQYTSKTCSNCGFTITSADYDRVLEKLKKTATGWMTTINGKELKVEGQITYYNRYKRQNVVKDLSVELDRLSEESVNNDISSWTKGRSGEALSLLKKRFSHRPVQEKFVCLNCEFETHADEQAALNIARSWLFLRSQEYKKYQTNKTTGNTDKRAFVETWQSFYRKKLKEVWKPAV

SEQ ID NO: 31448 - protein, 978 aa, synthetic construct
  REGION 1..978: note = engineered CasX variant
QEGKRINKIRRRLVKDSNTKKAGKTGPMKTLLVRVMTPDLRERLENLRKKPENIPQPISNTSRANLNKLLTDYTEMKKAILHVYWEEFQKDPVGLMSRVAQPASKKIDQNKLKPEMDEKGNLTTAGFACSQCGQPLFVYKLEQVSEKGKAYTNYFGRCNVAEHEKLILLAQLKPEKDSDEAVTYSLGKFGQRALDFYSIHVTKESTHPVKPLAQIAGNRYASHPVGKALSDACMGTIASFLSKYQDIIIEHQKVVKGNQKRLESLRELAGKENLEYPSVTLPPQPHTKEGVDAYNEVIARVRMWVNLNLWQKLKLSRDDAKPLLRLKGFPSFPLVERQANEVDWWDMVCNVKKLINEKKEDGKVFWQNLAGYKRQEALRPYLSSEEDRKKGKKFARYQLGDLLLHLEKKHGEDWGKVYDEAWERIDKKVEGLSKHIKLEEERRSEDAQSKAALTDWLRAKASFVIEGLKEADKDEFCRCELKLQKWYGDLRGKPFAIEAENSILDISGFSKQYNCAFIWQKDGVKKLNLYLIINYFKGGKLRFKKIKPEAFEANRFYTVINKKSGEIVPMEVNFNFDDPNLIILPLAFGKRQGREFIWNDLLSLETGSLKLANGRVIEKTLYNRRTRQDEPALFVALTFERREVLDSSNIKPMNLIGVDRGENIPAVIALTDPEGCPLSRFKDSLGNPTHILRIGESYKEKQRTIQAKKEVEQRRAGGYSRKYASKAKNLADDMVRNTARDLLYYAVTQDAMLIFENLSRGFGRQGKRTFMAERQYTRMEDWLTAKLAYEGLPSKTYLSKTLAQYTSKTCSNCGFTITSADYDRVLEKLKKTATGWMTTINGKELKVEGQITYYNRYKRQNVVKDLSVELDRLSEESVNNDISSWTKGRSGEALSLLKKRFSHRPVQEKFVCLNCEFETHADEQAALNIARSWLFLRSQEYKKYQTNKTTGNTDKRAFVETWQSFYRKKLKEVWKPAV

SEQ ID NO: 31449 - protein, 978 aa, synthetic construct
  REGION 1..978: note = engineered CasX variant
QEGKRINKIRRRLVKDSNTKKAGKTGPMKTLLVRVMTPDLRERLENLRKKPENIPQPISNTSRANLNKLLTDYTEMKKAILHVYWEEFQKDPVGLMSRVAQPASKKIDQNKLKPEMDEKGNLTTAGFACSQCGQPLFVYKLEQVSEKGKAYTNYFGRCNVAEHEKLILLAQLKPEKDSDEAVTYSLGKFGQRALDFYSIHVTKESTHPVKPLAQIAGNRYASSPVGKALSDACMGTIASFLSKYQDIIIEHQKVVKGNQKRLESLRELAGKENLEYPSVTLPPQPHTKEGVDAYNEVIARVRMWVNLNLWQKLKLSRDDAKPLLRLKGFPSFPLVERQANEVDWWDMVCNVKKLINEKKEDGKVFWQNLAGYKRQEALRPYLSSEEDRKKGKKFARYQLGDLLLHLEKKHGEDWGKVYDEAWERIDKKVEGLSKHIKLEEERRSEDAQSKAALTDWLRAKASFVIEGLKEADKDEFCRCELKLQKWYGDLRGKPFAIEAENSILDISGFSKQYNCAFIWQKDGVKKLNLYLIINYFKGGKLRFKKIKPEAFEANRFYTVINKKSGEIVPMEVNFNFDDPNLIILPLAFGKRQGREFIWNDLLSLETGSLKLANGRVIEKTLYNRRTRQDEPALFVALTFERREVLDSSNIKPMNLIGVDRGENIPAVIALTDPEGCPLSRFKDSLGNPTHILRIGESYKEKQRTIQAKKEVEQRRAGGYSRKYASKAKNLADDMVRNTARDLLYYAVTQDAMLIFENLSRGFGRQGKRTFMAERQYTRMEDWLTAKLAYEGLPSKTYLSKTLAQYTSKTCSNCGFTITSADYDRVLEKLKKTATGWMTTINGKELKVEGQITYYNRYKRQNVVKDLSVELDRLSEESVNNDISSWTKGRSGEALSLLKKRFSHRPVQEKFVCLNCEFETHADEQAALNIARSWLFLRSQEYKKYQTNKTTGNTDKRAFVETWQSFYRKKLKEVWKPAV

SEQ ID NO: 31450 - protein, 978 aa, synthetic construct
  REGION 1..978: note = engineered CasX variant
QEGKRINKIRRRLVKDSNTKKAGKTGPMKTLLVRVMTPDLRERLENLRKKPENIPQPISNTSRANLNKLLTDYTEMKKAILHVYWEEFQKDPVGLMSRVAQPASKKIDQNKLKPEMDEKGNLTTAGFACSQCGQPLFVYKLEQVSEKGKAYTNYFGRCNVAEHEKLILLAQLKPEKDSDEAVTYSLGKFGQRALDFYSIHVTKESTHPVKPLAQIAGNRYASTPVGKALSDACMGTIASFLSKYQDIIIEHQKVVKGNQKRLESLRELAGKENLEYPSVTLPPQPHTKEGVDAYNEVIARVRMWVNLNLWQKLKLSRDDAKPLLRLKGFPSFPLVERQANEVDWWDMVCNVKKLINEKKEDGKVFWQNLAGYKRQEALRPYLSSEEDRKKGKKFARYQLGDLLLHLEKKHGEDWGKVYDEAWERIDKKVEGLSKHIKLEEERRSEDAQSKAALTDWLRAKASFVIEGLKEADKDEFCRCELKLQKWYGDLRGKPFAIEAENSILDISGFSKQYNCAFIWQKDGVKKLNLYLIINYFKGGKLRFKKIKPEAFEANRFYTVINKKSGEIVPMEVNFNFDDPNLIILPLAFGKRQGREFIWNDLLSLETGSLKLANGRVIEKTLYNRRTRQDEPALFVALTFERREVLDSSNIKPMNLIGVDRGENIPAVIALTDPEGCPLSRFKDSLGNPTHILRIGESYKEKQRTIQAKKEVEQRRAGGYSRKYASKAKNLADDMVRNTARDLLYYAVTQDAMLIFENLSRGFGRQGKRTFMAERQYTRMEDWLTAKLAYEGLPSKTYLSKTLAQYTSKTCSNCGFTITSADYDRVLEKLKKTATGWMTTINGKELKVEGQITYYNRYKRQNVVKDLSVELDRLSEESVNNDISSWTKGRSGEALSLLKKRFSHRPVQEKFVCLNCEFETHADEQAALNIARSWLFLRSQEYKKYQTNKTTGNTDKRAFVETWQSFYRKKLKEVWKPAV

SEQ ID NO: 31451 - protein, 978 aa, synthetic construct
  REGION 1..978: note = engineered CasX variant
QEGKRINKIRRRLVKDSNTKKAGKTGPMKTLLVRVMTPDLRERLENLRKKPENIPQPISNTSRANLNKLLTDYTEMKKAILHVYWEEFQKDPVGLMSRVAQPASKKIDQNKLKPEMDEKGNLTTAGFACSQCGQPLFVYKLEQVSEKGKAYTNYFGRCNVAEHEKLILLAQLKPEKDSDEAVTYSLGKFGQRALDFYSIHVTKESTHPVKPLAQIAGNRYASAPVGKALSDACMGTIASFLSKYQDIIIEHQKVVKGNQKRLESLRELAGKENLEYPSVTLPPQPHTKEGVDAYNEVIARVRMWVNLNLWQKLKLSRDDAKPLLRLKGFPSFPLVERQANEVDWWDMVCNVKKLINEKKEDGKVFWQNLAGYKRQEALRPYLSSEEDRKKGKKFARYQLGDLLLHLEKKHGEDWGKVYDEAWERIDKKVEGLSKHIKLEEERRSEDAQSKAALTDWLRAKASFVIEGLKEADKDEFCRCELKLQKWYGDLRGKPFAIEAENSILDISGFSKQYNCAFIWQKDGVKKLNLYLIINYFKGGKLRFKKIKPEAFEANRFYTVINKKSGEIVPMEVNFNFDDPNLIILPLAFGKRQGREFIWNDLLSLETGSLKLANGRVIEKTLYNRRTRQDEPALFVALTFERREVLDSSNIKPMNLIGVDRGENIPAVIALTDPEGCPLSRFKDSLGNPTHILRIGESYKEKQRTIQAKKEVEQRRAGGYSRKYASKAKNLADDMVRNTARDLLYYAVTQDAMLIFENLSRGFGRQGKRTFMAERQYTRMEDWLTAKLAYEGLPSKTYLSKTLAQYTSKTCSNCGFTITSADYDRVLEKLKKTATGWMTTINGKELKVEGQITYYNRYKRQNVVKDLSVELDRLSEESVNNDISSWTKGRSGEALSLLKKRFSHRPVQEKFVCLNCEFETHADEQAALNIARSWLFLRSQEYKKYQTNKTTGNTDKRAFVETWQSFYRKKLKEVWKPAV

SEQ ID NO: 31452 - protein, 978 aa, synthetic construct
  REGION 1..978: note = engineered CasX variant
QEGKRINKIRRRLVKDSNTKKAGKTGPMKTLLVRVMTPDLRERLENLRKKPENIPQPISNTSRANLNKLLTDYTEMKKAILHVYWEEFQKDPVGLMSRVAQPASKKIDQNKLKPEMDEKGNLTTAGFACSQCGQPLFVYKLEQVSEKGKAYTNYFGRCNVAEHEKLILLAQLKPEKDSDEAVTYSLGKFGQRALDFYSIHVTKESTHPVKPLAQIAGNRYASVPVGKALSDACMGTIASFLSKYQDIIIEHQKVVKGNQKRLESLRELAGKENLEYPSVTLPPQPHTKEGVDAYNEVIARVRMWVNLNLWQKLKLSRDDAKPLLRLKGFPSFPLVERQANEVDWWDMVCNVKKLINEKKEDGKVFWQNLAGYKRQEALRPYLSSEEDRKKGKKFARYQLGDLLLHLEKKHGEDWGKVYDEAWERIDKKVEGLSKHIKLEEERRSEDAQSKAALTDWLRAKASFVIEGLKEADKDEFCRCELKLQKWYGDLRGKPFAIEAENSILDISGFSKQYNCAFIWQKDGVKKLNLYLIINYFKGGKLRFKKIKPEAFEANRFYTVINKKSGEIVPMEVNFNFDDPNLIILPLAFGKRQGREFIWNDLLSLETGSLKLANGRVIEKTLYNRRTRQDEPALFVALTFERREVLDSSNIKPMNLIGVDRGENIPAVIALTDPEGCPLSRFKDSLGNPTHILRIGESYKEKQRTIQAKKEVEQRRAGGYSRKYASKAKNLADDMVRNTARDLLYYAVTQDAMLIFENLSRGFGRQGKRTFMAERQYTRMEDWLTAKLAYEGLPSKTYLSKTLAQYTSKTCSNCGFTITSADYDRVLEKLKKTATGWMTTINGKELKVEGQITYYNRYKRQNVVKDLSVELDRLSEESVNNDISSWTKGRSGEALSLLKKRFSHRPVQEKFVCLNCEFETHADEQAALNIARSWLFLRSQEYKKYQTNKTTGNTDKRAFVETWQSFYRKKLKEVWKPAV

SEQ ID NO: 31453 - protein, 978 aa, synthetic construct
  REGION 1..978: note = engineered CasX variant
QEGKRINKIRRRLVKDSNTKKAGKTGPMKTLLVRVMTPDLRERLENLRKKPENIPQPISNTSRANLNKLLTDYTEMKKAILHVYWEEFQKDPVGLMSRVAQPASKKIDQNKLKPEMDEKGNLTTAGFACSQCGQPLFVYKLEQVSEKGKAYTNYFGRCNVAEHEKLIKLAQLKPEKDSDEAVTYSLGKFGQRALDFYSIHVTKESTHPVKPLAQIAGNRYASGPVGKALSDACMGTIASFLSKYQDIIIEHQKVVKGNQKRLESLRELAGKENLEYPSVTLPPQPHTKEGVDAYNEVIARVRMWVNLNLWQKLKLSRDDAKPLLRLKGFPSFPLVERQANEVDWWDMVCNVKKLINEKKEDGKVFWQNLAGYKRQEALRPYLSSEEDRKKGKKFARYQLGDLLLHLEKKHGEDWGKVYDEAWERIDKKVEGLSKHIKLEEERRSEDAQSKAALTDWLRAKASFVIEGLKEADKDEFCRCELKLQKWYGDLRGKPFAIEAENSILDISGFSKQYNCAFIWQKDGVKKLNLYLIINYFKGGKLRFKKIKPEAFEANRFYTVINKKSGEIVPMEVNFNFDDPNLIILPLAFGKRQGREFIWNDLLSLETGSLKLANGRVIEKTLYNRRTRQDEPALFVALTFERREVLDSSNIKPMNLIGVDRGENIPAVIALTDPEGCPLSRFKDSLGNPTHILRIGESYKEKQRTIQAKKEVEQRRAGGYSRKYASKAKNLADDMVRNTARDLLYYAVTQDAMLIFENLSRGFGRQGKRTFMAERQYTRMEDWLTAKLAYEGLPSKTYLSKTLAQYTSKTCSNCGFTITSADYDRVLEKLKKTATGWMTTINGKELKVEGQITYYNRYKRQNVVKDLSVELDRLSEESVNNDISSWTKGRSGEALSLLKKRFSHRPVQEKFVCLNCEFETHADEQAALNIARSWLFLRSQEYKKYQTNKTTGNTDKRAFVETWQSFYRKKLKEVWKPAV

SEQ ID NO: 31454 - protein, 977 aa, synthetic construct
  REGION 1..977: note = engineered CasX variant
QEGKRINKIRRRLVKDSNTKKAGKTGPMKTLLVRVMTPDLRERLENLRKKPENIPQPISNTSRANLNKLLTDYTEMKKAILHVYWEEFQKDPVGLMSRVAQPASKKIDQNKLKPEMDEKGNLTTAGFACSQCGQPLFVYKLEQVSEKGKAYTNYFGRCNVAEHEKLILLAQLKPEKDSDEAVTYSLGKFGQRALDFYSIHVTKESTHPVKPLAQIAGNRYASPVGKALSDACMGTIASFLSKYQDIIIEHQKVVKGNQKRLESLRELAGKENLEYPSVTLPPQPHTKEGVDAYNEVIARVRMWVNLNLWQKLKLSRDDAKPLLRLKGFPSFPLVERQANEVDWWDMVCNVKKLINEKKEDGKVFWQNLAGYKRQEALRPYLSSEEDRKKGKKFARYQLGDLLLHLEKKHGEDWGKVYDEAWERIDKKVEGLSKHIKLEEERRSEDAQSKAALTDWLRAKASFVIEGLKEADKDEFCRCELKLQKWYGDLRGKPFAIEAENSILDISGFSKQYNCAFIWQKDGVKKLNLYLIINYFKGGKLRFKKIKPEAFEANRFYTVINKKSGEIVPMEVNFNFDDPNLIILPLAFGKRQGREFIWNDLLSLETGSLKLANGRVIEKTLYNRRTRQDEPALFVALTFERREVLDSSNIKPMNLIGVDRGENIPAVIALTDPEGCPLSRFKDSLGNPTHILRIGESYKEKQRTIQAKKEVEQRRAGGYSRKYASKAKNLADDMVRNTARDLLYYAVTQDAMLIFENLSRGFGRQGKRTFMAERQYTRMEDWLTAKLAYEGLPSKTYLSKTLAQYTSKTCSNCGFTITSADYDRVLEKLKKTATGWMTTINGKELKVEGQITYYNRYKRQNVVKDLSVELDRLSEESVNNDISSWTKGRSGEALSLLKKRFSHRPVQEKFVCLNCEFETHADEQAALNIARSWLFLRSQEYKKYQTNKTTGNTDKRAFVETWQSFYRKKLKEVWKPAV

SEQ ID NO: 31455 - protein, 979 aa, synthetic construct
  REGION 1..979: note = engineered CasX variant
QEGKRINKIRRRLVKDSNTKKAGKTGPMKTLLVRVMTPDLRERLENLRKKPENIPQPISNTSRANLNKLLTDYTEMKKAILHVYWEEFQKDPVGLMSRVAQPASKKIDQNKLKPEMDEKGNLTTAGFACSQCGQPLFVYKLEQVSEKGKAYTNYFGRCNVAEHEKLILLAQLKPEKDSDEAVTYSLGKFGQRALDFYSIHVTKESTHPVKPLAQIAGNRYASYPVGKALSDACMGTIASFLSKYQDIIIEHQKVVKGNQKRLESLRELAGKENLEYPSVTLPPQPHTKEGVDAYNEVIARVRMWVNLNLWQKLKLSRDDAKPLLRLKGFPSFPLVERQANEVDWWDMVCNVKKLINEKKEDGKVFWQNLAGYKRQEALRPYLSSEEDRKKGKKFARYQLGDLLLHLEKKHGEDWGKVYDEAWERIDKKVEGLSKHIKLEEERRSEDAQSKAALTDWLRAKASFVIEGLKEADKDEFCRCELKLQKWYGDLRGKPFAIEAENSILDISGFSKQYNCAFIWQKDGVKKLNLYLIINYFKGGKLRFKKIKPEAFEANRFYTVINKKSGEIVPMEVNFNFDDPNLIILPLAFGKRQGREFIWNDLLSLETGSLKLANGRVIEKTLYNRRTRQDEPALFVALTFERREVLDSSNIKPMNLIGVDRGENIPAVIALTDPEGCPLSRFKDSLGNPTHILRIGESYKEKQRTIQAKKEVEQRRAGGYSRKYASKAKNLADDMVRNTARDLLYYAVTQDAMLIFENLSRGFGRQGKRTFMAERQYTRMEDWLTAKLAYEGLPSKTYLSKTLAQYTSKTCSNCGFTITSADYDRVLEKLKKTATGWMTTINGKELKVEGQITYYNRYKRQNVVKDLSVELDRLSEESVNNDISSWTKGRSGEALSLLKKRFSHRPVQEKFVCLNCGFETHADEQAALNIARSWLFLRSQEYKKYQTNKTSTGNTDKRAFVETWQSFYRKKLKEVWKPAV

SEQ ID NO: 31456 - protein, 979 aa, synthetic construct
  REGION 1..979: note = engineered CasX variant
QEGKRINKIRRRLVKDSNTKKAGKTGPMKTLLVRVMTPDLRERLENLRKKPENIPQPISNTSRANLNKLLTDYTEMKKAILHVYWEEFQKDPVGLMSRVAQPASKKIDQNKLKPEMDEKGNLTTAGFACSQCGQPLFVYKLEQVSEKGKAYTNYFGRCNVAEHEKLILLAQLKPEKDSDEAVTYSLGKFGQRALDFYSIHVTKESTHPVKPLAQIAGNRYASHPVGKALSDACMGTIASFLSKYQDIIIEHQKVVKGNQKRLESLRELAGKENLEYPSVTLPPQPHTKEGVDAYNEVIARVRMWVNLNLWQKLKLSRDDAKPLLRLKGFPSFPLVERQANEVDWWDMVCNVKKLINEKKEDGKVFWQNLAGYKRQEALRPYLSSEEDRKKGKKFARYQLGDLLLHLEKKHGEDWGKVYDEAWERIDKKVEGLSKHIKLEEERRSEDAQSKAALTDWLRAKASFVIEGLKEADKDEFCRCELKLQKWYGDLRGKPFAIEAENSILDISGFSKQYNCAFIWQKDGVKKLNLYLIINYFKGGKLRFKKIKPEAFEANRFYTVINKKSGEIVPMEVNFNFDDPNLIILPLAFGKRQGREFIWNDLLSLETGSLKLANGRVIEKTLYNRRTRQDEPALFVALTFERREVLDSSNIKPMNLIGVDRGENIPAVIALTDPEGCPLSRFKDSLGNPTHILRIGESYKEKQRTIQAKKEVEQRRAGGYSRKYASKAKNLADDMVRNTARDLLYYAVTQDAMLIFENLSRGFGRQGKRTFMAERQYTRMEDWLTAKLAYEGLPSKTYLSKTLAQYTSKTCSNCGFTITSADYDRVLEKLKKTATGWMTTINGKELKVEGQITYYNRYKRQNVVKDLSVELDRLSEESVNNDISSWTKGRSGEALSLLKKRFSHRPVQEKFVCLNCGFETHADEQAALNIARSWLFLRSQEYKKYQTNKTSTGNTDKRAFVETWQSFYRKKLKEVWKPAV

SEQ ID NO: 31457 - protein, 979 aa, synthetic construct
  REGION 1..979: note = engineered CasX variant
QEGKRINKIRRRLVKDSNTKKAGKTGPMKTLLVRVMTPDLRERLENLRKKPENIPQPISNTSRANLNKLLTDYTEMKKAILHVYWEEFQKDPVGLMSRVAQPASKKIDQNKLKPEMDEKGNLTTAGFACSQCGQPLFVYKLEQVSEKGKAYTNYFGRCNVAEHEKLILLAQLKPEKDSDEAVTYSLGKFGQRALDFYSIHVTKESTHPVKPLAQIAGNRYASSPVGKALSDACMGTIASFLSKYQDIIIEHQKVVKGNQKRLESLRELAGKENLEYPSVTLPPQPHTKEGVDAYNEVIARVRMWVNLNLWQKLKLSRDDAKPLLRLKGFPSFPLVERQANEVDWWDMVCNVKKLINEKKEDGKVFWQNLAGYKRQEALRPYLSSEEDRKKGKKFARYQLGDLLLHLEKKHGEDWGKVYDEAWERIDKKVEGLSKHIKLEEERRSEDAQSKAALTDWLRAKASFVIEGLKEADKDEFCRCELKLQKWYGDLRGKPFAIEAENSILDISGFSKQYNCAFIWQKDGVKKLNLYLIINYFKGGKLRFKKIKPEAFEANRFYTVINKKSGEIVPMEVNFNFDDPNLIILPLAFGKRQGREFIWNDLLSLETGSLKLANGRVIEKTLYNRRTRQDEPALFVALTFERREVLDSSNIKPMNLIGVDRGENIPAVIALTDPEGCPLSRFKDSLGNPTHILRIGESYKEKQRTIQAKKEVEQRRAGGYSRKYASKAKNLADDMVRNTARDLLYYAVTQDAMLIFENLSRGFGRQGKRTFMAERQYTRMEDWLTAKLAYEGLPSKTYLSKTLAQYTSKTCSNCGFTITSADYDRVLEKLKKTATGWMTTINGKELKVEGQITYYNRYKRQNVVKDLSVELDRLSEESVNNDISSWTKGRSGEALSLLKKRFSHRPVQEKFVCLNCGFETHADEQAALNIARSWLFLRSQEYKKYQTNKTSTGNTDKRAFVETWQSFYRKKLKEVWKPAV

SEQ ID NO: 31458 - protein, 979 aa, synthetic construct
  REGION 1..979: note = engineered CasX variant
QEGKRINKIRRRLVKDSNTKKAGKTGPMKTLLVRVMTPDLRERLENLRKKPENIPQPISNTSRANLNKLLTDYTEMKKAILHVYWEEFQKDPVGLMSRVAQPASKKIDQNKLKPEMDEKGNLTTAGFACSQCGQPLFVYKLEQVSEKGKAYTNYFGRCNVAEHEKLILLAQLKPEKDSDEAVTYSLGKFGQRALDFYSIHVTKESTHPVKPLAQIAGNRYASTPVGKALSDACMGTIASFLSKYQDIIIEHQKVVKGNQKRLESLRELAGKENLEYPSVTLPPQPHTKEGVDAYNEVIARVRMWVNLNLWQKLKLSRDDAKPLLRLKGFPSFPLVERQANEVDWWDMVCNVKKLINEKKEDGKVFWQNLAGYKRQEALRPYLSSEEDRKKGKKFARYQLGDLLLHLEKKHGEDWGKVYDEAWERIDKKVEGLSKHIKLEEERRSEDAQSKAALTDWLRAKASFVIEGLKEADKDEFCRCELKLQKWYGDLRGKPFAIEAENSILDISGFSKQYNCAFIWQKDGVKKLNLYLIINYFKGGKLRFKKIKPEAFEANRFYTVINKKSGEIVPMEVNFNFDDPNLIILPLAFGKRQGREFIWNDLLSLETGSLKLANGRVIEKTLYNRRTRQDEPALFVALTFERREVLDSSNIKPMNLIGVDRGENIPAVIALTDPEGCPLSRFKDSLGNPTHILRIGESYKEKQRTIQAKKEVEQRRAGGYSRKYASKAKNLADDMVRNTARDLLYYAVTQDAMLIFENLSRGFGRQGKRTFMAERQYTRMEDWLTAKLAYEGLPSKTYLSKTLAQYTSKTCSNCGFTITSADYDRVLEKLKKTATGWMTTINGKELKVEGQITYYNRYKRQNVVKDLSVELDRLSEESVNNDISSWTKGRSGEALSLLKKRFSHRPVQEKFVCLNCGFETHADEQAALNIARSWLFLRSQEYKKYQTNKTSTGNTDKRAFVETWQSFYRKKLKEVWKPAV

SEQ ID NO: 31459 - protein, 979 aa, synthetic construct
  REGION 1..979: note = engineered CasX variant
QEGKRINKIRRRLVKDSNTKKAGKTGPMKTLLVRVMTPDLRERLENLRKKPENIPQPISNTSRANLNKLLTDYTEMKKAILHVYWEEFQKDPVGLMSRVAQPASKKIDQNKLKPEMDEKGNLTTAGFACSQCGQPLFVYKLEQVSEKGKAYTNYFGRCNVAEHEKLILLAQLKPEKDSDEAVTYSLGKFGQRALDFYSIHVTKESTHPVKPLAQIAGNRYASAPVGKALSDACMGTIASFLSKYQDIIIEHQKVVKGNQKRLESLRELAGKENLEYPSVTLPPQPHTKEGVDAYNEVIARVRMWVNLNLWQKLKLSRDDAKPLLRLKGFPSFPLVERQANEVDWWDMVCNVKKLINEKKEDGKVFWQNLAGYKRQEALRPYLSSEEDRKKGKKFARYQLGDLLLHLEKKHGEDWGKVYDEAWERIDKKVEGLSKHIKLEEERRSEDAQSKAALTDWLRAKASFVIEGLKEADKDEFCRCELKLQKWYGDLRGKPFAIEAENSILDISGFSKQYNCAFIWQKDGVKKLNLYLIINYFKGGKLRFKKIKPEAFEANRFYTVINKKSGEIVPMEVNFNFDDPNLIILPLAFGKRQGREFIWNDLLSLETGSLKLANGRVIEKTLYNRRTRQDEPALFVALTFERREVLDSSNIKPMNLIGVDRGENIPAVIALTDPEGCPLSRFKDSLGNPTHILRIGESYKEKQRTIQAKKEVEQRRAGGYSRKYASKAKNLADDMVRNTARDLLYYAVTQDAMLIFENLSRGFGRQGKRTFMAERQYTRMEDWLTAKLAYEGLPSKTYLSKTLAQYTSKTCSNCGFTITSADYDRVLEKLKKTATGWMTTINGKELKVEGQITYYNRYKRQNVVKDLSVELDRLSEESVNNDISSWTKGRSGEALSLLKKRFSHRPVQEKFVCLNCGFETHADEQAALNIARSWLFLRSQEYKKYQTNKTSTGNTDKRAFVETWQSFYRKKLKEVWKPAV

SEQ ID NO: 31460 - protein, 979 aa, synthetic construct
  REGION 1..979: note = engineered CasX variant
QEGKRINKIRRRLVKDSNTKKAGKTGPMKTLLVRVMTPDLRERLENLRKKPENIPQPISNTSRANLNKLLTDYTEMKKAILHVYWEEFQKDPVGLMSRVAQPASKKIDQNKLKPEMDEKGNLTTAGFACSQCGQPLFVYKLEQVSEKGKAYTNYFGRCNVAEHEKLILLAQLKPEKDSDEAVTYSLGKFGQRALDFYSIHVTKESTHPVKPLAQIAGNRYASVPVGKALSDACMGTIASFLSKYQDIIIEHQKVVKGNQKRLESLRELAGKENLEYPSVTLPPQPHTKEGVDAYNEVIARVRMWVNLNLWQKLKLSRDDAKPLLRLKGFPSFPLVERQANEVDWWDMVCNVKKLINEKKEDGKVFWQNLAGYKRQEALRPYLSSEEDRKKGKKFARYQLGDLLLHLEKKHGEDWGKVYDEAWERIDKKVEGLSKHIKLEEERRSEDAQSKAALTDWLRAKASFVIEGLKEADKDEFCRCELKLQKWYGDLRGKPFAIEAENSILDISGFSKQYNCAFIWQKDGVKKLNLYLIINYFKGGKLRFKKIKPEAFEANRFYTVINKKSGEIVPMEVNFNFDDPNLIILPLAFGKRQGREFIWNDLLSLETGSLKLANGRVIEKTLYNRRTRQDEPALFVALTFERREVLDSSNIKPMNLIGVDRGENIPAVIALTDPEGCPLSRFKDSLGNPTHILRIGESYKEKQRTIQAKKEVEQRRAGGYSRKYASKAKNLADDMVRNTARDLLYYAVTQDAMLIFENLSRGFGRQGKRTFMAERQYTRMEDWLTAKLAYEGLPSKTYLSKTLAQYTSKTCSNCGFTITSADYDRVLEKLKKTATGWMTTINGKELKVEGQITYYNRYKRQNVVKDLSVELDRLSEESVNNDISSWTKGRSGEALSLLKKRFSHRPVQEKFVCLNCGFETHADEQAALNIARSWLFLRSQEYKKYQTNKTSTGNTDKRAFVETWQSFYRKKLKEVWKPAV

SEQ ID NO: 31461 - protein, 979 aa, synthetic construct
  REGION 1..979: note = engineered CasX variant
QEGKRINKIRRRLVKDSNTKKAGKTGPMKTLLVRVMTPDLRERLENLRKKPENIPQPISNTSRANLNKLLTDYTEMKKAILHVYWEEFQKDPVGLMSRVAQPASKKIDQNKLKPEMDEKGNLTTAGFACSQCGQPLFVYKLEQVSEKGKAYTNYFGRCNVAEHEKLIKLAQLKPEKDSDEAVTYSLGKFGQRALDFYSIHVTKESTHPVKPLAQIAGNRYASGPVGKALSDACMGTIASFLSKYQDIIIEHQKVVKGNQKRLESLRELAGKENLEYPSVTLPPQPHTKEGVDAYNEVIARVRMWVNLNLWQKLKLSRDDAKPLLRLKGFPSFPLVERQANEVDWWDMVCNVKKLINEKKEDGKVFWQNLAGYKRQEALRPYLSSEEDRKKGKKFARYQLGDLLLHLEKKHGEDWGKVYDEAWERIDKKVEGLSKHIKLEEERRSEDAQSKAALTDWLRAKASFVIEGLKEADKDEFCRCELKLQKWYGDLRGKPFAIEAENSILDISGFSKQYNCAFIWQKDGVKKLNLYLIINYFKGGKLRFKKIKPEAFEANRFYTVINKKSGEIVPMEVNFNFDDPNLIILPLAFGKRQGREFIWNDLLSLETGSLKLANGRVIEKTLYNRRTRQDEPALFVALTFERREVLDSSNIKPMNLIGVDRGENIPAVIALTDPEGCPLSRFKDSLGNPTHILRIGESYKEKQRTIQAKKEVEQRRAGGYSRKYASKAKNLADDMVRNTARDLLYYAVTQDAMLIFENLSRGFGRQGKRTFMAERQYTRMEDWLTAKLAYEGLPSKTYLSKTLAQYTSKTCSNCGFTITSADYDRVLEKLKKTATGWMTTINGKELKVEGQITYYNRYKRQNVVKDLSVELDRLSEESVNNDISSWTKGRSGEALSLLKKRFSHRPVQEKFVCLNCGFETHADEQAALNIARSWLFLRSQEYKKYQTNKTSTGNTDKRAFVETWQSFYRKKLKEVWKPAV

SEQ ID NO: 31462 - protein, 978 aa, synthetic construct
  REGION 1..978: note = engineered CasX variant
QEGKRINKIRRRLVKDSNTKKAGKTGPMKTLLVRVMTPDLRERLENLRKKPENIPQPISNTSRANLNKLLTDYTEMKKAILHVYWEEFQKDPVGLMSRVAQPASKKIDQNKLKPEMDEKGNLTTAGFACSQCGQPLFVYKLEQVSEKGKAYTNYFGRCNVAEHEKLILLAQLKPEKDSDEAVTYSLGKFGQRALDFYSIHVTKESTHPVKPLAQIAGNRYASPVGKALSDACMGTIASFLSKYQDIIIEHQKVVKGNQKRLESLRELAGKENLEYPSVTLPPQPHTKEGVDAYNEVIARVRMWVNLNLWQKLKLSRDDAKPLLRLKGFPSFPLVERQANEVDWWDMVCNVKKLINEKKEDGKVFWQNLAGYKRQEALRPYLSSEEDRKKGKKFARYQLGDLLLHLEKKHGEDWGKVYDEAWERIDKKVEGLSKHIKLEEERRSEDAQSKAALTDWLRAKASFVIEGLKEADKDEFCRCELKLQKWYGDLRGKPFAIEAENSILDISGFSKQYNCAFIWQKDGVKKLNLYLIINYFKGGKLRFKKIKPEAFEANRFYTVINKKSGEIVPMEVNFNFDDPNLIILPLAFGKRQGREFIWNDLLSLETGSLKLANGRVIEKTLYNRRTRQDEPALFVALTFERREVLDSSNIKPMNLIGVDRGENIPAVIALTDPEGCPLSRFKDSLGNPTHILRIGESYKEKQRTIQAKKEVEQRRAGGYSRKYASKAKNLADDMVRNTARDLLYYAVTQDAMLIFENLSRGFGRQGKRTFMAERQYTRMEDWLTAKLAYEGLPSKTYLSKTLAQYTSKTCSNCGFTITSADYDRVLEKLKKTATGWMTTINGKELKVEGQITYYNRYKRQNVVKDLSVELDRLSEESVNNDISSWTKGRSGEALSLLKKRFSHRPVQEKFVCLNCGFETHADEQAALNIARSWLFLRSQEYKKYQTNKTSTGNTDKRAFVETWQSFYRKKLKEVWKPAV

SEQ ID NO: 31463 - protein, 979 aa, synthetic construct
  REGION 1..979: note = engineered CasX variant
QEGKRINKIRRRLVKDSNTKKAGKTGPMKTLLVRVMTPDLRERLENLRKKPENIPQPISNTSRANLNKLLTDYTEMKKAILHVYWEEFQKDPVGLMSRVAQPASKKIDQNKLKPEMDEKGNLTTAGFACSQCGQPLFVYKLEQVSEKGKAYTNYFGRCNVAEHEKLILLAQLKPEKDSDEAVTYSLGKFGQRALDFYSIHVTKESTHPVKPLAQIAGNRYASYPVGKALSDACMGTIASFLSKYQDIIIEHQKVVKGNQKRLESLRELAGKENLEYPSVTLPPQPHTKEGVDAYNEVIARVRMWVNLNLWQKLKLSRDDAKPLLRLKGFPSFPLVERQANEVDWWDMVCNVKKLINEKKEDGKVFWQNLAGYKRQEALRPYLSSEEDRKKGKKFARYQLGDLLLHLEKKHGEDWGKVYDEAWERIDKKVEGLSKHIKLEEERRSEDAQSKAALTDWLRAKASFVIEGLKEADKDEFCRCELKLQKWYGDLRGKPFAIEAENSILDISGFSKQYNCAFIWQKDGVKKLNLYLIINYFKGGKLRFKKIKPEAFEANRFYTVINKKSGEIVPMEVNFNFDDPNLIILPLAFGKRQGREFIWNDLLSLETGSLKLANGRVIEKTLYNRRTRQDEPALFVALTFERREVLDSSNIKPMNLIGVDRGENIPAVIALTDPEGCPLSRFKDSLGNPTHILRIGESYKEKQRTIQAKKEVEQRRAGGYSRKYASKAKNLADDMVRNTARDLLYYAVTQDAMLIFENLSRGFGRQGKRTFMAERQYTRMEDWLTAKLAYEGLPSKTYLSKTLAQYTSKTCSNCGFTITSADYDRVLEKLKKTATGWMTTINGKELKVEGQITYYNRYKRQNVVKDLSVELDRLSEESVNNDISSWTKGRSGEALSLLKKRFSHRPVQEKFVCLNCGFETHADEQAALNIARSWLFLRSQEYKKYQTNKTTGKNTDKRAFVETWQSFYRKKLKEVWKPAV

SEQ ID NO: 31464 - protein, 979 aa, synthetic construct
  REGION 1..979: note = engineered CasX variant
QEGKRINKIRRRLVKDSNTKKAGKTGPMKTLLVRVMTPDLRERLENLRKKPENIPQPISNTSRANLNKLLTDYTEMKKAILHVYWEEFQKDPVGLMSRVAQPASKKIDQNKLKPEMDEKGNLTTAGFACSQCGQPLFVYKLEQVSEKGKAYTNYFGRCNVAEHEKLILLAQLKPEKDSDEAVTYSLGKFGQRALDFYSIHVTKESTHPVKPLAQIAGNRYASHPVGKALSDACMGTIASFLSKYQDIIIEHQKVVKGNQKRLESLRELAGKENLEYPSVTLPPQPHTKEGVDAYNEVIARVRMWVNLNLWQKLKLSRDDAKPLLRLKGFPSFPLVERQANEVDWWDMVCNVKKLINEKKEDGKVFWQNLAGYKRQEALRPYLSSEEDRKKGKKFARYQLGDLLLHLEKKHGEDWGKVYDEAWERIDKKVEGLSKHIKLEEERRSEDAQSKAALTDWLRAKASFVIEGLKEADKDEFCRCELKLQKWYGDLRGKPFAIEAENSILDISGFSKQYNCAFIWQKDGVKKLNLYLIINYFKGGKLRFKKIKPEAFEANRFYTVINKKSGEIVPMEVNFNFDDPNLIILPLAFGKRQGREFIWNDLLSLETGSLKLANGRVIEKTLYNRRTRQDEPALFVALTFERREVLDSSNIKPMNLIGVDRGENIPAVIALTDPEGCPLSRFKDSLGNPTHILRIGESYKEKQRTIQAKKEVEQRRAGGYSRKYASKAKNLADDMVRNTARDLLYYAVTQDAMLIFENLSRGFGRQGKRTFMAERQYTRMEDWLTAKLAYEGLPSKTYLSKTLAQYTSKTCSNCGFTITSADYDRVLEKLKKTATGWMTTINGKELKVEGQITYYNRYKRQNVVKDLSVELDRLSEESVNNDISSWTKGRSGEALSLLKKRFSHRPVQEKFVCLNCGFETHADEQAALNIARSWLFLRSQEYKKYQTNKTTGKNTDKRAFVETWQSFYRKKLKEVWKPAV

SEQ ID NO: 31465 - protein, 979 aa, synthetic construct
  REGION 1..979: note = engineered CasX variant
QEGKRINKIRRRLVKDSNTKKAGKTGPMKTLLVRVMTPDLRERLENLRKKPENIPQPISNTSRANLNKLLTDYTEMKKAILHVYWEEFQKDPVGLMSRVAQPASKKIDQNKLKPEMDEKGNLTTAGFACSQCGQPLFVYKLEQVSEKGKAYTNYFGRCNVAEHEKLILLAQLKPEKDSDEAVTYSLGKFGQRALDFYSIHVTKESTHPVKPLAQIAGNRYASSPVGKALSDACMGTIASFLSKYQDIIIEHQKVVKGNQKRLESLRELAGKENLEYPSVTLPPQPHTKEGVDAYNEVIARVRMWVNLNLWQKLKLSRDDAKPLLRLKGFPSFPLVERQANEVDWWDMVCNVKKLINEKKEDGKVFWQNLAGYKRQEALRPYLSSEEDRKKGKKFARYQLGDLLLHLEKKHGEDWGKVYDEAWERIDKKVEGLSKHIKLEEERRSEDAQSKAALTDWLRAKASFVIEGLKEADKDEFCRCELKLQKWYGDLRGKPFAIEAENSILDISGFSKQYNCAFIWQKDGVKKLNLYLIINYFKGGKLRFKKIKPEAFEANRFYTVINKKSGEIVPMEVNFNFDDPNLIILPLAFGKRQGREFIWNDLLSLETGSLKLANGRVIEKTLYNRRTRQDEPALFVALTFERREVLDSSNIKPMNLIGVDRGENIPAVIALTDPEGCPLSRFKDSLGNPTHILRIGESYKEKQRTIQAKKEVEQRRAGGYSRKYASKAKNLADDMVRNTARDLLYYAVTQDAMLIFENLSRGFGRQGKRTFMAERQYTRMEDWLTAKLAYEGLPSKTYLSKTLAQYTSKTCSNCGFTITSADYDRVLEKLKKTATGWMTTINGKELKVEGQITYYNRYKRQNVVKDLSVELDRLSEESVNNDISSWTKGRSGEALSLLKKRFSHRPVQEKFVCLNCGFETHADEQAALNIARSWLFLRSQEYKKYQTNKTTGKNTDKRAFVETWQSFYRKKLKEVWKPAV

SEQ ID NO: 31466 - protein, 979 aa, synthetic construct
  REGION 1..979: note = engineered CasX variant
QEGKRINKIRRRLVKDSNTKKAGKTGPMKTLLVRVMTPDLRERLENLRKKPENIPQPISNTSRANLNKLLTDYTEMKKAILHVYWEEFQKDPVGLMSRVAQPASKKIDQNKLKPEMDEKGNLTTAGFACSQCGQPLFVYKLEQVSEKGKAYTNYFGRCNVAEHEKLILLAQLKPEKDSDEAVTYSLGKFGQRALDFYSIHVTKESTHPVKPLAQIAGNRYASTPVGKALSDACMGTIASFLSKYQDIIIEHQKVVKGNQKRLESLRELAGKENLEYPSVTLPPQPHTKEGVDAYNEVIARVRMWVNLNLWQKLKLSRDDAKPLLRLKGFPSFPLVERQANEVDWWDMVCNVKKLINEKKEDGKVFWQNLAGYKRQEALRPYLSSEEDRKKGKKFARYQLGDLLLHLEKKHGEDWGKVYDEAWERIDKKVEGLSKHIKLEEERRSEDAQSKAALTDWLRAKASFVIEGLKEADKDEFCRCELKLQKWYGDLRGKPFAIEAENSILDISGFSKQYNCAFIWQKDGVKKLNLYLIINYFKGGKLRFKKIKPEAFEANRFYTVINKKSGEIVPMEVNFNFDDPNLIILPLAFGKRQGREFIWNDLLSLETGSLKLANGRVIEKTLYNRRTRQDEPALFVALTFERREVLDSSNIKPMNLIGVDRGENIPAVIALTDPEGCPLSRFKDSLGNPTHILRIGESYKEKQRTIQAKKEVEQRRAGGYSRKYASKAKNLADDMVRNTARDLLYYAVTQDAMLIFENLSRGFGRQGKRTFMAERQYTRMEDWLTAKLAYEGLPSKTYLSKTLAQYTSKTCSNCGFTITSADYDRVLEKLKKTATGWMTTINGKELKVEGQITYYNRYKRQNVVKDLSVELDRLSEESVNNDISSWTKGRSGEALSLLKKRFSHRPVQEKFVCLNCGFETHADEQAALNIARSWLFLRSQEYKKYQTNKTTGKNTDKRAFVETWQSFYRKKLKEVWKPAV

SEQ ID NO: 31467 - protein, 979 aa, synthetic construct
  REGION 1..979: note = engineered CasX variant
QEGKRINKIRRRLVKDSNTKKAGKTGPMKTLLVRVMTPDLRERLENLRKKPENIPQPISNTSRANLNKLLTDYTEMKKAILHVYWEEFQKDPVGLMSRVAQPASKKIDQNKLKPEMDEKGNLTTAGFACSQCGQPLFVYKLEQVSEKGKAYTNYFGRCNVAEHEKLILLAQLKPEKDSDEAVTYSLGKFGQRALDFYSIHVTKESTHPVKPLAQIAGNRYASAPVGKALSDACMGTIASFLSKYQDIIIEHQKVVKGNQKRLESLRELAGKENLEYPSVTLPPQPHTKEGVDAYNEVIARVRMWVNLNLWQKLKLSRDDAKPLLRLKGFPSFPLVERQANEVDWWDMVCNVKKLINEKKEDGKVFWQNLAGYKRQEALRPYLSSEEDRKKGKKFARYQLGDLLLHLEKKHGEDWGKVYDEAWERIDKKVEGLSKHIKLEEERRSEDAQSKAALTDWLRAKASFVIEGLKEADKDEFCRCELKLQKWYGDLRGKPFAIEAENSILDISGFSKQYNCAFIWQKDGVKKLNLYLIINYFKGGKLRFKKIKPEAFEANRFYTVINKKSGEIVPMEVNFNFDDPNLIILPLAFGKRQGREFIWNDLLSLETGSLKLANGRVIEKTLYNRRTRQDEPALFVALTFERREVLDSSNIKPMNLIGVDRGENIPAVIALTDPEGCPLSRFKDSLGNPTHILRIGESYKEKQRTIQAKKEVEQRRAGGYSRKYASKAKNLADDMVRNTARDLLYYAVTQDAMLIFENLSRGFGRQGKRTFMAERQYTRMEDWLTAKLAYEGLPSKTYLSKTLAQYTSKTCSNCGFTITSADYDRVLEKLKKTATGWMTTINGKELKVEGQITYYNRYKRQNVVKDLSVELDRLSEESVNNDISSWTKGRSGEALSLLKKRFSHRPVQEKFVCLNCGFETHADEQAALNIARSWLFLRSQEYKKYQTNKTTGKNTDKRAFVETWQSFYRKKLKEVWKPAV

SEQ ID NO: 31468 - protein, 979 aa, synthetic construct
  REGION 1..979: note = engineered CasX variant
QEGKRINKIRRRLVKDSNTKKAGKTGPMKTLLVRVMTPDLRERLENLRKKPENIPQPISNTSRANLNKLLTDYTEMKKAILHVYWEEFQKDPVGLMSRVAQPASKKIDQNKLKPEMDEKGNLTTAGFACSQCGQPLFVYKLEQVSEKGKAYTNYFGRCNVAEHEKLILLAQLKPEKDSDEAVTYSLGKFGQRALDFYSIHVTKESTHPVKPLAQIAGNRYASVPVGKALSDACMGTIASFLSKYQDIIIEHQKVVKGNQKRLESLRELAGKENLEYPSVTLPPQPHTKEGVDAYNEVIARVRMWVNLNLWQKLKLSRDDAKPLLRLKGFPSFPLVERQANEVDWWDMVCNVKKLINEKKEDGKVFWQNLAGYKRQEALRPYLSSEEDRKKGKKFARYQLGDLLLHLEKKHGEDWGKVYDEAWERIDKKVEGLSKHIKLEEERRSEDAQSKAALTDWLRAKASFVIEGLKEADKDEFCRCELKLQKWYGDLRGKPFAIEAENSILDISGFSKQYNCAFIWQKDGVKKLNLYLIINYFKGGKLRFKKIKPEAFEANRFYTVINKKSGEIVPMEVNFNFDDPNLIILPLAFGKRQGREFIWNDLLSLETGSLKLANGRVIEKTLYNRRTRQDEPALFVALTFERREVLDSSNIKPMNLIGVDRGENIPAVIALTDPEGCPLSRFKDSLGNPTHILRIGESYKEKQRTIQAKKEVEQRRAGGYSRKYASKAKNLADDMVRNTARDLLYYAVTQDAMLIFENLSRGFGRQGKRTFMAERQYTRMEDWLTAKLAYEGLPSKTYLSKTLAQYTSKTCSNCGFTITSADYDRVLEKLKKTATGWMTTINGKELKVEGQITYYNRYKRQNVVKDLSVELDRLSEESVNNDISSWTKGRSGEALSLLKKRFSHRPVQEKFVCLNCGFETHADEQAALNIARSWLFLRSQEYKKYQTNKTTGKNTDKRAFVETWQSFYRKKLKEVWKPAV

SEQ ID NO: 31469 - protein, 979 aa, synthetic construct
  REGION 1..979: note = engineered CasX variant
QEGKRINKIRRRLVKDSNTKKAGKTGPMKTLLVRVMTPDLRERLENLRKKPENIPQPISNTSRANLNKLLTDYTEMKKAILHVYWEEFQKDPVGLMSRVAQPASKKIDQNKLKPEMDEKGNLTTAGFACSQCGQPLFVYKLEQVSEKGKAYTNYFGRCNVAEHEKLIKLAQLKPEKDSDEAVTYSLGKFGQRALDFYSIHVTKESTHPVKPLAQIAGNRYASGPVGKALSDACMGTIASFLSKYQDIIIEHQKVVKGNQKRLESLRELAGKENLEYPSVTLPPQPHTKEGVDAYNEVIARVRMWVNLNLWQKLKLSRDDAKPLLRLKGFPSFPLVERQANEVDWWDMVCNVKKLINEKKEDGKVFWQNLAGYKRQEALRPYLSSEEDRKKGKKFARYQLGDLLLHLEKKHGEDWGKVYDEAWERIDKKVEGLSKHIKLEEERRSEDAQSKAALTDWLRAKASFVIEGLKEADKDEFCRCELKLQKWYGDLRGKPFAIEAENSILDISGFSKQYNCAFIWQKDGVKKLNLYLIINYFKGGKLRFKKIKPEAFEANRFYTVINKKSGEIVPMEVNFNFDDPNLIILPLAFGKRQGREFIWNDLLSLETGSLKLANGRVIEKTLYNRRTRQDEPALFVALTFERREVLDSSNIKPMNLIGVDRGENIPAVIALTDPEGCPLSRFKDSLGNPTHILRIGESYKEKQRTIQAKKEVEQRRAGGYSRKYASKAKNLADDMVRNTARDLLYYAVTQDAMLIFENLSRGFGRQGKRTFMAERQYTRMEDWLTAKLAYEGLPSKTYLSKTLAQYTSKTCSNCGFTITSADYDRVLEKLKKTATGWMTTINGKELKVEGQITYYNRYKRQNVVKDLSVELDRLSEESVNNDISSWTKGRSGEALSLLKKRFSHRPVQEKFVCLNCGFETHADEQAALNIARSWLFLRSQEYKKYQTNKTTGKNTDKRAFVETWQSFYRKKLKEVWKPAV

SEQ ID NO: 31470 - protein, 978 aa, synthetic construct
  REGION 1..978: note = engineered CasX variant
QEGKRINKIRRRLVKDSNTKKAGKTGPMKTLLVRVMTPDLRERLENLRKKPENIPQPISNTSRANLNKLLTDYTEMKKAILHVYWEEFQKDPVGLMSRVAQPASKKIDQNKLKPEMDEKGNLTTAGFACSQCGQPLFVYKLEQVSEKGKAYTNYFGRCNVAEHEKLILLAQLKPEKDSDEAVTYSLGKFGQRALDFYSIHVTKESTHPVKPLAQIAGNRYASPVGKALSDACMGTIASFLSKYQDIIIEHQKVVKGNQKRLESLRELAGKENLEYPSVTLPPQPHTKEGVDAYNEVIARVRMWVNLNLWQKLKLSRDDAKPLLRLKGFPSFPLVERQANEVDWWDMVCNVKKLINEKKEDGKVFWQNLAGYKRQEALRPYLSSEEDRKKGKKFARYQLGDLLLHLEKKHGEDWGKVYDEAWERIDKKVEGLSKHIKLEEERRSEDAQSKAALTDWLRAKASFVIEGLKEADKDEFCRCELKLQKWYGDLRGKPFAIEAENSILDISGFSKQYNCAFIWQKDGVKKLNLYLIINYFKGGKLRFKKIKPEAFEANRFYTVINKKSGEIVPMEVNFNFDDPNLIILPLAFGKRQGREFIWNDLLSLETGSLKLANGRVIEKTLYNRRTRQDEPALFVALTFERREVLDSSNIKPMNLIGVDRGENIPAVIALTDPEGCPLSRFKDSLGNPTHILRIGESYKEKQRTIQAKKEVEQRRAGGYSRKYASKAKNLADDMVRNTARDLLYYAVTQDAMLIFENLSRGFGRQGKRTFMAERQYTRMEDWLTAKLAYEGLPSKTYLSKTLAQYTSKTCSNCGFTITSADYDRVLEKLKKTATGWMTTINGKELKVEGQITYYNRYKRQNVVKDLSVELDRLSEESVNNDISSWTKGRSGEALSLLKKRFSHRPVQEKFVCLNCGFETHADEQAALNIARSWLFLRSQEYKKYQTNKTTGKNTDKRAFVETWQSFYRKKLKEVWKPAV

SEQ ID NO: 31471 - protein, 978 aa, synthetic construct
  REGION 1..978: note = engineered CasX variant
QEGKRINKIRRRLVKDSNTKKAGKTGPMKTLLVRVMTPDLRERLENLRKKPENIPQPISNTSRANLNKLLTDYTEMKKAILHVYWEEFQKDPVGLMSRVAQPASKKIDQNKLKPEMDEKGNLTTAGFACSQCGQPLFVYKLEQVSEKGKAYTNYFGRCNVAEHEKLILLAQLKPEKDSDEAVTYSLGKFGQRALDFYSIHVTKESTHPVKPLAQIAGNRYASYPVGKALSDACMGTIASFLSKYQDIIIEHQKVVKGNQKRLESLRELAGKENLEYPSVTLPPQPHTKEGVDAYNEVIARVRMWVNLNLWQKLKLSRDDAKPLLRLKKFPSFPLVERQANEVDWWDMVCNVKKLINEKKEDGKVFWQNLAGYKRQEALRPYLSSEEDRKKGKKFARYQLGDLLLHLEKKHGEDWGKVYDEAWERIDKKVEGLSKHIKLEEERRSEDAQSKAALTDWLRAKASFVIEGLKEADKDEFCRCELKLQKWYGDLRGKPFAIEAENSILDISGFSKQYNCAFIWQKDGVKKLNLYLIINYFKGGKLRFKKIKPEAFEANRFYTVINKKSGEIVPMEVNFNFDDPNLIILPLAFGKRQGREFIWNDLLSLETGSLKLANGRVIEKTLYNRRTRQDEPALFVALTFERREVLDSSNIKPMNLIGVDRGENIPAVIALTDPEGCPLSRFKDSLGNPTHILRIGESYKEKQRTIQAKKEVEQRRAGGYSRKYASKAKNLADDMVRNTARDLLYYAVTQDAMLIFENLSRGFGRQGKRTFMAERQYTRMEDWLTAKLAYEGLPSKTYLSKTLAQYTSKTCSNCGFTITSADYDRVLEKLKKTATGWMTTINGKELKVEGQITYYNRYKRQNVVKDLSVELDRLSEESVNNDISSWTKGRSGEALSLLKKRFSHRPVQEKFVCLNCGFETHADEQAALNIARSWLFLRSQEYKKYQTNKTTGNTDKRAFVETWQSFYRKKLKEVWKPAV

SEQ ID NO: 31472 - protein, 978 aa, synthetic construct
  REGION 1..978: note = engineered CasX variant
QEGKRINKIRRRLVKDSNTKKAGKTGPMKTLLVRVMTPDLRERLENLRKKPENIPQPISNTSRANLNKLLTDYTEMKKAILHVYWEEFQKDPVGLMSRVAQPASKKIDQNKLKPEMDEKGNLTTAGFACSQCGQPLFVYKLEQVSEKGKAYTNYFGRCNVAEHEKLILLAQLKPEKDSDEAVTYSLGKFGQRALDFYSIHVTKESTHPVKPLAQIAGNRYASHPVGKALSDACMGTIASFLSKYQDIIIEHQKVVKGNQKRLESLRELAGKENLEYPSVTLPPQPHTKEGVDAYNEVIARVRMWVNLNLWQKLKLSRDDAKPLLRLKKFPSFPLVERQANEVDWWDMVCNVKKLINEKKEDGKVFWQNLAGYKRQEALRPYLSSEEDRKKGKKFARYQLGDLLLHLEKKHGEDWGKVYDEAWERIDKKVEGLSKHIKLEEERRSEDAQSKAALTDWLRAKASFVIEGLKEADKDEFCRCELKLQKWYGDLRGKPFAIEAENSILDISGFSKQYNCAFIWQKDGVKKLNLYLIINYFKGGKLRFKKIKPEAFEANRFYTVINKKSGEIVPMEVNFNFDDPNLIILPLAFGKRQGREFIWNDLLSLETGSLKLANGRVIEKTLYNRRTRQDEPALFVALTFERREVLDSSNIKPMNLIGVDRGENIPAVIALTDPEGCPLSRFKDSLGNPTHILRIGESYKEKQRTIQAKKEVEQRRAGGYSRKYASKAKNLADDMVRNTARDLLYYAVTQDAMLIFENLSRGFGRQGKRTFMAERQYTRMEDWLTAKLAYEGLPSKTYLSKTLAQYTSKTCSNCGFTITSADYDRVLEKLKKTATGWMTTINGKELKVEGQITYYNRYKRQNVVKDLSVELDRLSEESVNNDISSWTKGRSGEALSLLKKRFSHRPVQEKFVCLNCGFETHADEQAALNIARSWLFLRSQEYKKYQTNKTTGNTDKRAFVETWQSFYRKKLKEVWKPAV

SEQ ID NO: 31473 - protein, 978 aa, synthetic construct
  REGION 1..978: note = engineered CasX variant
QEGKRINKIRRRLVKDSNTKKAGKTGPMKTLLVRVMTPDLRERLENLRKKPENIPQPISNTSRANLNKLLTDYTEMKKAILHVYWEEFQKDPVGLMSRVAQPASKKIDQNKLKPEMDEKGNLTTAGFACSQCGQPLFVYKLEQVSEKGKAYTNYFGRCNVAEHEKLILLAQLKPEKDSDEAVTYSLGKFGQRALDFYSIHVTKESTHPVKPLAQIAGNRYASSPVGKALSDACMGTIASFLSKYQDIIIEHQKVVKGNQKRLESLRELAGKENLEYPSVTLPPQPHTKEGVDAYNEVIARVRMWVNLNLWQKLKLSRDDAKPLLRLKKFPSFPLVERQANEVDWWDMVCNVKKLINEKKEDGKVFWQNLAGYKRQEALRPYLSSEEDRKKGKKFARYQLGDLLLHLEKKHGEDWGKVYDEAWERIDKKVEGLSKHIKLEEERRSEDAQSKAALTDWLRAKASFVIEGLKEADKDEFCRCELKLQKWYGDLRGKPFAIEAENSILDISGFSKQYNCAFIWQKDGVKKLNLYLIINYFKGGKLRFKKIKPEAFEANRFYTVINKKSGEIVPMEVNFNFDDPNLIILPLAFGKRQGREFIWNDLLSLETGSLKLANGRVIEKTLYNRRTRQDEPALFVALTFERREVLDSSNIKPMNLIGVDRGENIPAVIALTDPEGCPLSRFKDSLGNPTHILRIGESYKEKQRTIQAKKEVEQRRAGGYSRKYASKAKNLADDMVRNTARDLLYYAVTQDAMLIFENLSRGFGRQGKRTFMAERQYTRMEDWLTAKLAYEGLPSKTYLSKTLAQYTSKTCSNCGFTITSADYDRVLEKLKKTATGWMTTINGKELKVEGQITYYNRYKRQNVVKDLSVELDRLSEESVNNDISSWTKGRSGEALSLLKKRFSHRPVQEKFVCLNCGFETHADEQAALNIARSWLFLRSQEYKKYQTNKTTGNTDKRAFVETWQSFYRKKLKEVWKPAV

SEQ ID NO: 31474 - protein, 978 aa, synthetic construct
  REGION 1..978: note = engineered CasX variant
QEGKRINKIRRRLVKDSNTKKAGKTGPMKTLLVRVMTPDLRERLENLRKKPENIPQPISNTSRANLNKLLTDYTEMKKAILHVYWEEFQKDPVGLMSRVAQPASKKIDQNKLKPEMDEKGNLTTAGFACSQCGQPLFVYKLEQVSEKGKAYTNYFGRCNVAEHEKLILLAQLKPEKDSDEAVTYSLGKFGQRALDFYSIHVTKESTHPVKPLAQIAGNRYASTPVGKALSDACMGTIASFLSKYQDIIIEHQKVVKGNQKRLESLRELAGKENLEYPSVTLPPQPHTKEGVDAYNEVIARVRMWVNLNLWQKLKLSRDDAKPLLRLKKFPSFPLVERQANEVDWWDMVCNVKKLINEKKEDGKVFWQNLAGYKRQEALRPYLSSEEDRKKGKKFARYQLGDLLLHLEKKHGEDWGKVYDEAWERIDKKVEGLSKHIKLEEERRSEDAQSKAALTDWLRAKASFVIEGLKEADKDEFCRCELKLQKWYGDLRGKPFAIEAENSILDISGFSKQYNCAFIWQKDGVKKLNLYLIINYFKGGKLRFKKIKPEAFEANRFYTVINKKSGEIVPMEVNFNFDDPNLIILPLAFGKRQGREFIWNDLLSLETGSLKLANGRVIEKTLYNRRTRQDEPALFVALTFERREVLDSSNIKPMNLIGVDRGENIPAVIALTDPEGCPLSRFKDSLGNPTHILRIGESYKEKQRTIQAKKEVEQRRAGGYSRKYASKAKNLADDMVRNTARDLLYYAVTQDAMLIFENLSRGFGRQGKRTFMAERQYTRMEDWLTAKLAYEGLPSKTYLSKTLAQYTSKTCSNCGFTITSADYDRVLEKLKKTATGWMTTINGKELKVEGQITYYNRYKRQNVVKDLSVELDRLSEESVNNDISSWTKGRSGEALSLLKKRFSHRPVQEKFVCLNCGFETHADEQAALNIARSWLFLRSQEYKKYQTNKTTGNTDKRAFVETWQSFYRKKLKEVWKPAV

SEQ ID NO: 31475 - protein, 978 aa, synthetic construct
  REGION 1..978: note = engineered CasX variant
QEGKRINKIRRRLVKDSNTKKAGKTGPMKTLLVRVMTPDLRERLENLRKKPENIPQPISNTSRANLNKLLTDYTEMKKAILHVYWEEFQKDPVGLMSRVAQPASKKIDQNKLKPEMDEKGNLTTAGFACSQCGQPLFVYKLEQVSEKGKAYTNYFGRCNVAEHEKLILLAQLKPEKDSDEAVTYSLGKFGQRALDFYSIHVTKESTHPVKPLAQIAGNRYASAPVGKALSDACMGTIASFLSKYQDIIIEHQKVVKGNQKRLESLRELAGKENLEYPSVTLPPQPHTKEGVDAYNEVIARVRMWVNLNLWQKLKLSRDDAKPLLRLKKFPSFPLVERQANEVDWWDMVCNVKKLINEKKEDGKVFWQNLAGYKRQEALRPYLSSEEDRKKGKKFARYQLGDLLLHLEKKHGEDWGKVYDEAWERIDKKVEGLSKHIKLEEERRSEDAQSKAALTDWLRAKASFVIEGLKEADKDEFCRCELKLQKWYGDLRGKPFAIEAENSILDISGFSKQYNCAFIWQKDGVKKLNLYLIINYFKGGKLRFKKIKPEAFEANRFYTVINKKSGEIVPMEVNFNFDDPNLIILPLAFGKRQGREFIWNDLLSLETGSLKLANGRVIEKTLYNRRTRQDEPALFVALTFERREVLDSSNIKPMNLIGVDRGENIPAVIALTDPEGCPLSRFKDSLGNPTHILRIGESYKEKQRTIQAKKEVEQRRAGGYSRKYASKAKNLADDMVRNTARDLLYYAVTQDAMLIFENLSRGFGRQGKRTFMAERQYTRMEDWLTAKLAYEGLPSKTYLSKTLAQYTSKTCSNCGFTITSADYDRVLEKLKKTATGWMTTINGKELKVEGQITYYNRYKRQNVVKDLSVELDRLSEESVNNDISSWTKGRSGEALSLLKKRFSHRPVQEKFVCLNCGFETHADEQAALNIARSWLFLRSQEYKKYQTNKTTGNTDKRAFVETWQSFYRKKLKEVWKPAV

SEQ ID NO: 31476 - protein, 978 aa, synthetic construct
  REGION 1..978: note = engineered CasX variant
QEGKRINKIRRRLVKDSNTKKAGKTGPMKTLLVRVMTPDLRERLENLRKKPENIPQPISNTSRANLNKLLTDYTEMKKAILHVYWEEFQKDPVGLMSRVAQPASKKIDQNKLKPEMDEKGNLTTAGFACSQCGQPLFVYKLEQVSEKGKAYTNYFGRCNVAEHEKLILLAQLKPEKDSDEAVTYSLGKFGQRALDFYSIHVTKESTHPVKPLAQIAGNRYASVPVGKALSDACMGTIASFLSKYQDIIIEHQKVVKGNQKRLESLRELAGKENLEYPSVTLPPQPHTKEGVDAYNEVIARVRMWVNLNLWQKLKLSRDDAKPLLRLKKFPSFPLVERQANEVDWWDMVCNVKKLINEKKEDGKVFWQNLAGYKRQEALRPYLSSEEDRKKGKKFARYQLGDLLLHLEKKHGEDWGKVYDEAWERIDKKVEGLSKHIKLEEERRSEDAQSKAALTDWLRAKASFVIEGLKEADKDEFCRCELKLQKWYGDLRGKPFAIEAENSILDISGFSKQYNCAFIWQKDGVKKLNLYLIINYFKGGKLRFKKIKPEAFEANRFYTVINKKSGEIVPMEVNFNFDDPNLIILPLAFGKRQGREFIWNDLLSLETGSLKLANGRVIEKTLYNRRTRQDEPALFVALTFERREVLDSSNIKPMNLIGVDRGENIPAVIALTDPEGCPLSRFKDSLGNPTHILRIGESYKEKQRTIQAKKEVEQRRAGGYSRKYASKAKNLADDMVRNTARDLLYYAVTQDAMLIFENLSRGFGRQGKRTFMAERQYTRMEDWLTAKLAYEGLPSKTYLSKTLAQYTSKTCSNCGFTITSADYDRVLEKLKKTATGWMTTINGKELKVEGQITYYNRYKRQNVVKDLSVELDRLSEESVNNDISSWTKGRSGEALSLLKKRFSHRPVQEKFVCLNCGFETHADEQAALNIARSWLFLRSQEYKKYQTNKTTGNTDKRAFVETWQSFYRKKLKEVWKPAV

SEQ ID NO: 31477 - protein, 978 aa, synthetic construct
  REGION 1..978: note = engineered CasX variant
QEGKRINKIRRRLVKDSNTKKAGKTGPMKTLLVRVMTPDLRERLENLRKKPENIPQPISNTSRANLNKLLTDYTEMKKAILHVYWEEFQKDPVGLMSRVAQPASKKIDQNKLKPEMDEKGNLTTAGFACSQCGQPLFVYKLEQVSEKGKAYTNYFGRCNVAEHEKLIKLAQLKPEKDSDEAVTYSLGKFGQRALDFYSIHVTKESTHPVKPLAQIAGNRYASGPVGKALSDACMGTIASFLSKYQDIIIEHQKVVKGNQKRLESLRELAGKENLEYPSVTLPPQPHTKEGVDAYNEVIARVRMWVNLNLWQKLKLSRDDAKPLLRLKKFPSFPLVERQANEVDWWDMVCNVKKLINEKKEDGKVFWQNLAGYKRQEALRPYLSSEEDRKKGKKFARYQLGDLLLHLEKKHGEDWGKVYDEAWERIDKKVEGLSKHIKLEEERRSEDAQSKAALTDWLRAKASFVIEGLKEADKDEFCRCELKLQKWYGDLRGKPFAIEAENSILDISGFSKQYNCAFIWQKDGVKKLNLYLIINYFKGGKLRFKKIKPEAFEANRFYTVINKKSGEIVPMEVNFNFDDPNLIILPLAFGKRQGREFIWNDLLSLETGSLKLANGRVIEKTLYNRRTRQDEPALFVALTFERREVLDSSNIKPMNLIGVDRGENIPAVIALTDPEGCPLSRFKDSLGNPTHILRIGESYKEKQRTIQAKKEVEQRRAGGYSRKYASKAKNLADDMVRNTARDLLYYAVTQDAMLIFENLSRGFGRQGKRTFMAERQYTRMEDWLTAKLAYEGLPSKTYLSKTLAQYTSKTCSNCGFTITSADYDRVLEKLKKTATGWMTTINGKELKVEGQITYYNRYKRQNVVKDLSVELDRLSEESVNNDISSWTKGRSGEALSLLKKRFSHRPVQEKFVCLNCGFETHADEQAALNIARSWLFLRSQEYKKYQTNKTTGNTDKRAFVETWQSFYRKKLKEVWKPAV

SEQ ID NO: 31478 - protein, 977 aa, synthetic construct
  REGION 1..977: note = engineered CasX variant
QEGKRINKIRRRLVKDSNTKKAGKTGPMKTLLVRVMTPDLRERLENLRKKPENIPQPISNTSRANLNKLLTDYTEMKKAILHVYWEEFQKDPVGLMSRVAQPASKKIDQNKLKPEMDEKGNLTTAGFACSQCGQPLFVYKLEQVSEKGKAYTNYFGRCNVAEHEKLILLAQLKPEKDSDEAVTYSLGKFGQRALDFYSIHVTKESTHPVKPLAQIAGNRYASPVGKALSDACMGTIASFLSKYQDIIIEHQKVVKGNQKRLESLRELAGKENLEYPSVTLPPQPHTKEGVDAYNEVIARVRMWVNLNLWQKLKLSRDDAKPLLRLKKFPSFPLVERQANEVDWWDMVCNVKKLINEKKEDGKVFWQNLAGYKRQEALRPYLSSEEDRKKGKKFARYQLGDLLLHLEKKHGEDWGKVYDEAWERIDKKVEGLSKHIKLEEERRSEDAQSKAALTDWLRAKASFVIEGLKEADKDEFCRCELKLQKWYGDLRGKPFAIEAENSILDISGFSKQYNCAFIWQKDGVKKLNLYLIINYFKGGKLRFKKIKPEAFEANRFYTVINKKSGEIVPMEVNFNFDDPNLIILPLAFGKRQGREFIWNDLLSLETGSLKLANGRVIEKTLYNRRTRQDEPALFVALTFERREVLDSSNIKPMNLIGVDRGENIPAVIALTDPEGCPLSRFKDSLGNPTHILRIGESYKEKQRTIQAKKEVEQRRAGGYSRKYASKAKNLADDMVRNTARDLLYYAVTQDAMLIFENLSRGFGRQGKRTFMAERQYTRMEDWLTAKLAYEGLPSKTYLSKTLAQYTSKTCSNCGFTITSADYDRVLEKLKKTATGWMTTINGKELKVEGQITYYNRYKRQNVVKDLSVELDRLSEESVNNDISSWTKGRSGEALSLLKKRFSHRPVQEKFVCLNCGFETHADEQAALNIARSWLFLRSQEYKKYQTNKTTGNTDKRAFVETWQSFYRKKLKEVWKPAV

SEQ ID NO: 31479 - protein, 978 aa, synthetic construct
  REGION 1..978: note = engineered CasX variant
QEGKRINKIRRRLVKDSNTKKAGKTGPMKTLLVRVMTPDLRERLENLRKKPENIPQPISNTSRANLNKLLTDYTEMKKAILHVYWEEFQKDPVGLMSRVAQPASKKIDQNKLKPEMDEKGNLTTAGFACSQCGQPLFVYKLEQVSEKGKAYTNYFGRCNVAEHEKLILLAQLKPEKDSDEAVTYSLGKFGQRALDFYSIHVTKESTHPVKPLAQIAGNRYASYPVGKALSDACMGTIASFLSKYQDIIIEHQKVVKGNQKRLESLRELAGKENLEYPSVTLPPQPHTKEGVDAYNEVIARVRMWVNLNLWQKLKLSRDDAKPLLRLKGFPSFPLVERQANEVDWWDMVCNVKKLINEKKEDGKVFWQNLAGYKRQEALRPYLSSEEDRKKGKKFARYQLGDLLLHLEKKHGEDWGKVYDEAWERIDKKVEGLSKHIKLEEERRSEDAQSKAALTDWLRAKASFVIEGLKEADKDEFCRCELKLQKWYGDLRGKPFAIEAENSILDISGFSKQYNCAFIWQKDGVKKLNLYLIINYFKGGKLRFKKIKPEAFEANRFYTVINKKSGEIVPMEVNFNFDDPNLIILPLAFGKRQGREFIWNDLLSLETGSLKLANGRVIEKTLYNRRTRQDEPALFVALTFERREVLDSSNIKPMNLIGVDRGENIPAVIALTDPEGCPLSRFKDSLGNPTHILRIGERYKEKQRTIQAKKEVEQRRAGGYSRKYASKAKNLADDMVRNTARDLLYYAVTQDAMLIFENLSRGFGRQGKRTFMAERQYTRMEDWLTAKLAYEGLPSKTYLSKTLAQYTSKTCSNCGFTITSADYDRVLEKLKKTATGWMTTINGKELKVEGQITYYNRYKRQNVVKDLSVELDRLSEESVNNDISSWTKGRSGEALSLLKKRFSHRPVQEKFVCLNCGFETHADEQAALNIARSWLFLRSQEYKKYQTNKTTGNTDKRAFVETWQSFYRKKLKEVWKPAV

SEQ ID NO: 31480 - protein, 978 aa, synthetic construct
  REGION 1..978: note = engineered CasX variant
QEGKRINKIRRRLVKDSNTKKAGKTGPMKTLLVRVMTPDLRERLENLRKKPENIPQPISNTSRANLNKLLTDYTEMKKAILHVYWEEFQKDPVGLMSRVAQPASKKIDQNKLKPEMDEKGNLTTAGFACSQCGQPLFVYKLEQVSEKGKAYTNYFGRCNVAEHEKLILLAQLKPEKDSDEAVTYSLGKFGQRALDFYSIHVTKESTHPVKPLAQIAGNRYASHPVGKALSDACMGTIASFLSKYQDIIIEHQKVVKGNQKRLESLRELAGKENLEYPSVTLPPQPHTKEGVDAYNEVIARVRMWVNLNLWQKLKLSRDDAKPLLRLKGFPSFPLVERQANEVDWWDMVCNVKKLINEKKEDGKVFWQNLAGYKRQEALRPYLSSEEDRKKGKKFARYQLGDLLLHLEKKHGEDWGKVYDEAWERIDKKVEGLSKHIKLEEERRSEDAQSKAALTDWLRAKASFVIEGLKEADKDEFCRCELKLQKWYGDLRGKPFAIEAENSILDISGFSKQYNCAFIWQKDGVKKLNLYLIINYFKGGKLRFKKIKPEAFEANRFYTVINKKSGEIVPMEVNFNFDDPNLIILPLAFGKRQGREFIWNDLLSLETGSLKLANGRVIEKTLYNRRTRQDEPALFVALTFERREVLDSSNIKPMNLIGVDRGENIPAVIALTDPEGCPLSRFKDSLGNPTHILRIGERYKEKQRTIQAKKEVEQRRAGGYSRKYASKAKNLADDMVRNTARDLLYYAVTQDAMLIFENLSRGFGRQGKRTFMAERQYTRMEDWLTAKLAYEGLPSKTYLSKTLAQYTSKTCSNCGFTITSADYDRVLEKLKKTATGWMTTINGKELKVEGQITYYNRYKRQNVVKDLSVELDRLSEESVNNDISSWTKGRSGEALSLLKKRFSHRPVQEKFVCLNCGFETHADEQAALNIARSWLFLRSQEYKKYQTNKTTGNTDKRAFVETWQSFYRKKLKEVWKPAV

SEQ ID NO: 31481 - protein, 978 aa, synthetic construct
  REGION 1..978: note = engineered CasX variant
QEGKRINKIRRRLVKDSNTKKAGKTGPMKTLLVRVMTPDLRERLENLRKKPENIPQPISNTSRANLNKLLTDYTEMKKAILHVYWEEFQKDPVGLMSRVAQPASKKIDQNKLKPEMDEKGNLTTAGFACSQCGQPLFVYKLEQVSEKGKAYTNYFGRCNVAEHEKLILLAQLKPEKDSDEAVTYSLGKFGQRALDFYSIHVTKESTHPVKPLAQIAGNRYASSPVGKALSDACMGTIASFLSKYQDIIIEHQKVVKGNQKRLESLRELAGKENLEYPSVTLPPQPHTKEGVDAYNEVIARVRMWVNLNLWQKLKLSRDDAKPLLRLKGFPSFPLVERQANEVDWWDMVCNVKKLINEKKEDGKVFWQNLAGYKRQEALRPYLSSEEDRKKGKKFARYQLGDLLLHLEKKHGEDWGKVYDEAWERIDKKVEGLSKHIKLEEERRSEDAQSKAALTDWLRAKASFVIEGLKEADKDEFCRCELKLQKWYGDLRGKPFAIEAENSILDISGFSKQYNCAFIWQKDGVKKLNLYLIINYFKGGKLRFKKIKPEAFEANRFYTVINKKSGEIVPMEVNFNFDDPNLIILPLAFGKRQGREFIWNDLLSLETGSLKLANGRVIEKTLYNRRTRQDEPALFVALTFERREVLDSSNIKPMNLIGVDRGENIPAVIALTDPEGCPLSRFKDSLGNPTHILRIGERYKEKQRTIQAKKEVEQRRAGGYSRKYASKAKNLADDMVRNTARDLLYYAVTQDAMLIFENLSRGFGRQGKRTFMAERQYTRMEDWLTAKLAYEGLPSKTYLSKTLAQYTSKTCSNCGFTITSADYDRVLEKLKKTATGWMTTINGKELKVEGQITYYNRYKRQNVVKDLSVELDRLSEESVNNDISSWTKGRSGEALSLLKKRFSHRPVQEKFVCLNCGFETHADEQAALNIARSWLFLRSQEYKKYQTNKTTGNTDKRAFVETWQSFYRKKLKEVWKPAV

SEQ ID NO: 31482 - protein, 978 aa, synthetic construct
  REGION 1..978: note = engineered CasX variant
QEGKRINKIRRRLVKDSNTKKAGKTGPMKTLLVRVMTPDLRERLENLRKKPENIPQPISNTSRANLNKLLTDYTEMKKAILHVYWEEFQKDPVGLMSRVAQPASKKIDQNKLKPEMDEKGNLTTAGFACSQCGQPLFVYKLEQVSEKGKAYTNYFGRCNVAEHEKLILLAQLKPEKDSDEAVTYSLGKFGQRALDFYSIHVTKESTHPVKPLAQIAGNRYASTPVGKALSDACMGTIASFLSKYQDIIIEHQKVVKGNQKRLESLRELAGKENLEYPSVTLPPQPHTKEGVDAYNEVIARVRMWVNLNLWQKLKLSRDDAKPLLRLKGFPSFPLVERQANEVDWWDMVCNVKKLINEKKEDGKVFWQNLAGYKRQEALRPYLSSEEDRKKGKKFARYQLGDLLLHLEKKHGEDWGKVYDEAWERIDKKVEGLSKHIKLEEERRSEDAQSKAALTDWLRAKASFVIEGLKEADKDEFCRCELKLQKWYGDLRGKPFAIEAENSILDISGFSKQYNCAFIWQKDGVKKLNLYLIINYFKGGKLRFKKIKPEAFEANRFYTVINKKSGEIVPMEVNFNFDDPNLIILPLAFGKRQGREFIWNDLLSLETGSLKLANGRVIEKTLYNRRTRQDEPALFVALTFERREVLDSSNIKPMNLIGVDRGENIPAVIALTDPEGCPLSRFKDSLGNPTHILRIGERYKEKQRTIQAKKEVEQRRAGGYSRKYASKAKNLADDMVRNTARDLLYYAVTQDAMLIFENLSRGFGRQGKRTFMAERQYTRMEDWLTAKLAYEGLPSKTYLSKTLAQYTSKTCSNCGFTITSADYDRVLEKLKKTATGWMTTINGKELKVEGQITYYNRYKRQNVVKDLSVELDRLSEESVNNDISSWTKGRSGEALSLLKKRFSHRPVQEKFVCLNCGFETHADEQAALNIARSWLFLRSQEYKKYQTNKTTGNTDKRAFVETWQSFYRKKLKEVWKPAV

SEQ ID NO: 31483 - protein, 978 aa, synthetic construct
  REGION 1..978: note = engineered CasX variant
QEGKRINKIRRRLVKDSNTKKAGKTGPMKTLLVRVMTPDLRERLENLRKKPENIPQPISNTSRANLNKLLTDYTEMKKAILHVYWEEFQKDPVGLMSRVAQPASKKIDQNKLKPEMDEKGNLTTAGFACSQCGQPLFVYKLEQVSEKGKAYTNYFGRCNVAEHEKLILLAQLKPEKDSDEAVTYSLGKFGQRALDFYSIHVTKESTHPVKPLAQIAGNRYASAPVGKALSDACMGTIASFLSKYQDIIIEHQKVVKGNQKRLESLRELAGKENLEYPSVTLPPQPHTKEGVDAYNEVIARVRMWVNLNLWQKLKLSRDDAKPLLRLKGFPSFPLVERQANEVDWWDMVCNVKKLINEKKEDGKVFWQNLAGYKRQEALRPYLSSEEDRKKGKKFARYQLGDLLLHLEKKHGEDWGKVYDEAWERIDKKVEGLSKHIKLEEERRSEDAQSKAALTDWLRAKASFVIEGLKEADKDEFCRCELKLQKWYGDLRGKPFAIEAENSILDISGFSKQYNCAFIWQKDGVKKLNLYLIINYFKGGKLRFKKIKPEAFEANRFYTVINKKSGEIVPMEVNFNFDDPNLIILPLAFGKRQGREFIWNDLLSLETGSLKLANGRVIEKTLYNRRTRQDEPALFVALTFERREVLDSSNIKPMNLIGVDRGENIPAVIALTDPEGCPLSRFKDSLGNPTHILRIGERYKEKQRTIQAKKEVEQRRAGGYSRKYASKAKNLADDMVRNTARDLLYYAVTQDAMLIFENLSRGFGRQGKRTFMAERQYTRMEDWLTAKLAYEGLPSKTYLSKTLAQYTSKTCSNCGFTITSADYDRVLEKLKKTATGWMTTINGKELKVEGQITYYNRYKRQNVVKDLSVELDRLSEESVNNDISSWTKGRSGEALSLLKKRFSHRPVQEKFVCLNCGFETHADEQAALNIARSWLFLRSQEYKKYQTNKTTGNTDKRAFVETWQSFYRKKLKEVWKPAV

SEQ ID NO: 31484 - protein, 978 aa, synthetic construct
  REGION 1..978: note = engineered CasX variant
QEGKRINKIRRRLVKDSNTKKAGKTGPMKTLLVRVMTPDLRERLENLRKKPENIPQPISNTSRANLNKLLTDYTEMKKAILHVYWEEFQKDPVGLMSRVAQPASKKIDQNKLKPEMDEKGNLTTAGFACSQCGQPLFVYKLEQVSEKGKAYTNYFGRCNVAEHEKLILLAQLKPEKDSDEAVTYSLGKFGQRALDFYSIHVTKESTHPVKPLAQIAGNRYASVPVGKALSDACMGTIASFLSKYQDIIIEHQKVVKGNQKRLESLRELAGKENLEYPSVTLPPQPHTKEGVDAYNEVIARVRMWVNLNLWQKLKLSRDDAKPLLRLKGFPSFPLVERQANEVDWWDMVCNVKKLINEKKEDGKVFWQNLAGYKRQEALRPYLSSEEDRKKGKKFARYQLGDLLLHLEKKHGEDWGKVYDEAWERIDKKVEGLSKHIKLEEERRSEDAQSKAALTDWLRAKASFVIEGLKEADKDEFCRCELKLQKWYGDLRGKPFAIEAENSILDISGFSKQYNCAFIWQKDGVKKLNLYLIINYFKGGKLRFKKIKPEAFEANRFYTVINKKSGEIVPMEVNFNFDDPNLIILPLAFGKRQGREFIWNDLLSLETGSLKLANGRVIEKTLYNRRTRQDEPALFVALTFERREVLDSSNIKPMNLIGVDRGENIPAVIALTDPEGCPLSRFKDSLGNPTHILRIGERYKEKQRTIQAKKEVEQRRAGGYSRKYASKAKNLADDMVRNTARDLLYYAVTQDAMLIFENLSRGFGRQGKRTFMAERQYTRMEDWLTAKLAYEGLPSKTYLSKTLAQYTSKTCSNCGFTITSADYDRVLEKLKKTATGWMTTINGKELKVEGQITYYNRYKRQNVVKDLSVELDRLSEESVNNDISSWTKGRSGEALSLLKKRFSHRPVQEKFVCLNCGFETHADEQAALNIARSWLFLRSQEYKKYQTNKTTGNTDKRAFVETWQSFYRKKLKEVWKPAV

SEQ ID NO: 31485 - protein, 978 aa, synthetic construct
  REGION 1..978: note = engineered CasX variant
QEGKRINKIRRRLVKDSNTKKAGKTGPMKTLLVRVMTPDLRERLENLRKKPENIPQPISNTSRANLNKLLTDYTEMKKAILHVYWEEFQKDPVGLMSRVAQPASKKIDQNKLKPEMDEKGNLTTAGFACSQCGQPLFVYKLEQVSEKGKAYTNYFGRCNVAEHEKLIKLAQLKPEKDSDEAVTYSLGKFGQRALDFYSIHVTKESTHPVKPLAQIAGNRYASGPVGKALSDACMGTIASFLSKYQDIIIEHQKVVKGNQKRLESLRELAGKENLEYPSVTLPPQPHTKEGVDAYNEVIARVRMWVNLNLWQKLKLSRDDAKPLLRLKGFPSFPLVERQANEVDWWDMVCNVKKLINEKKEDGKVFWQNLAGYKRQEALRPYLSSEEDRKKGKKFARYQLGDLLLHLEKKHGEDWGKVYDEAWERIDKKVEGLSKHIKLEEERRSEDAQSKAALTDWLRAKASFVIEGLKEADKDEFCRCELKLQKWYGDLRGKPFAIEAENSILDISGFSKQYNCAFIWQKDGVKKLNLYLIINYFKGGKLRFKKIKPEAFEANRFYTVINKKSGEIVPMEVNFNFDDPNLIILPLAFGKRQGREFIWNDLLSLETGSLKLANGRVIEKTLYNRRTRQDEPALFVALTFERREVLDSSNIKPMNLIGVDRGENIPAVIALTDPEGCPLSRFKDSLGNPTHILRIGERYKEKQRTIQAKKEVEQRRAGGYSRKYASKAKNLADDMVRNTARDLLYYAVTQDAMLIFENLSRGFGRQGKRTFMAERQYTRMEDWLTAKLAYEGLPSKTYLSKTLAQYTSKTCSNCGFTITSADYDRVLEKLKKTATGWMTTINGKELKVEGQITYYNRYKRQNVVKDLSVELDRLSEESVNNDISSWTKGRSGEALSLLKKRFSHRPVQEKFVCLNCGFETHADEQAALNIARSWLFLRSQEYKKYQTNKTTGNTDKRAFVETWQSFYRKKLKEVWKPAV

SEQ ID NO: 31486 - protein, 977 aa, synthetic construct
  REGION 1..977: note = engineered CasX variant
QEGKRINKIRRRLVKDSNTKKAGKTGPMKTLLVRVMTPDLRERLENLRKKPENIPQPISNTSRANLNKLLTDYTEMKKAILHVYWEEFQKDPVGLMSRVAQPASKKIDQNKLKPEMDEKGNLTTAGFACSQCGQPLFVYKLEQVSEKGKAYTNYFGRCNVAEHEKLILLAQLKPEKDSDEAVTYSLGKFGQRALDFYSIHVTKESTHPVKPLAQIAGNRYASPVGKALSDACMGTIASFLSKYQDIIIEHQKVVKGNQKRLESLRELAGKENLEYPSVTLPPQPHTKEGVDAYNEVIARVRMWVNLNLWQKLKLSRDDAKPLLRLKGFPSFPLVERQANEVDWWDMVCNVKKLINEKKEDGKVFWQNLAGYKRQEALRPYLSSEEDRKKGKKFARYQLGDLLLHLEKKHGEDWGKVYDEAWERIDKKVEGLSKHIKLEEERRSEDAQSKAALTDWLRAKASFVIEGLKEADKDEFCRCELKLQKWYGDLRGKPFAIEAENSILDISGFSKQYNCAFIWQKDGVKKLNLYLIINYFKGGKLRFKKIKPEAFEANRFYTVINKKSGEIVPMEVNFNFDDPNLIILPLAFGKRQGREFIWNDLLSLETGSLKLANGRVIEKTLYNRRTRQDEPALFVALTFERREVLDSSNIKPMNLIGVDRGENIPAVIALTDPEGCPLSRFKDSLGNPTHILRIGERYKEKQRTIQAKKEVEQRRAGGYSRKYASKAKNLADDMVRNTARDLLYYAVTQDAMLIFENLSRGFGRQGKRTFMAERQYTRMEDWLTAKLAYEGLPSKTYLSKTLAQYTSKTCSNCGFTITSADYDRVLEKLKKTATGWMTTINGKELKVEGQITYYNRYKRQNVVKDLSVELDRLSEESVNNDISSWTKGRSGEALSLLKKRFSHRPVQEKFVCLNCGFETHADEQAALNIARSWLFLRSQEYKKYQTNKTTGNTDKRAFVETWQSFYRKKLKEVWKPAV

SEQ ID NO: 31487 - protein, 978 aa, synthetic construct
  REGION 1..978: note = engineered CasX variant
QEGKRINKIRRRLVKDSNTKKAGKTGPMKTLLVRVMTPDLRERLENLRKKPENIPQPISNTSRANLNKLLTDYTEMKKAILHVYWEEFQKDPVGLMSRVAQPASKKIDQNKLKPEMDEKGNLTTAGFACSQCGQPLFVYKLEQVSEKGKAYTNYFGRCNVAEHEKLILLAQLKPEKDSDEAVTYSLGKFGQRALDFYSIHVTKESTHPVKPLAQIAGNRYASYPVGKALSDACMGTIASFLSKYQDIIIEHQKVVKGNQKRLESLRELAGKENLEYPSVTLPPQPHTKEGVDAYNEVIARVRMWVNLNLWQKLKLSRDDAKPLLRLKGFPSFPLVERQANEVDWWDMVCNVKKLINEKKEDGKVFWQNLAGYKRQEALRPYLSSEEDRKKGKKFARYQLGDLLLHLEKKHGEDWGKVYDEAWERIDKKVEGLSKHIKLEEERRSEDAQSKAALTDWLRAKASFVIEGLKEADKDEFCRCELKLQKWYGDLRGKPFAIEAENSILDISGFSKQYNCAFIWQKDGVKKLNLYLIINYFKGGKLRFKKIKPEAFEANRFYTVINKKSGEIVPMEVNFNFDDPNLIILPLAFGKRQGREFIWNDLLSLETGSLQLANGRVIEKTLYNRRTRQDEPALFVALTFERREVLDSSNIKPMNLIGVDRGENIPAVIALTDPEGCPLSRFKDSLGNPTHILRIGESYKEKQRTIQAKKEVEQRRAGGYSRKYASKAKNLADDMVRNTARDLLYYAVTQDAMLIFENLSRGFGRQGKRTFMAERQYTRMEDWLTAKLAYEGLPSKTYLSKTLAQYTSKTCSNCGFTITSADYDRVLEKLKKTATGWMTTINGKELKVEGQITYYNRYKRQNVVKDLSVELDRLSEESVNNDISSWTKGRSGEALSLLKKRFSHRPVQEKFVCLNCGFETHADEQAALNIARSWLFLRSQEYKKYQTNKTTGNTDKRAFVETWQSFYRKKLKEVWKPAV

SEQ ID NO: 31488 - protein, 978 aa, synthetic construct
  REGION 1..978: note = engineered CasX variant
QEGKRINKIRRRLVKDSNTKKAGKTGPMKTLLVRVMTPDLRERLENLRKKPENIPQPISNTSRANLNKLLTDYTEMKKAILHVYWEEFQKDPVGLMSRVAQPASKKIDQNKLKPEMDEKGNLTTAGFACSQCGQPLFVYKLEQVSEKGKAYTNYFGRCNVAEHEKLILLAQLKPEKDSDEAVTYSLGKFGQRALDFYSIHVTKESTHPVKPLAQIAGNRYASHPVGKALSDACMGTIASFLSKYQDIIIEHQKVVKGNQKRLESLRELAGKENLEYPSVTLPPQPHTKEGVDAYNEVIARVRMWVNLNLWQKLKLSRDDAKPLLRLKGFPSFPLVERQANEVDWWDMVCNVKKLINEKKEDGKVFWQNLAGYKRQEALRPYLSSEEDRKKGKKFARYQLGDLLLHLEKKHGEDWGKVYDEAWERIDKKVEGLSKHIKLEEERRSEDAQSKAALTDWLRAKASFVIEGLKEADKDEFCRCELKLQKWYGDLRGKPFAIEAENSILDISGFSKQYNCAFIWQKDGVKKLNLYLIINYFKGGKLRFKKIKPEAFEANRFYTVINKKSGEIVPMEVNFNFDDPNLIILPLAFGKRQGREFIWNDLLSLETGSLQLANGRVIEKTLYNRRTRQDEPALFVALTFERREVLDSSNIKPMNLIGVDRGENIPAVIALTDPEGCPLSRFKDSLGNPTHILRIGESYKEKQRTIQAKKEVEQRRAGGYSRKYASKAKNLADDMVRNTARDLLYYAVTQDAMLIFENLSRGFGRQGKRTFMAERQYTRMEDWLTAKLAYEGLPSKTYLSKTLAQYTSKTCSNCGFTITSADYDRVLEKLKKTATGWMTTINGKELKVEGQITYYNRYKRQNVVKDLSVELDRLSEESVNNDISSWTKGRSGEALSLLKKRFSHRPVQEKFVCLNCGFETHADEQAALNIARSWLFLRSQEYKKYQTNKTTGNTDKRAFVETWQSFYRKKLKEVWKPAV

SEQ ID NO: 31489 - protein, 978 aa, synthetic construct
  REGION 1..978: note = engineered CasX variant
QEGKRINKIRRRLVKDSNTKKAGKTGPMKTLLVRVMTPDLRERLENLRKKPENIPQPISNTSRANLNKLLTDYTEMKKAILHVYWEEFQKDPVGLMSRVAQPASKKIDQNKLKPEMDEKGNLTTAGFACSQCGQPLFVYKLEQVSEKGKAYTNYFGRCNVAEHEKLILLAQLKPEKDSDEAVTYSLGKFGQRALDFYSIHVTKESTHPVKPLAQIAGNRYASSPVGKALSDACMGTIASFLSKYQDIIIEHQKVVKGNQKRLESLRELAGKENLEYPSVTLPPQPHTKEGVDAYNEVIARVRMWVNLNLWQKLKLSRDDAKPLLRLKGFPSFPLVERQANEVDWWDMVCNVKKLINEKKEDGKVFWQNLAGYKRQEALRPYLSSEEDRKKGKKFARYQLGDLLLHLEKKHGEDWGKVYDEAWERIDKKVEGLSKHIKLEEERRSEDAQSKAALTDWLRAKASFVIEGLKEADKDEFCRCELKLQKWYGDLRGKPFAIEAENSILDISGFSKQYNCAFIWQKDGVKKLNLYLIINYFKGGKLRFKKIKPEAFEANRFYTVINKKSGEIVPMEVNFNFDDPNLIILPLAFGKRQGREFIWNDLLSLETGSLQLANGRVIEKTLYNRRTRQDEPALFVALTFERREVLDSSNIKPMNLIGVDRGENIPAVIALTDPEGCPLSRFKDSLGNPTHILRIGESYKEKQRTIQAKKEVEQRRAGGYSRKYASKAKNLADDMVRNTARDLLYYAVTQDAMLIFENLSRGFGRQGKRTFMAERQYTRMEDWLTAKLAYEGLPSKTYLSKTLAQYTSKTCSNCGFTITSADYDRVLEKLKKTATGWMTTINGKELKVEGQITYYNRYKRQNVVKDLSVELDRLSEESVNNDISSWTKGRSGEALSLLKKRFSHRPVQEKFVCLNCGFETHADEQAALNIARSWLFLRSQEYKKYQTNKTTGNTDKRAFVETWQSFYRKKLKEVWKPAV

SEQ ID NO: 31490 - protein, 978 aa, synthetic construct
  REGION 1..978: note = engineered CasX variant
QEGKRINKIRRRLVKDSNTKKAGKTGPMKTLLVRVMTPDLRERLENLRKKPENIPQPISNTSRANLNKLLTDYTEMKKAILHVYWEEFQKDPVGLMSRVAQPASKKIDQNKLKPEMDEKGNLTTAGFACSQCGQPLFVYKLEQVSEKGKAYTNYFGRCNVAEHEKLILLAQLKPEKDSDEAVTYSLGKFGQRALDFYSIHVTKESTHPVKPLAQIAGNRYASTPVGKALSDACMGTIASFLSKYQDIIIEHQKVVKGNQKRLESLRELAGKENLEYPSVTLPPQPHTKEGVDAYNEVIARVRMWVNLNLWQKLKLSRDDAKPLLRLKGFPSFPLVERQANEVDWWDMVCNVKKLINEKKEDGKVFWQNLAGYKRQEALRPYLSSEEDRKKGKKFARYQLGDLLLHLEKKHGEDWGKVYDEAWERIDKKVEGLSKHIKLEEERRSEDAQSKAALTDWLRAKASFVIEGLKEADKDEFCRCELKLQKWYGDLRGKPFAIEAENSILDISGFSKQYNCAFIWQKDGVKKLNLYLIINYFKGGKLRFKKIKPEAFEANRFYTVINKKSGEIVPMEVNFNFDDPNLIILPLAFGKRQGREFIWNDLLSLETGSLQLANGRVIEKTLYNRRTRQDEPALFVALTFERREVLDSSNIKPMNLIGVDRGENIPAVIALTDPEGCPLSRFKDSLGNPTHILRIGESYKEKQRTIQAKKEVEQRRAGGYSRKYASKAKNLADDMVRNTARDLLYYAVTQDAMLIFENLSRGFGRQGKRTFMAERQYTRMEDWLTAKLAYEGLPSKTYLSKTLAQYTSKTCSNCGFTITSADYDRVLEKLKKTATGWMTTINGKELKVEGQITYYNRYKRQNVVKDLSVELDRLSEESVNNDISSWTKGRSGEALSLLKKRFSHRPVQEKFVCLNCGFETHADEQAALNIARSWLFLRSQEYKKYQTNKTTGNTDKRAFVETWQSFYRKKLKEVWKPAV

SEQ ID NO: 31491 - protein, 978 aa, synthetic construct
  REGION 1..978: note = engineered CasX variant
QEGKRINKIRRRLVKDSNTKKAGKTGPMKTLLVRVMTPDLRERLENLRKKPENIPQPISNTSRANLNKLLTDYTEMKKAILHVYWEEFQKDPVGLMSRVAQPASKKIDQNKLKPEMDEKGNLTTAGFACSQCGQPLFVYKLEQVSEKGKAYTNYFGRCNVAEHEKLILLAQLKPEKDSDEAVTYSLGKFGQRALDFYSIHVTKESTHPVKPLAQIAGNRYASAPVGKALSDACMGTIASFLSKYQDIIIEHQKVVKGNQKRLESLRELAGKENLEYPSVTLPPQPHTKEGVDAYNEVIARVRMWVNLNLWQKLKLSRDDAKPLLRLKGFPSFPLVERQANEVDWWDMVCNVKKLINEKKEDGKVFWQNLAGYKRQEALRPYLSSEEDRKKGKKFARYQLGDLLLHLEKKHGEDWGKVYDEAWERIDKKVEGLSKHIKLEEERRSEDAQSKAALTDWLRAKASFVIEGLKEADKDEFCRCELKLQKWYGDLRGKPFAIEAENSILDISGFSKQYNCAFIWQKDGVKKLNLYLIINYFKGGKLRFKKIKPEAFEANRFYTVINKKSGEIVPMEVNFNFDDPNLIILPLAFGKRQGREFIWNDLLSLETGSLQLANGRVIEKTLYNRRTRQDEPALFVALTFERREVLDSSNIKPMNLIGVDRGENIPAVIALTDPEGCPLSRFKDSLGNPTHILRIGESYKEKQRTIQAKKEVEQRRAGGYSRKYASKAKNLADDMVRNTARDLLYYAVTQDAMLIFENLSRGFGRQGKRTFMAERQYTRMEDWLTAKLAYEGLPSKTYLSKTLAQYTSKTCSNCGFTITSADYDRVLEKLKKTATGWMTTINGKELKVEGQITYYNRYKRQNVVKDLSVELDRLSEESVNNDISSWTKGRSGEALSLLKKRFSHRPVQEKFVCLNCGFETHADEQAALNIARSWLFLRSQEYKKYQTNKTTGNTDKRAFVETWQSFYRKKLKEVWKPAV

SEQ ID NO: 31492 - protein, 978 aa, synthetic construct
  REGION 1..978: note = engineered CasX variant
QEGKRINKIRRRLVKDSNTKKAGKTGPMKTLLVRVMTPDLRERLENLRKKPENIPQPISNTSRANLNKLLTDYTEMKKAILHVYWEEFQKDPVGLMSRVAQPASKKIDQNKLKPEMDEKGNLTTAGFACSQCGQPLFVYKLEQVSEKGKAYTNYFGRCNVAEHEKLILLAQLKPEKDSDEAVTYSLGKFGQRALDFYSIHVTKESTHPVKPLAQIAGNRYASVPVGKALSDACMGTIASFLSKYQDIIIEHQKVVKGNQKRLESLRELAGKENLEYPSVTLPPQPHTKEGVDAYNEVIARVRMWVNLNLWQKLKLSRDDAKPLLRLKGFPSFPLVERQANEVDWWDMVCNVKKLINEKKEDGKVFWQNLAGYKRQEALRPYLSSEEDRKKGKKFARYQLGDLLLHLEKKHGEDWGKVYDEAWERIDKKVEGLSKHIKLEEERRSEDAQSKAALTDWLRAKASFVIEGLKEADKDEFCRCELKLQKWYGDLRGKPFAIEAENSILDISGFSKQYNCAFIWQKDGVKKLNLYLIINYFKGGKLRFKKIKPEAFEANRFYTVINKKSGEIVPMEVNFNFDDPNLIILPLAFGKRQGREFIWNDLLSLETGSLQLANGRVIEKTLYNRRTRQDEPALFVALTFERREVLDSSNIKPMNLIGVDRGENIPAVIALTDPEGCPLSRFKDSLGNPTHILRIGESYKEKQRTIQAKKEVEQRRAGGYSRKYASKAKNLADDMVRNTARDLLYYAVTQDAMLIFENLSRGFGRQGKRTFMAERQYTRMEDWLTAKLAYEGLPSKTYLSKTLAQYTSKTCSNCGFTITSADYDRVLEKLKKTATGWMTTINGKELKVEGQITYYNRYKRQNVVKDLSVELDRLSEESVNNDISSWTKGRSGEALSLLKKRFSHRPVQEKFVCLNCGFETHADEQAALNIARSWLFLRSQEYKKYQTNKTTGNTDKRAFVETWQSFYRKKLKEVWKPAV

SEQ ID NO: 31493 - protein, 978 aa, synthetic construct
  REGION 1..978: note = engineered CasX variant
QEGKRINKIRRRLVKDSNTKKAGKTGPMKTLLVRVMTPDLRERLENLRKKPENIPQPISNTSRANLNKLLTDYTEMKKAILHVYWEEFQKDPVGLMSRVAQPASKKIDQNKLKPEMDEKGNLTTAGFACSQCGQPLFVYKLEQVSEKGKAYTNYFGRCNVAEHEKLIKLAQLKPEKDSDEAVTYSLGKFGQRALDFYSIHVTKESTHPVKPLAQIAGNRYASGPVGKALSDACMGTIASFLSKYQDIIIEHQKVVKGNQKRLESLRELAGKENLEYPSVTLPPQPHTKEGVDAYNEVIARVRMWVNLNLWQKLKLSRDDAKPLLRLKGFPSFPLVERQANEVDWWDMVCNVKKLINEKKEDGKVFWQNLAGYKRQEALRPYLSSEEDRKKGKKFARYQLGDLLLHLEKKHGEDWGKVYDEAWERIDKKVEGLSKHIKLEEERRSEDAQSKAALTDWLRAKASFVIEGLKEADKDEFCRCELKLQKWYGDLRGKPFAIEAENSILDISGFSKQYNCAFIWQKDGVKKLNLYLIINYFKGGKLRFKKIKPEAFEANRFYTVINKKSGEIVPMEVNFNFDDPNLIILPLAFGKRQGREFIWNDLLSLETGSLQLANGRVIEKTLYNRRTRQDEPALFVALTFERREVLDSSNIKPMNLIGVDRGENIPAVIALTDPEGCPLSRFKDSLGNPTHILRIGESYKEKQRTIQAKKEVEQRRAGGYSRKYASKAKNLADDMVRNTARDLLYYAVTQDAMLIFENLSRGFGRQGKRTFMAERQYTRMEDWLTAKLAYEGLPSKTYLSKTLAQYTSKTCSNCGFTITSADYDRVLEKLKKTATGWMTTINGKELKVEGQITYYNRYKRQNVVKDLSVELDRLSEESVNNDISSWTKGRSGEALSLLKKRFSHRPVQEKFVCLNCGFETHADEQAALNIARSWLFLRSQEYKKYQTNKTTGNTDKRAFVETWQSFYRKKLKEVWKPAV

SEQ ID NO: 31494 - protein, 977 aa, synthetic construct
  REGION 1..977: note = engineered CasX variant
QEGKRINKIRRRLVKDSNTKKAGKTGPMKTLLVRVMTPDLRERLENLRKKPENIPQPISNTSRANLNKLLTDYTEMKKAILHVYWEEFQKDPVGLMSRVAQPASKKIDQNKLKPEMDEKGNLTTAGFACSQCGQPLFVYKLEQVSEKGKAYTNYFGRCNVAEHEKLILLAQLKPEKDSDEAVTYSLGKFGQRALDFYSIHVTKESTHPVKPLAQIAGNRYASPVGKALSDACMGTIASFLSKYQDIIIEHQKVVKGNQKRLESLRELAGKENLEYPSVTLPPQPHTKEGVDAYNEVIARVRMWVNLNLWQKLKLSRDDAKPLLRLKGFPSFPLVERQANEVDWWDMVCNVKKLINEKKEDGKVFWQNLAGYKRQEALRPYLSSEEDRKKGKKFARYQLGDLLLHLEKKHGEDWGKVYDEAWERIDKKVEGLSKHIKLEEERRSEDAQSKAALTDWLRAKASFVIEGLKEADKDEFCRCELKLQKWYGDLRGKPFAIEAENSILDISGFSKQYNCAFIWQKDGVKKLNLYLIINYFKGGKLRFKKIKPEAFEANRFYTVINKKSGEIVPMEVNFNFDDPNLIILPLAFGKRQGREFIWNDLLSLETGSLQLANGRVIEKTLYNRRTRQDEPALFVALTFERREVLDSSNIKPMNLIGVDRGENIPAVIALTDPEGCPLSRFKDSLGNPTHILRIGESYKEKQRTIQAKKEVEQRRAGGYSRKYASKAKNLADDMVRNTARDLLYYAVTQDAMLIFENLSRGFGRQGKRTFMAERQYTRMEDWLTAKLAYEGLPSKTYLSKTLAQYTSKTCSNCGFTITSADYDRVLEKLKKTATGWMTTINGKELKVEGQITYYNRYKRQNVVKDLSVELDRLSEESVNNDISSWTKGRSGEALSLLKKRFSHRPVQEKFVCLNCGFETHADEQAALNIARSWLFLRSQEYKKYQTNKTTGNTDKRAFVETWQSFYRKKLKEVWKPAV

SEQ ID NO: 31495 - protein, 979 aa, synthetic construct
  REGION 1..979: note = engineered CasX variant
QEIGGRINKIRRRLVKDSNTKKAGKTGPMKTLLVRVMTPDLRERLENLRKKPENIPQPISNTSRANLNKLLTDYTEMKKAILHVYWEEFQKDPVGLMSRVAQPASKKIDQNKLKPEMDEKGNLTTAGFACSQCGQPLFVYKLEQVSEKGKAYTNYFGRCNVAEHEKLILLAQLKPEKDSDEAVTYSLGKFGQRALDFYSIHVTKESTHPVKPLAQIAGNRYASYPVGKALSDACMGTIASFLSKYQDIIIEHQKVVKGNQKRLESLRELAGKENLEYPSVTLPPQPHTKEGVDAYNEVIARVRMWVNLNLWQKLKLSRDDAKPLLRLKGFPSFPLVERQANEVDWWDMVCNVKKLINEKKEDGKVFWQNLAGYKRQEALRPYLSSEEDRKKGKKFARYQLGDLLLHLEKKHGEDWGKVYDEAWERIDKKVEGLSKHIKLEEERRSEDAQSKAALTDWLRAKASFVIEGLKEADKDEFCRCELKLQKWYGDLRGKPFAIEAENSILDISGFSKQYNCAFIWQKDGVKKLNLYLIINYFKGGKLRFKKIKPEAFEANRFYTVINKKSGEIVPMEVNFNFDDPNLIILPLAFGKRQGREFIWNDLLSLETGSLKLANGRVIEKTLYNRRTRQDEPALFVALTFERREVLDSSNIKPMNLIGVDRGENIPAVIALTDPEGCPLSRFKDSLGNPTHILRIGESYKEKQRTIQAKKEVEQRRAGGYSRKYASKAKNLADDMVRNTARDLLYYAVTQDAMLIFENLSRGFGRQGKRTFMAERQYTRMEDWLTAKLAYEGLPSKTYLSKTLAQYTSKTCSNCGFTITSADYDRVLEKLKKTATGWMTTINGKELKVEGQITYYNRYKRQNVVKDLSVELDRLSEESVNNDISSWTKGRSGEALSLLKKRFSHRPVQEKFVCLNCGFETHADEQAALNIARSWLFLRSQEYKKYQTNKTTGNTDKRAFVETWQSFYRKKLKEVWKPAV

SEQ ID NO: 31496 - protein, 979 aa, synthetic construct
  REGION 1..979: note = engineered CasX variant
QEIGGRINKIRRRLVKDSNTKKAGKTGPMKTLLVRVMTPDLRERLENLRKKPENIPQPISNTSRANLNKLLTDYTEMKKAILHVYWEEFQKDPVGLMSRVAQPASKKIDQNKLKPEMDEKGNLTTAGFACSQCGQPLFVYKLEQVSEKGKAYTNYFGRCNVAEHEKLILLAQLKPEKDSDEAVTYSLGKFGQRALDFYSIHVTKESTHPVKPLAQIAGNRYASHPVGKALSDACMGTIASFLSKYQDIIIEHQKVVKGNQKRLESLRELAGKENLEYPSVTLPPQPHTKEGVDAYNEVIARVRMWVNLNLWQKLKLSRDDAKPLLRLKGFPSFPLVERQANEVDWWDMVCNVKKLINEKKEDGKVFWQNLAGYKRQEALRPYLSSEEDRKKGKKFARYQLGDLLLHLEKKHGEDWGKVYDEAWERIDKKVEGLSKHIKLEEERRSEDAQSKAALTDWLRAKASFVIEGLKEADKDEFCRCELKLQKWYGDLRGKPFAIEAENSILDISGFSKQYNCAFIWQKDGVKKLNLYLIINYFKGGKLRFKKIKPEAFEANRFYTVINKKSGEIVPMEVNFNFDDPNLIILPLAFGKRQGREFIWNDLLSLETGSLKLANGRVIEKTLYNRRTRQDEPALFVALTFERREVLDSSNIKPMNLIGVDRGENIPAVIALTDPEGCPLSRFKDSLGNPTHILRIGESYKEKQRTIQAKKEVEQRRAGGYSRKYASKAKNLADDMVRNTARDLLYYAVTQDAMLIFENLSRGFGRQGKRTFMAERQYTRMEDWLTAKLAYEGLPSKTYLSKTLAQYTSKTCSNCGFTITSADYDRVLEKLKKTATGWMTTINGKELKVEGQITYYNRYKRQNVVKDLSVELDRLSEESVNNDISSWTKGRSGEALSLLKKRFSHRPVQEKFVCLNCGFETHADEQAALNIARSWLFLRSQEYKKYQTNKTTGNTDKRAFVETWQSFYRKKLKEVWKPAV

SEQ ID NO: 31497 - protein, 979 aa, synthetic construct
  REGION 1..979: note = engineered CasX variant
QEIGGRINKIRRRLVKDSNTKKAGKTGPMKTLLVRVMTPDLRERLENLRKKPENIPQPISNTSRANLNKLLTDYTEMKKAILHVYWEEFQKDPVGLMSRVAQPASKKIDQNKLKPEMDEKGNLTTAGFACSQCGQPLFVYKLEQVSEKGKAYTNYFGRCNVAEHEKLILLAQLKPEKDSDEAVTYSLGKFGQRALDFYSIHVTKESTHPVKPLAQIAGNRYASSPVGKALSDACMGTIASFLSKYQDIIIEHQKVVKGNQKRLESLRELAGKENLEYPSVTLPPQPHTKEGVDAYNEVIARVRMWVNLNLWQKLKLSRDDAKPLLRLKGFPSFPLVERQANEVDWWDMVCNVKKLINEKKEDGKVFWQNLAGYKRQEALRPYLSSEEDRKKGKKFARYQLGDLLLHLEKKHGEDWGKVYDEAWERIDKKVEGLSKHIKLEEERRSEDAQSKAALTDWLRAKASFVIEGLKEADKDEFCRCELKLQKWYGDLRGKPFAIEAENSILDISGFSKQYNCAFIWQKDGVKKLNLYLIINYFKGGKLRFKKIKPEAFEANRFYTVINKKSGEIVPMEVNFNFDDPNLIILPLAFGKRQGREFIWNDLLSLETGSLKLANGRVIEKTLYNRRTRQDEPALFVALTFERREVLDSSNIKPMNLIGVDRGENIPAVIALTDPEGCPLSRFKDSLGNPTHILRIGESYKEKQRTIQAKKEVEQRRAGGYSRKYASKAKNLADDMVRNTARDLLYYAVTQDAMLIFENLSRGFGRQGKRTFMAERQYTRMEDWLTAKLAYEGLPSKTYLSKTLAQYTSKTCSNCGFTITSADYDRVLEKLKKTATGWMTTINGKELKVEGQITYYNRYKRQNVVKDLSVELDRLSEESVNNDISSWTKGRSGEALSLLKKRFSHRPVQEKFVCLNCGFETHADEQAALNIARSWLFLRSQEYKKYQTNKTTGNTDKRAFVETWQSFYRKKLKEVWKPAV

SEQ ID NO: 31498 - protein, 979 aa, synthetic construct
  REGION 1..979: note = engineered CasX variant
QEIGGRINKIRRRLVKDSNTKKAGKTGPMKTLLVRVMTPDLRERLENLRKKPENIPQPISNTSRANLNKLLTDYTEMKKAILHVYWEEFQKDPVGLMSRVAQPASKKIDQNKLKPEMDEKGNLTTAGFACSQCGQPLFVYKLEQVSEKGKAYTNYFGRCNVAEHEKLILLAQLKPEKDSDEAVTYSLGKFGQRALDFYSIHVTKESTHPVKPLAQIAGNRYASTPVGKALSDACMGTIASFLSKYQDIIIEHQKVVKGNQKRLESLRELAGKENLEYPSVTLPPQPHTKEGVDAYNEVIARVRMWVNLNLWQKLKLSRDDAKPLLRLKGFPSFPLVERQANEVDWWDMVCNVKKLINEKKEDGKVFWQNLAGYKRQEALRPYLSSEEDRKKGKKFARYQLGDLLLHLEKKHGEDWGKVYDEAWERIDKKVEGLSKHIKLEEERRSEDAQSKAALTDWLRAKASFVIEGLKEADKDEFCRCELKLQKWYGDLRGKPFAIEAENSILDISGFSKQYNCAFIWQKDGVKKLNLYLIINYFKGGKLRFKKIKPEAFEANRFYTVINKKSGEIVPMEVNFNFDDPNLIILPLAFGKRQGREFIWNDLLSLETGSLKLANGRVIEKTLYNRRTRQDEPALFVALTFERREVLDSSNIKPMNLIGVDRGENIPAVIALTDPEGCPLSRFKDSLGNPTHILRIGESYKEKQRTIQAKKEVEQRRAGGYSRKYASKAKNLADDMVRNTARDLLYYAVTQDAMLIFENLSRGFGRQGKRTFMAERQYTRMEDWLTAKLAYEGLPSKTYLSKTLAQYTSKTCSNCGFTITSADYDRVLEKLKKTATGWMTTINGKELKVEGQITYYNRYKRQNVVKDLSVELDRLSEESVNNDISSWTKGRSGEALSLLKKRFSHRPVQEKFVCLNCGFETHADEQAALNIARSWLFLRSQEYKKYQTNKTTGNTDKRAFVETWQSFYRKKLKEVWKPAV

SEQ ID NO: 31499 - protein, 979 aa, synthetic construct
  REGION 1..979: note = engineered CasX variant
QEIGGRINKIRRRLVKDSNTKKAGKTGPMKTLLVRVMTPDLRERLENLRKKPENIPQPISNTSRANLNKLLTDYTEMKKAILHVYWEEFQKDPVGLMSRVAQPASKKIDQNKLKPEMDEKGNLTTAGFACSQCGQPLFVYKLEQVSEKGKAYTNYFGRCNVAEHEKLILLAQLKPEKDSDEAVTYSLGKFGQRALDFYSIHVTKESTHPVKPLAQIAGNRYASAPVGKALSDACMGTIASFLSKYQDIIIEHQKVVKGNQKRLESLRELAGKENLEYPSVTLPPQPHTKEGVDAYNEVIARVRMWVNLNLWQKLKLSRDDAKPLLRLKGFPSFPLVERQANEVDWWDMVCNVKKLINEKKEDGKVFWQNLAGYKRQEALRPYLSSEEDRKKGKKFARYQLGDLLLHLEKKHGEDWGKVYDEAWERIDKKVEGLSKHIKLEEERRSEDAQSKAALTDWLRAKASFVIEGLKEADKDEFCRCELKLQKWYGDLRGKPFAIEAENSILDISGFSKQYNCAFIWQKDGVKKLNLYLIINYFKGGKLRFKKIKPEAFEANRFYTVINKKSGEIVPMEVNFNFDDPNLIILPLAFGKRQGREFIWNDLLSLETGSLKLANGRVIEKTLYNRRTRQDEPALFVALTFERREVLDSSNIKPMNLIGVDRGENIPAVIALTDPEGCPLSRFKDSLGNPTHILRIGESYKEKQRTIQAKKEVEQRRAGGYSRKYASKAKNLADDMVRNTARDLLYYAVTQDAMLIFENLSRGFGRQGKRTFMAERQYTRMEDWLTAKLAYEGLPSKTYLSKTLAQYTSKTCSNCGFTITSADYDRVLEKLKKTATGWMTTINGKELKVEGQITYYNRYKRQNVVKDLSVELDRLSEESVNNDISSWTKGRSGEALSLLKKRFSHRPVQEKFVCLNCGFETHADEQAALNIARSWLFLRSQEYKKYQTNKTTGNTDKRAFVETWQSFYRKKLKEVWKPAV

SEQ ID NO: 31500 - protein, 979 aa, synthetic construct
  REGION 1..979: note = engineered CasX variant
QEIGGRINKIRRRLVKDSNTKKAGKTGPMKTLLVRVMTPDLRERLENLRKKPENIPQPISNTSRANLNKLLTDYTEMKKAILHVYWEEFQKDPVGLMSRVAQPASKKIDQNKLKPEMDEKGNLTTAGFACSQCGQPLFVYKLEQVSEKGKAYTNYFGRCNVAEHEKLILLAQLKPEKDSDEAVTYSLGKFGQRALDFYSIHVTKESTHPVKPLAQIAGNRYASVPVGKALSDACMGTIASFLSKYQDIIIEHQKVVKGNQKRLESLRELAGKENLEYPSVTLPPQPHTKEGVDAYNEVIARVRMWVNLNLWQKLKLSRDDAKPLLRLKGFPSFPLVERQANEVDWWDMVCNVKKLINEKKEDGKVFWQNLAGYKRQEALRPYLSSEEDRKKGKKFARYQLGDLLLHLEKKHGEDWGKVYDEAWERIDKKVEGLSKHIKLEEERRSEDAQSKAALTDWLRAKASFVIEGLKEADKDEFCRCELKLQKWYGDLRGKPFAIEAENSILDISGFSKQYNCAFIWQKDGVKKLNLYLIINYFKGGKLRFKKIKPEAFEANRFYTVINKKSGEIVPMEVNFNFDDPNLIILPLAFGKRQGREFIWNDLLSLETGSLKLANGRVIEKTLYNRRTRQDEPALFVALTFERREVLDSSNIKPMNLIGVDRGENIPAVIALTDPEGCPLSRFKDSLGNPTHILRIGESYKEKQRTIQAKKEVEQRRAGGYSRKYASKAKNLADDMVRNTARDLLYYAVTQDAMLIFENLSRGFGRQGKRTFMAERQYTRMEDWLTAKLAYEGLPSKTYLSKTLAQYTSKTCSNCGFTITSADYDRVLEKLKKTATGWMTTINGKELKVEGQITYYNRYKRQNVVKDLSVELDRLSEESVNNDISSWTKGRSGEALSLLKKRFSHRPVQEKFVCLNCGFETHADEQAALNIARSWLFLRSQEYKKYQTNKTTGNTDKRAFVETWQSFYRKKLKEVWKPAV

SEQ ID NO: 31501 - protein, 979 aa, synthetic construct
  REGION 1..979: note = engineered CasX variant
QEIGGRINKIRRRLVKDSNTKKAGKTGPMKTLLVRVMTPDLRERLENLRKKPENIPQPISNTSRANLNKLLTDYTEMKKAILHVYWEEFQKDPVGLMSRVAQPASKKIDQNKLKPEMDEKGNLTTAGFACSQCGQPLFVYKLEQVSEKGKAYTNYFGRCNVAEHEKLIKLAQLKPEKDSDEAVTYSLGKFGQRALDFYSIHVTKESTHPVKPLAQIAGNRYASGPVGKALSDACMGTIASFLSKYQDIIIEHQKVVKGNQKRLESLRELAGKENLEYPSVTLPPQPHTKEGVDAYNEVIARVRMWVNLNLWQKLKLSRDDAKPLLRLKGFPSFPLVERQANEVDWWDMVCNVKKLINEKKEDGKVFWQNLAGYKRQEALRPYLSSEEDRKKGKKFARYQLGDLLLHLEKKHGEDWGKVYDEAWERIDKKVEGLSKHIKLEEERRSEDAQSKAALTDWLRAKASFVIEGLKEADKDEFCRCELKLQKWYGDLRGKPFAIEAENSILDISGFSKQYNCAFIWQKDGVKKLNLYLIINYFKGGKLRFKKIKPEAFEANRFYTVINKKSGEIVPMEVNFNFDDPNLIILPLAFGKRQGREFIWNDLLSLETGSLKLANGRVIEKTLYNRRTRQDEPALFVALTFERREVLDSSNIKPMNLIGVDRGENIPAVIALTDPEGCPLSRFKDSLGNPTHILRIGESYKEKQRTIQAKKEVEQRRAGGYSRKYASKAKNLADDMVRNTARDLLYYAVTQDAMLIFENLSRGFGRQGKRTFMAERQYTRMEDWLTAKLAYEGLPSKTYLSKTLAQYTSKTCSNCGFTITSADYDRVLEKLKKTATGWMTTINGKELKVEGQITYYNRYKRQNVVKDLSVELDRLSEESVNNDISSWTKGRSGEALSLLKKRFSHRPVQEKFVCLNCGFETHADEQAALNIARSWLFLRSQEYKKYQTNKTTGNTDKRAFVETWQSFYRKKLKEVWKPAV

SEQ ID NO: 31502 - protein, 978 aa, synthetic construct
  REGION 1..978: note = engineered CasX variant
QEIGGRINKIRRRLVKDSNTKKAGKTGPMKTLLVRVMTPDLRERLENLRKKPENIPQPISNTSRANLNKLLTDYTEMKKAILHVYWEEFQKDPVGLMSRVAQPASKKIDQNKLKPEMDEKGNLTTAGFACSQCGQPLFVYKLEQVSEKGKAYTNYFGRCNVAEHEKLILLAQLKPEKDSDEAVTYSLGKFGQRALDFYSIHVTKESTHPVKPLAQIAGNRYASPVGKALSDACMGTIASFLSKYQDIIIEHQKVVKGNQKRLESLRELAGKENLEYPSVTLPPQPHTKEGVDAYNEVIARVRMWVNLNLWQKLKLSRDDAKPLLRLKGFPSFPLVERQANEVDWWDMVCNVKKLINEKKEDGKVFWQNLAGYKRQEALRPYLSSEEDRKKGKKFARYQLGDLLLHLEKKHGEDWGKVYDEAWERIDKKVEGLSKHIKLEEERRSEDAQSKAALTDWLRAKASFVIEGLKEADKDEFCRCELKLQKWYGDLRGKPFAIEAENSILDISGFSKQYNCAFIWQKDGVKKLNLYLIINYFKGGKLRFKKIKPEAFEANRFYTVINKKSGEIVPMEVNFNFDDPNLIILPLAFGKRQGREFIWNDLLSLETGSLKLANGRVIEKTLYNRRTRQDEPALFVALTFERREVLDSSNIKPMNLIGVDRGENIPAVIALTDPEGCPLSRFKDSLGNPTHILRIGESYKEKQRTIQAKKEVEQRRAGGYSRKYASKAKNLADDMVRNTARDLLYYAVTQDAMLIFENLSRGFGRQGKRTFMAERQYTRMEDWLTAKLAYEGLPSKTYLSKTLAQYTSKTCSNCGFTITSADYDRVLEKLKKTATGWMTTINGKELKVEGQITYYNRYKRQNVVKDLSVELDRLSEESVNNDISSWTKGRSGEALSLLKKRFSHRPVQEKFVCLNCGFETHADEQAALNIARSWLFLRSQEYKKYQTNKTTGNTDKRAFVETWQSFYRKKLKEVWKPAV

SEQ ID NO: 31503 - protein, 980 aa, synthetic construct
  REGION 1..980: note = engineered CasX variant
QEIGKGRINKIRRRLVKDSNTKKAGKTGPMKTLLVRVMTPDLRERLENLRKKPENIPQPISNTSRANLNKLLTDYTEMKKAILHVYWEEFQKDPVGLMSRVAQPASKKIDQNKLKPEMDEKGNLTTAGFACSQCGQPLFVYKLEQVSEKGKAYTNYFGRCNVAEHEKLILLAQLKPEKDSDEAVTYSLGKFGQRALDFYSIHVTKESTHPVKPLAQIAGNRYASYPVGKALSDACMGTIASFLSKYQDIIIEHQKVVKGNQKRLESLRELAGKENLEYPSVTLPPQPHTKEGVDAYNEVIARVRMWVNLNLWQKLKLSRDDAKPLLRLKGFPSFPLVERQANEVDWWDMVCNVKKLINEKKEDGKVFWQNLAGYKRQEALRPYLSSEEDRKKGKKFARYQLGDLLLHLEKKHGEDWGKVYDEAWERIDKKVEGLSKHIKLEEERRSEDAQSKAALTDWLRAKASFVIEGLKEADKDEFCRCELKLQKWYGDLRGKPFAIEAENSILDISGFSKQYNCAFIWQKDGVKKLNLYLIINYFKGGKLRFKKIKPEAFEANRFYTVINKKSGEIVPMEVNFNFDDPNLIILPLAFGKRQGREFIWNDLLSLETGSLKLANGRVIEKTLYNRRTRQDEPALFVALTFERREVLDSSNIKPMNLIGVDRGENIPAVIALTDPEGCPLSRFKDSLGNPTHILRIGESYKEKQRTIQAKKEVEQRRAGGYSRKYASKAKNLADDMVRNTARDLLYYAVTQDAMLIFENLSRGFGRQGKRTFMAERQYTRMEDWLTAKLAYEGLPSKTYLSKTLAQYTSKTCSNCGFTITSADYDRVLEKLKKTATGWMTTINGKELKVEGQITYYNRYKRQNVVKDLSVELDRLSEESVNNDISSWTKGRSGEALSLLKKRFSHRPVQEKFVCLNCGFETHADEQAALNIARSWLFLRSQEYKKYQTNKTTGNTDKRAFVETWQSFYRKKLKEVWKPAV

SEQ ID NO: 31504 - protein, 980 aa, synthetic construct
  REGION 1..980: note = engineered CasX variant
QEIGKGRINKIRRRLVKDSNTKKAGKTGPMKTLLVRVMTPDLRERLENLRKKPENIPQPISNTSRANLNKLLTDYTEMKKAILHVYWEEFQKDPVGLMSRVAQPASKKIDQNKLKPEMDEKGNLTTAGFACSQCGQPLFVYKLEQVSEKGKAYTNYFGRCNVAEHEKLILLAQLKPEKDSDEAVTYSLGKFGQRALDFYSIHVTKESTHPVKPLAQIAGNRYASHPVGKALSDACMGTIASFLSKYQDIIIEHQKVVKGNQKRLESLRELAGKENLEYPSVTLPPQPHTKEGVDAYNEVIARVRMWVNLNLWQKLKLSRDDAKPLLRLKGFPSFPLVERQANEVDWWDMVCNVKKLINEKKEDGKVFWQNLAGYKRQEALRPYLSSEEDRKKGKKFARYQLGDLLLHLEKKHGEDWGKVYDEAWERIDKKVEGLSKHIKLEEERRSEDAQSKAALTDWLRAKASFVIEGLKEADKDEFCRCELKLQKWYGDLRGKPFAIEAENSILDISGFSKQYNCAFIWQKDGVKKLNLYLIINYFKGGKLRFKKIKPEAFEANRFYTVINKKSGEIVPMEVNFNFDDPNLIILPLAFGKRQGREFIWNDLLSLETGSLKLANGRVIEKTLYNRRTRQDEPALFVALTFERREVLDSSNIKPMNLIGVDRGENIPAVIALTDPEGCPLSRFKDSLGNPTHILRIGESYKEKQRTIQAKKEVEQRRAGGYSRKYASKAKNLADDMVRNTARDLLYYAVTQDAMLIFENLSRGFGRQGKRTFMAERQYTRMEDWLTAKLAYEGLPSKTYLSKTLAQYTSKTCSNCGFTITSADYDRVLEKLKKTATGWMTTINGKELKVEGQITYYNRYKRQNVVKDLSVELDRLSEESVNNDISSWTKGRSGEALSLLKKRFSHRPVQEKFVCLNCGFETHADEQAALNIARSWLFLRSQEYKKYQTNKTTGNTDKRAFVETWQSFYRKKLKEVWKPAV

SEQ ID NO: 31505 - protein, 980 aa, synthetic construct
  REGION 1..980: note = engineered CasX variant
QEIGKGRINKIRRRLVKDSNTKKAGKTGPMKTLLVRVMTPDLRERLENLRKKPENIPQPISNTSRANLNKLLTDYTEMKKAILHVYWEEFQKDPVGLMSRVAQPASKKIDQNKLKPEMDEKGNLTTAGFACSQCGQPLFVYKLEQVSEKGKAYTNYFGRCNVAEHEKLILLAQLKPEKDSDEAVTYSLGKFGQRALDFYSIHVTKESTHPVKPLAQIAGNRYASSPVGKALSDACMGTIASFLSKYQDIIIEHQKVVKGNQKRLESLRELAGKENLEYPSVTLPPQPHTKEGVDAYNEVIARVRMWVNLNLWQKLKLSRDDAKPLLRLKGFPSFPLVERQANEVDWWDMVCNVKKLINEKKEDGKVFWQNLAGYKRQEALRPYLSSEEDRKKGKKFARYQLGDLLLHLEKKHGEDWGKVYDEAWERIDKKVEGLSKHIKLEEERRSEDAQSKAALTDWLRAKASFVIEGLKEADKDEFCRCELKLQKWYGDLRGKPFAIEAENSILDISGFSKQYNCAFIWQKDGVKKLNLYLIINYFKGGKLRFKKIKPEAFEANRFYTVINKKSGEIVPMEVNFNFDDPNLIILPLAFGKRQGREFIWNDLLSLETGSLKLANGRVIEKTLYNRRTRQDEPALFVALTFERREVLDSSNIKPMNLIGVDRGENIPAVIALTDPEGCPLSRFKDSLGNPTHILRIGESYKEKQRTIQAKKEVEQRRAGGYSRKYASKAKNLADDMVRNTARDLLYYAVTQDAMLIFENLSRGFGRQGKRTFMAERQYTRMEDWLTAKLAYEGLPSKTYLSKTLAQYTSKTCSNCGFTITSADYDRVLEKLKKTATGWMTTINGKELKVEGQITYYNRYKRQNVVKDLSVELDRLSEESVNNDISSWTKGRSGEALSLLKKRFSHRPVQEKFVCLNCGFETHADEQAALNIARSWLFLRSQEYKKYQTNKTTGNTDKRAFVETWQSFYRKKLKEVWKPAV

SEQ ID NO: 31506 - protein, 980 aa, synthetic construct
  REGION 1..980: note = engineered CasX variant
QEIGKGRINKIRRRLVKDSNTKKAGKTGPMKTLLVRVMTPDLRERLENLRKKPENIPQPISNTSRANLNKLLTDYTEMKKAILHVYWEEFQKDPVGLMSRVAQPASKKIDQNKLKPEMDEKGNLTTAGFACSQCGQPLFVYKLEQVSEKGKAYTNYFGRCNVAEHEKLILLAQLKPEKDSDEAVTYSLGKFGQRALDFYSIHVTKESTHPVKPLAQIAGNRYASTPVGKALSDACMGTIASFLSKYQDIIIEHQKVVKGNQKRLESLRELAGKENLEYPSVTLPPQPHTKEGVDAYNEVIARVRMWVNLNLWQKLKLSRDDAKPLLRLKGFPSFPLVERQANEVDWWDMVCNVKKLINEKKEDGKVFWQNLAGYKRQEALRPYLSSEEDRKKGKKFARYQLGDLLLHLEKKHGEDWGKVYDEAWERIDKKVEGLSKHIKLEEERRSEDAQSKAALTDWLRAKASFVIEGLKEADKDEFCRCELKLQKWYGDLRGKPFAIEAENSILDISGFSKQYNCAFIWQKDGVKKLNLYLIINYFKGGKLRFKKIKPEAFEANRFYTVINKKSGEIVPMEVNFNFDDPNLIILPLAFGKRQGREFIWNDLLSLETGSLKLANGRVIEKTLYNRRTRQDEPALFVALTFERREVLDSSNIKPMNLIGVDRGENIPAVIALTDPEGCPLSRFKDSLGNPTHILRIGESYKEKQRTIQAKKEVEQRRAGGYSRKYASKAKNLADDMVRNTARDLLYYAVTQDAMLIFENLSRGFGRQGKRTFMAERQYTRMEDWLTAKLAYEGLPSKTYLSKTLAQYTSKTCSNCGFTITSADYDRVLEKLKKTATGWMTTINGKELKVEGQITYYNRYKRQNVVKDLSVELDRLSEESVNNDISSWTKGRSGEALSLLKKRFSHRPVQEKFVCLNCGFETHADEQAALNIARSWLFLRSQEYKKYQTNKTTGNTDKRAFVETWQSFYRKKLKEVWKPAV

SEQ ID NO: 31507 - protein, 980 aa, synthetic construct
  REGION 1..980: note = engineered CasX variant
QEIGKGRINKIRRRLVKDSNTKKAGKTGPMKTLLVRVMTPDLRERLENLRKKPENIPQPISNTSRANLNKLLTDYTEMKKAILHVYWEEFQKDPVGLMSRVAQPASKKIDQNKLKPEMDEKGNLTTAGFACSQCGQPLFVYKLEQVSEKGKAYTNYFGRCNVAEHEKLILLAQLKPEKDSDEAVTYSLGKFGQRALDFYSIHVTKESTHPVKPLAQIAGNRYASAPVGKALSDACMGTIASFLSKYQDIIIEHQKVVKGNQKRLESLRELAGKENLEYPSVTLPPQPHTKEGVDAYNEVIARVRMWVNLNLWQKLKLSRDDAKPLLRLKGFPSFPLVERQANEVDWWDMVCNVKKLINEKKEDGKVFWQNLAGYKRQEALRPYLSSEEDRKKGKKFARYQLGDLLLHLEKKHGEDWGKVYDEAWERIDKKVEGLSKHIKLEEERRSEDAQSKAALTDWLRAKASFVIEGLKEADKDEFCRCELKLQKWYGDLRGKPFAIEAENSILDISGFSKQYNCAFIWQKDGVKKLNLYLIINYFKGGKLRFKKIKPEAFEANRFYTVINKKSGEIVPMEVNFNFDDPNLIILPLAFGKRQGREFIWNDLLSLETGSLKLANGRVIEKTLYNRRTRQDEPALFVALTFERREVLDSSNIKPMNLIGVDRGENIPAVIALTDPEGCPLSRFKDSLGNPTHILRIGESYKEKQRTIQAKKEVEQRRAGGYSRKYASKAKNLADDMVRNTARDLLYYAVTQDAMLIFENLSRGFGRQGKRTFMAERQYTRMEDWLTAKLAYEGLPSKTYLSKTLAQYTSKTCSNCGFTITSADYDRVLEKLKKTATGWMTTINGKELKVEGQITYYNRYKRQNVVKDLSVELDRLSEESVNNDISSWTKGRSGEALSLLKKRFSHRPVQEKFVCLNCGFETHADEQAALNIARSWLFLRSQEYKKYQTNKTTGNTDKRAFVETWQSFYRKKLKEVWKPAV

SEQ ID NO: 31508 - protein, 980 aa, synthetic construct
  REGION 1..980: note = engineered CasX variant
QEIGKGRINKIRRRLVKDSNTKKAGKTGPMKTLLVRVMTPDLRERLENLRKKPENIPQPISNTSRANLNKLLTDYTEMKKAILHVYWEEFQKDPVGLMSRVAQPASKKIDQNKLKPEMDEKGNLTTAGFACSQCGQPLFVYKLEQVSEKGKAYTNYFGRCNVAEHEKLILLAQLKPEKDSDEAVTYSLGKFGQRALDFYSIHVTKESTHPVKPLAQIAGNRYASVPVGKALSDACMGTIASFLSKYQDIIIEHQKVVKGNQKRLESLRELAGKENLEYPSVTLPPQPHTKEGVDAYNEVIARVRMWVNLNLWQKLKLSRDDAKPLLRLKGFPSFPLVERQANEVDWWDMVCNVKKLINEKKEDGKVFWQNLAGYKRQEALRPYLSSEEDRKKGKKFARYQLGDLLLHLEKKHGEDWGKVYDEAWERIDKKVEGLSKHIKLEEERRSEDAQSKAALTDWLRAKASFVIEGLKEADKDEFCRCELKLQKWYGDLRGKPFAIEAENSILDISGFSKQYNCAFIWQKDGVKKLNLYLIINYFKGGKLRFKKIKPEAFEANRFYTVINKKSGEIVPMEVNFNFDDPNLIILPLAFGKRQGREFIWNDLLSLETGSLKLANGRVIEKTLYNRRTRQDEPALFVALTFERREVLDSSNIKPMNLIGVDRGENIPAVIALTDPEGCPLSRFKDSLGNPTHILRIGESYKEKQRTIQAKKEVEQRRAGGYSRKYASKAKNLADDMVRNTARDLLYYAVTQDAMLIFENLSRGFGRQGKRTFMAERQYTRMEDWLTAKLAYEGLPSKTYLSKTLAQYTSKTCSNCGFTITSADYDRVLEKLKKTATGWMTTINGKELKVEGQITYYNRYKRQNVVKDLSVELDRLSEESVNNDISSWTKGRSGEALSLLKKRFSHRPVQEKFVCLNCGFETHADEQAALNIARSWLFLRSQEYKKYQTNKTTGNTDKRAFVETWQSFYRKKLKEVWKPAV

SEQ ID NO: 31509 - protein, 980 aa, synthetic construct
  REGION 1..980: note = engineered CasX variant
QEIGKGRINKIRRRLVKDSNTKKAGKTGPMKTLLVRVMTPDLRERLENLRKKPENIPQPISNTSRANLNKLLTDYTEMKKAILHVYWEEFQKDPVGLMSRVAQPASKKIDQNKLKPEMDEKGNLTTAGFACSQCGQPLFVYKLEQVSEKGKAYTNYFGRCNVAEHEKLIKLAQLKPEKDSDEAVTYSLGKFGQRALDFYSIHVTKESTHPVKPLAQIAGNRYASGPVGKALSDACMGTIASFLSKYQDIIIEHQKVVKGNQKRLESLRELAGKENLEYPSVTLPPQPHTKEGVDAYNEVIARVRMWVNLNLWQKLKLSRDDAKPLLRLKGFPSFPLVERQANEVDWWDMVCNVKKLINEKKEDGKVFWQNLAGYKRQEALRPYLSSEEDRKKGKKFARYQLGDLLLHLEKKHGEDWGKVYDEAWERIDKKVEGLSKHIKLEEERRSEDAQSKAALTDWLRAKASFVIEGLKEADKDEFCRCELKLQKWYGDLRGKPFAIEAENSILDISGFSKQYNCAFIWQKDGVKKLNLYLIINYFKGGKLRFKKIKPEAFEANRFYTVINKKSGEIVPMEVNFNFDDPNLIILPLAFGKRQGREFIWNDLLSLETGSLKLANGRVIEKTLYNRRTRQDEPALFVALTFERREVLDSSNIKPMNLIGVDRGENIPAVIALTDPEGCPLSRFKDSLGNPTHILRIGESYKEKQRTIQAKKEVEQRRAGGYSRKYASKAKNLADDMVRNTARDLLYYAVTQDAMLIFENLSRGFGRQGKRTFMAERQYTRMEDWLTAKLAYEGLPSKTYLSKTLAQYTSKTCSNCGFTITSADYDRVLEKLKKTATGWMTTINGKELKVEGQITYYNRYKRQNVVKDLSVELDRLSEESVNNDISSWTKGRSGEALSLLKKRFSHRPVQEKFVCLNCGFETHADEQAALNIARSWLFLRSQEYKKYQTNKTTGNTDKRAFVETWQSFYRKKLKEVWKPAV

SEQ ID NO: 31510 - protein, 979 aa, synthetic construct
  REGION 1..979: note = engineered CasX variant
QEIGKGRINKIRRRLVKDSNTKKAGKTGPMKTLLVRVMTPDLRERLENLRKKPENIPQPISNTSRANLNKLLTDYTEMKKAILHVYWEEFQKDPVGLMSRVAQPASKKIDQNKLKPEMDEKGNLTTAGFACSQCGQPLFVYKLEQVSEKGKAYTNYFGRCNVAEHEKLILLAQLKPEKDSDEAVTYSLGKFGQRALDFYSIHVTKESTHPVKPLAQIAGNRYASPVGKALSDACMGTIASFLSKYQDIIIEHQKVVKGNQKRLESLRELAGKENLEYPSVTLPPQPHTKEGVDAYNEVIARVRMWVNLNLWQKLKLSRDDAKPLLRLKGFPSFPLVERQANEVDWWDMVCNVKKLINEKKEDGKVFWQNLAGYKRQEALRPYLSSEEDRKKGKKFARYQLGDLLLHLEKKHGEDWGKVYDEAWERIDKKVEGLSKHIKLEEERRSEDAQSKAALTDWLRAKASFVIEGLKEADKDEFCRCELKLQKWYGDLRGKPFAIEAENSILDISGFSKQYNCAFIWQKDGVKKLNLYLIINYFKGGKLRFKKIKPEAFEANRFYTVINKKSGEIVPMEVNFNFDDPNLIILPLAFGKRQGREFIWNDLLSLETGSLKLANGRVIEKTLYNRRTRQDEPALFVALTFERREVLDSSNIKPMNLIGVDRGENIPAVIALTDPEGCPLSRFKDSLGNPTHILRIGESYKEKQRTIQAKKEVEQRRAGGYSRKYASKAKNLADDMVRNTARDLLYYAVTQDAMLIFENLSRGFGRQGKRTFMAERQYTRMEDWLTAKLAYEGLPSKTYLSKTLAQYTSKTCSNCGFTITSADYDRVLEKLKKTATGWMTTINGKELKVEGQITYYNRYKRQNVVKDLSVELDRLSEESVNNDISSWTKGRSGEALSLLKKRFSHRPVQEKFVCLNCGFETHADEQAALNIARSWLFLRSQEYKKYQTNKTTGNTDKRAFVETWQSFYRKKLKEVWKPAV

SEQ ID NO: 31511 - protein, 979 aa, synthetic construct
  REGION 1..979: note = engineered CasX variant
QEIGKRANKIRRRLVKDSNTKKAGKTGPMKTLLVRVMTPDLRERLENLRKKPENIPQPISNTSRANLNKLLTDYTEMKKAILHVYWEEFQKDPVGLMSRVAQPASKKIDQNKLKPEMDEKGNLTTAGFACSQCGQPLFVYKLEQVSEKGKAYTNYFGRCNVAEHEKLILLAQLKPEKDSDEAVTYSLGKFGQRALDFYSIHVTKESTHPVKPLAQIAGNRYASYPVGKALSDACMGTIASFLSKYQDIIIEHQKVVKGNQKRLESLRELAGKENLEYPSVTLPPQPHTKEGVDAYNEVIARVRMWVNLNLWQKLKLSRDDAKPLLRLKGFPSFPLVERQANEVDWWDMVCNVKKLINEKKEDGKVFWQNLAGYKRQEALRPYLSSEEDRKKGKKFARYQLGDLLLHLEKKHGEDWGKVYDEAWERIDKKVEGLSKHIKLEEERRSEDAQSKAALTDWLRAKASFVIEGLKEADKDEFCRCELKLQKWYGDLRGKPFAIEAENSILDISGFSKQYNCAFIWQKDGVKKLNLYLIINYFKGGKLRFKKIKPEAFEANRFYTVINKKSGEIVPMEVNFNFDDPNLIILPLAFGKRQGREFIWNDLLSLETGSLKLANGRVIEKTLYNRRTRQDEPALFVALTFERREVLDSSNIKPMNLIGVDRGENIPAVIALTDPEGCPLSRFKDSLGNPTHILRIGESYKEKQRTIQAKKEVEQRRAGGYSRKYASKAKNLADDMVRNTARDLLYYAVTQDAMLIFENLSRGFGRQGKRTFMAERQYTRMEDWLTAKLAYEGLPSKTYLSKTLAQYTSKTCSNCGFTITSADYDRVLEKLKKTATGWMTTINGKELKVEGQITYYNRYKRQNVVKDLSVELDRLSEESVNNDISSWTKGRSGEALSLLKKRFSHRPVQEKFVCLNCGFETHADEQAALNIARSWLFLRSQEYKKYQTNKTTGNTDKRAFVETWQSFYRKKLKEVWKPAV

SEQ ID NO: 31512 - protein, 979 aa, synthetic construct
  REGION 1..979: note = engineered CasX variant
QEIGKRANKIRRRLVKDSNTKKAGKTGPMKTLLVRVMTPDLRERLENLRKKPENIPQPISNTSRANLNKLLTDYTEMKKAILHVYWEEFQKDPVGLMSRVAQPASKKIDQNKLKPEMDEKGNLTTAGFACSQCGQPLFVYKLEQVSEKGKAYTNYFGRCNVAEHEKLILLAQLKPEKDSDEAVTYSLGKFGQRALDFYSIHVTKESTHPVKPLAQIAGNRYASHPVGKALSDACMGTIASFLSKYQDIIIEHQKVVKGNQKRLESLRELAGKENLEYPSVTLPPQPHTKEGVDAYNEVIARVRMWVNLNLWQKLKLSRDDAKPLLRLKGFPSFPLVERQANEVDWWDMVCNVKKLINEKKEDGKVFWQNLAGYKRQEALRPYLSSEEDRKKGKKFARYQLGDLLLHLEKKHGEDWGKVYDEAWERIDKKVEGLSKHIKLEEERRSEDAQSKAALTDWLRAKASFVIEGLKEADKDEFCRCELKLQKWYGDLRGKPFAIEAENSILDISGFSKQYNCAFIWQKDGVKKLNLYLIINYFKGGKLRFKKIKPEAFEANRFYTVINKKSGEIVPMEVNFNFDDPNLIILPLAFGKRQGREFIWNDLLSLETGSLKLANGRVIEKTLYNRRTRQDEPALFVALTFERREVLDSSNIKPMNLIGVDRGENIPAVIALTDPEGCPLSRFKDSLGNPTHILRIGESYKEKQRTIQAKKEVEQRRAGGYSRKYASKAKNLADDMVRNTARDLLYYAVTQDAMLIFENLSRGFGRQGKRTFMAERQYTRMEDWLTAKLAYEGLPSKTYLSKTLAQYTSKTCSNCGFTITSADYDRVLEKLKKTATGWMTTINGKELKVEGQITYYNRYKRQNVVKDLSVELDRLSEESVNNDISSWTKGRSGEALSLLKKRFSHRPVQEKFVCLNCGFETHADEQAALNIARSWLFLRSQEYKKYQTNKTTGNTDKRAFVETWQSFYRKKLKEVWKPAV

SEQ ID NO: 31513 - protein, 979 aa, synthetic construct
  REGION 1..979: note = engineered CasX variant
QEIGKRANKIRRRLVKDSNTKKAGKTGPMKTLLVRVMTPDLRERLENLRKKPENIPQPISNTSRANLNKLLTDYTEMKKAILHVYWEEFQKDPVGLMSRVAQPASKKIDQNKLKPEMDEKGNLTTAGFACSQCGQPLFVYKLEQVSEKGKAYTNYFGRCNVAEHEKLILLAQLKPEKDSDEAVTYSLGKFGQRALDFYSIHVTKESTHPVKPLAQIAGNRYASSPVGKALSDACMGTIASFLSKYQDIIIEHQKVVKGNQKRLESLRELAGKENLEYPSVTLPPQPHTKEGVDAYNEVIARVRMWVNLNLWQKLKLSRDDAKPLLRLKGFPSFPLVERQANEVDWWDMVCNVKKLINEKKEDGKVFWQNLAGYKRQEALRPYLSSEEDRKKGKKFARYQLGDLLLHLEKKHGEDWGKVYDEAWERIDKKVEGLSKHIKLEEERRSEDAQSKAALTDWLRAKASFVIEGLKEADKDEFCRCELKLQKWYGDLRGKPFAIEAENSILDISGFSKQYNCAFIWQKDGVKKLNLYLIINYFKGGKLRFKKIKPEAFEANRFYTVINKKSGEIVPMEVNFNFDDPNLIILPLAFGKRQGREFIWNDLLSLETGSLKLANGRVIEKTLYNRRTRQDEPALFVALTFERREVLDSSNIKPMNLIGVDRGENIPAVIALTDPEGCPLSRFKDSLGNPTHILRIGESYKEKQRTIQAKKEVEQRRAGGYSRKYASKAKNLADDMVRNTARDLLYYAVTQDAMLIFENLSRGFGRQGKRTFMAERQYTRMEDWLTAKLAYEGLPSKTYLSKTLAQYTSKTCSNCGFTITSADYDRVLEKLKKTATGWMTTINGKELKVEGQITYYNRYKRQNVVKDLSVELDRLSEESVNNDISSWTKGRSGEALSLLKKRFSHRPVQEKFVCLNCGFETHADEQAALNIARSWLFLRSQEYKKYQTNKTTGNTDKRAFVETWQSFYRKKLKEVWKPAV

SEQ ID NO: 31514 - protein, 979 aa, synthetic construct
  REGION 1..979: note = engineered CasX variant
QEIGKRANKIRRRLVKDSNTKKAGKTGPMKTLLVRVMTPDLRERLENLRKKPENIPQPISNTSRANLNKLLTDYTEMKKAILHVYWEEFQKDPVGLMSRVAQPASKKIDQNKLKPEMDEKGNLTTAGFACSQCGQPLFVYKLEQVSEKGKAYTNYFGRCNVAEHEKLILLAQLKPEKDSDEAVTYSLGKFGQRALDFYSIHVTKESTHPVKPLAQIAGNRYASTPVGKALSDACMGTIASFLSKYQDIIIEHQKVVKGNQKRLESLRELAGKENLEYPSVTLPPQPHTKEGVDAYNEVIARVRMWVNLNLWQKLKLSRDDAKPLLRLKGFPSFPLVERQANEVDWWDMVCNVKKLINEKKEDGKVFWQNLAGYKRQEALRPYLSSEEDRKKGKKFARYQLGDLLLHLEKKHGEDWGKVYDEAWERIDKKVEGLSKHIKLEEERRSEDAQSKAALTDWLRAKASFVIEGLKEADKDEFCRCELKLQKWYGDLRGKPFAIEAENSILDISGFSKQYNCAFIWQKDGVKKLNLYLIINYFKGGKLRFKKIKPEAFEANRFYTVINKKSGEIVPMEVNFNFDDPNLIILPLAFGKRQGREFIWNDLLSLETGSLKLANGRVIEKTLYNRRTRQDEPALFVALTFERREVLDSSNIKPMNLIGVDRGENIPAVIALTDPEGCPLSRFKDSLGNPTHILRIGESYKEKQRTIQAKKEVEQRRAGGYSRKYASKAKNLADDMVRNTARDLLYYAVTQDAMLIFENLSRGFGRQGKRTFMAERQYTRMEDWLTAKLAYEGLPSKTYLSKTLAQYTSKTCSNCGFTITSADYDRVLEKLKKTATGWMTTINGKELKVEGQITYYNRYKRQNVVKDLSVELDRLSEESVNNDISSWTKGRSGEALSLLKKRFSHRPVQEKFVCLNCGFETHADEQAALNIARSWLFLRSQEYKKYQTNKTTGNTDKRAFVETWQSFYRKKLKEVWKPAV

SEQ ID NO: 31515 - protein, 979 aa, synthetic construct
  REGION 1..979: note = engineered CasX variant
QEIGKRANKIRRRLVKDSNTKKAGKTGPMKTLLVRVMTPDLRERLENLRKKPENIPQPISNTSRANLNKLLTDYTEMKKAILHVYWEEFQKDPVGLMSRVAQPASKKIDQNKLKPEMDEKGNLTTAGFACSQCGQPLFVYKLEQVSEKGKAYTNYFGRCNVAEHEKLILLAQLKPEKDSDEAVTYSLGKFGQRALDFYSIHVTKESTHPVKPLAQIAGNRYASAPVGKALSDACMGTIASFLSKYQDIIIEHQKVVKGNQKRLESLRELAGKENLEYPSVTLPPQPHTKEGVDAYNEVIARVRMWVNLNLWQKLKLSRDDAKPLLRLKGFPSFPLVERQANEVDWWDMVCNVKKLINEKKEDGKVFWQNLAGYKRQEALRPYLSSEEDRKKGKKFARYQLGDLLLHLEKKHGEDWGKVYDEAWERIDKKVEGLSKHIKLEEERRSEDAQSKAALTDWLRAKASFVIEGLKEADKDEFCRCELKLQKWYGDLRGKPFAIEAENSILDISGFSKQYNCAFIWQKDGVKKLNLYLIINYFKGGKLRFKKIKPEAFEANRFYTVINKKSGEIVPMEVNFNFDDPNLIILPLAFGKRQGREFIWNDLLSLETGSLKLANGRVIEKTLYNRRTRQDEPALFVALTFERREVLDSSNIKPMNLIGVDRGENIPAVIALTDPEGCPLSRFKDSLGNPTHILRIGESYKEKQRTIQAKKEVEQRRAGGYSRKYASKAKNLADDMVRNTARDLLYYAVTQDAMLIFENLSRGFGRQGKRTFMAERQYTRMEDWLTAKLAYEGLPSKTYLSKTLAQYTSKTCSNCGFTITSADYDRVLEKLKKTATGWMTTINGKELKVEGQITYYNRYKRQNVVKDLSVELDRLSEESVNNDISSWTKGRSGEALSLLKKRFSHRPVQEKFVCLNCGFETHADEQAALNIARSWLFLRSQEYKKYQTNKTTGNTDKRAFVETWQSFYRKKLKEVWKPAV

SEQ ID NO: 31516 - protein, 979 aa, synthetic construct
  REGION 1..979: note = engineered CasX variant
QEIGKRANKIRRRLVKDSNTKKAGKTGPMKTLLVRVMTPDLRERLENLRKKPENIPQPISNTSRANLNKLLTDYTEMKKAILHVYWEEFQKDPVGLMSRVAQPASKKIDQNKLKPEMDEKGNLTTAGFACSQCGQPLFVYKLEQVSEKGKAYTNYFGRCNVAEHEKLILLAQLKPEKDSDEAVTYSLGKFGQRALDFYSIHVTKESTHPVKPLAQIAGNRYASVPVGKALSDACMGTIASFLSKYQDIIIEHQKVVKGNQKRLESLRELAGKENLEYPSVTLPPQPHTKEGVDAYNEVIARVRMWVNLNLWQKLKLSRDDAKPLLRLKGFPSFPLVERQANEVDWWDMVCNVKKLINEKKEDGKVFWQNLAGYKRQEALRPYLSSEEDRKKGKKFARYQLGDLLLHLEKKHGEDWGKVYDEAWERIDKKVEGLSKHIKLEEERRSEDAQSKAALTDWLRAKASFVIEGLKEADKDEFCRCELKLQKWYGDLRGKPFAIEAENSILDISGFSKQYNCAFIWQKDGVKKLNLYLIINYFKGGKLRFKKIKPEAFEANRFYTVINKKSGEIVPMEVNFNFDDPNLIILPLAFGKRQGREFIWNDLLSLETGSLKLANGRVIEKTLYNRRTRQDEPALFVALTFERREVLDSSNIKPMNLIGVDRGENIPAVIALTDPEGCPLSRFKDSLGNPTHILRIGESYKEKQRTIQAKKEVEQRRAGGYSRKYASKAKNLADDMVRNTARDLLYYAVTQDAMLIFENLSRGFGRQGKRTFMAERQYTRMEDWLTAKLAYEGLPSKTYLSKTLAQYTSKTCSNCGFTITSADYDRVLEKLKKTATGWMTTINGKELKVEGQITYYNRYKRQNVVKDLSVELDRLSEESVNNDISSWTKGRSGEALSLLKKRFSHRPVQEKFVCLNCGFETHADEQAALNIARSWLFLRSQEYKKYQTNKTTGNTDKRAFVETWQSFYRKKLKEVWKPAV

SEQ ID NO: 31517 - protein, 979 aa, synthetic construct
  REGION 1..979: note = engineered CasX variant
QEIGKRANKIRRRLVKDSNTKKAGKTGPMKTLLVRVMTPDLRERLENLRKKPENIPQPISNTSRANLNKLLTDYTEMKKAILHVYWEEFQKDPVGLMSRVAQPASKKIDQNKLKPEMDEKGNLTTAGFACSQCGQPLFVYKLEQVSEKGKAYTNYFGRCNVAEHEKLIKLAQLKPEKDSDEAVTYSLGKFGQRALDFYSIHVTKESTHPVKPLAQIAGNRYASGPVGKALSDACMGTIASFLSKYQDIIIEHQKVVKGNQKRLESLRELAGKENLEYPSVTLPPQPHTKEGVDAYNEVIARVRMWVNLNLWQKLKLSRDDAKPLLRLKGFPSFPLVERQANEVDWWDMVCNVKKLINEKKEDGKVFWQNLAGYKRQEALRPYLSSEEDRKKGKKFARYQLGDLLLHLEKKHGEDWGKVYDEAWERIDKKVEGLSKHIKLEEERRSEDAQSKAALTDWLRAKASFVIEGLKEADKDEFCRCELKLQKWYGDLRGKPFAIEAENSILDISGFSKQYNCAFIWQKDGVKKLNLYLIINYFKGGKLRFKKIKPEAFEANRFYTVINKKSGEIVPMEVNFNFDDPNLIILPLAFGKRQGREFIWNDLLSLETGSLKLANGRVIEKTLYNRRTRQDEPALFVALTFERREVLDSSNIKPMNLIGVDRGENIPAVIALTDPEGCPLSRFKDSLGNPTHILRIGESYKEKQRTIQAKKEVEQRRAGGYSRKYASKAKNLADDMVRNTARDLLYYAVTQDAMLIFENLSRGFGRQGKRTFMAERQYTRMEDWLTAKLAYEGLPSKTYLSKTLAQYTSKTCSNCGFTITSADYDRVLEKLKKTATGWMTTINGKELKVEGQITYYNRYKRQNVVKDLSVELDRLSEESVNNDISSWTKGRSGEALSLLKKRFSHRPVQEKFVCLNCGFETHADEQAALNIARSWLFLRSQEYKKYQTNKTTGNTDKRAFVETWQSFYRKKLKEVWKPAV

SEQ ID NO: 31518 - protein, 978 aa, synthetic construct
  REGION 1..978: note = engineered CasX variant
QEIGKRANKIRRRLVKDSNTKKAGKTGPMKTLLVRVMTPDLRERLENLRKKPENIPQPISNTSRANLNKLLTDYTEMKKAILHVYWEEFQKDPVGLMSRVAQPASKKIDQNKLKPEMDEKGNLTTAGFACSQCGQPLFVYKLEQVSEKGKAYTNYFGRCNVAEHEKLILLAQLKPEKDSDEAVTYSLGKFGQRALDFYSIHVTKESTHPVKPLAQIAGNRYASPVGKALSDACMGTIASFLSKYQDIIIEHQKVVKGNQKRLESLRELAGKENLEYPSVTLPPQPHTKEGVDAYNEVIARVRMWVNLNLWQKLKLSRDDAKPLLRLKGFPSFPLVERQANEVDWWDMVCNVKKLINEKKEDGKVFWQNLAGYKRQEALRPYLSSEEDRKKGKKFARYQLGDLLLHLEKKHGEDWGKVYDEAWERIDKKVEGLSKHIKLEEERRSEDAQSKAALTDWLRAKASFVIEGLKEADKDEFCRCELKLQKWYGDLRGKPFAIEAENSILDISGFSKQYNCAFIWQKDGVKKLNLYLIINYFKGGKLRFKKIKPEAFEANRFYTVINKKSGEIVPMEVNFNFDDPNLIILPLAFGKRQGREFIWNDLLSLETGSLKLANGRVIEKTLYNRRTRQDEPALFVALTFERREVLDSSNIKPMNLIGVDRGENIPAVIALTDPEGCPLSRFKDSLGNPTHILRIGESYKEKQRTIQAKKEVEQRRAGGYSRKYASKAKNLADDMVRNTARDLLYYAVTQDAMLIFENLSRGFGRQGKRTFMAERQYTRMEDWLTAKLAYEGLPSKTYLSKTLAQYTSKTCSNCGFTITSADYDRVLEKLKKTATGWMTTINGKELKVEGQITYYNRYKRQNVVKDLSVELDRLSEESVNNDISSWTKGRSGEALSLLKKRFSHRPVQEKFVCLNCGFETHADEQAALNIARSWLFLRSQEYKKYQTNKTTGNTDKRAFVETWQSFYRKKLKEVWKPAV

SEQ ID NO: 31519 - protein, 979 aa, synthetic construct
  REGION 1..979: note = engineered CasX variant
QEIGKRISKIRRRLVKDSNTKKAGKTGPMKTLLVRVMTPDLRERLENLRKKPENIPQPISNTSRANLNKLLTDYTEMKKAILHVYWEEFQKDPVGLMSRVAQPASKKIDQNKLKPEMDEKGNLTTAGFACSQCGQPLFVYKLEQVSEKGKAYTNYFGRCNVAEHEKLILLAQLKPEKDSDEAVTYSLGKFGQRALDFYSIHVTKESTHPVKPLAQIAGNRYASYPVGKALSDACMGTIASFLSKYQDIIIEHQKVVKGNQKRLESLRELAGKENLEYPSVTLPPQPHTKEGVDAYNEVIARVRMWVNLNLWQKLKLSRDDAKPLLRLKGFPSFPLVERQANEVDWWDMVCNVKKLINEKKEDGKVFWQNLAGYKRQEALRPYLSSEEDRKKGKKFARYQLGDLLLHLEKKHGEDWGKVYDEAWERIDKKVEGLSKHIKLEEERRSEDAQSKAALTDWLRAKASFVIEGLKEADKDEFCRCELKLQKWYGDLRGKPFAIEAENSILDISGFSKQYNCAFIWQKDGVKKLNLYLIINYFKGGKLRFKKIKPEAFEANRFYTVINKKSGEIVPMEVNFNFDDPNLIILPLAFGKRQGREFIWNDLLSLETGSLKLANGRVIEKTLYNRRTRQDEPALFVALTFERREVLDSSNIKPMNLIGVDRGENIPAVIALTDPEGCPLSRFKDSLGNPTHILRIGESYKEKQRTIQAKKEVEQRRAGGYSRKYASKAKNLADDMVRNTARDLLYYAVTQDAMLIFENLSRGFGRQGKRTFMAERQYTRMEDWLTAKLAYEGLPSKTYLSKTLAQYTSKTCSNCGFTITSADYDRVLEKLKKTATGWMTTINGKELKVEGQITYYNRYKRQNVVKDLSVELDRLSEESVNNDISSWTKGRSGEALSLLKKRFSHRPVQEKFVCLNCGFETHADEQAALNIARSWLFLRSQEYKKYQTNKTTGNTDKRAFVETWQSFYRKKLKEVWKPAV

SEQ ID NO: 31520 - protein, 979 aa, synthetic construct
  REGION 1..979: note = engineered CasX variant
QEIGKRISKIRRRLVKDSNTKKAGKTGPMKTLLVRVMTPDLRERLENLRKKPENIPQPISNTSRANLNKLLTDYTEMKKAILHVYWEEFQKDPVGLMSRVAQPASKKIDQNKLKPEMDEKGNLTTAGFACSQCGQPLFVYKLEQVSEKGKAYTNYFGRCNVAEHEKLILLAQLKPEKDSDEAVTYSLGKFGQRALDFYSIHVTKESTHPVKPLAQIAGNRYASHPVGKALSDACMGTIASFLSKYQDIIIEHQKVVKGNQKRLESLRELAGKENLEYPSVTLPPQPHTKEGVDAYNEVIARVRMWVNLNLWQKLKLSRDDAKPLLRLKGFPSFPLVERQANEVDWWDMVCNVKKLINEKKEDGKVFWQNLAGYKRQEALRPYLSSEEDRKKGKKFARYQLGDLLLHLEKKHGEDWGKVYDEAWERIDKKVEGLSKHIKLEEERRSEDAQSKAALTDWLRAKASFVIEGLKEADKDEFCRCELKLQKWYGDLRGKPFAIEAENSILDISGFSKQYNCAFIWQKDGVKKLNLYLIINYFKGGKLRFKKIKPEAFEANRFYTVINKKSGEIVPMEVNFNFDDPNLIILPLAFGKRQGREFIWNDLLSLETGSLKLANGRVIEKTLYNRRTRQDEPALFVALTFERREVLDSSNIKPMNLIGVDRGENIPAVIALTDPEGCPLSRFKDSLGNPTHILRIGESYKEKQRTIQAKKEVEQRRAGGYSRKYASKAKNLADDMVRNTARDLLYYAVTQDAMLIFENLSRGFGRQGKRTFMAERQYTRMEDWLTAKLAYEGLPSKTYLSKTLAQYTSKTCSNCGFTITSADYDRVLEKLKKTATGWMTTINGKELKVEGQITYYNRYKRQNVVKDLSVELDRLSEESVNNDISSWTKGRSGEALSLLKKRFSHRPVQEKFVCLNCGFETHADEQAALNIARSWLFLRSQEYKKYQTNKTTGNTDKRAFVETWQSFYRKKLKEVWKPAV

SEQ ID NO: 31521 - protein, 979 aa, synthetic construct
  REGION 1..979: note = engineered CasX variant
QEIGKRISKIRRRLVKDSNTKKAGKTGPMKTLLVRVMTPDLRERLENLRKKPENIPQPISNTSRANLNKLLTDYTEMKKAILHVYWEEFQKDPVGLMSRVAQPASKKIDQNKLKPEMDEKGNLTTAGFACSQCGQPLFVYKLEQVSEKGKAYTNYFGRCNVAEHEKLILLAQLKPEKDSDEAVTYSLGKFGQRALDFYSIHVTKESTHPVKPLAQIAGNRYASSPVGKALSDACMGTIASFLSKYQDIIIEHQKVVKGNQKRLESLRELAGKENLEYPSVTLPPQPHTKEGVDAYNEVIARVRMWVNLNLWQKLKLSRDDAKPLLRLKGFPSFPLVERQANEVDWWDMVCNVKKLINEKKEDGKVFWQNLAGYKRQEALRPYLSSEEDRKKGKKFARYQLGDLLLHLEKKHGEDWGKVYDEAWERIDKKVEGLSKHIKLEEERRSEDAQSKAALTDWLRAKASFVIEGLKEADKDEFCRCELKLQKWYGDLRGKPFAIEAENSILDISGFSKQYNCAFIWQKDGVKKLNLYLIINYFKGGKLRFKKIKPEAFEANRFYTVINKKSGEIVPMEVNFNFDDPNLIILPLAFGKRQGREFIWNDLLSLETGSLKLANGRVIEKTLYNRRTRQDEPALFVALTFERREVLDSSNIKPMNLIGVDRGENIPAVIALTDPEGCPLSRFKDSLGNPTHILRIGESYKEKQRTIQAKKEVEQRRAGGYSRKYASKAKNLADDMVRNTARDLLYYAVTQDAMLIFENLSRGFGRQGKRTFMAERQYTRMEDWLTAKLAYEGLPSKTYLSKTLAQYTSKTCSNCGFTITSADYDRVLEKLKKTATGWMTTINGKELKVEGQITYYNRYKRQNVVKDLSVELDRLSEESVNNDISSWTKGRSGEALSLLKKRFSHRPVQEKFVCLNCGFETHADEQAALNIARSWLFLRSQEYKKYQTNKTTGNTDKRAFVETWQSFYRKKLKEVWKPAV

SEQ ID NO: 31522 - protein, 979 aa, synthetic construct
  REGION 1..979: note = engineered CasX variant
QEIGKRISKIRRRLVKDSNTKKAGKTGPMKTLLVRVMTPDLRERLENLRKKPENIPQPISNTSRANLNKLLTDYTEMKKAILHVYWEEFQKDPVGLMSRVAQPASKKIDQNKLKPEMDEKGNLTTAGFACSQCGQPLFVYKLEQVSEKGKAYTNYFGRCNVAEHEKLILLAQLKPEKDSDEAVTYSLGKFGQRALDFYSIHVTKESTHPVKPLAQIAGNRYASTPVGKALSDACMGTIASFLSKYQDIIIEHQKVVKGNQKRLESLRELAGKENLEYPSVTLPPQPHTKEGVDAYNEVIARVRMWVNLNLWQKLKLSRDDAKPLLRLKGFPSFPLVERQANEVDWWDMVCNVKKLINEKKEDGKVFWQNLAGYKRQEALRPYLSSEEDRKKGKKFARYQLGDLLLHLEKKHGEDWGKVYDEAWERIDKKVEGLSKHIKLEEERRSEDAQSKAALTDWLRAKASFVIEGLKEADKDEFCRCELKLQKWYGDLRGKPFAIEAENSILDISGFSKQYNCAFIWQKDGVKKLNLYLIINYFKGGKLRFKKIKPEAFEANRFYTVINKKSGEIVPMEVNFNFDDPNLIILPLAFGKRQGREFIWNDLLSLETGSLKLANGRVIEKTLYNRRTRQDEPALFVALTFERREVLDSSNIKPMNLIGVDRGENIPAVIALTDPEGCPLSRFKDSLGNPTHILRIGESYKEKQRTIQAKKEVEQRRAGGYSRKYASKAKNLADDMVRNTARDLLYYAVTQDAMLIFENLSRGFGRQGKRTFMAERQYTRMEDWLTAKLAYEGLPSKTYLSKTLAQYTSKTCSNCGFTITSADYDRVLEKLKKTATGWMTTINGKELKVEGQITYYNRYKRQNVVKDLSVELDRLSEESVNNDISSWTKGRSGEALSLLKKRFSHRPVQEKFVCLNCGFETHADEQAALNIARSWLFLRSQEYKKYQTNKTTGNTDKRAFVETWQSFYRKKLKEVWKPAV

SEQ ID NO: 31523 - protein, 979 aa, synthetic construct
  REGION 1..979: note = engineered CasX variant
QEIGKRISKIRRRLVKDSNTKKAGKTGPMKTLLVRVMTPDLRERLENLRKKPENIPQPISNTSRANLNKLLTDYTEMKKAILHVYWEEFQKDPVGLMSRVAQPASKKIDQNKLKPEMDEKGNLTTAGFACSQCGQPLFVYKLEQVSEKGKAYTNYFGRCNVAEHEKLILLAQLKPEKDSDEAVTYSLGKFGQRALDFYSIHVTKESTHPVKPLAQIAGNRYASAPVGKALSDACMGTIASFLSKYQDIIIEHQKVVKGNQKRLESLRELAGKENLEYPSVTLPPQPHTKEGVDAYNEVIARVRMWVNLNLWQKLKLSRDDAKPLLRLKGFPSFPLVERQANEVDWWDMVCNVKKLINEKKEDGKVFWQNLAGYKRQEALRPYLSSEEDRKKGKKFARYQLGDLLLHLEKKHGEDWGKVYDEAWERIDKKVEGLSKHIKLEEERRSEDAQSKAALTDWLRAKASFVIEGLKEADKDEFCRCELKLQKWYGDLRGKPFAIEAENSILDISGFSKQYNCAFIWQKDGVKKLNLYLIINYFKGGKLRFKKIKPEAFEANRFYTVINKKSGEIVPMEVNFNFDDPNLIILPLAFGKRQGREFIWNDLLSLETGSLKLANGRVIEKTLYNRRTRQDEPALFVALTFERREVLDSSNIKPMNLIGVDRGENIPAVIALTDPEGCPLSRFKDSLGNPTHILRIGESYKEKQRTIQAKKEVEQRRAGGYSRKYASKAKNLADDMVRNTARDLLYYAVTQDAMLIFENLSRGFGRQGKRTFMAERQYTRMEDWLTAKLAYEGLPSKTYLSKTLAQYTSKTCSNCGFTITSADYDRVLEKLKKTATGWMTTINGKELKVEGQITYYNRYKRQNVVKDLSVELDRLSEESVNNDISSWTKGRSGEALSLLKKRFSHRPVQEKFVCLNCGFETHADEQAALNIARSWLFLRSQEYKKYQTNKTTGNTDKRAFVETWQSFYRKKLKEVWKPAV

SEQ ID NO: 31524 - protein, 979 aa, synthetic construct
  REGION 1..979: note = engineered CasX variant
QEIGKRISKIRRRLVKDSNTKKAGKTGPMKTLLVRVMTPDLRERLENLRKKPENIPQPISNTSRANLNKLLTDYTEMKKAILHVYWEEFQKDPVGLMSRVAQPASKKIDQNKLKPEMDEKGNLTTAGFACSQCGQPLFVYKLEQVSEKGKAYTNYFGRCNVAEHEKLILLAQLKPEKDSDEAVTYSLGKFGQRALDFYSIHVTKESTHPVKPLAQIAGNRYASVPVGKALSDACMGTIASFLSKYQDIIIEHQKVVKGNQKRLESLRELAGKENLEYPSVTLPPQPHTKEGVDAYNEVIARVRMWVNLNLWQKLKLSRDDAKPLLRLKGFPSFPLVERQANEVDWWDMVCNVKKLINEKKEDGKVFWQNLAGYKRQEALRPYLSSEEDRKKGKKFARYQLGDLLLHLEKKHGEDWGKVYDEAWERIDKKVEGLSKHIKLEEERRSEDAQSKAALTDWLRAKASFVIEGLKEADKDEFCRCELKLQKWYGDLRGKPFAIEAENSILDISGFSKQYNCAFIWQKDGVKKLNLYLIINYFKGGKLRFKKIKPEAFEANRFYTVINKKSGEIVPMEVNFNFDDPNLIILPLAFGKRQGREFIWNDLLSLETGSLKLANGRVIEKTLYNRRTRQDEPALFVALTFERREVLDSSNIKPMNLIGVDRGENIPAVIALTDPEGCPLSRFKDSLGNPTHILRIGESYKEKQRTIQAKKEVEQRRAGGYSRKYASKAKNLADDMVRNTARDLLYYAVTQDAMLIFENLSRGFGRQGKRTFMAERQYTRMEDWLTAKLAYEGLPSKTYLSKTLAQYTSKTCSNCGFTITSADYDRVLEKLKKTATGWMTTINGKELKVEGQITYYNRYKRQNVVKDLSVELDRLSEESVNNDISSWTKGRSGEALSLLKKRFSHRPVQEKFVCLNCGFETHADEQAALNIARSWLFLRSQEYKKYQTNKTTGNTDKRAFVETWQSFYRKKLKEVWKPAV

SEQ ID NO: 31525 - protein, 979 aa, synthetic construct
  REGION 1..979: note = engineered CasX variant
QEIGKRISKIRRRLVKDSNTKKAGKTGPMKTLLVRVMTPDLRERLENLRKKPENIPQPISNTSRANLNKLLTDYTEMKKAILHVYWEEFQKDPVGLMSRVAQPASKKIDQNKLKPEMDEKGNLTTAGFACSQCGQPLFVYKLEQVSEKGKAYTNYFGRCNVAEHEKLIKLAQLKPEKDSDEAVTYSLGKFGQRALDFYSIHVTKESTHPVKPLAQIAGNRYASGPVGKALSDACMGTIASFLSKYQDIIIEHQKVVKGNQKRLESLRELAGKENLEYPSVTLPPQPHTKEGVDAYNEVIARVRMWVNLNLWQKLKLSRDDAKPLLRLKGFPSFPLVERQANEVDWWDMVCNVKKLINEKKEDGKVFWQNLAGYKRQEALRPYLSSEEDRKKGKKFARYQLGDLLLHLEKKHGEDWGKVYDEAWERIDKKVEGLSKHIKLEEERRSEDAQSKAALTDWLRAKASFVIEGLKEADKDEFCRCELKLQKWYGDLRGKPFAIEAENSILDISGFSKQYNCAFIWQKDGVKKLNLYLIINYFKGGKLRFKKIKPEAFEANRFYTVINKKSGEIVPMEVNFNFDDPNLIILPLAFGKRQGREFIWNDLLSLETGSLKLANGRVIEKTLYNRRTRQDEPALFVALTFERREVLDSSNIKPMNLIGVDRGENIPAVIALTDPEGCPLSRFKDSLGNPTHILRIGESYKEKQRTIQAKKEVEQRRAGGYSRKYASKAKNLADDMVRNTARDLLYYAVTQDAMLIFENLSRGFGRQGKRTFMAERQYTRMEDWLTAKLAYEGLPSKTYLSKTLAQYTSKTCSNCGFTITSADYDRVLEKLKKTATGWMTTINGKELKVEGQITYYNRYKRQNVVKDLSVELDRLSEESVNNDISSWTKGRSGEALSLLKKRFSHRPVQEKFVCLNCGFETHADEQAALNIARSWLFLRSQEYKKYQTNKTTGNTDKRAFVETWQSFYRKKLKEVWKPAV

SEQ ID NO: 31526 - protein, 978 aa, synthetic construct
  REGION 1..978: note = engineered CasX variant
QEIGKRISKIRRRLVKDSNTKKAGKTGPMKTLLVRVMTPDLRERLENLRKKPENIPQPISNTSRANLNKLLTDYTEMKKAILHVYWEEFQKDPVGLMSRVAQPASKKIDQNKLKPEMDEKGNLTTAGFACSQCGQPLFVYKLEQVSEKGKAYTNYFGRCNVAEHEKLILLAQLKPEKDSDEAVTYSLGKFGQRALDFYSIHVTKESTHPVKPLAQIAGNRYASPVGKALSDACMGTIASFLSKYQDIIIEHQKVVKGNQKRLESLRELAGKENLEYPSVTLPPQPHTKEGVDAYNEVIARVRMWVNLNLWQKLKLSRDDAKPLLRLKGFPSFPLVERQANEVDWWDMVCNVKKLINEKKEDGKVFWQNLAGYKRQEALRPYLSSEEDRKKGKKFARYQLGDLLLHLEKKHGEDWGKVYDEAWERIDKKVEGLSKHIKLEEERRSEDAQSKAALTDWLRAKASFVIEGLKEADKDEFCRCELKLQKWYGDLRGKPFAIEAENSILDISGFSKQYNCAFIWQKDGVKKLNLYLIINYFKGGKLRFKKIKPEAFEANRFYTVINKKSGEIVPMEVNFNFDDPNLIILPLAFGKRQGREFIWNDLLSLETGSLKLANGRVIEKTLYNRRTRQDEPALFVALTFERREVLDSSNIKPMNLIGVDRGENIPAVIALTDPEGCPLSRFKDSLGNPTHILRIGESYKEKQRTIQAKKEVEQRRAGGYSRKYASKAKNLADDMVRNTARDLLYYAVTQDAMLIFENLSRGFGRQGKRTFMAERQYTRMEDWLTAKLAYEGLPSKTYLSKTLAQYTSKTCSNCGFTITSADYDRVLEKLKKTATGWMTTINGKELKVEGQITYYNRYKRQNVVKDLSVELDRLSEESVNNDISSWTKGRSGEALSLLKKRFSHRPVQEKFVCLNCGFETHADEQAALNIARSWLFLRSQEYKKYQTNKTTGNTDKRAFVETWQSFYRKKLKEVWKPAV

SEQ ID NO: 31527 - protein, 979 aa, synthetic construct
  REGION 1..979: note = engineered CasX variant
QEIGKRINGIRRRLVKDSNTKKAGKTGPMKTLLVRVMTPDLRERLENLRKKPENIPQPISNTSRANLNKLLTDYTEMKKAILHVYWEEFQKDPVGLMSRVAQPASKKIDQNKLKPEMDEKGNLTTAGFACSQCGQPLFVYKLEQVSEKGKAYTNYFGRCNVAEHEKLILLAQLKPEKDSDEAVTYSLGKFGQRALDFYSIHVTKESTHPVKPLAQIAGNRYASYPVGKALSDACMGTIASFLSKYQDIIIEHQKVVKGNQKRLESLRELAGKENLEYPSVTLPPQPHTKEGVDAYNEVIARVRMWVNLNLWQKLKLSRDDAKPLLRLKGFPSFPLVERQANEVDWWDMVCNVKKLINEKKEDGKVFWQNLAGYKRQEALRPYLSSEEDRKKGKKFARYQLGDLLLHLEKKHGEDWGKVYDEAWERIDKKVEGLSKHIKLEEERRSEDAQSKAALTDWLRAKASFVIEGLKEADKDEFCRCELKLQKWYGDLRGKPFAIEAENSILDISGFSKQYNCAFIWQKDGVKKLNLYLIINYFKGGKLRFKKIKPEAFEANRFYTVINKKSGEIVPMEVNFNFDDPNLIILPLAFGKRQGREFIWNDLLSLETGSLKLANGRVIEKTLYNRRTRQDEPALFVALTFERREVLDSSNIKPMNLIGVDRGENIPAVIALTDPEGCPLSRFKDSLGNPTHILRIGESYKEKQRTIQAKKEVEQRRAGGYSRKYASKAKNLADDMVRNTARDLLYYAVTQDAMLIFENLSRGFGRQGKRTFMAERQYTRMEDWLTAKLAYEGLPSKTYLSKTLAQYTSKTCSNCGFTITSADYDRVLEKLKKTATGWMTTINGKELKVEGQITYYNRYKRQNVVKDLSVELDRLSEESVNNDISSWTKGRSGEALSLLKKRFSHRPVQEKFVCLNCGFETHADEQAALNIARSWLFLRSQEYKKYQTNKTTGNTDKRAFVETWQSFYRKKLKEVWKPAV

SEQ ID NO: 31528 - protein, 979 aa, synthetic construct
  REGION 1..979: note = engineered CasX variant
QEIGKRINGIRRRLVKDSNTKKAGKTGPMKTLLVRVMTPDLRERLENLRKKPENIPQPISNTSRANLNKLLTDYTEMKKAILHVYWEEFQKDPVGLMSRVAQPASKKIDQNKLKPEMDEKGNLTTAGFACSQCGQPLFVYKLEQVSEKGKAYTNYFGRCNVAEHEKLILLAQLKPEKDSDEAVTYSLGKFGQRALDFYSIHVTKESTHPVKPLAQIAGNRYASHPVGKALSDACMGTIASFLSKYQDIIIEHQKVVKGNQKRLESLRELAGKENLEYPSVTLPPQPHTKEGVDAYNEVIARVRMWVNLNLWQKLKLSRDDAKPLLRLKGFPSFPLVERQANEVDWWDMVCNVKKLINEKKEDGKVFWQNLAGYKRQEALRPYLSSEEDRKKGKKFARYQLGDLLLHLEKKHGEDWGKVYDEAWERIDKKVEGLSKHIKLEEERRSEDAQSKAALTDWLRAKASFVIEGLKEADKDEFCRCELKLQKWYGDLRGKPFAIEAENSILDISGFSKQYNCAFIWQKDGVKKLNLYLIINYFKGGKLRFKKIKPEAFEANRFYTVINKKSGEIVPMEVNFNFDDPNLIILPLAFGKRQGREFIWNDLLSLETGSLKLANGRVIEKTLYNRRTRQDEPALFVALTFERREVLDSSNIKPMNLIGVDRGENIPAVIALTDPEGCPLSRFKDSLGNPTHILRIGESYKEKQRTIQAKKEVEQRRAGGYSRKYASKAKNLADDMVRNTARDLLYYAVTQDAMLIFENLSRGFGRQGKRTFMAERQYTRMEDWLTAKLAYEGLPSKTYLSKTLAQYTSKTCSNCGFTITSADYDRVLEKLKKTATGWMTTINGKELKVEGQITYYNRYKRQNVVKDLSVELDRLSEESVNNDISSWTKGRSGEALSLLKKRFSHRPVQEKFVCLNCGFETHADEQAALNIARSWLFLRSQEYKKYQTNKTTGNTDKRAFVETWQSFYRKKLKEVWKPAV

SEQ ID NO: 31529 - protein, 979 aa, synthetic construct
  REGION 1..979: note = engineered CasX variant
QEIGKRINGIRRRLVKDSNTKKAGKTGPMKTLLVRVMTPDLRERLENLRKKPENIPQPISNTSRANLNKLLTDYTEMKKAILHVYWEEFQKDPVGLMSRVAQPASKKIDQNKLKPEMDEKGNLTTAGFACSQCGQPLFVYKLEQVSEKGKAYTNYFGRCNVAEHEKLILLAQLKPEKDSDEAVTYSLGKFGQRALDFYSIHVTKESTHPVKPLAQIAGNRYASSPVGKALSDACMGTIASFLSKYQDIIIEHQKVVKGNQKRLESLRELAGKENLEYPSVTLPPQPHTKEGVDAYNEVIARVRMWVNLNLWQKLKLSRDDAKPLLRLKGFPSFPLVERQANEVDWWDMVCNVKKLINEKKEDGKVFWQNLAGYKRQEALRPYLSSEEDRKKGKKFARYQLGDLLLHLEKKHGEDWGKVYDEAWERIDKKVEGLSKHIKLEEERRSEDAQSKAALTDWLRAKASFVIEGLKEADKDEFCRCELKLQKWYGDLRGKPFAIEAENSILDISGFSKQYNCAFIWQKDGVKKLNLYLIINYFKGGKLRFKKIKPEAFEANRFYTVINKKSGEIVPMEVNFNFDDPNLIILPLAFGKRQGREFIWNDLLSLETGSLKLANGRVIEKTLYNRRTRQDEPALFVALTFERREVLDSSNIKPMNLIGVDRGENIPAVIALTDPEGCPLSRFKDSLGNPTHILRIGESYKEKQRTIQAKKEVEQRRAGGYSRKYASKAKNLADDMVRNTARDLLYYAVTQDAMLIFENLSRGFGRQGKRTFMAERQYTRMEDWLTAKLAYEGLPSKTYLSKTLAQYTSKTCSNCGFTITSADYDRVLEKLKKTATGWMTTINGKELKVEGQITYYNRYKRQNVVKDLSVELDRLSEESVNNDISSWTKGRSGEALSLLKKRFSHRPVQEKFVCLNCGFETHADEQAALNIARSWLFLRSQEYKKYQTNKTTGNTDKRAFVETWQSFYRKKLKEVWKPAV

SEQ ID NO: 31530 - protein, 979 aa, synthetic construct
  REGION 1..979: note = engineered CasX variant
QEIGKRINGIRRRLVKDSNTKKAGKTGPMKTLLVRVMTPDLRERLENLRKKPENIPQPISNTSRANLNKLLTDYTEMKKAILHVYWEEFQKDPVGLMSRVAQPASKKIDQNKLKPEMDEKGNLTTAGFACSQCGQPLFVYKLEQVSEKGKAYTNYFGRCNVAEHEKLILLAQLKPEKDSDEAVTYSLGKFGQRALDFYSIHVTKESTHPVKPLAQIAGNRYASTPVGKALSDACMGTIASFLSKYQDIIIEHQKVVKGNQKRLESLRELAGKENLEYPSVTLPPQPHTKEGVDAYNEVIARVRMWVNLNLWQKLKLSRDDAKPLLRLKGFPSFPLVERQANEVDWWDMVCNVKKLINEKKEDGKVFWQNLAGYKRQEALRPYLSSEEDRKKGKKFARYQLGDLLLHLEKKHGEDWGKVYDEAWERIDKKVEGLSKHIKLEEERRSEDAQSKAALTDWLRAKASFVIEGLKEADKDEFCRCELKLQKWYGDLRGKPFAIEAENSILDISGFSKQYNCAFIWQKDGVKKLNLYLIINYFKGGKLRFKKIKPEAFEANRFYTVINKKSGEIVPMEVNFNFDDPNLIILPLAFGKRQGREFIWNDLLSLETGSLKLANGRVIEKTLYNRRTRQDEPALFVALTFERREVLDSSNIKPMNLIGVDRGENIPAVIALTDPEGCPLSRFKDSLGNPTHILRIGESYKEKQRTIQAKKEVEQRRAGGYSRKYASKAKNLADDMVRNTARDLLYYAVTQDAMLIFENLSRGFGRQGKRTFMAERQYTRMEDWLTAKLAYEGLPSKTYLSKTLAQYTSKTCSNCGFTITSADYDRVLEKLKKTATGWMTTINGKELKVEGQITYYNRYKRQNVVKDLSVELDRLSEESVNNDISSWTKGRSGEALSLLKKRFSHRPVQEKFVCLNCGFETHADEQAALNIARSWLFLRSQEYKKYQTNKTTGNTDKRAFVETWQSFYRKKLKEVWKPAV

SEQ ID NO: 31531 - protein, 979 aa, synthetic construct
  REGION 1..979: note = engineered CasX variant
QEIGKRINGIRRRLVKDSNTKKAGKTGPMKTLLVRVMTPDLRERLENLRKKPENIPQPISNTSRANLNKLLTDYTEMKKAILHVYWEEFQKDPVGLMSRVAQPASKKIDQNKLKPEMDEKGNLTTAGFACSQCGQPLFVYKLEQVSEKGKAYTNYFGRCNVAEHEKLILLAQLKPEKDSDEAVTYSLGKFGQRALDFYSIHVTKESTHPVKPLAQIAGNRYASAPVGKALSDACMGTIASFLSKYQDIIIEHQKVVKGNQKRLESLRELAGKENLEYPSVTLPPQPHTKEGVDAYNEVIARVRMWVNLNLWQKLKLSRDDAKPLLRLKGFPSFPLVERQANEVDWWDMVCNVKKLINEKKEDGKVFWQNLAGYKRQEALRPYLSSEEDRKKGKKFARYQLGDLLLHLEKKHGEDWGKVYDEAWERIDKKVEGLSKHIKLEEERRSEDAQSKAALTDWLRAKASFVIEGLKEADKDEFCRCELKLQKWYGDLRGKPFAIEAENSILDISGFSKQYNCAFIWQKDGVKKLNLYLIINYFKGGKLRFKKIKPEAFEANRFYTVINKKSGEIVPMEVNFNFDDPNLIILPLAFGKRQGREFIWNDLLSLETGSLKLANGRVIEKTLYNRRTRQDEPALFVALTFERREVLDSSNIKPMNLIGVDRGENIPAVIALTDPEGCPLSRFKDSLGNPTHILRIGESYKEKQRTIQAKKEVEQRRAGGYSRKYASKAKNLADDMVRNTARDLLYYAVTQDAMLIFENLSRGFGRQGKRTFMAERQYTRMEDWLTAKLAYEGLPSKTYLSKTLAQYTSKTCSNCGFTITSADYDRVLEKLKKTATGWMTTINGKELKVEGQITYYNRYKRQNVVKDLSVELDRLSEESVNNDISSWTKGRSGEALSLLKKRFSHRPVQEKFVCLNCGFETHADEQAALNIARSWLFLRSQEYKKYQTNKTTGNTDKRAFVETWQSFYRKKLKEVWKPAV

SEQ ID NO: 31532 - protein, 979 aa, synthetic construct
  REGION 1..979: note = engineered CasX variant
QEIGKRINGIRRRLVKDSNTKKAGKTGPMKTLLVRVMTPDLRERLENLRKKPENIPQPISNTSRANLNKLLTDYTEMKKAILHVYWEEFQKDPVGLMSRVAQPASKKIDQNKLKPEMDEKGNLTTAGFACSQCGQPLFVYKLEQVSEKGKAYTNYFGRCNVAEHEKLILLAQLKPEKDSDEAVTYSLGKFGQRALDFYSIHVTKESTHPVKPLAQIAGNRYASVPVGKALSDACMGTIASFLSKYQDIIIEHQKVVKGNQKRLESLRELAGKENLEYPSVTLPPQPHTKEGVDAYNEVIARVRMWVNLNLWQKLKLSRDDAKPLLRLKGFPSFPLVERQANEVDWWDMVCNVKKLINEKKEDGKVFWQNLAGYKRQEALRPYLSSEEDRKKGKKFARYQLGDLLLHLEKKHGEDWGKVYDEAWERIDKKVEGLSKHIKLEEERRSEDAQSKAALTDWLRAKASFVIEGLKEADKDEFCRCELKLQKWYGDLRGKPFAIEAENSILDISGFSKQYNCAFIWQKDGVKKLNLYLIINYFKGGKLRFKKIKPEAFEANRFYTVINKKSGEIVPMEVNFNFDDPNLIILPLAFGKRQGREFIWNDLLSLETGSLKLANGRVIEKTLYNRRTRQDEPALFVALTFERREVLDSSNIKPMNLIGVDRGENIPAVIALTDPEGCPLSRFKDSLGNPTHILRIGESYKEKQRTIQAKKEVEQRRAGGYSRKYASKAKNLADDMVRNTARDLLYYAVTQDAMLIFENLSRGFGRQGKRTFMAERQYTRMEDWLTAKLAYEGLPSKTYLSKTLAQYTSKTCSNCGFTITSADYDRVLEKLKKTATGWMTTINGKELKVEGQITYYNRYKRQNVVKDLSVELDRLSEESVNNDISSWTKGRSGEALSLLKKRFSHRPVQEKFVCLNCGFETHADEQAALNIARSWLFLRSQEYKKYQTNKTTGNTDKRAFVETWQSFYRKKLKEVWKPAV

SEQ ID NO: 31533 - protein, 979 aa, synthetic construct
  REGION 1..979: note = engineered CasX variant
QEIGKRINGIRRRLVKDSNTKKAGKTGPMKTLLVRVMTPDLRERLENLRKKPENIPQPISNTSRANLNKLLTDYTEMKKAILHVYWEEFQKDPVGLMSRVAQPASKKIDQNKLKPEMDEKGNLTTAGFACSQCGQPLFVYKLEQVSEKGKAYTNYFGRCNVAEHEKLIKLAQLKPEKDSDEAVTYSLGKFGQRALDFYSIHVTKESTHPVKPLAQIAGNRYASGPVGKALSDACMGTIASFLSKYQDIIIEHQKVVKGNQKRLESLRELAGKENLEYPSVTLPPQPHTKEGVDAYNEVIARVRMWVNLNLWQKLKLSRDDAKPLLRLKGFPSFPLVERQANEVDWWDMVCNVKKLINEKKEDGKVFWQNLAGYKRQEALRPYLSSEEDRKKGKKFARYQLGDLLLHLEKKHGEDWGKVYDEAWERIDKKVEGLSKHIKLEEERRSEDAQSKAALTDWLRAKASFVIEGLKEADKDEFCRCELKLQKWYGDLRGKPFAIEAENSILDISGFSKQYNCAFIWQKDGVKKLNLYLIINYFKGGKLRFKKIKPEAFEANRFYTVINKKSGEIVPMEVNFNFDDPNLIILPLAFGKRQGREFIWNDLLSLETGSLKLANGRVIEKTLYNRRTRQDEPALFVALTFERREVLDSSNIKPMNLIGVDRGENIPAVIALTDPEGCPLSRFKDSLGNPTHILRIGESYKEKQRTIQAKKEVEQRRAGGYSRKYASKAKNLADDMVRNTARDLLYYAVTQDAMLIFENLSRGFGRQGKRTFMAERQYTRMEDWLTAKLAYEGLPSKTYLSKTLAQYTSKTCSNCGFTITSADYDRVLEKLKKTATGWMTTINGKELKVEGQITYYNRYKRQNVVKDLSVELDRLSEESVNNDISSWTKGRSGEALSLLKKRFSHRPVQEKFVCLNCGFETHADEQAALNIARSWLFLRSQEYKKYQTNKTTGNTDKRAFVETWQSFYRKKLKEVWKPAV

SEQ ID NO: 31534 - protein, 978 aa, synthetic construct
  REGION 1..978: note = engineered CasX variant
QEIGKRINGIRRRLVKDSNTKKAGKTGPMKTLLVRVMTPDLRERLENLRKKPENIPQPISNTSRANLNKLLTDYTEMKKAILHVYWEEFQKDPVGLMSRVAQPASKKIDQNKLKPEMDEKGNLTTAGFACSQCGQPLFVYKLEQVSEKGKAYTNYFGRCNVAEHEKLILLAQLKPEKDSDEAVTYSLGKFGQRALDFYSIHVTKESTHPVKPLAQIAGNRYASPVGKALSDACMGTIASFLSKYQDIIIEHQKVVKGNQKRLESLRELAGKENLEYPSVTLPPQPHTKEGVDAYNEVIARVRMWVNLNLWQKLKLSRDDAKPLLRLKGFPSFPLVERQANEVDWWDMVCNVKKLINEKKEDGKVFWQNLAGYKRQEALRPYLSSEEDRKKGKKFARYQLGDLLLHLEKKHGEDWGKVYDEAWERIDKKVEGLSKHIKLEEERRSEDAQSKAALTDWLRAKASFVIEGLKEADKDEFCRCELKLQKWYGDLRGKPFAIEAENSILDISGFSKQYNCAFIWQKDGVKKLNLYLIINYFKGGKLRFKKIKPEAFEANRFYTVINKKSGEIVPMEVNFNFDDPNLIILPLAFGKRQGREFIWNDLLSLETGSLKLANGRVIEKTLYNRRTRQDEPALFVALTFERREVLDSSNIKPMNLIGVDRGENIPAVIALTDPEGCPLSRFKDSLGNPTHILRIGESYKEKQRTIQAKKEVEQRRAGGYSRKYASKAKNLADDMVRNTARDLLYYAVTQDAMLIFENLSRGFGRQGKRTFMAERQYTRMEDWLTAKLAYEGLPSKTYLSKTLAQYTSKTCSNCGFTITSADYDRVLEKLKKTATGWMTTINGKELKVEGQITYYNRYKRQNVVKDLSVELDRLSEESVNNDISSWTKGRSGEALSLLKKRFSHRPVQEKFVCLNCGFETHADEQAALNIARSWLFLRSQEYKKYQTNKTTGNTDKRAFVETWQSFYRKKLKEVWKPAV

SEQ ID NO: 31535 - protein, 979 aa, synthetic construct
  REGION 1..979: note = engineered CasX variant
QEIGKRINKIRRRLVKDSNTKKAGKTGPMKTLLVPVMTPDLRERLENLRKKPENIPQPISNTSRANLNKLLTDYTEMKKAILHVYWEEFQKDPVGLMSRVAQPASKKIDQNKLKPEMDEKGNLTTAGFACSQCGQPLFVYKLEQVSEKGKAYTNYFGRCNVAEHEKLILLAQLKPEKDSDEAVTYSLGKFGQRALDFYSIHVTKESTHPVKPLAQIAGNRYASYPVGKALSDACMGTIASFLSKYQDIIIEHQKVVKGNQKRLESLRELAGKENLEYPSVTLPPQPHTKEGVDAYNEVIARVRMWVNLNLWQKLKLSRDDAKPLLRLKGFPSFPLVERQANEVDWWDMVCNVKKLINEKKEDGKVFWQNLAGYKRQEALRPYLSSEEDRKKGKKFARYQLGDLLLHLEKKHGEDWGKVYDEAWERIDKKVEGLSKHIKLEEERRSEDAQSKAALTDWLRAKASFVIEGLKEADKDEFCRCELKLQKWYGDLRGKPFAIEAENSILDISGFSKQYNCAFIWQKDGVKKLNLYLIINYFKGGKLRFKKIKPEAFEANRFYTVINKKSGEIVPMEVNFNFDDPNLIILPLAFGKRQGREFIWNDLLSLETGSLKLANGRVIEKTLYNRRTRQDEPALFVALTFERREVLDSSNIKPMNLIGVDRGENIPAVIALTDPEGCPLSRFKDSLGNPTHILRIGESYKEKQRTIQAKKEVEQRRAGGYSRKYASKAKNLADDMVRNTARDLLYYAVTQDAMLIFENLSRGFGRQGKRTFMAERQYTRMEDWLTAKLAYEGLPSKTYLSKTLAQYTSKTCSNCGFTITSADYDRVLEKLKKTATGWMTTINGKELKVEGQITYYNRYKRQNVVKDLSVELDRLSEESVNNDISSWTKGRSGEALSLLKKRFSHRPVQEKFVCLNCGFETHADEQAALNIARSWLFLRSQEYKKYQTNKTTGNTDKRAFVETWQSFYRKKLKEVWKPAV

SEQ ID NO: 31536 - protein, 979 aa, synthetic construct
  REGION 1..979: note = engineered CasX variant
QEIGKRINKIRRRLVKDSNTKKAGKTGPMKTLLVPVMTPDLRERLENLRKKPENIPQPISNTSRANLNKLLTDYTEMKKAILHVYWEEFQKDPVGLMSRVAQPASKKIDQNKLKPEMDEKGNLTTAGFACSQCGQPLFVYKLEQVSEKGKAYTNYFGRCNVAEHEKLILLAQLKPEKDSDEAVTYSLGKFGQRALDFYSIHVTKESTHPVKPLAQIAGNRYASHPVGKALSDACMGTIASFLSKYQDIIIEHQKVVKGNQKRLESLRELAGKENLEYPSVTLPPQPHTKEGVDAYNEVIARVRMWVNLNLWQKLKLSRDDAKPLLRLKGFPSFPLVERQANEVDWWDMVCNVKKLINEKKEDGKVFWQNLAGYKRQEALRPYLSSEEDRKKGKKFARYQLGDLLLHLEKKHGEDWGKVYDEAWERIDKKVEGLSKHIKLEEERRSEDAQSKAALTDWLRAKASFVIEGLKEADKDEFCRCELKLQKWYGDLRGKPFAIEAENSILDISGFSKQYNCAFIWQKDGVKKLNLYLIINYFKGGKLRFKKIKPEAFEANRFYTVINKKSGEIVPMEVNFNFDDPNLIILPLAFGKRQGREFIWNDLLSLETGSLKLANGRVIEKTLYNRRTRQDEPALFVALTFERREVLDSSNIKPMNLIGVDRGENIPAVIALTDPEGCPLSRFKDSLGNPTHILRIGESYKEKQRTIQAKKEVEQRRAGGYSRKYASKAKNLADDMVRNTARDLLYYAVTQDAMLIFENLSRGFGRQGKRTFMAERQYTRMEDWLTAKLAYEGLPSKTYLSKTLAQYTSKTCSNCGFTITSADYDRVLEKLKKTATGWMTTINGKELKVEGQITYYNRYKRQNVVKDLSVELDRLSEESVNNDISSWTKGRSGEALSLLKKRFSHRPVQEKFVCLNCGFETHADEQAALNIARSWLFLRSQEYKKYQTNKTTGNTDKRAFVETWQSFYRKKLKEVWKPAV

SEQ ID NO: 31537 - protein, 979 aa, synthetic construct
  REGION 1..979: note = engineered CasX variant
QEIGKRINKIRRRLVKDSNTKKAGKTGPMKTLLVPVMTPDLRERLENLRKKPENIPQPISNTSRANLNKLLTDYTEMKKAILHVYWEEFQKDPVGLMSRVAQPASKKIDQNKLKPEMDEKGNLTTAGFACSQCGQPLFVYKLEQVSEKGKAYTNYFGRCNVAEHEKLILLAQLKPEKDSDEAVTYSLGKFGQRALDFYSIHVTKESTHPVKPLAQIAGNRYASSPVGKALSDACMGTIASFLSKYQDIIIEHQKVVKGNQKRLESLRELAGKENLEYPSVTLPPQPHTKEGVDAYNEVIARVRMWVNLNLWQKLKLSRDDAKPLLRLKGFPSFPLVERQANEVDWWDMVCNVKKLINEKKEDGKVFWQNLAGYKRQEALRPYLSSEEDRKKGKKFARYQLGDLLLHLEKKHGEDWGKVYDEAWERIDKKVEGLSKHIKLEEERRSEDAQSKAALTDWLRAKASFVIEGLKEADKDEFCRCELKLQKWYGDLRGKPFAIEAENSILDISGFSKQYNCAFIWQKDGVKKLNLYLIINYFKGGKLRFKKIKPEAFEANRFYTVINKKSGEIVPMEVNFNFDDPNLIILPLAFGKRQGREFIWNDLLSLETGSLKLANGRVIEKTLYNRRTRQDEPALFVALTFERREVLDSSNIKPMNLIGVDRGENIPAVIALTDPEGCPLSRFKDSLGNPTHILRIGESYKEKQRTIQAKKEVEQRRAGGYSRKYASKAKNLADDMVRNTARDLLYYAVTQDAMLIFENLSRGFGRQGKRTFMAERQYTRMEDWLTAKLAYEGLPSKTYLSKTLAQYTSKTCSNCGFTITSADYDRVLEKLKKTATGWMTTINGKELKVEGQITYYNRYKRQNVVKDLSVELDRLSEESVNNDISSWTKGRSGEALSLLKKRFSHRPVQEKFVCLNCGFETHADEQAALNIARSWLFLRSQEYKKYQTNKTTGNTDKRAFVETWQSFYRKKLKEVWKPAV

SEQ ID NO: 31538 - protein, 979 aa, synthetic construct
  REGION 1..979: note = engineered CasX variant
QEIGKRINKIRRRLVKDSNTKKAGKTGPMKTLLVPVMTPDLRERLENLRKKPENIPQPISNTSRANLNKLLTDYTEMKKAILHVYWEEFQKDPVGLMSRVAQPASKKIDQNKLKPEMDEKGNLTTAGFACSQCGQPLFVYKLEQVSEKGKAYTNYFGRCNVAEHEKLILLAQLKPEKDSDEAVTYSLGKFGQRALDFYSIHVTKESTHPVKPLAQIAGNRYASTPVGKALSDACMGTIASFLSKYQDIIIEHQKVVKGNQKRLESLRELAGKENLEYPSVTLPPQPHTKEGVDAYNEVIARVRMWVNLNLWQKLKLSRDDAKPLLRLKGFPSFPLVERQANEVDWWDMVCNVKKLINEKKEDGKVFWQNLAGYKRQEALRPYLSSEEDRKKGKKFARYQLGDLLLHLEKKHGEDWGKVYDEAWERIDKKVEGLSKHIKLEEERRSEDAQSKAALTDWLRAKASFVIEGLKEADKDEFCRCELKLQKWYGDLRGKPFAIEAENSILDISGFSKQYNCAFIWQKDGVKKLNLYLIINYFKGGKLRFKKIKPEAFEANRFYTVINKKSGEIVPMEVNFNFDDPNLIILPLAFGKRQGREFIWNDLLSLETGSLKLANGRVIEKTLYNRRTRQDEPALFVALTFERREVLDSSNIKPMNLIGVDRGENIPAVIALTDPEGCPLSRFKDSLGNPTHILRIGESYKEKQRTIQAKKEVEQRRAGGYSRKYASKAKNLADDMVRNTARDLLYYAVTQDAMLIFENLSRGFGRQGKRTFMAERQYTRMEDWLTAKLAYEGLPSKTYLSKTLAQYTSKTCSNCGFTITSADYDRVLEKLKKTATGWMTTINGKELKVEGQITYYNRYKRQNVVKDLSVELDRLSEESVNNDISSWTKGRSGEALSLLKKRFSHRPVQEKFVCLNCGFETHADEQAALNIARSWLFLRSQEYKKYQTNKTTGNTDKRAFVETWQSFYRKKLKEVWKPAV

SEQ ID NO: 31539 - protein, 979 aa, synthetic construct
  REGION 1..979: note = engineered CasX variant
QEIGKRINKIRRRLVKDSNTKKAGKTGPMKTLLVPVMTPDLRERLENLRKKPENIPQPISNTSRANLNKLLTDYTEMKKAILHVYWEEFQKDPVGLMSRVAQPASKKIDQNKLKPEMDEKGNLTTAGFACSQCGQPLFVYKLEQVSEKGKAYTNYFGRCNVAEHEKLILLAQLKPEKDSDEAVTYSLGKFGQRALDFYSIHVTKESTHPVKPLAQIAGNRYASAPVGKALSDACMGTIASFLSKYQDIIIEHQKVVKGNQKRLESLRELAGKENLEYPSVTLPPQPHTKEGVDAYNEVIARVRMWVNLNLWQKLKLSRDDAKPLLRLKGFPSFPLVERQANEVDWWDMVCNVKKLINEKKEDGKVFWQNLAGYKRQEALRPYLSSEEDRKKGKKFARYQLGDLLLHLEKKHGEDWGKVYDEAWERIDKKVEGLSKHIKLEEERRSEDAQSKAALTDWLRAKASFVIEGLKEADKDEFCRCELKLQKWYGDLRGKPFAIEAENSILDISGFSKQYNCAFIWQKDGVKKLNLYLIINYFKGGKLRFKKIKPEAFEANRFYTVINKKSGEIVPMEVNFNFDDPNLIILPLAFGKRQGREFIWNDLLSLETGSLKLANGRVIEKTLYNRRTRQDEPALFVALTFERREVLDSSNIKPMNLIGVDRGENIPAVIALTDPEGCPLSRFKDSLGNPTHILRIGESYKEKQRTIQAKKEVEQRRAGGYSRKYASKAKNLADDMVRNTARDLLYYAVTQDAMLIFENLSRGFGRQGKRTFMAERQYTRMEDWLTAKLAYEGLPSKTYLSKTLAQYTSKTCSNCGFTITSADYDRVLEKLKKTATGWMTTINGKELKVEGQITYYNRYKRQNVVKDLSVELDRLSEESVNNDISSWTKGRSGEALSLLKKRFSHRPVQEKFVCLNCGFETHADEQAALNIARSWLFLRSQEYKKYQTNKTTGNTDKRAFVETWQSFYRKKLKEVWKPAV

SEQ ID NO: 31540 - protein, 979 aa, synthetic construct
  REGION 1..979: note = engineered CasX variant
QEIGKRINKIRRRLVKDSNTKKAGKTGPMKTLLVPVMTPDLRERLENLRKKPENIPQPISNTSRANLNKLLTDYTEMKKAILHVYWEEFQKDPVGLMSRVAQPASKKIDQNKLKPEMDEKGNLTTAGFACSQCGQPLFVYKLEQVSEKGKAYTNYFGRCNVAEHEKLILLAQLKPEKDSDEAVTYSLGKFGQRALDFYSIHVTKESTHPVKPLAQIAGNRYASVPVGKALSDACMGTIASFLSKYQDIIIEHQKVVKGNQKRLESLRELAGKENLEYPSVTLPPQPHTKEGVDAYNEVIARVRMWVNLNLWQKLKLSRDDAKPLLRLKGFPSFPLVERQANEVDWWDMVCNVKKLINEKKEDGKVFWQNLAGYKRQEALRPYLSSEEDRKKGKKFARYQLGDLLLHLEKKHGEDWGKVYDEAWERIDKKVEGLSKHIKLEEERRSEDAQSKAALTDWLRAKASFVIEGLKEADKDEFCRCELKLQKWYGDLRGKPFAIEAENSILDISGFSKQYNCAFIWQKDGVKKLNLYLIINYFKGGKLRFKKIKPEAFEANRFYTVINKKSGEIVPMEVNFNFDDPNLIILPLAFGKRQGREFIWNDLLSLETGSLKLANGRVIEKTLYNRRTRQDEPALFVALTFERREVLDSSNIKPMNLIGVDRGENIPAVIALTDPEGCPLSRFKDSLGNPTHILRIGESYKEKQRTIQAKKEVEQRRAGGYSRKYASKAKNLADDMVRNTARDLLYYAVTQDAMLIFENLSRGFGRQGKRTFMAERQYTRMEDWLTAKLAYEGLPSKTYLSKTLAQYTSKTCSNCGFTITSADYDRVLEKLKKTATGWMTTINGKELKVEGQITYYNRYKRQNVVKDLSVELDRLSEESVNNDISSWTKGRSGEALSLLKKRFSHRPVQEKFVCLNCGFETHADEQAALNIARSWLFLRSQEYKKYQTNKTTGNTDKRAFVETWQSFYRKKLKEVWKPAV

SEQ ID NO: 31541 - protein, 979 aa, synthetic construct
  REGION 1..979: note = engineered CasX variant
QEIGKRINKIRRRLVKDSNTKKAGKTGPMKTLLVPVMTPDLRERLENLRKKPENIPQPISNTSRANLNKLLTDYTEMKKAILHVYWEEFQKDPVGLMSRVAQPASKKIDQNKLKPEMDEKGNLTTAGFACSQCGQPLFVYKLEQVSEKGKAYTNYFGRCNVAEHEKLIKLAQLKPEKDSDEAVTYSLGKFGQRALDFYSIHVTKESTHPVKPLAQIAGNRYASGPVGKALSDACMGTIASFLSKYQDIIIEHQKVVKGNQKRLESLRELAGKENLEYPSVTLPPQPHTKEGVDAYNEVIARVRMWVNLNLWQKLKLSRDDAKPLLRLKGFPSFPLVERQANEVDWWDMVCNVKKLINEKKEDGKVFWQNLAGYKRQEALRPYLSSEEDRKKGKKFARYQLGDLLLHLEKKHGEDWGKVYDEAWERIDKKVEGLSKHIKLEEERRSEDAQSKAALTDWLRAKASFVIEGLKEADKDEFCRCELKLQKWYGDLRGKPFAIEAENSILDISGFSKQYNCAFIWQKDGVKKLNLYLIINYFKGGKLRFKKIKPEAFEANRFYTVINKKSGEIVPMEVNFNFDDPNLIILPLAFGKRQGREFIWNDLLSLETGSLKLANGRVIEKTLYNRRTRQDEPALFVALTFERREVLDSSNIKPMNLIGVDRGENIPAVIALTDPEGCPLSRFKDSLGNPTHILRIGESYKEKQRTIQAKKEVEQRRAGGYSRKYASKAKNLADDMVRNTARDLLYYAVTQDAMLIFENLSRGFGRQGKRTFMAERQYTRMEDWLTAKLAYEGLPSKTYLSKTLAQYTSKTCSNCGFTITSADYDRVLEKLKKTATGWMTTINGKELKVEGQITYYNRYKRQNVVKDLSVELDRLSEESVNNDISSWTKGRSGEALSLLKKRFSHRPVQEKFVCLNCGFETHADEQAALNIARSWLFLRSQEYKKYQTNKTTGNTDKRAFVETWQSFYRKKLKEVWKPAV

SEQ ID NO: 31542 - protein, 978 aa, synthetic construct
  REGION 1..978: note = engineered CasX variant
QEIGKRINKIRRRLVKDSNTKKAGKTGPMKTLLVPVMTPDLRERLENLRKKPENIPQPISNTSRANLNKLLTDYTEMKKAILHVYWEEFQKDPVGLMSRVAQPASKKIDQNKLKPEMDEKGNLTTAGFACSQCGQPLFVYKLEQVSEKGKAYTNYFGRCNVAEHEKLILLAQLKPEKDSDEAVTYSLGKFGQRALDFYSIHVTKESTHPVKPLAQIAGNRYASPVGKALSDACMGTIASFLSKYQDIIIEHQKVVKGNQKRLESLRELAGKENLEYPSVTLPPQPHTKEGVDAYNEVIARVRMWVNLNLWQKLKLSRDDAKPLLRLKGFPSFPLVERQANEVDWWDMVCNVKKLINEKKEDGKVFWQNLAGYKRQEALRPYLSSEEDRKKGKKFARYQLGDLLLHLEKKHGEDWGKVYDEAWERIDKKVEGLSKHIKLEEERRSEDAQSKAALTDWLRAKASFVIEGLKEADKDEFCRCELKLQKWYGDLRGKPFAIEAENSILDISGFSKQYNCAFIWQKDGVKKLNLYLIINYFKGGKLRFKKIKPEAFEANRFYTVINKKSGEIVPMEVNFNFDDPNLIILPLAFGKRQGREFIWNDLLSLETGSLKLANGRVIEKTLYNRRTRQDEPALFVALTFERREVLDSSNIKPMNLIGVDRGENIPAVIALTDPEGCPLSRFKDSLGNPTHILRIGESYKEKQRTIQAKKEVEQRRAGGYSRKYASKAKNLADDMVRNTARDLLYYAVTQDAMLIFENLSRGFGRQGKRTFMAERQYTRMEDWLTAKLAYEGLPSKTYLSKTLAQYTSKTCSNCGFTITSADYDRVLEKLKKTATGWMTTINGKELKVEGQITYYNRYKRQNVVKDLSVELDRLSEESVNNDISSWTKGRSGEALSLLKKRFSHRPVQEKFVCLNCGFETHADEQAALNIARSWLFLRSQEYKKYQTNKTTGNTDKRAFVETWQSFYRKKLKEVWKPAV

SEQ ID NO: 31543 - protein, 979 aa, synthetic construct
  REGION 1..979: note = engineered CasX variant
QEIGKRINKIRRRLVKDSNTKKAGKTGPMKTLLVRVMTPDLRERLENLRKKPPNIPQPISNTSRANLNKLLTDYTEMKKAILHVYWEEFQKDPVGLMSRVAQPASKKIDQNKLKPEMDEKGNLTTAGFACSQCGQPLFVYKLEQVSEKGKAYTNYFGRCNVAEHEKLILLAQLKPEKDSDEAVTYSLGKFGQRALDFYSIHVTKESTHPVKPLAQIAGNRYASYPVGKALSDACMGTIASFLSKYQDIIIEHQKVVKGNQKRLESLRELAGKENLEYPSVTLPPQPHTKEGVDAYNEVIARVRMWVNLNLWQKLKLSRDDAKPLLRLKGFPSFPLVERQANEVDWWDMVCNVKKLINEKKEDGKVFWQNLAGYKRQEALRPYLSSEEDRKKGKKFARYQLGDLLLHLEKKHGEDWGKVYDEAWERIDKKVEGLSKHIKLEEERRSEDAQSKAALTDWLRAKASFVIEGLKEADKDEFCRCELKLQKWYGDLRGKPFAIEAENSILDISGFSKQYNCAFIWQKDGVKKLNLYLIINYFKGGKLRFKKIKPEAFEANRFYTVINKKSGEIVPMEVNFNFDDPNLIILPLAFGKRQGREFIWNDLLSLETGSLKLANGRVIEKTLYNRRTRQDEPALFVALTFERREVLDSSNIKPMNLIGVDRGENIPAVIALTDPEGCPLSRFKDSLGNPTHILRIGESYKEKQRTIQAKKEVEQRRAGGYSRKYASKAKNLADDMVRNTARDLLYYAVTQDAMLIFENLSRGFGRQGKRTFMAERQYTRMEDWLTAKLAYEGLPSKTYLSKTLAQYTSKTCSNCGFTITSADYDRVLEKLKKTATGWMTTINGKELKVEGQITYYNRYKRQNVVKDLSVELDRLSEESVNNDISSWTKGRSGEALSLLKKRFSHRPVQEKFVCLNCGFETHADEQAALNIARSWLFLRSQEYKKYQTNKTTGNTDKRAFVETWQSFYRKKLKEVWKPAV

SEQ ID NO: 31544 - protein, 979 aa, synthetic construct
  REGION 1..979: note = engineered CasX variant
QEIGKRINKIRRRLVKDSNTKKAGKTGPMKTLLVRVMTPDLRERLENLRKKPPNIPQPISNTSRANLNKLLTDYTEMKKAILHVYWEEFQKDPVGLMSRVAQPASKKIDQNKLKPEMDEKGNLTTAGFACSQCGQPLFVYKLEQVSEKGKAYTNYFGRCNVAEHEKLILLAQLKPEKDSDEAVTYSLGKFGQRALDFYSIHVTKESTHPVKPLAQIAGNRYASHPVGKALSDACMGTIASFLSKYQDIIIEHQKVVKGNQKRLESLRELAGKENLEYPSVTLPPQPHTKEGVDAYNEVIARVRMWVNLNLWQKLKLSRDDAKPLLRLKGFPSFPLVERQANEVDWWDMVCNVKKLINEKKEDGKVFWQNLAGYKRQEALRPYLSSEEDRKKGKKFARYQLGDLLLHLEKKHGEDWGKVYDEAWERIDKKVEGLSKHIKLEEERRSEDAQSKAALTDWLRAKASFVIEGLKEADKDEFCRCELKLQKWYGDLRGKPFAIEAENSILDISGFSKQYNCAFIWQKDGVKKLNLYLIINYFKGGKLRFKKIKPEAFEANRFYTVINKKSGEIVPMEVNFNFDDPNLIILPLAFGKRQGREFIWNDLLSLETGSLKLANGRVIEKTLYNRRTRQDEPALFVALTFERREVLDSSNIKPMNLIGVDRGENIPAVIALTDPEGCPLSRFKDSLGNPTHILRIGESYKEKQRTIQAKKEVEQRRAGGYSRKYASKAKNLADDMVRNTARDLLYYAVTQDAMLIFENLSRGFGRQGKRTFMAERQYTRMEDWLTAKLAYEGLPSKTYLSKTLAQYTSKTCSNCGFTITSADYDRVLEKLKKTATGWMTTINGKELKVEGQITYYNRYKRQNVVKDLSVELDRLSEESVNNDISSWTKGRSGEALSLLKKRFSHRPVQEKFVCLNCGFETHADEQAALNIARSWLFLRSQEYKKYQTNKTTGNTDKRAFVETWQSFYRKKLKEVWKPAV

SEQ ID NO: 31545 - protein, 979 aa, synthetic construct
  REGION 1..979: note = engineered CasX variant
QEIGKRINKIRRRLVKDSNTKKAGKTGPMKTLLVRVMTPDLRERLENLRKKPPNIPQPISNTSRANLNKLLTDYTEMKKAILHVYWEEFQKDPVGLMSRVAQPASKKIDQNKLKPEMDEKGNLTTAGFACSQCGQPLFVYKLEQVSEKGKAYTNYFGRCNVAEHEKLILLAQLKPEKDSDEAVTYSLGKFGQRALDFYSIHVTKESTHPVKPLAQIAGNRYASSPVGKALSDACMGTIASFLSKYQDIIIEHQKVVKGNQKRLESLRELAGKENLEYPSVTLPPQPHTKEGVDAYNEVIARVRMWVNLNLWQKLKLSRDDAKPLLRLKGFPSFPLVERQANEVDWWDMVCNVKKLINEKKEDGKVFWQNLAGYKRQEALRPYLSSEEDRKKGKKFARYQLGDLLLHLEKKHGEDWGKVYDEAWERIDKKVEGLSKHIKLEEERRSEDAQSKAALTDWLRAKASFVIEGLKEADKDEFCRCELKLQKWYGDLRGKPFAIEAENSILDISGFSKQYNCAFIWQKDGVKKLNLYLIINYFKGGKLRFKKIKPEAFEANRFYTVINKKSGEIVPMEVNFNFDDPNLIILPLAFGKRQGREFIWNDLLSLETGSLKLANGRVIEKTLYNRRTRQDEPALFVALTFERREVLDSSNIKPMNLIGVDRGENIPAVIALTDPEGCPLSRFKDSLGNPTHILRIGESYKEKQRTIQAKKEVEQRRAGGYSRKYASKAKNLADDMVRNTARDLLYYAVTQDAMLIFENLSRGFGRQGKRTFMAERQYTRMEDWLTAKLAYEGLPSKTYLSKTLAQYTSKTCSNCGFTITSADYDRVLEKLKKTATGWMTTINGKELKVEGQITYYNRYKRQNVVKDLSVELDRLSEESVNNDISSWTKGRSGEALSLLKKRFSHRPVQEKFVCLNCGFETHADEQAALNIARSWLFLRSQEYKKYQTNKTTGNTDKRAFVETWQSFYRKKLKEVWKPAV

SEQ ID NO: 31546 - protein, 979 aa, synthetic construct
  REGION 1..979: note = engineered CasX variant
QEIGKRINKIRRRLVKDSNTKKAGKTGPMKTLLVRVMTPDLRERLENLRKKPPNIPQPISNTSRANLNKLLTDYTEMKKAILHVYWEEFQKDPVGLMSRVAQPASKKIDQNKLKPEMDEKGNLTTAGFACSQCGQPLFVYKLEQVSEKGKAYTNYFGRCNVAEHEKLILLAQLKPEKDSDEAVTYSLGKFGQRALDFYSIHVTKESTHPVKPLAQIAGNRYASTPVGKALSDACMGTIASFLSKYQDIIIEHQKVVKGNQKRLESLRELAGKENLEYPSVTLPPQPHTKEGVDAYNEVIARVRMWVNLNLWQKLKLSRDDAKPLLRLKGFPSFPLVERQANEVDWWDMVCNVKKLINEKKEDGKVFWQNLAGYKRQEALRPYLSSEEDRKKGKKFARYQLGDLLLHLEKKHGEDWGKVYDEAWERIDKKVEGLSKHIKLEEERRSEDAQSKAALTDWLRAKASFVIEGLKEADKDEFCRCELKLQKWYGDLRGKPFAIEAENSILDISGFSKQYNCAFIWQKDGVKKLNLYLIINYFKGGKLRFKKIKPEAFEANRFYTVINKKSGEIVPMEVNFNFDDPNLIILPLAFGKRQGREFIWNDLLSLETGSLKLANGRVIEKTLYNRRTRQDEPALFVALTFERREVLDSSNIKPMNLIGVDRGENIPAVIALTDPEGCPLSRFKDSLGNPTHILRIGESYKEKQRTIQAKKEVEQRRAGGYSRKYASKAKNLADDMVRNTARDLLYYAVTQDAMLIFENLSRGFGRQGKRTFMAERQYTRMEDWLTAKLAYEGLPSKTYLSKTLAQYTSKTCSNCGFTITSADYDRVLEKLKKTATGWMTTINGKELKVEGQITYYNRYKRQNVVKDLSVELDRLSEESVNNDISSWTKGRSGEALSLLKKRFSHRPVQEKFVCLNCGFETHADEQAALNIARSWLFLRSQEYKKYQTNKTTGNTDKRAFVETWQSFYRKKLKEVWKPAV

SEQ ID NO: 31547 - protein, 979 aa, synthetic construct
  REGION 1..979: note = engineered CasX variant
QEIGKRINKIRRRLVKDSNTKKAGKTGPMKTLLVRVMTPDLRERLENLRKKPPNIPQPISNTSRANLNKLLTDYTEMKKAILHVYWEEFQKDPVGLMSRVAQPASKKIDQNKLKPEMDEKGNLTTAGFACSQCGQPLFVYKLEQVSEKGKAYTNYFGRCNVAEHEKLILLAQLKPEKDSDEAVTYSLGKFGQRALDFYSIHVTKESTHPVKPLAQIAGNRYASAPVGKALSDACMGTIASFLSKYQDIIIEHQKVVKGNQKRLESLRELAGKENLEYPSVTLPPQPHTKEGVDAYNEVIARVRMWVNLNLWQKLKLSRDDAKPLLRLKGFPSFPLVERQANEVDWWDMVCNVKKLINEKKEDGKVFWQNLAGYKRQEALRPYLSSEEDRKKGKKFARYQLGDLLLHLEKKHGEDWGKVYDEAWERIDKKVEGLSKHIKLEEERRSEDAQSKAALTDWLRAKASFVIEGLKEADKDEFCRCELKLQKWYGDLRGKPFAIEAENSILDISGFSKQYNCAFIWQKDGVKKLNLYLIINYFKGGKLRFKKIKPEAFEANRFYTVINKKSGEIVPMEVNFNFDDPNLIILPLAFGKRQGREFIWNDLLSLETGSLKLANGRVIEKTLYNRRTRQDEPALFVALTFERREVLDSSNIKPMNLIGVDRGENIPAVIALTDPEGCPLSRFKDSLGNPTHILRIGESYKEKQRTIQAKKEVEQRRAGGYSRKYASKAKNLADDMVRNTARDLLYYAVTQDAMLIFENLSRGFGRQGKRTFMAERQYTRMEDWLTAKLAYEGLPSKTYLSKTLAQYTSKTCSNCGFTITSADYDRVLEKLKKTATGWMTTINGKELKVEGQITYYNRYKRQNVVKDLSVELDRLSEESVNNDISSWTKGRSGEALSLLKKRFSHRPVQEKFVCLNCGFETHADEQAALNIARSWLFLRSQEYKKYQTNKTTGNTDKRAFVETWQSFYRKKLKEVWKPAV

SEQ ID NO: 31548 - protein, 979 aa, synthetic construct
  REGION 1..979: note = engineered CasX variant
QEIGKRINKIRRRLVKDSNTKKAGKTGPMKTLLVRVMTPDLRERLENLRKKPPNIPQPISNTSRANLNKLLTDYTEMKKAILHVYWEEFQKDPVGLMSRVAQPASKKIDQNKLKPEMDEKGNLTTAGFACSQCGQPLFVYKLEQVSEKGKAYTNYFGRCNVAEHEKLILLAQLKPEKDSDEAVTYSLGKFGQRALDFYSIHVTKESTHPVKPLAQIAGNRYASVPVGKALSDACMGTIASFLSKYQDIIIEHQKVVKGNQKRLESLRELAGKENLEYPSVTLPPQPHTKEGVDAYNEVIARVRMWVNLNLWQKLKLSRDDAKPLLRLKGFPSFPLVERQANEVDWWDMVCNVKKLINEKKEDGKVFWQNLAGYKRQEALRPYLSSEEDRKKGKKFARYQLGDLLLHLEKKHGEDWGKVYDEAWERIDKKVEGLSKHIKLEEERRSEDAQSKAALTDWLRAKASFVIEGLKEADKDEFCRCELKLQKWYGDLRGKPFAIEAENSILDISGFSKQYNCAFIWQKDGVKKLNLYLIINYFKGGKLRFKKIKPEAFEANRFYTVINKKSGEIVPMEVNFNFDDPNLIILPLAFGKRQGREFIWNDLLSLETGSLKLANGRVIEKTLYNRRTRQDEPALFVALTFERREVLDSSNIKPMNLIGVDRGENIPAVIALTDPEGCPLSRFKDSLGNPTHILRIGESYKEKQRTIQAKKEVEQRRAGGYSRKYASKAKNLADDMVRNTARDLLYYAVTQDAMLIFENLSRGFGRQGKRTFMAERQYTRMEDWLTAKLAYEGLPSKTYLSKTLAQYTSKTCSNCGFTITSADYDRVLEKLKKTATGWMTTINGKELKVEGQITYYNRYKRQNVVKDLSVELDRLSEESVNNDISSWTKGRSGEALSLLKKRFSHRPVQEKFVCLNCGFETHADEQAALNIARSWLFLRSQEYKKYQTNKTTGNTDKRAFVETWQSFYRKKLKEVWKPAV

SEQ ID NO: 31549 - protein, 979 aa, synthetic construct
  REGION 1..979: note = engineered CasX variant
QEIGKRINKIRRRLVKDSNTKKAGKTGPMKTLLVRVMTPDLRERLENLRKKPPNIPQPISNTSRANLNKLLTDYTEMKKAILHVYWEEFQKDPVGLMSRVAQPASKKIDQNKLKPEMDEKGNLTTAGFACSQCGQPLFVYKLEQVSEKGKAYTNYFGRCNVAEHEKLIKLAQLKPEKDSDEAVTYSLGKFGQRALDFYSIHVTKESTHPVKPLAQIAGNRYASGPVGKALSDACMGTIASFLSKYQDIIIEHQKVVKGNQKRLESLRELAGKENLEYPSVTLPPQPHTKEGVDAYNEVIARVRMWVNLNLWQKLKLSRDDAKPLLRLKGFPSFPLVERQANEVDWWDMVCNVKKLINEKKEDGKVFWQNLAGYKRQEALRPYLSSEEDRKKGKKFARYQLGDLLLHLEKKHGEDWGKVYDEAWERIDKKVEGLSKHIKLEEERRSEDAQSKAALTDWLRAKASFVIEGLKEADKDEFCRCELKLQKWYGDLRGKPFAIEAENSILDISGFSKQYNCAFIWQKDGVKKLNLYLIINYFKGGKLRFKKIKPEAFEANRFYTVINKKSGEIVPMEVNFNFDDPNLIILPLAFGKRQGREFIWNDLLSLETGSLKLANGRVIEKTLYNRRTRQDEPALFVALTFERREVLDSSNIKPMNLIGVDRGENIPAVIALTDPEGCPLSRFKDSLGNPTHILRIGESYKEKQRTIQAKKEVEQRRAGGYSRKYASKAKNLADDMVRNTARDLLYYAVTQDAMLIFENLSRGFGRQGKRTFMAERQYTRMEDWLTAKLAYEGLPSKTYLSKTLAQYTSKTCSNCGFTITSADYDRVLEKLKKTATGWMTTINGKELKVEGQITYYNRYKRQNVVKDLSVELDRLSEESVNNDISSWTKGRSGEALSLLKKRFSHRPVQEKFVCLNCGFETHADEQAALNIARSWLFLRSQEYKKYQTNKTTGNTDKRAFVETWQSFYRKKLKEVWKPAV

SEQ ID NO: 31550 - protein, 978 aa, synthetic construct
  REGION 1..978: note = engineered CasX variant
QEIGKRINKIRRRLVKDSNTKKAGKTGPMKTLLVRVMTPDLRERLENLRKKPPNIPQPISNTSRANLNKLLTDYTEMKKAILHVYWEEFQKDPVGLMSRVAQPASKKIDQNKLKPEMDEKGNLTTAGFACSQCGQPLFVYKLEQVSEKGKAYTNYFGRCNVAEHEKLILLAQLKPEKDSDEAVTYSLGKFGQRALDFYSIHVTKESTHPVKPLAQIAGNRYASPVGKALSDACMGTIASFLSKYQDIIIEHQKVVKGNQKRLESLRELAGKENLEYPSVTLPPQPHTKEGVDAYNEVIARVRMWVNLNLWQKLKLSRDDAKPLLRLKGFPSFPLVERQANEVDWWDMVCNVKKLINEKKEDGKVFWQNLAGYKRQEALRPYLSSEEDRKKGKKFARYQLGDLLLHLEKKHGEDWGKVYDEAWERIDKKVEGLSKHIKLEEERRSEDAQSKAALTDWLRAKASFVIEGLKEADKDEFCRCELKLQKWYGDLRGKPFAIEAENSILDISGFSKQYNCAFIWQKDGVKKLNLYLIINYFKGGKLRFKKIKPEAFEANRFYTVINKKSGEIVPMEVNFNFDDPNLIILPLAFGKRQGREFIWNDLLSLETGSLKLANGRVIEKTLYNRRTRQDEPALFVALTFERREVLDSSNIKPMNLIGVDRGENIPAVIALTDPEGCPLSRFKDSLGNPTHILRIGESYKEKQRTIQAKKEVEQRRAGGYSRKYASKAKNLADDMVRNTARDLLYYAVTQDAMLIFENLSRGFGRQGKRTFMAERQYTRMEDWLTAKLAYEGLPSKTYLSKTLAQYTSKTCSNCGFTITSADYDRVLEKLKKTATGWMTTINGKELKVEGQITYYNRYKRQNVVKDLSVELDRLSEESVNNDISSWTKGRSGEALSLLKKRFSHRPVQEKFVCLNCGFETHADEQAALNIARSWLFLRSQEYKKYQTNKTTGNTDKRAFVETWQSFYRKKLKEVWKPAV

SEQ ID NO: 31551 - protein, 979 aa, synthetic construct
  REGION 1..979: note = engineered CasX variant
QEIGKRINKIRRRLVKDSNTKKAGKTGPMKTLLVRVMTPDLRERLENLRKKPENIPQPISNTSQANLNKLLTDYTEMKKAILHVYWEEFQKDPVGLMSRVAQPASKKIDQNKLKPEMDEKGNLTTAGFACSQCGQPLFVYKLEQVSEKGKAYTNYFGRCNVAEHEKLILLAQLKPEKDSDEAVTYSLGKFGQRALDFYSIHVTKESTHPVKPLAQIAGNRYASYPVGKALSDACMGTIASFLSKYQDIIIEHQKVVKGNQKRLESLRELAGKENLEYPSVTLPPQPHTKEGVDAYNEVIARVRMWVNLNLWQKLKLSRDDAKPLLRLKGFPSFPLVERQANEVDWWDMVCNVKKLINEKKEDGKVFWQNLAGYKRQEALRPYLSSEEDRKKGKKFARYQLGDLLLHLEKKHGEDWGKVYDEAWERIDKKVEGLSKHIKLEEERRSEDAQSKAALTDWLRAKASFVIEGLKEADKDEFCRCELKLQKWYGDLRGKPFAIEAENSILDISGFSKQYNCAFIWQKDGVKKLNLYLIINYFKGGKLRFKKIKPEAFEANRFYTVINKKSGEIVPMEVNFNFDDPNLIILPLAFGKRQGREFIWNDLLSLETGSLKLANGRVIEKTLYNRRTRQDEPALFVALTFERREVLDSSNIKPMNLIGVDRGENIPAVIALTDPEGCPLSRFKDSLGNPTHILRIGESYKEKQRTIQAKKEVEQRRAGGYSRKYASKAKNLADDMVRNTARDLLYYAVTQDAMLIFENLSRGFGRQGKRTFMAERQYTRMEDWLTAKLAYEGLPSKTYLSKTLAQYTSKTCSNCGFTITSADYDRVLEKLKKTATGWMTTINGKELKVEGQITYYNRYKRQNVVKDLSVELDRLSEESVNNDISSWTKGRSGEALSLLKKRFSHRPVQEKFVCLNCGFETHADEQAALNIARSWLFLRSQEYKKYQTNKTTGNTDKRAFVETWQSFYRKKLKEVWKPAV

SEQ ID NO: 31552 - protein, 979 aa, synthetic construct
  REGION 1..979: note = engineered CasX variant
QEIGKRINKIRRRLVKDSNTKKAGKTGPMKTLLVRVMTPDLRERLENLRKKPENIPQPISNTSQANLNKLLTDYTEMKKAILHVYWEEFQKDPVGLMSRVAQPASKKIDQNKLKPEMDEKGNLTTAGFACSQCGQPLFVYKLEQVSEKGKAYTNYFGRCNVAEHEKLILLAQLKPEKDSDEAVTYSLGKFGQRALDFYSIHVTKESTHPVKPLAQIAGNRYASHPVGKALSDACMGTIASFLSKYQDIIIEHQKVVKGNQKRLESLRELAGKENLEYPSVTLPPQPHTKEGVDAYNEVIARVRMWVNLNLWQKLKLSRDDAKPLLRLKGFPSFPLVERQANEVDWWDMVCNVKKLINEKKEDGKVFWQNLAGYKRQEALRPYLSSEEDRKKGKKFARYQLGDLLLHLEKKHGEDWGKVYDEAWERIDKKVEGLSKHIKLEEERRSEDAQSKAALTDWLRAKASFVIEGLKEADKDEFCRCELKLQKWYGDLRGKPFAIEAENSILDISGFSKQYNCAFIWQKDGVKKLNLYLIINYFKGGKLRFKKIKPEAFEANRFYTVINKKSGEIVPMEVNFNFDDPNLIILPLAFGKRQGREFIWNDLLSLETGSLKLANGRVIEKTLYNRRTRQDEPALFVALTFERREVLDSSNIKPMNLIGVDRGENIPAVIALTDPEGCPLSRFKDSLGNPTHILRIGESYKEKQRTIQAKKEVEQRRAGGYSRKYASKAKNLADDMVRNTARDLLYYAVTQDAMLIFENLSRGFGRQGKRTFMAERQYTRMEDWLTAKLAYEGLPSKTYLSKTLAQYTSKTCSNCGFTITSADYDRVLEKLKKTATGWMTTINGKELKVEGQITYYNRYKRQNVVKDLSVELDRLSEESVNNDISSWTKGRSGEALSLLKKRFSHRPVQEKFVCLNCGFETHADEQAALNIARSWLFLRSQEYKKYQTNKTTGNTDKRAFVETWQSFYRKKLKEVWKPAV

SEQ ID NO: 31553 - protein, 979 aa, synthetic construct
  REGION 1..979: note = engineered CasX variant
QEIGKRINKIRRRLVKDSNTKKAGKTGPMKTLLVRVMTPDLRERLENLRKKPENIPQPISNTSQANLNKLLTDYTEMKKAILHVYWEEFQKDPVGLMSRVAQPASKKIDQNKLKPEMDEKGNLTTAGFACSQCGQPLFVYKLEQVSEKGKAYTNYFGRCNVAEHEKLILLAQLKPEKDSDEAVTYSLGKFGQRALDFYSIHVTKESTHPVKPLAQIAGNRYASSPVGKALSDACMGTIASFLSKYQDIIIEHQKVVKGNQKRLESLRELAGKENLEYPSVTLPPQPHTKEGVDAYNEVIARVRMWVNLNLWQKLKLSRDDAKPLLRLKGFPSFPLVERQANEVDWWDMVCNVKKLINEKKEDGKVFWQNLAGYKRQEALRPYLSSEEDRKKGKKFARYQLGDLLLHLEKKHGEDWGKVYDEAWERIDKKVEGLSKHIKLEEERRSEDAQSKAALTDWLRAKASFVIEGLKEADKDEFCRCELKLQKWYGDLRGKPFAIEAENSILDISGFSKQYNCAFIWQKDGVKKLNLYLIINYFKGGKLRFKKIKPEAFEANRFYTVINKKSGEIVPMEVNFNFDDPNLIILPLAFGKRQGREFIWNDLLSLETGSLKLANGRVIEKTLYNRRTRQDEPALFVALTFERREVLDSSNIKPMNLIGVDRGENIPAVIALTDPEGCPLSRFKDSLGNPTHILRIGESYKEKQRTIQAKKEVEQRRAGGYSRKYASKAKNLADDMVRNTARDLLYYAVTQDAMLIFENLSRGFGRQGKRTFMAERQYTRMEDWLTAKLAYEGLPSKTYLSKTLAQYTSKTCSNCGFTITSADYDRVLEKLKKTATGWMTTINGKELKVEGQITYYNRYKRQNVVKDLSVELDRLSEESVNNDISSWTKGRSGEALSLLKKRFSHRPVQEKFVCLNCGFETHADEQAALNIARSWLFLRSQEYKKYQTNKTTGNTDKRAFVETWQSFYRKKLKEVWKPAV

SEQ ID NO: 31554 - protein, 979 aa, synthetic construct
  REGION 1..979: note = engineered CasX variant
QEIGKRINKIRRRLVKDSNTKKAGKTGPMKTLLVRVMTPDLRERLENLRKKPENIPQPISNTSQANLNKLLTDYTEMKKAILHVYWEEFQKDPVGLMSRVAQPASKKIDQNKLKPEMDEKGNLTTAGFACSQCGQPLFVYKLEQVSEKGKAYTNYFGRCNVAEHEKLILLAQLKPEKDSDEAVTYSLGKFGQRALDFYSIHVTKESTHPVKPLAQIAGNRYASTPVGKALSDACMGTIASFLSKYQDIIIEHQKVVKGNQKRLESLRELAGKENLEYPSVTLPPQPHTKEGVDAYNEVIARVRMWVNLNLWQKLKLSRDDAKPLLRLKGFPSFPLVERQANEVDWWDMVCNVKKLINEKKEDGKVFWQNLAGYKRQEALRPYLSSEEDRKKGKKFARYQLGDLLLHLEKKHGEDWGKVYDEAWERIDKKVEGLSKHIKLEEERRSEDAQSKAALTDWLRAKASFVIEGLKEADKDEFCRCELKLQKWYGDLRGKPFAIEAENSILDISGFSKQYNCAFIWQKDGVKKLNLYLIINYFKGGKLRFKKIKPEAFEANRFYTVINKKSGEIVPMEVNFNFDDPNLIILPLAFGKRQGREFIWNDLLSLETGSLKLANGRVIEKTLYNRRTRQDEPALFVALTFERREVLDSSNIKPMNLIGVDRGENIPAVIALTDPEGCPLSRFKDSLGNPTHILRIGESYKEKQRTIQAKKEVEQRRAGGYSRKYASKAKNLADDMVRNTARDLLYYAVTQDAMLIFENLSRGFGRQGKRTFMAERQYTRMEDWLTAKLAYEGLPSKTYLSKTLAQYTSKTCSNCGFTITSADYDRVLEKLKKTATGWMTTINGKELKVEGQITYYNRYKRQNVVKDLSVELDRLSEESVNNDISSWTKGRSGEALSLLKKRFSHRPVQEKFVCLNCGFETHADEQAALNIARSWLFLRSQEYKKYQTNKTTGNTDKRAFVETWQSFYRKKLKEVWKPAV

SEQ ID NO: 31555 - protein, 979 aa, synthetic construct
  REGION 1..979: note = engineered CasX variant
QEIGKRINKIRRRLVKDSNTKKAGKTGPMKTLLVRVMTPDLRERLENLRKKPENIPQPISNTSQANLNKLLTDYTEMKKAILHVYWEEFQKDPVGLMSRVAQPASKKIDQNKLKPEMDEKGNLTTAGFACSQCGQPLFVYKLEQVSEKGKAYTNYFGRCNVAEHEKLILLAQLKPEKDSDEAVTYSLGKFGQRALDFYSIHVTKESTHPVKPLAQIAGNRYASAPVGKALSDACMGTIASFLSKYQDIIIEHQKVVKGNQKRLESLRELAGKENLEYPSVTLPPQPHTKEGVDAYNEVIARVRMWVNLNLWQKLKLSRDDAKPLLRLKGFPSFPLVERQANEVDWWDMVCNVKKLINEKKEDGKVFWQNLAGYKRQEALRPYLSSEEDRKKGKKFARYQLGDLLLHLEKKHGEDWGKVYDEAWERIDKKVEGLSKHIKLEEERRSEDAQSKAALTDWLRAKASFVIEGLKEADKDEFCRCELKLQKWYGDLRGKPFAIEAENSILDISGFSKQYNCAFIWQKDGVKKLNLYLIINYFKGGKLRFKKIKPEAFEANRFYTVINKKSGEIVPMEVNFNFDDPNLIILPLAFGKRQGREFIWNDLLSLETGSLKLANGRVIEKTLYNRRTRQDEPALFVALTFERREVLDSSNIKPMNLIGVDRGENIPAVIALTDPEGCPLSRFKDSLGNPTHILRIGESYKEKQRTIQAKKEVEQRRAGGYSRKYASKAKNLADDMVRNTARDLLYYAVTQDAMLIFENLSRGFGRQGKRTFMAERQYTRMEDWLTAKLAYEGLPSKTYLSKTLAQYTSKTCSNCGFTITSADYDRVLEKLKKTATGWMTTINGKELKVEGQITYYNRYKRQNVVKDLSVELDRLSEESVNNDISSWTKGRSGEALSLLKKRFSHRPVQEKFVCLNCGFETHADEQAALNIARSWLFLRSQEYKKYQTNKTTGNTDKRAFVETWQSFYRKKLKEVWKPAV

SEQ ID NO: 31556 - protein, 979 aa, synthetic construct
  REGION 1..979: note = engineered CasX variant
QEIGKRINKIRRRLVKDSNTKKAGKTGPMKTLLVRVMTPDLRERLENLRKKPENIPQPISNTSQANLNKLLTDYTEMKKAILHVYWEEFQKDPVGLMSRVAQPASKKIDQNKLKPEMDEKGNLTTAGFACSQCGQPLFVYKLEQVSEKGKAYTNYFGRCNVAEHEKLILLAQLKPEKDSDEAVTYSLGKFGQRALDFYSIHVTKESTHPVKPLAQIAGNRYASVPVGKALSDACMGTIASFLSKYQDIIIEHQKVVKGNQKRLESLRELAGKENLEYPSVTLPPQPHTKEGVDAYNEVIARVRMWVNLNLWQKLKLSRDDAKPLLRLKGFPSFPLVERQANEVDWWDMVCNVKKLINEKKEDGKVFWQNLAGYKRQEALRPYLSSEEDRKKGKKFARYQLGDLLLHLEKKHGEDWGKVYDEAWERIDKKVEGLSKHIKLEEERRSEDAQSKAALTDWLRAKASFVIEGLKEADKDEFCRCELKLQKWYGDLRGKPFAIEAENSILDISGFSKQYNCAFIWQKDGVKKLNLYLIINYFKGGKLRFKKIKPEAFEANRFYTVINKKSGEIVPMEVNFNFDDPNLIILPLAFGKRQGREFIWNDLLSLETGSLKLANGRVIEKTLYNRRTRQDEPALFVALTFERREVLDSSNIKPMNLIGVDRGENIPAVIALTDPEGCPLSRFKDSLGNPTHILRIGESYKEKQRTIQAKKEVEQRRAGGYSRKYASKAKNLADDMVRNTARDLLYYAVTQDAMLIFENLSRGFGRQGKRTFMAERQYTRMEDWLTAKLAYEGLPSKTYLSKTLAQYTSKTCSNCGFTITSADYDRVLEKLKKTATGWMTTINGKELKVEGQITYYNRYKRQNVVKDLSVELDRLSEESVNNDISSWTKGRSGEALSLLKKRFSHRPVQEKFVCLNCGFETHADEQAALNIARSWLFLRSQEYKKYQTNKTTGNTDKRAFVETWQSFYRKKLKEVWKPAV

SEQ ID NO: 31557 - protein, 979 aa, synthetic construct
  REGION 1..979: note = engineered CasX variant
QEIGKRINKIRRRLVKDSNTKKAGKTGPMKTLLVRVMTPDLRERLENLRKKPENIPQPISNTSQANLNKLLTDYTEMKKAILHVYWEEFQKDPVGLMSRVAQPASKKIDQNKLKPEMDEKGNLTTAGFACSQCGQPLFVYKLEQVSEKGKAYTNYFGRCNVAEHEKLIKLAQLKPEKDSDEAVTYSLGKFGQRALDFYSIHVTKESTHPVKPLAQIAGNRYASGPVGKALSDACMGTIASFLSKYQDIIIEHQKVVKGNQKRLESLRELAGKENLEYPSVTLPPQPHTKEGVDAYNEVIARVRMWVNLNLWQKLKLSRDDAKPLLRLKGFPSFPLVERQANEVDWWDMVCNVKKLINEKKEDGKVFWQNLAGYKRQEALRPYLSSEEDRKKGKKFARYQLGDLLLHLEKKHGEDWGKVYDEAWERIDKKVEGLSKHIKLEEERRSEDAQSKAALTDWLRAKASFVIEGLKEADKDEFCRCELKLQKWYGDLRGKPFAIEAENSILDISGFSKQYNCAFIWQKDGVKKLNLYLIINYFKGGKLRFKKIKPEAFEANRFYTVINKKSGEIVPMEVNFNFDDPNLIILPLAFGKRQGREFIWNDLLSLETGSLKLANGRVIEKTLYNRRTRQDEPALFVALTFERREVLDSSNIKPMNLIGVDRGENIPAVIALTDPEGCPLSRFKDSLGNPTHILRIGESYKEKQRTIQAKKEVEQRRAGGYSRKYASKAKNLADDMVRNTARDLLYYAVTQDAMLIFENLSRGFGRQGKRTFMAERQYTRMEDWLTAKLAYEGLPSKTYLSKTLAQYTSKTCSNCGFTITSADYDRVLEKLKKTATGWMTTINGKELKVEGQITYYNRYKRQNVVKDLSVELDRLSEESVNNDISSWTKGRSGEALSLLKKRFSHRPVQEKFVCLNCGFETHADEQAALNIARSWLFLRSQEYKKYQTNKTTGNTDKRAFVETWQSFYRKKLKEVWKPAV

SEQ ID NO: 31558 - protein, 978 aa, synthetic construct
  REGION 1..978: note = engineered CasX variant
QEIGKRINKIRRRLVKDSNTKKAGKTGPMKTLLVRVMTPDLRERLENLRKKPENIPQPISNTSQANLNKLLTDYTEMKKAILHVYWEEFQKDPVGLMSRVAQPASKKIDQNKLKPEMDEKGNLTTAGFACSQCGQPLFVYKLEQVSEKGKAYTNYFGRCNVAEHEKLILLAQLKPEKDSDEAVTYSLGKFGQRALDFYSIHVTKESTHPVKPLAQIAGNRYASPVGKALSDACMGTIASFLSKYQDIIIEHQKVVKGNQKRLESLRELAGKENLEYPSVTLPPQPHTKEGVDAYNEVIARVRMWVNLNLWQKLKLSRDDAKPLLRLKGFPSFPLVERQANEVDWWDMVCNVKKLINEKKEDGKVFWQNLAGYKRQEALRPYLSSEEDRKKGKKFARYQLGDLLLHLEKKHGEDWGKVYDEAWERIDKKVEGLSKHIKLEEERRSEDAQSKAALTDWLRAKASFVIEGLKEADKDEFCRCELKLQKWYGDLRGKPFAIEAENSILDISGFSKQYNCAFIWQKDGVKKLNLYLIINYFKGGKLRFKKIKPEAFEANRFYTVINKKSGEIVPMEVNFNFDDPNLIILPLAFGKRQGREFIWNDLLSLETGSLKLANGRVIEKTLYNRRTRQDEPALFVALTFERREVLDSSNIKPMNLIGVDRGENIPAVIALTDPEGCPLSRFKDSLGNPTHILRIGESYKEKQRTIQAKKEVEQRRAGGYSRKYASKAKNLADDMVRNTARDLLYYAVTQDAMLIFENLSRGFGRQGKRTFMAERQYTRMEDWLTAKLAYEGLPSKTYLSKTLAQYTSKTCSNCGFTITSADYDRVLEKLKKTATGWMTTINGKELKVEGQITYYNRYKRQNVVKDLSVELDRLSEESVNNDISSWTKGRSGEALSLLKKRFSHRPVQEKFVCLNCGFETHADEQAALNIARSWLFLRSQEYKKYQTNKTTGNTDKRAFVETWQSFYRKKLKEVWKPAV

SEQ ID NO: 31559 - protein, 979 aa, synthetic construct
  REGION 1..979: note = engineered CasX variant
QEIGKRINKIRRRLVKDSNTKKAGKTGPMKTLLVRVMTPDLRERLENLRKKPENIPQPISNTSRANLNKLLTDYTEMKKAILHVYDEEFQKDPVGLMSRVAQPASKKIDQNKLKPEMDEKGNLTTAGFACSQCGQPLFVYKLEQVSEKGKAYTNYFGRCNVAEHEKLILLAQLKPEKDSDEAVTYSLGKFGQRALDFYSIHVTKESTHPVKPLAQIAGNRYASYPVGKALSDACMGTIASFLSKYQDIIIEHQKVVKGNQKRLESLRELAGKENLEYPSVTLPPQPHTKEGVDAYNEVIARVRMWVNLNLWQKLKLSRDDAKPLLRLKGFPSFPLVERQANEVDWWDMVCNVKKLINEKKEDGKVFWQNLAGYKRQEALRPYLSSEEDRKKGKKFARYQLGDLLLHLEKKHGEDWGKVYDEAWERIDKKVEGLSKHIKLEEERRSEDAQSKAALTDWLRAKASFVIEGLKEADKDEFCRCELKLQKWYGDLRGKPFAIEAENSILDISGFSKQYNCAFIWQKDGVKKLNLYLIINYFKGGKLRFKKIKPEAFEANRFYTVINKKSGEIVPMEVNFNFDDPNLIILPLAFGKRQGREFIWNDLLSLETGSLKLANGRVIEKTLYNRRTRQDEPALFVALTFERREVLDSSNIKPMNLIGVDRGENIPAVIALTDPEGCPLSRFKDSLGNPTHILRIGESYKEKQRTIQAKKEVEQRRAGGYSRKYASKAKNLADDMVRNTARDLLYYAVTQDAMLIFENLSRGFGRQGKRTFMAERQYTRMEDWLTAKLAYEGLPSKTYLSKTLAQYTSKTCSNCGFTITSADYDRVLEKLKKTATGWMTTINGKELKVEGQITYYNRYKRQNVVKDLSVELDRLSEESVNNDISSWTKGRSGEALSLLKKRFSHRPVQEKFVCLNCGFETHADEQAALNIARSWLFLRSQEYKKYQTNKTTGNTDKRAFVETWQSFYRKKLKEVWKPAV

SEQ ID NO: 31560 - protein, 979 aa, synthetic construct
  REGION 1..979: note = engineered CasX variant
QEIGKRINKIRRRLVKDSNTKKAGKTGPMKTLLVRVMTPDLRERLENLRKKPENIPQPISNTSRANLNKLLTDYTEMKKAILHVYDEEFQKDPVGLMSRVAQPASKKIDQNKLKPEMDEKGNLTTAGFACSQCGQPLFVYKLEQVSEKGKAYTNYFGRCNVAEHEKLILLAQLKPEKDSDEAVTYSLGKFGQRALDFYSIHVTKESTHPVKPLAQIAGNRYASHPVGKALSDACMGTIASFLSKYQDIIIEHQKVVKGNQKRLESLRELAGKENLEYPSVTLPPQPHTKEGVDAYNEVIARVRMWVNLNLWQKLKLSRDDAKPLLRLKGFPSFPLVERQANEVDWWDMVCNVKKLINEKKEDGKVFWQNLAGYKRQEALRPYLSSEEDRKKGKKFARYQLGDLLLHLEKKHGEDWGKVYDEAWERIDKKVEGLSKHIKLEEERRSEDAQSKAALTDWLRAKASFVIEGLKEADKDEFCRCELKLQKWYGDLRGKPFAIEAENSILDISGFSKQYNCAFIWQKDGVKKLNLYLIINYFKGGKLRFKKIKPEAFEANRFYTVINKKSGEIVPMEVNFNFDDPNLIILPLAFGKRQGREFIWNDLLSLETGSLKLANGRVIEKTLYNRRTRQDEPALFVALTFERREVLDSSNIKPMNLIGVDRGENIPAVIALTDPEGCPLSRFKDSLGNPTHILRIGESYKEKQRTIQAKKEVEQRRAGGYSRKYASKAKNLADDMVRNTARDLLYYAVTQDAMLIFENLSRGFGRQGKRTFMAERQYTRMEDWLTAKLAYEGLPSKTYLSKTLAQYTSKTCSNCGFTITSADYDRVLEKLKKTATGWMTTINGKELKVEGQITYYNRYKRQNVVKDLSVELDRLSEESVNNDISSWTKGRSGEALSLLKKRFSHRPVQEKFVCLNCGFETHADEQAALNIARSWLFLRSQEYKKYQTNKTTGNTDKRAFVETWQSFYRKKLKEVWKPAV

SEQ ID NO: 31561 - protein, 979 aa, synthetic construct
  REGION 1..979: note = engineered CasX variant
QEIGKRINKIRRRLVKDSNTKKAGKTGPMKTLLVRVMTPDLRERLENLRKKPENIPQPISNTSRANLNKLLTDYTEMKKAILHVYDEEFQKDPVGLMSRVAQPASKKIDQNKLKPEMDEKGNLTTAGFACSQCGQPLFVYKLEQVSEKGKAYTNYFGRCNVAEHEKLILLAQLKPEKDSDEAVTYSLGKFGQRALDFYSIHVTKESTHPVKPLAQIAGNRYASSPVGKALSDACMGTIASFLSKYQDIIIEHQKVVKGNQKRLESLRELAGKENLEYPSVTLPPQPHTKEGVDAYNEVIARVRMWVNLNLWQKLKLSRDDAKPLLRLKGFPSFPLVERQANEVDWWDMVCNVKKLINEKKEDGKVFWQNLAGYKRQEALRPYLSSEEDRKKGKKFARYQLGDLLLHLEKKHGEDWGKVYDEAWERIDKKVEGLSKHIKLEEERRSEDAQSKAALTDWLRAKASFVIEGLKEADKDEFCRCELKLQKWYGDLRGKPFAIEAENSILDISGFSKQYNCAFIWQKDGVKKLNLYLIINYFKGGKLRFKKIKPEAFEANRFYTVINKKSGEIVPMEVNFNFDDPNLIILPLAFGKRQGREFIWNDLLSLETGSLKLANGRVIEKTLYNRRTRQDEPALFVALTFERREVLDSSNIKPMNLIGVDRGENIPAVIALTDPEGCPLSRFKDSLGNPTHILRIGESYKEKQRTIQAKKEVEQRRAGGYSRKYASKAKNLADDMVRNTARDLLYYAVTQDAMLIFENLSRGFGRQGKRTFMAERQYTRMEDWLTAKLAYEGLPSKTYLSKTLAQYTSKTCSNCGFTITSADYDRVLEKLKKTATGWMTTINGKELKVEGQITYYNRYKRQNVVKDLSVELDRLSEESVNNDISSWTKGRSGEALSLLKKRFSHRPVQEKFVCLNCGFETHADEQAALNIARSWLFLRSQEYKKYQTNKTTGNTDKRAFVETWQSFYRKKLKEVWKPAV

SEQ ID NO: 31562 - protein, 979 aa, synthetic construct
  REGION 1..979: note = engineered CasX variant
QEIGKRINKIRRRLVKDSNTKKAGKTGPMKTLLVRVMTPDLRERLENLRKKPENIPQPISNTSRANLNKLLTDYTEMKKAILHVYDEEFQKDPVGLMSRVAQPASKKIDQNKLKPEMDEKGNLTTAGFACSQCGQPLFVYKLEQVSEKGKAYTNYFGRCNVAEHEKLILLAQLKPEKDSDEAVTYSLGKFGQRALDFYSIHVTKESTHPVKPLAQIAGNRYASTPVGKALSDACMGTIASFLSKYQDIIIEHQKVVKGNQKRLESLRELAGKENLEYPSVTLPPQPHTKEGVDAYNEVIARVRMWVNLNLWQKLKLSRDDAKPLLRLKGFPSFPLVERQANEVDWWDMVCNVKKLINEKKEDGKVFWQNLAGYKRQEALRPYLSSEEDRKKGKKFARYQLGDLLLHLEKKHGEDWGKVYDEAWERIDKKVEGLSKHIKLEEERRSEDAQSKAALTDWLRAKASFVIEGLKEADKDEFCRCELKLQKWYGDLRGKPFAIEAENSILDISGFSKQYNCAFIWQKDGVKKLNLYLIINYFKGGKLRFKKIKPEAFEANRFYTVINKKSGEIVPMEVNFNFDDPNLIILPLAFGKRQGREFIWNDLLSLETGSLKLANGRVIEKTLYNRRTRQDEPALFVALTFERREVLDSSNIKPMNLIGVDRGENIPAVIALTDPEGCPLSRFKDSLGNPTHILRIGESYKEKQRTIQAKKEVEQRRAGGYSRKYASKAKNLADDMVRNTARDLLYYAVTQDAMLIFENLSRGFGRQGKRTFMAERQYTRMEDWLTAKLAYEGLPSKTYLSKTLAQYTSKTCSNCGFTITSADYDRVLEKLKKTATGWMTTINGKELKVEGQITYYNRYKRQNVVKDLSVELDRLSEESVNNDISSWTKGRSGEALSLLKKRFSHRPVQEKFVCLNCGFETHADEQAALNIARSWLFLRSQEYKKYQTNKTTGNTDKRAFVETWQSFYRKKLKEVWKPAV

SEQ ID NO: 31563 - protein, 979 aa, synthetic construct
  REGION 1..979: note = engineered CasX variant
QEIGKRINKIRRRLVKDSNTKKAGKTGPMKTLLVRVMTPDLRERLENLRKKPENIPQPISNTSRANLNKLLTDYTEMKKAILHVYDEEFQKDPVGLMSRVAQPASKKIDQNKLKPEMDEKGNLTTAGFACSQCGQPLFVYKLEQVSEKGKAYTNYFGRCNVAEHEKLILLAQLKPEKDSDEAVTYSLGKFGQRALDFYSIHVTKESTHPVKPLAQIAGNRYASAPVGKALSDACMGTIASFLSKYQDIIIEHQKVVKGNQKRLESLRELAGKENLEYPSVTLPPQPHTKEGVDAYNEVIARVRMWVNLNLWQKLKLSRDDAKPLLRLKGFPSFPLVERQANEVDWWDMVCNVKKLINEKKEDGKVFWQNLAGYKRQEALRPYLSSEEDRKKGKKFARYQLGDLLLHLEKKHGEDWGKVYDEAWERIDKKVEGLSKHIKLEEERRSEDAQSKAALTDWLRAKASFVIEGLKEADKDEFCRCELKLQKWYGDLRGKPFAIEAENSILDISGFSKQYNCAFIWQKDGVKKLNLYLIINYFKGGKLRFKKIKPEAFEANRFYTVINKKSGEIVPMEVNFNFDDPNLIILPLAFGKRQGREFIWNDLLSLETGSLKLANGRVIEKTLYNRRTRQDEPALFVALTFERREVLDSSNIKPMNLIGVDRGENIPAVIALTDPEGCPLSRFKDSLGNPTHILRIGESYKEKQRTIQAKKEVEQRRAGGYSRKYASKAKNLADDMVRNTARDLLYYAVTQDAMLIFENLSRGFGRQGKRTFMAERQYTRMEDWLTAKLAYEGLPSKTYLSKTLAQYTSKTCSNCGFTITSADYDRVLEKLKKTATGWMTTINGKELKVEGQITYYNRYKRQNVVKDLSVELDRLSEESVNNDISSWTKGRSGEALSLLKKRFSHRPVQEKFVCLNCGFETHADEQAALNIARSWLFLRSQEYKKYQTNKTTGNTDKRAFVETWQSFYRKKLKEVWKPAV

SEQ ID NO: 31564 - protein, 979 aa, synthetic construct
  REGION 1..979: note = engineered CasX variant
QEIGKRINKIRRRLVKDSNTKKAGKTGPMKTLLVRVMTPDLRERLENLRKKPENIPQPISNTSRANLNKLLTDYTEMKKAILHVYDEEFQKDPVGLMSRVAQPASKKIDQNKLKPEMDEKGNLTTAGFACSQCGQPLFVYKLEQVSEKGKAYTNYFGRCNVAEHEKLILLAQLKPEKDSDEAVTYSLGKFGQRALDFYSIHVTKESTHPVKPLAQIAGNRYASVPVGKALSDACMGTIASFLSKYQDIIIEHQKVVKGNQKRLESLRELAGKENLEYPSVTLPPQPHTKEGVDAYNEVIARVRMWVNLNLWQKLKLSRDDAKPLLRLKGFPSFPLVERQANEVDWWDMVCNVKKLINEKKEDGKVFWQNLAGYKRQEALRPYLSSEEDRKKGKKFARYQLGDLLLHLEKKHGEDWGKVYDEAWERIDKKVEGLSKHIKLEEERRSEDAQSKAALTDWLRAKASFVIEGLKEADKDEFCRCELKLQKWYGDLRGKPFAIEAENSILDISGFSKQYNCAFIWQKDGVKKLNLYLIINYFKGGKLRFKKIKPEAFEANRFYTVINKKSGEIVPMEVNFNFDDPNLIILPLAFGKRQGREFIWNDLLSLETGSLKLANGRVIEKTLYNRRTRQDEPALFVALTFERREVLDSSNIKPMNLIGVDRGENIPAVIALTDPEGCPLSRFKDSLGNPTHILRIGESYKEKQRTIQAKKEVEQRRAGGYSRKYASKAKNLADDMVRNTARDLLYYAVTQDAMLIFENLSRGFGRQGKRTFMAERQYTRMEDWLTAKLAYEGLPSKTYLSKTLAQYTSKTCSNCGFTITSADYDRVLEKLKKTATGWMTTINGKELKVEGQITYYNRYKRQNVVKDLSVELDRLSEESVNNDISSWTKGRSGEALSLLKKRFSHRPVQEKFVCLNCGFETHADEQAALNIARSWLFLRSQEYKKYQTNKTTGNTDKRAFVETWQSFYRKKLKEVWKPAV

SEQ ID NO: 31565 - protein, 979 aa, synthetic construct
  REGION 1..979: note = engineered CasX variant
QEIGKRINKIRRRLVKDSNTKKAGKTGPMKTLLVRVMTPDLRERLENLRKKPENIPQPISNTSRANLNKLLTDYTEMKKAILHVYDEEFQKDPVGLMSRVAQPASKKIDQNKLKPEMDEKGNLTTAGFACSQCGQPLFVYKLEQVSEKGKAYTNYFGRCNVAEHEKLIKLAQLKPEKDSDEAVTYSLGKFGQRALDFYSIHVTKESTHPVKPLAQIAGNRYASGPVGKALSDACMGTIASFLSKYQDIIIEHQKVVKGNQKRLESLRELAGKENLEYPSVTLPPQPHTKEGVDAYNEVIARVRMWVNLNLWQKLKLSRDDAKPLLRLKGFPSFPLVERQANEVDWWDMVCNVKKLINEKKEDGKVFWQNLAGYKRQEALRPYLSSEEDRKKGKKFARYQLGDLLLHLEKKHGEDWGKVYDEAWERIDKKVEGLSKHIKLEEERRSEDAQSKAALTDWLRAKASFVIEGLKEADKDEFCRCELKLQKWYGDLRGKPFAIEAENSILDISGFSKQYNCAFIWQKDGVKKLNLYLIINYFKGGKLRFKKIKPEAFEANRFYTVINKKSGEIVPMEVNFNFDDPNLIILPLAFGKRQGREFIWNDLLSLETGSLKLANGRVIEKTLYNRRTRQDEPALFVALTFERREVLDSSNIKPMNLIGVDRGENIPAVIALTDPEGCPLSRFKDSLGNPTHILRIGESYKEKQRTIQAKKEVEQRRAGGYSRKYASKAKNLADDMVRNTARDLLYYAVTQDAMLIFENLSRGFGRQGKRTFMAERQYTRMEDWLTAKLAYEGLPSKTYLSKTLAQYTSKTCSNCGFTITSADYDRVLEKLKKTATGWMTTINGKELKVEGQITYYNRYKRQNVVKDLSVELDRLSEESVNNDISSWTKGRSGEALSLLKKRFSHRPVQEKFVCLNCGFETHADEQAALNIARSWLFLRSQEYKKYQTNKTTGNTDKRAFVETWQSFYRKKLKEVWKPAV

SEQ ID NO: 31566 - protein, 978 aa, synthetic construct
  REGION 1..978: note = engineered CasX variant
QEIGKRINKIRRRLVKDSNTKKAGKTGPMKTLLVRVMTPDLRERLENLRKKPENIPQPISNTSRANLNKLLTDYTEMKKAILHVYDEEFQKDPVGLMSRVAQPASKKIDQNKLKPEMDEKGNLTTAGFACSQCGQPLFVYKLEQVSEKGKAYTNYFGRCNVAEHEKLILLAQLKPEKDSDEAVTYSLGKFGQRALDFYSIHVTKESTHPVKPLAQIAGNRYASPVGKALSDACMGTIASFLSKYQDIIIEHQKVVKGNQKRLESLRELAGKENLEYPSVTLPPQPHTKEGVDAYNEVIARVRMWVNLNLWQKLKLSRDDAKPLLRLKGFPSFPLVERQANEVDWWDMVCNVKKLINEKKEDGKVFWQNLAGYKRQEALRPYLSSEEDRKKGKKFARYQLGDLLLHLEKKHGEDWGKVYDEAWERIDKKVEGLSKHIKLEEERRSEDAQSKAALTDWLRAKASFVIEGLKEADKDEFCRCELKLQKWYGDLRGKPFAIEAENSILDISGFSKQYNCAFIWQKDGVKKLNLYLIINYFKGGKLRFKKIKPEAFEANRFYTVINKKSGEIVPMEVNFNFDDPNLIILPLAFGKRQGREFIWNDLLSLETGSLKLANGRVIEKTLYNRRTRQDEPALFVALTFERREVLDSSNIKPMNLIGVDRGENIPAVIALTDPEGCPLSRFKDSLGNPTHILRIGESYKEKQRTIQAKKEVEQRRAGGYSRKYASKAKNLADDMVRNTARDLLYYAVTQDAMLIFENLSRGFGRQGKRTFMAERQYTRMEDWLTAKLAYEGLPSKTYLSKTLAQYTSKTCSNCGFTITSADYDRVLEKLKKTATGWMTTINGKELKVEGQITYYNRYKRQNVVKDLSVELDRLSEESVNNDISSWTKGRSGEALSLLKKRFSHRPVQEKFVCLNCGFETHADEQAALNIARSWLFLRSQEYKKYQTNKTTGNTDKRAFVETWQSFYRKKLKEVWKPAV

SEQ ID NO: 31567 - protein, 979 aa, synthetic construct
  REGION 1..979: note = engineered CasX variant
QEIGKRINKIRRRLVKDSNTKKAGKTGPMKTLLVRVMTPDLRERLENLRKKPENIPQPISNTSRANLNKLLTDYTEMKKAILHVYWEEFQKDPVGLMSRVAQPASKKIDQNKLKPEMDEKGNLTTAGFACSQCGQPLFVYKLEQVSEKGKAYTNYFGRCNVAEHEKLIKLAQLKPEKDSDEAVTYSLGKFGQRALDFYSIHVTKESTHPVKPLAQIAGNRYASYPVGKALSDACMGTIASFLSKYQDIIIEHQKVVKGNQKRLESLRELAGKENLEYPSVTLPPQPHTKEGVDAYNEVIARVRMWVNLNLWQKLKLSRDDAKPLLRLKGFPSFPLVERQANEVDWWDMVCNVKKLINEKKEDGKVFWQNLAGYKRQEALRPYLSSEEDRKKGKKFARYQLGDLLLHLEKKHGEDWGKVYDEAWERIDKKVEGLSKHIKLEEERRSEDAQSKAALTDWLRAKASFVIEGLKEADKDEFCRCELKLQKWYGDLRGKPFAIEAENSILDISGFSKQYNCAFIWQKDGVKKLNLYLIINYFKGGKLRFKKIKPEAFEANRFYTVINKKSGEIVPMEVNFNFDDPNLIILPLAFGKRQGREFIWNDLLSLETGSLKLANGRVIEKTLYNRRTRQDEPALFVALTFERREVLDSSNIKPMNLIGVDRGENIPAVIALTDPEGCPLSRFKDSLGNPTHILRIGESYKEKQRTIQAKKEVEQRRAGGYSRKYASKAKNLADDMVRNTARDLLYYAVTQDAMLIFENLSRGFGRQGKRTFMAERQYTRMEDWLTAKLAYEGLPSKTYLSKTLAQYTSKTCSNCGFTITSADYDRVLEKLKKTATGWMTTINGKELKVEGQITYYNRYKRQNVVKDLSVELDRLSEESVNNDISSWTKGRSGEALSLLKKRFSHRPVQEKFVCLNCGFETHADEQAALNIARSWLFLRSQEYKKYQTNKTTGNTDKRAFVETWQSFYRKKLKEVWKPAV

SEQ ID NO: 31568 - protein, 979 aa, synthetic construct
  REGION 1..979: note = engineered CasX variant
QEIGKRINKIRRRLVKDSNTKKAGKTGPMKTLLVRVMTPDLRERLENLRKKPENIPQPISNTSRANLNKLLTDYTEMKKAILHVYWEEFQKDPVGLMSRVAQPASKKIDQNKLKPEMDEKGNLTTAGFACSQCGQPLFVYKLEQVSEKGKAYTNYFGRCNVAEHEKLIKLAQLKPEKDSDEAVTYSLGKFGQRALDFYSIHVTKESTHPVKPLAQIAGNRYASHPVGKALSDACMGTIASFLSKYQDIIIEHQKVVKGNQKRLESLRELAGKENLEYPSVTLPPQPHTKEGVDAYNEVIARVRMWVNLNLWQKLKLSRDDAKPLLRLKGFPSFPLVERQANEVDWWDMVCNVKKLINEKKEDGKVFWQNLAGYKRQEALRPYLSSEEDRKKGKKFARYQLGDLLLHLEKKHGEDWGKVYDEAWERIDKKVEGLSKHIKLEEERRSEDAQSKAALTDWLRAKASFVIEGLKEADKDEFCRCELKLQKWYGDLRGKPFAIEAENSILDISGFSKQYNCAFIWQKDGVKKLNLYLIINYFKGGKLRFKKIKPEAFEANRFYTVINKKSGEIVPMEVNFNFDDPNLIILPLAFGKRQGREFIWNDLLSLETGSLKLANGRVIEKTLYNRRTRQDEPALFVALTFERREVLDSSNIKPMNLIGVDRGENIPAVIALTDPEGCPLSRFKDSLGNPTHILRIGESYKEKQRTIQAKKEVEQRRAGGYSRKYASKAKNLADDMVRNTARDLLYYAVTQDAMLIFENLSRGFGRQGKRTFMAERQYTRMEDWLTAKLAYEGLPSKTYLSKTLAQYTSKTCSNCGFTITSADYDRVLEKLKKTATGWMTTINGKELKVEGQITYYNRYKRQNVVKDLSVELDRLSEESVNNDISSWTKGRSGEALSLLKKRFSHRPVQEKFVCLNCGFETHADEQAALNIARSWLFLRSQEYKKYQTNKTTGNTDKRAFVETWQSFYRKKLKEVWKPAV

SEQ ID NO: 31569 - protein, 979 aa, synthetic construct
  REGION 1..979: note = engineered CasX variant
QEIGKRINKIRRRLVKDSNTKKAGKTGPMKTLLVRVMTPDLRERLENLRKKPENIPQPISNTSRANLNKLLTDYTEMKKAILHVYWEEFQKDPVGLMSRVAQPASKKIDQNKLKPEMDEKGNLTTAGFACSQCGQPLFVYKLEQVSEKGKAYTNYFGRCNVAEHEKLIKLAQLKPEKDSDEAVTYSLGKFGQRALDFYSIHVTKESTHPVKPLAQIAGNRYASTPVGKALSDACMGTIASFLSKYQDIIIEHQKVVKGNQKRLESLRELAGKENLEYPSVTLPPQPHTKEGVDAYNEVIARVRMWVNLNLWQKLKLSRDDAKPLLRLKGFPSFPLVERQANEVDWWDMVCNVKKLINEKKEDGKVFWQNLAGYKRQEALRPYLSSEEDRKKGKKFARYQLGDLLLHLEKKHGEDWGKVYDEAWERIDKKVEGLSKHIKLEEERRSEDAQSKAALTDWLRAKASFVIEGLKEADKDEFCRCELKLQKWYGDLRGKPFAIEAENSILDISGFSKQYNCAFIWQKDGVKKLNLYLIINYFKGGKLRFKKIKPEAFEANRFYTVINKKSGEIVPMEVNFNFDDPNLIILPLAFGKRQGREFIWNDLLSLETGSLKLANGRVIEKTLYNRRTRQDEPALFVALTFERREVLDSSNIKPMNLIGVDRGENIPAVIALTDPEGCPLSRFKDSLGNPTHILRIGESYKEKQRTIQAKKEVEQRRAGGYSRKYASKAKNLADDMVRNTARDLLYYAVTQDAMLIFENLSRGFGRQGKRTFMAERQYTRMEDWLTAKLAYEGLPSKTYLSKTLAQYTSKTCSNCGFTITSADYDRVLEKLKKTATGWMTTINGKELKVEGQITYYNRYKRQNVVKDLSVELDRLSEESVNNDISSWTKGRSGEALSLLKKRFSHRPVQEKFVCLNCGFETHADEQAALNIARSWLFLRSQEYKKYQTNKTTGNTDKRAFVETWQSFYRKKLKEVWKPAV

SEQ ID NO: 31570 - protein, 979 aa, synthetic construct
  REGION 1..979: note = engineered CasX variant
QEIGKRINKIRRRLVKDSNTKKAGKTGPMKTLLVRVMTPDLRERLENLRKKPENIPQPISNTSRANLNKLLTDYTEMKKAILHVYWEEFQKDPVGLMSRVAQPASKKIDQNKLKPEMDEKGNLTTAGFACSQCGQPLFVYKLEQVSEKGKAYTNYFGRCNVAEHEKLIKLAQLKPEKDSDEAVTYSLGKFGQRALDFYSIHVTKESTHPVKPLAQIAGNRYASAPVGKALSDACMGTIASFLSKYQDIIIEHQKVVKGNQKRLESLRELAGKENLEYPSVTLPPQPHTKEGVDAYNEVIARVRMWVNLNLWQKLKLSRDDAKPLLRLKGFPSFPLVERQANEVDWWDMVCNVKKLINEKKEDGKVFWQNLAGYKRQEALRPYLSSEEDRKKGKKFARYQLGDLLLHLEKKHGEDWGKVYDEAWERIDKKVEGLSKHIKLEEERRSEDAQSKAALTDWLRAKASFVIEGLKEADKDEFCRCELKLQKWYGDLRGKPFAIEAENSILDISGFSKQYNCAFIWQKDGVKKLNLYLIINYFKGGKLRFKKIKPEAFEANRFYTVINKKSGEIVPMEVNFNFDDPNLIILPLAFGKRQGREFIWNDLLSLETGSLKLANGRVIEKTLYNRRTRQDEPALFVALTFERREVLDSSNIKPMNLIGVDRGENIPAVIALTDPEGCPLSRFKDSLGNPTHILRIGESYKEKQRTIQAKKEVEQRRAGGYSRKYASKAKNLADDMVRNTARDLLYYAVTQDAMLIFENLSRGFGRQGKRTFMAERQYTRMEDWLTAKLAYEGLPSKTYLSKTLAQYTSKTCSNCGFTITSADYDRVLEKLKKTATGWMTTINGKELKVEGQITYYNRYKRQNVVKDLSVELDRLSEESVNNDISSWTKGRSGEALSLLKKRFSHRPVQEKFVCLNCGFETHADEQAALNIARSWLFLRSQEYKKYQTNKTTGNTDKRAFVETWQSFYRKKLKEVWKPAV

SEQ ID NO: 31571 - protein, 979 aa, synthetic construct
  REGION 1..979: note = engineered CasX variant
QEIGKRINKIRRRLVKDSNTKKAGKTGPMKTLLVRVMTPDLRERLENLRKKPENIPQPISNTSRANLNKLLTDYTEMKKAILHVYWEEFQKDPVGLMSRVAQPASKKIDQNKLKPEMDEKGNLTTAGFACSQCGQPLFVYKLEQVSEKGKAYTNYFGRCNVAEHEKLIKLAQLKPEKDSDEAVTYSLGKFGQRALDFYSIHVTKESTHPVKPLAQIAGNRYASVPVGKALSDACMGTIASFLSKYQDIIIEHQKVVKGNQKRLESLRELAGKENLEYPSVTLPPQPHTKEGVDAYNEVIARVRMWVNLNLWQKLKLSRDDAKPLLRLKGFPSFPLVERQANEVDWWDMVCNVKKLINEKKEDGKVFWQNLAGYKRQEALRPYLSSEEDRKKGKKFARYQLGDLLLHLEKKHGEDWGKVYDEAWERIDKKVEGLSKHIKLEEERRSEDAQSKAALTDWLRAKASFVIEGLKEADKDEFCRCELKLQKWYGDLRGKPFAIEAENSILDISGFSKQYNCAFIWQKDGVKKLNLYLIINYFKGGKLRFKKIKPEAFEANRFYTVINKKSGEIVPMEVNFNFDDPNLIILPLAFGKRQGREFIWNDLLSLETGSLKLANGRVIEKTLYNRRTRQDEPALFVALTFERREVLDSSNIKPMNLIGVDRGENIPAVIALTDPEGCPLSRFKDSLGNPTHILRIGESYKEKQRTIQAKKEVEQRRAGGYSRKYASKAKNLADDMVRNTARDLLYYAVTQDAMLIFENLSRGFGRQGKRTFMAERQYTRMEDWLTAKLAYEGLPSKTYLSKTLAQYTSKTCSNCGFTITSADYDRVLEKLKKTATGWMTTINGKELKVEGQITYYNRYKRQNVVKDLSVELDRLSEESVNNDISSWTKGRSGEALSLLKKRFSHRPVQEKFVCLNCGFETHADEQAALNIARSWLFLRSQEYKKYQTNKTTGNTDKRAFVETWQSFYRKKLKEVWKPAV

SEQ ID NO: 31572 - protein, 980 aa, synthetic construct
  REGION 1..980: note = engineered CasX variant
QEIGKRINKIRRRLVKDSNTKKAGKTGPMKTLLVRVMTPDLRERLENLRKKPENIPQPISNTSRANLNKLLTDYTEMKKAILHVYWEEFQKDPVGLMSRVAQPASKKIDQNKLKPEMDEKGNLTTAGFACSQCGQPLFVYKLEQVSEKGKAYTNYFGRCNVAEHEKLIKKLAQLKPEKDSDEAVTYSLGKFGQRALDFYSIHVTKESTHPVKPLAQIAGNRYASGPVGKALSDACMGTIASFLSKYQDIIIEHQKVVKGNQKRLESLRELAGKENLEYPSVTLPPQPHTKEGVDAYNEVIARVRMWVNLNLWQKLKLSRDDAKPLLRLKGFPSFPLVERQANEVDWWDMVCNVKKLINEKKEDGKVFWQNLAGYKRQEALRPYLSSEEDRKKGKKFARYQLGDLLLHLEKKHGEDWGKVYDEAWERIDKKVEGLSKHIKLEEERRSEDAQSKAALTDWLRAKASFVIEGLKEADKDEFCRCELKLQKWYGDLRGKPFAIEAENSILDISGFSKQYNCAFIWQKDGVKKLNLYLIINYFKGGKLRFKKIKPEAFEANRFYTVINKKSGEIVPMEVNFNFDDPNLIILPLAFGKRQGREFIWNDLLSLETGSLKLANGRVIEKTLYNRRTRQDEPALFVALTFERREVLDSSNIKPMNLIGVDRGENIPAVIALTDPEGCPLSRFKDSLGNPTHILRIGESYKEKQRTIQAKKEVEQRRAGGYSRKYASKAKNLADDMVRNTARDLLYYAVTQDAMLIFENLSRGFGRQGKRTFMAERQYTRMEDWLTAKLAYEGLPSKTYLSKTLAQYTSKTCSNCGFTITSADYDRVLEKLKKTATGWMTTINGKELKVEGQITYYNRYKRQNVVKDLSVELDRLSEESVNNDISSWTKGRSGEALSLLKKRFSHRPVQEKFVCLNCGFETHADEQAALNIARSWLFLRSQEYKKYQTNKTTGNTDKRAFVETWQSFYRKKLKEVWKPAV

SEQ ID NO: 31573 - protein, 978 aa, synthetic construct
  REGION 1..978: note = engineered CasX variant
QEIGKRINKIRRRLVKDSNTKKAGKTGPMKTLLVRVMTPDLRERLENLRKKPENIPQPISNTSRANLNKLLTDYTEMKKAILHVYWEEFQKDPVGLMSRVAQPASKKIDQNKLKPEMDEKGNLTTAGFACSQCGQPLFVYKLEQVSEKGKAYTNYFGRCNVAEHEKLIKLAQLKPEKDSDEAVTYSLGKFGQRALDFYSIHVTKESTHPVKPLAQIAGNRYASPVGKALSDACMGTIASFLSKYQDIIIEHQKVVKGNQKRLESLRELAGKENLEYPSVTLPPQPHTKEGVDAYNEVIARVRMWVNLNLWQKLKLSRDDAKPLLRLKGFPSFPLVERQANEVDWWDMVCNVKKLINEKKEDGKVFWQNLAGYKRQEALRPYLSSEEDRKKGKKFARYQLGDLLLHLEKKHGEDWGKVYDEAWERIDKKVEGLSKHIKLEEERRSEDAQSKAALTDWLRAKASFVIEGLKEADKDEFCRCELKLQKWYGDLRGKPFAIEAENSILDISGFSKQYNCAFIWQKDGVKKLNLYLIINYFKGGKLRFKKIKPEAFEANRFYTVINKKSGEIVPMEVNFNFDDPNLIILPLAFGKRQGREFIWNDLLSLETGSLKLANGRVIEKTLYNRRTRQDEPALFVALTFERREVLDSSNIKPMNLIGVDRGENIPAVIALTDPEGCPLSRFKDSLGNPTHILRIGESYKEKQRTIQAKKEVEQRRAGGYSRKYASKAKNLADDMVRNTARDLLYYAVTQDAMLIFENLSRGFGRQGKRTFMAERQYTRMEDWLTAKLAYEGLPSKTYLSKTLAQYTSKTCSNCGFTITSADYDRVLEKLKKTATGWMTTINGKELKVEGQITYYNRYKRQNVVKDLSVELDRLSEESVNNDISSWTKGRSGEALSLLKKRFSHRPVQEKFVCLNCGFETHADEQAALNIARSWLFLRSQEYKKYQTNKTTGNTDKRAFVETWQSFYRKKLKEVWKPAV

SEQ ID NO: 31574 - protein, 979 aa, synthetic construct
  REGION 1..979: note = engineered CasX variant
QEIGKRINKIRRRLVKDSNTKKAGKTGPMKTLLVRVMTPDLRERLENLRKKPENIPQPISNTSRANLNKLLTDYTEMKKAILHVYWEEFQKDPVGLMSRVAQPASKKIDQNKLKPEMDEKGNLTTAGFACSQCGQPLFVYKLEQVSEKGKAYTNYFGRCNVAEHEKLILLYQLKPEKDSDEAVTYSLGKFGQRALDFYSIHVTKESTHPVKPLAQIAGNRYASYPVGKALSDACMGTIASFLSKYQDIIIEHQKVVKGNQKRLESLRELAGKENLEYPSVTLPPQPHTKEGVDAYNEVIARVRMWVNLNLWQKLKLSRDDAKPLLRLKGFPSFPLVERQANEVDWWDMVCNVKKLINEKKEDGKVFWQNLAGYKRQEALRPYLSSEEDRKKGKKFARYQLGDLLLHLEKKHGEDWGKVYDEAWERIDKKVEGLSKHIKLEEERRSEDAQSKAALTDWLRAKASFVIEGLKEADKDEFCRCELKLQKWYGDLRGKPFAIEAENSILDISGFSKQYNCAFIWQKDGVKKLNLYLIINYFKGGKLRFKKIKPEAFEANRFYTVINKKSGEIVPMEVNFNFDDPNLIILPLAFGKRQGREFIWNDLLSLETGSLKLANGRVIEKTLYNRRTRQDEPALFVALTFERREVLDSSNIKPMNLIGVDRGENIPAVIALTDPEGCPLSRFKDSLGNPTHILRIGESYKEKQRTIQAKKEVEQRRAGGYSRKYASKAKNLADDMVRNTARDLLYYAVTQDAMLIFENLSRGFGRQGKRTFMAERQYTRMEDWLTAKLAYEGLPSKTYLSKTLAQYTSKTCSNCGFTITSADYDRVLEKLKKTATGWMTTINGKELKVEGQITYYNRYKRQNVVKDLSVELDRLSEESVNNDISSWTKGRSGEALSLLKKRFSHRPVQEKFVCLNCGFETHADEQAALNIARSWLFLRSQEYKKYQTNKTTGNTDKRAFVETWQSFYRKKLKEVWKPAV

SEQ ID NO: 31575 - protein, 979 aa, synthetic construct
  REGION 1..979: note = engineered CasX variant
QEIGKRINKIRRRLVKDSNTKKAGKTGPMKTLLVRVMTPDLRERLENLRKKPENIPQPISNTSRANLNKLLTDYTEMKKAILHVYWEEFQKDPVGLMSRVAQPASKKIDQNKLKPEMDEKGNLTTAGFACSQCGQPLFVYKLEQVSEKGKAYTNYFGRCNVAEHEKLILLYQLKPEKDSDEAVTYSLGKFGQRALDFYSIHVTKESTHPVKPLAQIAGNRYASHPVGKALSDACMGTIASFLSKYQDIIIEHQKVVKGNQKRLESLRELAGKENLEYPSVTLPPQPHTKEGVDAYNEVIARVRMWVNLNLWQKLKLSRDDAKPLLRLKGFPSFPLVERQANEVDWWDMVCNVKKLINEKKEDGKVFWQNLAGYKRQEALRPYLSSEEDRKKGKKFARYQLGDLLLHLEKKHGEDWGKVYDEAWERIDKKVEGLSKHIKLEEERRSEDAQSKAALTDWLRAKASFVIEGLKEADKDEFCRCELKLQKWYGDLRGKPFAIEAENSILDISGFSKQYNCAFIWQKDGVKKLNLYLIINYFKGGKLRFKKIKPEAFEANRFYTVINKKSGEIVPMEVNFNFDDPNLIILPLAFGKRQGREFIWNDLLSLETGSLKLANGRVIEKTLYNRRTRQDEPALFVALTFERREVLDSSNIKPMNLIGVDRGENIPAVIALTDPEGCPLSRFKDSLGNPTHILRIGESYKEKQRTIQAKKEVEQRRAGGYSRKYASKAKNLADDMVRNTARDLLYYAVTQDAMLIFENLSRGFGRQGKRTFMAERQYTRMEDWLTAKLAYEGLPSKTYLSKTLAQYTSKTCSNCGFTITSADYDRVLEKLKKTATGWMTTINGKELKVEGQITYYNRYKRQNVVKDLSVELDRLSEESVNNDISSWTKGRSGEALSLLKKRFSHRPVQEKFVCLNCGFETHADEQAALNIARSWLFLRSQEYKKYQTNKTTGNTDKRAFVETWQSFYRKKLKEVWKPAV

SEQ ID NO: 31576 - protein, 979 aa, synthetic construct
  REGION 1..979: note = engineered CasX variant
QEIGKRINKIRRRLVKDSNTKKAGKTGPMKTLLVRVMTPDLRERLENLRKKPENIPQPISNTSRANLNKLLTDYTEMKKAILHVYWEEFQKDPVGLMSRVAQPASKKIDQNKLKPEMDEKGNLTTAGFACSQCGQPLFVYKLEQVSEKGKAYTNYFGRCNVAEHEKLILLYQLKPEKDSDEAVTYSLGKFGQRALDFYSIHVTKESTHPVKPLAQIAGNRYASSPVGKALSDACMGTIASFLSKYQDIIIEHQKVVKGNQKRLESLRELAGKENLEYPSVTLPPQPHTKEGVDAYNEVIARVRMWVNLNLWQKLKLSRDDAKPLLRLKGFPSFPLVERQANEVDWWDMVCNVKKLINEKKEDGKVFWQNLAGYKRQEALRPYLSSEEDRKKGKKFARYQLGDLLLHLEKKHGEDWGKVYDEAWERIDKKVEGLSKHIKLEEERRSEDAQSKAALTDWLRAKASFVIEGLKEADKDEFCRCELKLQKWYGDLRGKPFAIEAENSILDISGFSKQYNCAFIWQKDGVKKLNLYLIINYFKGGKLRFKKIKPEAFEANRFYTVINKKSGEIVPMEVNFNFDDPNLIILPLAFGKRQGREFIWNDLLSLETGSLKLANGRVIEKTLYNRRTRQDEPALFVALTFERREVLDSSNIKPMNLIGVDRGENIPAVIALTDPEGCPLSRFKDSLGNPTHILRIGESYKEKQRTIQAKKEVEQRRAGGYSRKYASKAKNLADDMVRNTARDLLYYAVTQDAMLIFENLSRGFGRQGKRTFMAERQYTRMEDWLTAKLAYEGLPSKTYLSKTLAQYTSKTCSNCGFTITSADYDRVLEKLKKTATGWMTTINGKELKVEGQITYYNRYKRQNVVKDLSVELDRLSEESVNNDISSWTKGRSGEALSLLKKRFSHRPVQEKFVCLNCGFETHADEQAALNIARSWLFLRSQEYKKYQTNKTTGNTDKRAFVETWQSFYRKKLKEVWKPAV

SEQ ID NO: 31577 - protein, 979 aa, synthetic construct
  REGION 1..979: note = engineered CasX variant
QEIGKRINKIRRRLVKDSNTKKAGKTGPMKTLLVRVMTPDLRERLENLRKKPENIPQPISNTSRANLNKLLTDYTEMKKAILHVYWEEFQKDPVGLMSRVAQPASKKIDQNKLKPEMDEKGNLTTAGFACSQCGQPLFVYKLEQVSEKGKAYTNYFGRCNVAEHEKLILLYQLKPEKDSDEAVTYSLGKFGQRALDFYSIHVTKESTHPVKPLAQIAGNRYASTPVGKALSDACMGTIASFLSKYQDIIIEHQKVVKGNQKRLESLRELAGKENLEYPSVTLPPQPHTKEGVDAYNEVIARVRMWVNLNLWQKLKLSRDDAKPLLRLKGFPSFPLVERQANEVDWWDMVCNVKKLINEKKEDGKVFWQNLAGYKRQEALRPYLSSEEDRKKGKKFARYQLGDLLLHLEKKHGEDWGKVYDEAWERIDKKVEGLSKHIKLEEERRSEDAQSKAALTDWLRAKASFVIEGLKEADKDEFCRCELKLQKWYGDLRGKPFAIEAENSILDISGFSKQYNCAFIWQKDGVKKLNLYLIINYFKGGKLRFKKIKPEAFEANRFYTVINKKSGEIVPMEVNFNFDDPNLIILPLAFGKRQGREFIWNDLLSLETGSLKLANGRVIEKTLYNRRTRQDEPALFVALTFERREVLDSSNIKPMNLIGVDRGENIPAVIALTDPEGCPLSRFKDSLGNPTHILRIGESYKEKQRTIQAKKEVEQRRAGGYSRKYASKAKNLADDMVRNTARDLLYYAVTQDAMLIFENLSRGFGRQGKRTFMAERQYTRMEDWLTAKLAYEGLPSKTYLSKTLAQYTSKTCSNCGFTITSADYDRVLEKLKKTATGWMTTINGKELKVEGQITYYNRYKRQNVVKDLSVELDRLSEESVNNDISSWTKGRSGEALSLLKKRFSHRPVQEKFVCLNCGFETHADEQAALNIARSWLFLRSQEYKKYQTNKTTGNTDKRAFVETWQSFYRKKLKEVWKPAV

SEQ ID NO: 31578 - protein, 979 aa, synthetic construct
  REGION 1..979: note = engineered CasX variant
QEIGKRINKIRRRLVKDSNTKKAGKTGPMKTLLVRVMTPDLRERLENLRKKPENIPQPISNTSRANLNKLLTDYTEMKKAILHVYWEEFQKDPVGLMSRVAQPASKKIDQNKLKPEMDEKGNLTTAGFACSQCGQPLFVYKLEQVSEKGKAYTNYFGRCNVAEHEKLILLYQLKPEKDSDEAVTYSLGKFGQRALDFYSIHVTKESTHPVKPLAQIAGNRYASAPVGKALSDACMGTIASFLSKYQDIIIEHQKVVKGNQKRLESLRELAGKENLEYPSVTLPPQPHTKEGVDAYNEVIARVRMWVNLNLWQKLKLSRDDAKPLLRLKGFPSFPLVERQANEVDWWDMVCNVKKLINEKKEDGKVFWQNLAGYKRQEALRPYLSSEEDRKKGKKFARYQLGDLLLHLEKKHGEDWGKVYDEAWERIDKKVEGLSKHIKLEEERRSEDAQSKAALTDWLRAKASFVIEGLKEADKDEFCRCELKLQKWYGDLRGKPFAIEAENSILDISGFSKQYNCAFIWQKDGVKKLNLYLIINYFKGGKLRFKKIKPEAFEANRFYTVINKKSGEIVPMEVNFNFDDPNLIILPLAFGKRQGREFIWNDLLSLETGSLKLANGRVIEKTLYNRRTRQDEPALFVALTFERREVLDSSNIKPMNLIGVDRGENIPAVIALTDPEGCPLSRFKDSLGNPTHILRIGESYKEKQRTIQAKKEVEQRRAGGYSRKYASKAKNLADDMVRNTARDLLYYAVTQDAMLIFENLSRGFGRQGKRTFMAERQYTRMEDWLTAKLAYEGLPSKTYLSKTLAQYTSKTCSNCGFTITSADYDRVLEKLKKTATGWMTTINGKELKVEGQITYYNRYKRQNVVKDLSVELDRLSEESVNNDISSWTKGRSGEALSLLKKRFSHRPVQEKFVCLNCGFETHADEQAALNIARSWLFLRSQEYKKYQTNKTTGNTDKRAFVETWQSFYRKKLKEVWKPAV

SEQ ID NO: 31579 - protein, 979 aa, synthetic construct
  REGION 1..979: note = engineered CasX variant
QEIGKRINKIRRRLVKDSNTKKAGKTGPMKTLLVRVMTPDLRERLENLRKKPENIPQPISNTSRANLNKLLTDYTEMKKAILHVYWEEFQKDPVGLMSRVAQPASKKIDQNKLKPEMDEKGNLTTAGFACSQCGQPLFVYKLEQVSEKGKAYTNYFGRCNVAEHEKLILLYQLKPEKDSDEAVTYSLGKFGQRALDFYSIHVTKESTHPVKPLAQIAGNRYASVPVGKALSDACMGTIASFLSKYQDIIIEHQKVVKGNQKRLESLRELAGKENLEYPSVTLPPQPHTKEGVDAYNEVIARVRMWVNLNLWQKLKLSRDDAKPLLRLKGFPSFPLVERQANEVDWWDMVCNVKKLINEKKEDGKVFWQNLAGYKRQEALRPYLSSEEDRKKGKKFARYQLGDLLLHLEKKHGEDWGKVYDEAWERIDKKVEGLSKHIKLEEERRSEDAQSKAALTDWLRAKASFVIEGLKEADKDEFCRCELKLQKWYGDLRGKPFAIEAENSILDISGFSKQYNCAFIWQKDGVKKLNLYLIINYFKGGKLRFKKIKPEAFEANRFYTVINKKSGEIVPMEVNFNFDDPNLIILPLAFGKRQGREFIWNDLLSLETGSLKLANGRVIEKTLYNRRTRQDEPALFVALTFERREVLDSSNIKPMNLIGVDRGENIPAVIALTDPEGCPLSRFKDSLGNPTHILRIGESYKEKQRTIQAKKEVEQRRAGGYSRKYASKAKNLADDMVRNTARDLLYYAVTQDAMLIFENLSRGFGRQGKRTFMAERQYTRMEDWLTAKLAYEGLPSKTYLSKTLAQYTSKTCSNCGFTITSADYDRVLEKLKKTATGWMTTINGKELKVEGQITYYNRYKRQNVVKDLSVELDRLSEESVNNDISSWTKGRSGEALSLLKKRFSHRPVQEKFVCLNCGFETHADEQAALNIARSWLFLRSQEYKKYQTNKTTGNTDKRAFVETWQSFYRKKLKEVWKPAV

SEQ ID NO: 31580 - protein, 979 aa, synthetic construct
  REGION 1..979: note = engineered CasX variant
QEIGKRINKIRRRLVKDSNTKKAGKTGPMKTLLVRVMTPDLRERLENLRKKPENIPQPISNTSRANLNKLLTDYTEMKKAILHVYWEEFQKDPVGLMSRVAQPASKKIDQNKLKPEMDEKGNLTTAGFACSQCGQPLFVYKLEQVSEKGKAYTNYFGRCNVAEHEKLIKLYQLKPEKDSDEAVTYSLGKFGQRALDFYSIHVTKESTHPVKPLAQIAGNRYASGPVGKALSDACMGTIASFLSKYQDIIIEHQKVVKGNQKRLESLRELAGKENLEYPSVTLPPQPHTKEGVDAYNEVIARVRMWVNLNLWQKLKLSRDDAKPLLRLKGFPSFPLVERQANEVDWWDMVCNVKKLINEKKEDGKVFWQNLAGYKRQEALRPYLSSEEDRKKGKKFARYQLGDLLLHLEKKHGEDWGKVYDEAWERIDKKVEGLSKHIKLEEERRSEDAQSKAALTDWLRAKASFVIEGLKEADKDEFCRCELKLQKWYGDLRGKPFAIEAENSILDISGFSKQYNCAFIWQKDGVKKLNLYLIINYFKGGKLRFKKIKPEAFEANRFYTVINKKSGEIVPMEVNFNFDDPNLIILPLAFGKRQGREFIWNDLLSLETGSLKLANGRVIEKTLYNRRTRQDEPALFVALTFERREVLDSSNIKPMNLIGVDRGENIPAVIALTDPEGCPLSRFKDSLGNPTHILRIGESYKEKQRTIQAKKEVEQRRAGGYSRKYASKAKNLADDMVRNTARDLLYYAVTQDAMLIFENLSRGFGRQGKRTFMAERQYTRMEDWLTAKLAYEGLPSKTYLSKTLAQYTSKTCSNCGFTITSADYDRVLEKLKKTATGWMTTINGKELKVEGQITYYNRYKRQNVVKDLSVELDRLSEESVNNDISSWTKGRSGEALSLLKKRFSHRPVQEKFVCLNCGFETHADEQAALNIARSWLFLRSQEYKKYQTNKTTGNTDKRAFVETWQSFYRKKLKEVWKPAV

SEQ ID NO: 31581 - protein, 978 aa, synthetic construct
  REGION 1..978: note = engineered CasX variant
QEIGKRINKIRRRLVKDSNTKKAGKTGPMKTLLVRVMTPDLRERLENLRKKPENIPQPISNTSRANLNKLLTDYTEMKKAILHVYWEEFQKDPVGLMSRVAQPASKKIDQNKLKPEMDEKGNLTTAGFACSQCGQPLFVYKLEQVSEKGKAYTNYFGRCNVAEHEKLILLYQLKPEKDSDEAVTYSLGKFGQRALDFYSIHVTKESTHPVKPLAQIAGNRYASPVGKALSDACMGTIASFLSKYQDIIIEHQKVVKGNQKRLESLRELAGKENLEYPSVTLPPQPHTKEGVDAYNEVIARVRMWVNLNLWQKLKLSRDDAKPLLRLKGFPSFPLVERQANEVDWWDMVCNVKKLINEKKEDGKVFWQNLAGYKRQEALRPYLSSEEDRKKGKKFARYQLGDLLLHLEKKHGEDWGKVYDEAWERIDKKVEGLSKHIKLEEERRSEDAQSKAALTDWLRAKASFVIEGLKEADKDEFCRCELKLQKWYGDLRGKPFAIEAENSILDISGFSKQYNCAFIWQKDGVKKLNLYLIINYFKGGKLRFKKIKPEAFEANRFYTVINKKSGEIVPMEVNFNFDDPNLIILPLAFGKRQGREFIWNDLLSLETGSLKLANGRVIEKTLYNRRTRQDEPALFVALTFERREVLDSSNIKPMNLIGVDRGENIPAVIALTDPEGCPLSRFKDSLGNPTHILRIGESYKEKQRTIQAKKEVEQRRAGGYSRKYASKAKNLADDMVRNTARDLLYYAVTQDAMLIFENLSRGFGRQGKRTFMAERQYTRMEDWLTAKLAYEGLPSKTYLSKTLAQYTSKTCSNCGFTITSADYDRVLEKLKKTATGWMTTINGKELKVEGQITYYNRYKRQNVVKDLSVELDRLSEESVNNDISSWTKGRSGEALSLLKKRFSHRPVQEKFVCLNCGFETHADEQAALNIARSWLFLRSQEYKKYQTNKTTGNTDKRAFVETWQSFYRKKLKEVWKPAV

SEQ ID NO: 31582 - protein, 979 aa, synthetic construct
  REGION 1..979: note = engineered CasX variant
QEIGKRINKIRRRLVKDSNTKKAGKTGPMKTLLVRVMTPDLRERLENLRKKPENIPQPISNTSRANLNKLLTDYTEMKKAILHVYWEEFQKDPVGLMSRVAQPASKKIDQNKLKPEMDEKGNLTTAGFACSQCGQPLFVYKLEQVSEKGKAYTNYFGRCNVAEHEKLILLSQLKPEKDSDEAVTYSLGKFGQRALDFYSIHVTKESTHPVKPLAQIAGNRYASYPVGKALSDACMGTIASFLSKYQDIIIEHQKVVKGNQKRLESLRELAGKENLEYPSVTLPPQPHTKEGVDAYNEVIARVRMWVNLNLWQKLKLSRDDAKPLLRLKGFPSFPLVERQANEVDWWDMVCNVKKLINEKKEDGKVFWQNLAGYKRQEALRPYLSSEEDRKKGKKFARYQLGDLLLHLEKKHGEDWGKVYDEAWERIDKKVEGLSKHIKLEEERRSEDAQSKAALTDWLRAKASFVIEGLKEADKDEFCRCELKLQKWYGDLRGKPFAIEAENSILDISGFSKQYNCAFIWQKDGVKKLNLYLIINYFKGGKLRFKKIKPEAFEANRFYTVINKKSGEIVPMEVNFNFDDPNLIILPLAFGKRQGREFIWNDLLSLETGSLKLANGRVIEKTLYNRRTRQDEPALFVALTFERREVLDSSNIKPMNLIGVDRGENIPAVIALTDPEGCPLSRFKDSLGNPTHILRIGESYKEKQRTIQAKKEVEQRRAGGYSRKYASKAKNLADDMVRNTARDLLYYAVTQDAMLIFENLSRGFGRQGKRTFMAERQYTRMEDWLTAKLAYEGLPSKTYLSKTLAQYTSKTCSNCGFTITSADYDRVLEKLKKTATGWMTTINGKELKVEGQITYYNRYKRQNVVKDLSVELDRLSEESVNNDISSWTKGRSGEALSLLKKRFSHRPVQEKFVCLNCGFETHADEQAALNIARSWLFLRSQEYKKYQTNKTTGNTDKRAFVETWQSFYRKKLKEVWKPAV

SEQ ID NO: 31583 - protein, 979 aa, synthetic construct
  REGION 1..979: note = engineered CasX variant
QEIGKRINKIRRRLVKDSNTKKAGKTGPMKTLLVRVMTPDLRERLENLRKKPENIPQPISNTSRANLNKLLTDYTEMKKAILHVYWEEFQKDPVGLMSRVAQPASKKIDQNKLKPEMDEKGNLTTAGFACSQCGQPLFVYKLEQVSEKGKAYTNYFGRCNVAEHEKLILLSQLKPEKDSDEAVTYSLGKFGQRALDFYSIHVTKESTHPVKPLAQIAGNRYASHPVGKALSDACMGTIASFLSKYQDIIIEHQKVVKGNQKRLESLRELAGKENLEYPSVTLPPQPHTKEGVDAYNEVIARVRMWVNLNLWQKLKLSRDDAKPLLRLKGFPSFPLVERQANEVDWWDMVCNVKKLINEKKEDGKVFWQNLAGYKRQEALRPYLSSEEDRKKGKKFARYQLGDLLLHLEKKHGEDWGKVYDEAWERIDKKVEGLSKHIKLEEERRSEDAQSKAALTDWLRAKASFVIEGLKEADKDEFCRCELKLQKWYGDLRGKPFAIEAENSILDISGFSKQYNCAFIWQKDGVKKLNLYLIINYFKGGKLRFKKIKPEAFEANRFYTVINKKSGEIVPMEVNFNFDDPNLIILPLAFGKRQGREFIWNDLLSLETGSLKLANGRVIEKTLYNRRTRQDEPALFVALTFERREVLDSSNIKPMNLIGVDRGENIPAVIALTDPEGCPLSRFKDSLGNPTHILRIGESYKEKQRTIQAKKEVEQRRAGGYSRKYASKAKNLADDMVRNTARDLLYYAVTQDAMLIFENLSRGFGRQGKRTFMAERQYTRMEDWLTAKLAYEGLPSKTYLSKTLAQYTSKTCSNCGFTITSADYDRVLEKLKKTATGWMTTINGKELKVEGQITYYNRYKRQNVVKDLSVELDRLSEESVNNDISSWTKGRSGEALSLLKKRFSHRPVQEKFVCLNCGFETHADEQAALNIARSWLFLRSQEYKKYQTNKTTGNTDKRAFVETWQSFYRKKLKEVWKPAV

SEQ ID NO: 31584 - protein, 979 aa, synthetic construct
  REGION 1..979: note = engineered CasX variant
QEIGKRINKIRRRLVKDSNTKKAGKTGPMKTLLVRVMTPDLRERLENLRKKPENIPQPISNTSRANLNKLLTDYTEMKKAILHVYWEEFQKDPVGLMSRVAQPASKKIDQNKLKPEMDEKGNLTTAGFACSQCGQPLFVYKLEQVSEKGKAYTNYFGRCNVAEHEKLILLSQLKPEKDSDEAVTYSLGKFGQRALDFYSIHVTKESTHPVKPLAQIAGNRYASSPVGKALSDACMGTIASFLSKYQDIIIEHQKVVKGNQKRLESLRELAGKENLEYPSVTLPPQPHTKEGVDAYNEVIARVRMWVNLNLWQKLKLSRDDAKPLLRLKGFPSFPLVERQANEVDWWDMVCNVKKLINEKKEDGKVFWQNLAGYKRQEALRPYLSSEEDRKKGKKFARYQLGDLLLHLEKKHGEDWGKVYDEAWERIDKKVEGLSKHIKLEEERRSEDAQSKAALTDWLRAKASFVIEGLKEADKDEFCRCELKLQKWYGDLRGKPFAIEAENSILDISGFSKQYNCAFIWQKDGVKKLNLYLIINYFKGGKLRFKKIKPEAFEANRFYTVINKKSGEIVPMEVNFNFDDPNLIILPLAFGKRQGREFIWNDLLSLETGSLKLANGRVIEKTLYNRRTRQDEPALFVALTFERREVLDSSNIKPMNLIGVDRGENIPAVIALTDPEGCPLSRFKDSLGNPTHILRIGESYKEKQRTIQAKKEVEQRRAGGYSRKYASKAKNLADDMVRNTARDLLYYAVTQDAMLIFENLSRGFGRQGKRTFMAERQYTRMEDWLTAKLAYEGLPSKTYLSKTLAQYTSKTCSNCGFTITSADYDRVLEKLKKTATGWMTTINGKELKVEGQITYYNRYKRQNVVKDLSVELDRLSEESVNNDISSWTKGRSGEALSLLKKRFSHRPVQEKFVCLNCGFETHADEQAALNIARSWLFLRSQEYKKYQTNKTTGNTDKRAFVETWQSFYRKKLKEVWKPAV

SEQ ID NO: 31585 - protein, 979 aa, synthetic construct
  REGION 1..979: note = engineered CasX variant
QEIGKRINKIRRRLVKDSNTKKAGKTGPMKTLLVRVMTPDLRERLENLRKKPENIPQPISNTSRANLNKLLTDYTEMKKAILHVYWEEFQKDPVGLMSRVAQPASKKIDQNKLKPEMDEKGNLTTAGFACSQCGQPLFVYKLEQVSEKGKAYTNYFGRCNVAEHEKLILLSQLKPEKDSDEAVTYSLGKFGQRALDFYSIHVTKESTHPVKPLAQIAGNRYASTPVGKALSDACMGTIASFLSKYQDIIIEHQKVVKGNQKRLESLRELAGKENLEYPSVTLPPQPHTKEGVDAYNEVIARVRMWVNLNLWQKLKLSRDDAKPLLRLKGFPSFPLVERQANEVDWWDMVCNVKKLINEKKEDGKVFWQNLAGYKRQEALRPYLSSEEDRKKGKKFARYQLGDLLLHLEKKHGEDWGKVYDEAWERIDKKVEGLSKHIKLEEERRSEDAQSKAALTDWLRAKASFVIEGLKEADKDEFCRCELKLQKWYGDLRGKPFAIEAENSILDISGFSKQYNCAFIWQKDGVKKLNLYLIINYFKGGKLRFKKIKPEAFEANRFYTVINKKSGEIVPMEVNFNFDDPNLIILPLAFGKRQGREFIWNDLLSLETGSLKLANGRVIEKTLYNRRTRQDEPALFVALTFERREVLDSSNIKPMNLIGVDRGENIPAVIALTDPEGCPLSRFKDSLGNPTHILRIGESYKEKQRTIQAKKEVEQRRAGGYSRKYASKAKNLADDMVRNTARDLLYYAVTQDAMLIFENLSRGFGRQGKRTFMAERQYTRMEDWLTAKLAYEGLPSKTYLSKTLAQYTSKTCSNCGFTITSADYDRVLEKLKKTATGWMTTINGKELKVEGQITYYNRYKRQNVVKDLSVELDRLSEESVNNDISSWTKGRSGEALSLLKKRFSHRPVQEKFVCLNCGFETHADEQAALNIARSWLFLRSQEYKKYQTNKTTGNTDKRAFVETWQSFYRKKLKEVWKPAV

SEQ ID NO: 31586 - protein, 979 aa, synthetic construct
  REGION 1..979: note = engineered CasX variant
QEIGKRINKIRRRLVKDSNTKKAGKTGPMKTLLVRVMTPDLRERLENLRKKPENIPQPISNTSRANLNKLLTDYTEMKKAILHVYWEEFQKDPVGLMSRVAQPASKKIDQNKLKPEMDEKGNLTTAGFACSQCGQPLFVYKLEQVSEKGKAYTNYFGRCNVAEHEKLILLSQLKPEKDSDEAVTYSLGKFGQRALDFYSIHVTKESTHPVKPLAQIAGNRYASAPVGKALSDACMGTIASFLSKYQDIIIEHQKVVKGNQKRLESLRELAGKENLEYPSVTLPPQPHTKEGVDAYNEVIARVRMWVNLNLWQKLKLSRDDAKPLLRLKGFPSFPLVERQANEVDWWDMVCNVKKLINEKKEDGKVFWQNLAGYKRQEALRPYLSSEEDRKKGKKFARYQLGDLLLHLEKKHGEDWGKVYDEAWERIDKKVEGLSKHIKLEEERRSEDAQSKAALTDWLRAKASFVIEGLKEADKDEFCRCELKLQKWYGDLRGKPFAIEAENSILDISGFSKQYNCAFIWQKDGVKKLNLYLIINYFKGGKLRFKKIKPEAFEANRFYTVINKKSGEIVPMEVNFNFDDPNLIILPLAFGKRQGREFIWNDLLSLETGSLKLANGRVIEKTLYNRRTRQDEPALFVALTFERREVLDSSNIKPMNLIGVDRGENIPAVIALTDPEGCPLSRFKDSLGNPTHILRIGESYKEKQRTIQAKKEVEQRRAGGYSRKYASKAKNLADDMVRNTARDLLYYAVTQDAMLIFENLSRGFGRQGKRTFMAERQYTRMEDWLTAKLAYEGLPSKTYLSKTLAQYTSKTCSNCGFTITSADYDRVLEKLKKTATGWMTTINGKELKVEGQITYYNRYKRQNVVKDLSVELDRLSEESVNNDISSWTKGRSGEALSLLKKRFSHRPVQEKFVCLNCGFETHADEQAALNIARSWLFLRSQEYKKYQTNKTTGNTDKRAFVETWQSFYRKKLKEVWKPAV

SEQ ID NO: 31587 - protein, 979 aa, synthetic construct
  REGION 1..979: note = engineered CasX variant
QEIGKRINKIRRRLVKDSNTKKAGKTGPMKTLLVRVMTPDLRERLENLRKKPENIPQPISNTSRANLNKLLTDYTEMKKAILHVYWEEFQKDPVGLMSRVAQPASKKIDQNKLKPEMDEKGNLTTAGFACSQCGQPLFVYKLEQVSEKGKAYTNYFGRCNVAEHEKLILLSQLKPEKDSDEAVTYSLGKFGQRALDFYSIHVTKESTHPVKPLAQIAGNRYASVPVGKALSDACMGTIASFLSKYQDIIIEHQKVVKGNQKRLESLRELAGKENLEYPSVTLPPQPHTKEGVDAYNEVIARVRMWVNLNLWQKLKLSRDDAKPLLRLKGFPSFPLVERQANEVDWWDMVCNVKKLINEKKEDGKVFWQNLAGYKRQEALRPYLSSEEDRKKGKKFARYQLGDLLLHLEKKHGEDWGKVYDEAWERIDKKVEGLSKHIKLEEERRSEDAQSKAALTDWLRAKASFVIEGLKEADKDEFCRCELKLQKWYGDLRGKPFAIEAENSILDISGFSKQYNCAFIWQKDGVKKLNLYLIINYFKGGKLRFKKIKPEAFEANRFYTVINKKSGEIVPMEVNFNFDDPNLIILPLAFGKRQGREFIWNDLLSLETGSLKLANGRVIEKTLYNRRTRQDEPALFVALTFERREVLDSSNIKPMNLIGVDRGENIPAVIALTDPEGCPLSRFKDSLGNPTHILRIGESYKEKQRTIQAKKEVEQRRAGGYSRKYASKAKNLADDMVRNTARDLLYYAVTQDAMLIFENLSRGFGRQGKRTFMAERQYTRMEDWLTAKLAYEGLPSKTYLSKTLAQYTSKTCSNCGFTITSADYDRVLEKLKKTATGWMTTINGKELKVEGQITYYNRYKRQNVVKDLSVELDRLSEESVNNDISSWTKGRSGEALSLLKKRFSHRPVQEKFVCLNCGFETHADEQAALNIARSWLFLRSQEYKKYQTNKTTGNTDKRAFVETWQSFYRKKLKEVWKPAV

SEQ ID NO: 31588 - protein, 979 aa, synthetic construct
  REGION 1..979: note = engineered CasX variant
QEIGKRINKIRRRLVKDSNTKKAGKTGPMKTLLVRVMTPDLRERLENLRKKPENIPQPISNTSRANLNKLLTDYTEMKKAILHVYWEEFQKDPVGLMSRVAQPASKKIDQNKLKPEMDEKGNLTTAGFACSQCGQPLFVYKLEQVSEKGKAYTNYFGRCNVAEHEKLIKLSQLKPEKDSDEAVTYSLGKFGQRALDFYSIHVTKESTHPVKPLAQIAGNRYASGPVGKALSDACMGTIASFLSKYQDIIIEHQKVVKGNQKRLESLRELAGKENLEYPSVTLPPQPHTKEGVDAYNEVIARVRMWVNLNLWQKLKLSRDDAKPLLRLKGFPSFPLVERQANEVDWWDMVCNVKKLINEKKEDGKVFWQNLAGYKRQEALRPYLSSEEDRKKGKKFARYQLGDLLLHLEKKHGEDWGKVYDEAWERIDKKVEGLSKHIKLEEERRSEDAQSKAALTDWLRAKASFVIEGLKEADKDEFCRCELKLQKWYGDLRGKPFAIEAENSILDISGFSKQYNCAFIWQKDGVKKLNLYLIINYFKGGKLRFKKIKPEAFEANRFYTVINKKSGEIVPMEVNFNFDDPNLIILPLAFGKRQGREFIWNDLLSLETGSLKLANGRVIEKTLYNRRTRQDEPALFVALTFERREVLDSSNIKPMNLIGVDRGENIPAVIALTDPEGCPLSRFKDSLGNPTHILRIGESYKEKQRTIQAKKEVEQRRAGGYSRKYASKAKNLADDMVRNTARDLLYYAVTQDAMLIFENLSRGFGRQGKRTFMAERQYTRMEDWLTAKLAYEGLPSKTYLSKTLAQYTSKTCSNCGFTITSADYDRVLEKLKKTATGWMTTINGKELKVEGQITYYNRYKRQNVVKDLSVELDRLSEESVNNDISSWTKGRSGEALSLLKKRFSHRPVQEKFVCLNCGFETHADEQAALNIARSWLFLRSQEYKKYQTNKTTGNTDKRAFVETWQSFYRKKLKEVWKPAV

SEQ ID NO: 31589 - protein, 978 aa, synthetic construct
  REGION 1..978: note = engineered CasX variant
QEIGKRINKIRRRLVKDSNTKKAGKTGPMKTLLVRVMTPDLRERLENLRKKPENIPQPISNTSRANLNKLLTDYTEMKKAILHVYWEEFQKDPVGLMSRVAQPASKKIDQNKLKPEMDEKGNLTTAGFACSQCGQPLFVYKLEQVSEKGKAYTNYFGRCNVAEHEKLILLSQLKPEKDSDEAVTYSLGKFGQRALDFYSIHVTKESTHPVKPLAQIAGNRYASPVGKALSDACMGTIASFLSKYQDIIIEHQKVVKGNQKRLESLRELAGKENLEYPSVTLPPQPHTKEGVDAYNEVIARVRMWVNLNLWQKLKLSRDDAKPLLRLKGFPSFPLVERQANEVDWWDMVCNVKKLINEKKEDGKVFWQNLAGYKRQEALRPYLSSEEDRKKGKKFARYQLGDLLLHLEKKHGEDWGKVYDEAWERIDKKVEGLSKHIKLEEERRSEDAQSKAALTDWLRAKASFVIEGLKEADKDEFCRCELKLQKWYGDLRGKPFAIEAENSILDISGFSKQYNCAFIWQKDGVKKLNLYLIINYFKGGKLRFKKIKPEAFEANRFYTVINKKSGEIVPMEVNFNFDDPNLIILPLAFGKRQGREFIWNDLLSLETGSLKLANGRVIEKTLYNRRTRQDEPALFVALTFERREVLDSSNIKPMNLIGVDRGENIPAVIALTDPEGCPLSRFKDSLGNPTHILRIGESYKEKQRTIQAKKEVEQRRAGGYSRKYASKAKNLADDMVRNTARDLLYYAVTQDAMLIFENLSRGFGRQGKRTFMAERQYTRMEDWLTAKLAYEGLPSKTYLSKTLAQYTSKTCSNCGFTITSADYDRVLEKLKKTATGWMTTINGKELKVEGQITYYNRYKRQNVVKDLSVELDRLSEESVNNDISSWTKGRSGEALSLLKKRFSHRPVQEKFVCLNCGFETHADEQAALNIARSWLFLRSQEYKKYQTNKTTGNTDKRAFVETWQSFYRKKLKEVWKPAV

SEQ ID NO: 31590 - protein, 979 aa, synthetic construct
  REGION 1..979: note = engineered CasX variant
QEIGKRINKIRRRLVKDSNTKKAGKTGPMKTLLVRVMTPDLRERLENLRKKPENIPQPISNTSRANLNKLLTDYTEMKKAILHVYWEEFQKDPVGLMSRVAQPASKKIDQNKLKPEMDEKGNLTTAGFACSQCGQPLFVYKLEQVSEKGKAYTNYFGRCNVAEHEKLILLAQLKPEKDSDEAVTYSLGKFGQRALDFYSIHVTKESTHPVKPLAQIAGNRYASYPVGKALSDACMGTIASFLSKYQDIIIEHQKVVKGNQKRLESLRELAGKENLEYPSVTLPPQPHTKEGVDAYNEVIARVRMWVNLNLWQKLKLSRDDAKPLLRLKGFPSFPLVERQANEVDWWDMVCNVKKLINEKKEDGKVFWQNLAGYKRQEALRPYLSSEEDRKKGKKFARYQLGDLLLHLEKKHGEDWGKVYDEAWERIDKKVEGLSKHIKLEEERRSEDAQSKAALTDWLRAKASFVIEGLKEADKDEFCRCELKLQKWYGDLRGKPFAIEAENSILDISGFSKQYNCAFIWQKDGVKKLNLYLIINYFKGGKLRFKKIKPEAFEANRFYTVINKKSGEIVPMEVNFNFDDPNLIILPLAFGKRQGREFIWNDLLSLETGSLKLANGRVIEKTLYNRRTRQDEPALFVALTFERREVLDSSNIKPMNLIGVDRGENIPAVIALTDPEGCPLSRFKDSLGNPTHILRIGESYKEKQRTIQAKKEVEQRRAGGYSRKYASKAKNLADDMVRNTARDLLYYAVTQDAMLIFENLSRGFGRQGKRTFMAERQYTRMEDWLTAKLAYEGLPSKTYLSKTLAQYTSKTCSNCGFTITSADYDRVLEKLKKTATGWMTTINGKELKVEGQITYYNRYKRQNVVKDLSVELDRLSEESVNNDISSWTKGRSGEALSLLKKRFSHRPVQEKFVCLNCGFETHADEQAALNIARSWLFLRSQEYKKYQTNKTTGNTDKRAFVETWQSFYRKKLKEVWKPAV

SEQ ID NO: 31591 - protein, 979 aa, synthetic construct
  REGION 1..979: note = engineered CasX variant
QEIGKRINKIRRRLVKDSNTKKAGKTGPMKTLLVRVMTPDLRERLENLRKKPENIPQPISNTSRANLNKLLTDYTEMKKAILHVYWEEFQKDPVGLMSRVAQPASKKIDQNKLKPEMDEKGNLTTAGFACSQCGQPLFVYKLEQVSEKGKAYTNYFGRCNVAEHEKLILLAQLKPEKDSDEAVTYSLGKFGQRALDFYSIHVTKESTHPVKPLAQIAGNRYASHPVGKALSDACMGTIASFLSKYQDIIIEHQKVVKGNQKRLESLRELAGKENLEYPSVTLPPQPHTKEGVDAYNEVIARVRMWVNLNLWQKLKLSRDDAKPLLRLKGFPSFPLVERQANEVDWWDMVCNVKKLINEKKEDGKVFWQNLAGYKRQEALRPYLSSEEDRKKGKKFARYQLGDLLLHLEKKHGEDWGKVYDEAWERIDKKVEGLSKHIKLEEERRSEDAQSKAALTDWLRAKASFVIEGLKEADKDEFCRCELKLQKWYGDLRGKPFAIEAENSILDISGFSKQYNCAFIWQKDGVKKLNLYLIINYFKGGKLRFKKIKPEAFEANRFYTVINKKSGEIVPMEVNFNFDDPNLIILPLAFGKRQGREFIWNDLLSLETGSLKLANGRVIEKTLYNRRTRQDEPALFVALTFERREVLDSSNIKPMNLIGVDRGENIPAVIALTDPEGCPLSRFKDSLGNPTHILRIGESYKEKQRTIQAKKEVEQRRAGGYSRKYASKAKNLADDMVRNTARDLLYYAVTQDAMLIFENLSRGFGRQGKRTFMAERQYTRMEDWLTAKLAYEGLPSKTYLSKTLAQYTSKTCSNCGFTITSADYDRVLEKLKKTATGWMTTINGKELKVEGQITYYNRYKRQNVVKDLSVELDRLSEESVNNDISSWTKGRSGEALSLLKKRFSHRPVQEKFVCLNCGFETHADEQAALNIARSWLFLRSQEYKKYQTNKTTGNTDKRAFVETWQSFYRKKLKEVWKPAV

SEQ ID NO: 31592 - protein, 979 aa, synthetic construct
  REGION 1..979: note = engineered CasX variant
QEIGKRINKIRRRLVKDSNTKKAGKTGPMKTLLVRVMTPDLRERLENLRKKPENIPQPISNTSRANLNKLLTDYTEMKKAILHVYWEEFQKDPVGLMSRVAQPASKKIDQNKLKPEMDEKGNLTTAGFACSQCGQPLFVYKLEQVSEKGKAYTNYFGRCNVAEHEKLILLAQLKPEKDSDEAVTYSLGKFGQRALDFYSIHVTKESTHPVKPLAQIAGNRYASTPVGKALSDACMGTIASFLSKYQDIIIEHQKVVKGNQKRLESLRELAGKENLEYPSVTLPPQPHTKEGVDAYNEVIARVRMWVNLNLWQKLKLSRDDAKPLLRLKGFPSFPLVERQANEVDWWDMVCNVKKLINEKKEDGKVFWQNLAGYKRQEALRPYLSSEEDRKKGKKFARYQLGDLLLHLEKKHGEDWGKVYDEAWERIDKKVEGLSKHIKLEEERRSEDAQSKAALTDWLRAKASFVIEGLKEADKDEFCRCELKLQKWYGDLRGKPFAIEAENSILDISGFSKQYNCAFIWQKDGVKKLNLYLIINYFKGGKLRFKKIKPEAFEANRFYTVINKKSGEIVPMEVNFNFDDPNLIILPLAFGKRQGREFIWNDLLSLETGSLKLANGRVIEKTLYNRRTRQDEPALFVALTFERREVLDSSNIKPMNLIGVDRGENIPAVIALTDPEGCPLSRFKDSLGNPTHILRIGESYKEKQRTIQAKKEVEQRRAGGYSRKYASKAKNLADDMVRNTARDLLYYAVTQDAMLIFENLSRGFGRQGKRTFMAERQYTRMEDWLTAKLAYEGLPSKTYLSKTLAQYTSKTCSNCGFTITSADYDRVLEKLKKTATGWMTTINGKELKVEGQITYYNRYKRQNVVKDLSVELDRLSEESVNNDISSWTKGRSGEALSLLKKRFSHRPVQEKFVCLNCGFETHADEQAALNIARSWLFLRSQEYKKYQTNKTTGNTDKRAFVETWQSFYRKKLKEVWKPAV

SEQ ID NO: 31593 - protein, 979 aa, synthetic construct
  REGION 1..979: note = engineered CasX variant
QEIGKRINKIRRRLVKDSNTKKAGKTGPMKTLLVRVMTPDLRERLENLRKKPENIPQPISNTSRANLNKLLTDYTEMKKAILHVYWEEFQKDPVGLMSRVAQPASKKIDQNKLKPEMDEKGNLTTAGFACSQCGQPLFVYKLEQVSEKGKAYTNYFGRCNVAEHEKLILLAQLKPEKDSDEAVTYSLGKFGQRALDFYSIHVTKESTHPVKPLAQIAGNRYASAPVGKALSDACMGTIASFLSKYQDIIIEHQKVVKGNQKRLESLRELAGKENLEYPSVTLPPQPHTKEGVDAYNEVIARVRMWVNLNLWQKLKLSRDDAKPLLRLKGFPSFPLVERQANEVDWWDMVCNVKKLINEKKEDGKVFWQNLAGYKRQEALRPYLSSEEDRKKGKKFARYQLGDLLLHLEKKHGEDWGKVYDEAWERIDKKVEGLSKHIKLEEERRSEDAQSKAALTDWLRAKASFVIEGLKEADKDEFCRCELKLQKWYGDLRGKPFAIEAENSILDISGFSKQYNCAFIWQKDGVKKLNLYLIINYFKGGKLRFKKIKPEAFEANRFYTVINKKSGEIVPMEVNFNFDDPNLIILPLAFGKRQGREFIWNDLLSLETGSLKLANGRVIEKTLYNRRTRQDEPALFVALTFERREVLDSSNIKPMNLIGVDRGENIPAVIALTDPEGCPLSRFKDSLGNPTHILRIGESYKEKQRTIQAKKEVEQRRAGGYSRKYASKAKNLADDMVRNTARDLLYYAVTQDAMLIFENLSRGFGRQGKRTFMAERQYTRMEDWLTAKLAYEGLPSKTYLSKTLAQYTSKTCSNCGFTITSADYDRVLEKLKKTATGWMTTINGKELKVEGQITYYNRYKRQNVVKDLSVELDRLSEESVNNDISSWTKGRSGEALSLLKKRFSHRPVQEKFVCLNCGFETHADEQAALNIARSWLFLRSQEYKKYQTNKTTGNTDKRAFVETWQSFYRKKLKEVWKPAV

SEQ ID NO: 31594 - protein, 979 aa, synthetic construct
  REGION 1..979: note = engineered CasX variant
QEIGKRINKIRRRLVKDSNTKKAGKTGPMKTLLVRVMTPDLRERLENLRKKPENIPQPISNTSRANLNKLLTDYTEMKKAILHVYWEEFQKDPVGLMSRVAQPASKKIDQNKLKPEMDEKGNLTTAGFACSQCGQPLFVYKLEQVSEKGKAYTNYFGRCNVAEHEKLILLAQLKPEKDSDEAVTYSLGKFGQRALDFYSIHVTKESTHPVKPLAQIAGNRYASVPVGKALSDACMGTIASFLSKYQDIIIEHQKVVKGNQKRLESLRELAGKENLEYPSVTLPPQPHTKEGVDAYNEVIARVRMWVNLNLWQKLKLSRDDAKPLLRLKGFPSFPLVERQANEVDWWDMVCNVKKLINEKKEDGKVFWQNLAGYKRQEALRPYLSSEEDRKKGKKFARYQLGDLLLHLEKKHGEDWGKVYDEAWERIDKKVEGLSKHIKLEEERRSEDAQSKAALTDWLRAKASFVIEGLKEADKDEFCRCELKLQKWYGDLRGKPFAIEAENSILDISGFSKQYNCAFIWQKDGVKKLNLYLIINYFKGGKLRFKKIKPEAFEANRFYTVINKKSGEIVPMEVNFNFDDPNLIILPLAFGKRQGREFIWNDLLSLETGSLKLANGRVIEKTLYNRRTRQDEPALFVALTFERREVLDSSNIKPMNLIGVDRGENIPAVIALTDPEGCPLSRFKDSLGNPTHILRIGESYKEKQRTIQAKKEVEQRRAGGYSRKYASKAKNLADDMVRNTARDLLYYAVTQDAMLIFENLSRGFGRQGKRTFMAERQYTRMEDWLTAKLAYEGLPSKTYLSKTLAQYTSKTCSNCGFTITSADYDRVLEKLKKTATGWMTTINGKELKVEGQITYYNRYKRQNVVKDLSVELDRLSEESVNNDISSWTKGRSGEALSLLKKRFSHRPVQEKFVCLNCGFETHADEQAALNIARSWLFLRSQEYKKYQTNKTTGNTDKRAFVETWQSFYRKKLKEVWKPAV

SEQ ID NO: 31595 - protein, 979 aa, synthetic construct
  REGION 1..979: note = engineered CasX variant
QEIGKRINKIRRRLVKDSNTKKAGKTGPMKTLLVRVMTPDLRERLENLRKKPENIPQPISNTSRANLNKLLTDYTEMKKAILHVYWEEFQKDPVGLMSRVAQPASKKIDQNKLKPEMDEKGNLTTAGFACSQCGQPLFVYKLEQVSEKGKAYTNYFGRCNVAEHEKLILLAQLKPEKDSDEAVTYSLGKFGQRALDFYSIHVTKESTHPVKPLAQIAGNRYASYPVGKALSDACMGTIASFLSKYQDIIIEHQKVVKGNQKRLESLRELAGKENLEYPSVTLPPQPHTSEGVDAYNEVIARVRMWVNLNLWQKLKLSRDDAKPLLRLKGFPSFPLVERQANEVDWWDMVCNVKKLINEKKEDGKVFWQNLAGYKRQEALRPYLSSEEDRKKGKKFARYQLGDLLLHLEKKHGEDWGKVYDEAWERIDKKVEGLSKHIKLEEERRSEDAQSKAALTDWLRAKASFVIEGLKEADKDEFCRCELKLQKWYGDLRGKPFAIEAENSILDISGFSKQYNCAFIWQKDGVKKLNLYLIINYFKGGKLRFKKIKPEAFEANRFYTVINKKSGEIVPMEVNFNFDDPNLIILPLAFGKRQGREFIWNDLLSLETGSLKLANGRVIEKTLYNRRTRQDEPALFVALTFERREVLDSSNIKPMNLIGVDRGENIPAVIALTDPEGCPLSRFKDSLGNPTHILRIGESYKEKQRTIQAKKEVEQRRAGGYSRKYASKAKNLADDMVRNTARDLLYYAVTQDAMLIFENLSRGFGRQGKRTFMAERQYTRMEDWLTAKLAYEGLPSKTYLSKTLAQYTSKTCSNCGFTITSADYDRVLEKLKKTATGWMTTINGKELKVEGQITYYNRYKRQNVVKDLSVELDRLSEESVNNDISSWTKGRSGEALSLLKKRFSHRPVQEKFVCLNCGFETHADEQAALNIARSWLFLRSQEYKKYQTNKTTGNTDKRAFVETWQSFYRKKLKEVWKPAV

SEQ ID NO: 31596 - protein, 979 aa, synthetic construct
  REGION 1..979: note = engineered CasX variant
QEIGKRINKIRRRLVKDSNTKKAGKTGPMKTLLVRVMTPDLRERLENLRKKPENIPQPISNTSRANLNKLLTDYTEMKKAILHVYWEEFQKDPVGLMSRVAQPASKKIDQNKLKPEMDEKGNLTTAGFACSQCGQPLFVYKLEQVSEKGKAYTNYFGRCNVAEHEKLILLAQLKPEKDSDEAVTYSLGKFGQRALDFYSIHVTKESTHPVKPLAQIAGNRYASHPVGKALSDACMGTIASFLSKYQDIIIEHQKVVKGNQKRLESLRELAGKENLEYPSVTLPPQPHTSEGVDAYNEVIARVRMWVNLNLWQKLKLSRDDAKPLLRLKGFPSFPLVERQANEVDWWDMVCNVKKLINEKKEDGKVFWQNLAGYKRQEALRPYLSSEEDRKKGKKFARYQLGDLLLHLEKKHGEDWGKVYDEAWERIDKKVEGLSKHIKLEEERRSEDAQSKAALTDWLRAKASFVIEGLKEADKDEFCRCELKLQKWYGDLRGKPFAIEAENSILDISGFSKQYNCAFIWQKDGVKKLNLYLIINYFKGGKLRFKKIKPEAFEANRFYTVINKKSGEIVPMEVNFNFDDPNLIILPLAFGKRQGREFIWNDLLSLETGSLKLANGRVIEKTLYNRRTRQDEPALFVALTFERREVLDSSNIKPMNLIGVDRGENIPAVIALTDPEGCPLSRFKDSLGNPTHILRIGESYKEKQRTIQAKKEVEQRRAGGYSRKYASKAKNLADDMVRNTARDLLYYAVTQDAMLIFENLSRGFGRQGKRTFMAERQYTRMEDWLTAKLAYEGLPSKTYLSKTLAQYTSKTCSNCGFTITSADYDRVLEKLKKTATGWMTTINGKELKVEGQITYYNRYKRQNVVKDLSVELDRLSEESVNNDISSWTKGRSGEALSLLKKRFSHRPVQEKFVCLNCGFETHADEQAALNIARSWLFLRSQEYKKYQTNKTTGNTDKRAFVETWQSFYRKKLKEVWKPAV

SEQ ID NO: 31597 - protein, 979 aa, synthetic construct
  REGION 1..979: note = engineered CasX variant
QEIGKRINKIRRRLVKDSNTKKAGKTGPMKTLLVRVMTPDLRERLENLRKKPENIPQPISNTSRANLNKLLTDYTEMKKAILHVYWEEFQKDPVGLMSRVAQPASKKIDQNKLKPEMDEKGNLTTAGFACSQCGQPLFVYKLEQVSEKGKAYTNYFGRCNVAEHEKLILLAQLKPEKDSDEAVTYSLGKFGQRALDFYSIHVTKESTHPVKPLAQIAGNRYASSPVGKALSDACMGTIASFLSKYQDIIIEHQKVVKGNQKRLESLRELAGKENLEYPSVTLPPQPHTSEGVDAYNEVIARVRMWVNLNLWQKLKLSRDDAKPLLRLKGFPSFPLVERQANEVDWWDMVCNVKKLINEKKEDGKVFWQNLAGYKRQEALRPYLSSEEDRKKGKKFARYQLGDLLLHLEKKHGEDWGKVYDEAWERIDKKVEGLSKHIKLEEERRSEDAQSKAALTDWLRAKASFVIEGLKEADKDEFCRCELKLQKWYGDLRGKPFAIEAENSILDISGFSKQYNCAFIWQKDGVKKLNLYLIINYFKGGKLRFKKIKPEAFEANRFYTVINKKSGEIVPMEVNFNFDDPNLIILPLAFGKRQGREFIWNDLLSLETGSLKLANGRVIEKTLYNRRTRQDEPALFVALTFERREVLDSSNIKPMNLIGVDRGENIPAVIALTDPEGCPLSRFKDSLGNPTHILRIGESYKEKQRTIQAKKEVEQRRAGGYSRKYASKAKNLADDMVRNTARDLLYYAVTQDAMLIFENLSRGFGRQGKRTFMAERQYTRMEDWLTAKLAYEGLPSKTYLSKTLAQYTSKTCSNCGFTITSADYDRVLEKLKKTATGWMTTINGKELKVEGQITYYNRYKRQNVVKDLSVELDRLSEESVNNDISSWTKGRSGEALSLLKKRFSHRPVQEKFVCLNCGFETHADEQAALNIARSWLFLRSQEYKKYQTNKTTGNTDKRAFVETWQSFYRKKLKEVWKPAV

SEQ ID NO: 31598 - protein, 979 aa, synthetic construct
  REGION 1..979: note = engineered CasX variant
QEIGKRINKIRRRLVKDSNTKKAGKTGPMKTLLVRVMTPDLRERLENLRKKPENIPQPISNTSRANLNKLLTDYTEMKKAILHVYWEEFQKDPVGLMSRVAQPASKKIDQNKLKPEMDEKGNLTTAGFACSQCGQPLFVYKLEQVSEKGKAYTNYFGRCNVAEHEKLILLAQLKPEKDSDEAVTYSLGKFGQRALDFYSIHVTKESTHPVKPLAQIAGNRYASTPVGKALSDACMGTIASFLSKYQDIIIEHQKVVKGNQKRLESLRELAGKENLEYPSVTLPPQPHTSEGVDAYNEVIARVRMWVNLNLWQKLKLSRDDAKPLLRLKGFPSFPLVERQANEVDWWDMVCNVKKLINEKKEDGKVFWQNLAGYKRQEALRPYLSSEEDRKKGKKFARYQLGDLLLHLEKKHGEDWGKVYDEAWERIDKKVEGLSKHIKLEEERRSEDAQSKAALTDWLRAKASFVIEGLKEADKDEFCRCELKLQKWYGDLRGKPFAIEAENSILDISGFSKQYNCAFIWQKDGVKKLNLYLIINYFKGGKLRFKKIKPEAFEANRFYTVINKKSGEIVPMEVNFNFDDPNLIILPLAFGKRQGREFIWNDLLSLETGSLKLANGRVIEKTLYNRRTRQDEPALFVALTFERREVLDSSNIKPMNLIGVDRGENIPAVIALTDPEGCPLSRFKDSLGNPTHILRIGESYKEKQRTIQAKKEVEQRRAGGYSRKYASKAKNLADDMVRNTARDLLYYAVTQDAMLIFENLSRGFGRQGKRTFMAERQYTRMEDWLTAKLAYEGLPSKTYLSKTLAQYTSKTCSNCGFTITSADYDRVLEKLKKTATGWMTTINGKELKVEGQITYYNRYKRQNVVKDLSVELDRLSEESVNNDISSWTKGRSGEALSLLKKRFSHRPVQEKFVCLNCGFETHADEQAALNIARSWLFLRSQEYKKYQTNKTTGNTDKRAFVETWQSFYRKKLKEVWKPAV

SEQ ID NO: 31599 - protein, 979 aa, synthetic construct
  REGION 1..979: note = engineered CasX variant
QEIGKRINKIRRRLVKDSNTKKAGKTGPMKTLLVRVMTPDLRERLENLRKKPENIPQPISNTSRANLNKLLTDYTEMKKAILHVYWEEFQKDPVGLMSRVAQPASKKIDQNKLKPEMDEKGNLTTAGFACSQCGQPLFVYKLEQVSEKGKAYTNYFGRCNVAEHEKLILLAQLKPEKDSDEAVTYSLGKFGQRALDFYSIHVTKESTHPVKPLAQIAGNRYASAPVGKALSDACMGTIASFLSKYQDIIIEHQKVVKGNQKRLESLRELAGKENLEYPSVTLPPQPHTSEGVDAYNEVIARVRMWVNLNLWQKLKLSRDDAKPLLRLKGFPSFPLVERQANEVDWWDMVCNVKKLINEKKEDGKVFWQNLAGYKRQEALRPYLSSEEDRKKGKKFARYQLGDLLLHLEKKHGEDWGKVYDEAWERIDKKVEGLSKHIKLEEERRSEDAQSKAALTDWLRAKASFVIEGLKEADKDEFCRCELKLQKWYGDLRGKPFAIEAENSILDISGFSKQYNCAFIWQKDGVKKLNLYLIINYFKGGKLRFKKIKPEAFEANRFYTVINKKSGEIVPMEVNFNFDDPNLIILPLAFGKRQGREFIWNDLLSLETGSLKLANGRVIEKTLYNRRTRQDEPALFVALTFERREVLDSSNIKPMNLIGVDRGENIPAVIALTDPEGCPLSRFKDSLGNPTHILRIGESYKEKQRTIQAKKEVEQRRAGGYSRKYASKAKNLADDMVRNTARDLLYYAVTQDAMLIFENLSRGFGRQGKRTFMAERQYTRMEDWLTAKLAYEGLPSKTYLSKTLAQYTSKTCSNCGFTITSADYDRVLEKLKKTATGWMTTINGKELKVEGQITYYNRYKRQNVVKDLSVELDRLSEESVNNDISSWTKGRSGEALSLLKKRFSHRPVQEKFVCLNCGFETHADEQAALNIARSWLFLRSQEYKKYQTNKTTGNTDKRAFVETWQSFYRKKLKEVWKPAV

SEQ ID NO: 31600 - protein, 979 aa, synthetic construct
  REGION 1..979: note = engineered CasX variant
QEIGKRINKIRRRLVKDSNTKKAGKTGPMKTLLVRVMTPDLRERLENLRKKPENIPQPISNTSRANLNKLLTDYTEMKKAILHVYWEEFQKDPVGLMSRVAQPASKKIDQNKLKPEMDEKGNLTTAGFACSQCGQPLFVYKLEQVSEKGKAYTNYFGRCNVAEHEKLILLAQLKPEKDSDEAVTYSLGKFGQRALDFYSIHVTKESTHPVKPLAQIAGNRYASVPVGKALSDACMGTIASFLSKYQDIIIEHQKVVKGNQKRLESLRELAGKENLEYPSVTLPPQPHTSEGVDAYNEVIARVRMWVNLNLWQKLKLSRDDAKPLLRLKGFPSFPLVERQANEVDWWDMVCNVKKLINEKKEDGKVFWQNLAGYKRQEALRPYLSSEEDRKKGKKFARYQLGDLLLHLEKKHGEDWGKVYDEAWERIDKKVEGLSKHIKLEEERRSEDAQSKAALTDWLRAKASFVIEGLKEADKDEFCRCELKLQKWYGDLRGKPFAIEAENSILDISGFSKQYNCAFIWQKDGVKKLNLYLIINYFKGGKLRFKKIKPEAFEANRFYTVINKKSGEIVPMEVNFNFDDPNLIILPLAFGKRQGREFIWNDLLSLETGSLKLANGRVIEKTLYNRRTRQDEPALFVALTFERREVLDSSNIKPMNLIGVDRGENIPAVIALTDPEGCPLSRFKDSLGNPTHILRIGESYKEKQRTIQAKKEVEQRRAGGYSRKYASKAKNLADDMVRNTARDLLYYAVTQDAMLIFENLSRGFGRQGKRTFMAERQYTRMEDWLTAKLAYEGLPSKTYLSKTLAQYTSKTCSNCGFTITSADYDRVLEKLKKTATGWMTTINGKELKVEGQITYYNRYKRQNVVKDLSVELDRLSEESVNNDISSWTKGRSGEALSLLKKRFSHRPVQEKFVCLNCGFETHADEQAALNIARSWLFLRSQEYKKYQTNKTTGNTDKRAFVETWQSFYRKKLKEVWKPAV

SEQ ID NO: 31601 - protein, 979 aa, synthetic construct
  REGION 1..979: note = engineered CasX variant
QEIGKRINKIRRRLVKDSNTKKAGKTGPMKTLLVRVMTPDLRERLENLRKKPENIPQPISNTSRANLNKLLTDYTEMKKAILHVYWEEFQKDPVGLMSRVAQPASKKIDQNKLKPEMDEKGNLTTAGFACSQCGQPLFVYKLEQVSEKGKAYTNYFGRCNVAEHEKLIKLAQLKPEKDSDEAVTYSLGKFGQRALDFYSIHVTKESTHPVKPLAQIAGNRYASGPVGKALSDACMGTIASFLSKYQDIIIEHQKVVKGNQKRLESLRELAGKENLEYPSVTLPPQPHTSEGVDAYNEVIARVRMWVNLNLWQKLKLSRDDAKPLLRLKGFPSFPLVERQANEVDWWDMVCNVKKLINEKKEDGKVFWQNLAGYKRQEALRPYLSSEEDRKKGKKFARYQLGDLLLHLEKKHGEDWGKVYDEAWERIDKKVEGLSKHIKLEEERRSEDAQSKAALTDWLRAKASFVIEGLKEADKDEFCRCELKLQKWYGDLRGKPFAIEAENSILDISGFSKQYNCAFIWQKDGVKKLNLYLIINYFKGGKLRFKKIKPEAFEANRFYTVINKKSGEIVPMEVNFNFDDPNLIILPLAFGKRQGREFIWNDLLSLETGSLKLANGRVIEKTLYNRRTRQDEPALFVALTFERREVLDSSNIKPMNLIGVDRGENIPAVIALTDPEGCPLSRFKDSLGNPTHILRIGESYKEKQRTIQAKKEVEQRRAGGYSRKYASKAKNLADDMVRNTARDLLYYAVTQDAMLIFENLSRGFGRQGKRTFMAERQYTRMEDWLTAKLAYEGLPSKTYLSKTLAQYTSKTCSNCGFTITSADYDRVLEKLKKTATGWMTTINGKELKVEGQITYYNRYKRQNVVKDLSVELDRLSEESVNNDISSWTKGRSGEALSLLKKRFSHRPVQEKFVCLNCGFETHADEQAALNIARSWLFLRSQEYKKYQTNKTTGNTDKRAFVETWQSFYRKKLKEVWKPAV

SEQ ID NO: 31602 - protein, 978 aa, synthetic construct
  REGION 1..978: note = engineered CasX variant
QEIGKRINKIRRRLVKDSNTKKAGKTGPMKTLLVRVMTPDLRERLENLRKKPENIPQPISNTSRANLNKLLTDYTEMKKAILHVYWEEFQKDPVGLMSRVAQPASKKIDQNKLKPEMDEKGNLTTAGFACSQCGQPLFVYKLEQVSEKGKAYTNYFGRCNVAEHEKLILLAQLKPEKDSDEAVTYSLGKFGQRALDFYSIHVTKESTHPVKPLAQIAGNRYASPVGKALSDACMGTIASFLSKYQDIIIEHQKVVKGNQKRLESLRELAGKENLEYPSVTLPPQPHTSEGVDAYNEVIARVRMWVNLNLWQKLKLSRDDAKPLLRLKGFPSFPLVERQANEVDWWDMVCNVKKLINEKKEDGKVFWQNLAGYKRQEALRPYLSSEEDRKKGKKFARYQLGDLLLHLEKKHGEDWGKVYDEAWERIDKKVEGLSKHIKLEEERRSEDAQSKAALTDWLRAKASFVIEGLKEADKDEFCRCELKLQKWYGDLRGKPFAIEAENSILDISGFSKQYNCAFIWQKDGVKKLNLYLIINYFKGGKLRFKKIKPEAFEANRFYTVINKKSGEIVPMEVNFNFDDPNLIILPLAFGKRQGREFIWNDLLSLETGSLKLANGRVIEKTLYNRRTRQDEPALFVALTFERREVLDSSNIKPMNLIGVDRGENIPAVIALTDPEGCPLSRFKDSLGNPTHILRIGESYKEKQRTIQAKKEVEQRRAGGYSRKYASKAKNLADDMVRNTARDLLYYAVTQDAMLIFENLSRGFGRQGKRTFMAERQYTRMEDWLTAKLAYEGLPSKTYLSKTLAQYTSKTCSNCGFTITSADYDRVLEKLKKTATGWMTTINGKELKVEGQITYYNRYKRQNVVKDLSVELDRLSEESVNNDISSWTKGRSGEALSLLKKRFSHRPVQEKFVCLNCGFETHADEQAALNIARSWLFLRSQEYKKYQTNKTTGNTDKRAFVETWQSFYRKKLKEVWKPAV

SEQ ID NO: 31603 - protein, 979 aa, synthetic construct
  REGION 1..979: note = engineered CasX variant
QEIGKRINKIRRRLVKDSNTKKAGKTGPMKTLLVRVMTPDLRERLENLRKKPENIPQPISNTSRANLNKLLTDYTEMKKAILHVYWEEFQKDPVGLMSRVAQPASKKIDQNKLKPEMDEKGNLTTAGFACSQCGQPLFVYKLEQVSEKGKAYTNYFGRCNVAEHEKLILLAQLKPEKDSDEAVTYSLGKFGQRALDFYSIHVTKESTHPVKPLAQIAGNRYASYPVGKALSDACMGTIASFLSKYQDIIIEHQKVVKGNQKRLESLRELAGKENLEYPSVTLPPQPHTKEGLDAYNEVIARVRMWVNLNLWQKLKLSRDDAKPLLRLKGFPSFPLVERQANEVDWWDMVCNVKKLINEKKEDGKVFWQNLAGYKRQEALRPYLSSEEDRKKGKKFARYQLGDLLLHLEKKHGEDWGKVYDEAWERIDKKVEGLSKHIKLEEERRSEDAQSKAALTDWLRAKASFVIEGLKEADKDEFCRCELKLQKWYGDLRGKPFAIEAENSILDISGFSKQYNCAFIWQKDGVKKLNLYLIINYFKGGKLRFKKIKPEAFEANRFYTVINKKSGEIVPMEVNFNFDDPNLIILPLAFGKRQGREFIWNDLLSLETGSLKLANGRVIEKTLYNRRTRQDEPALFVALTFERREVLDSSNIKPMNLIGVDRGENIPAVIALTDPEGCPLSRFKDSLGNPTHILRIGESYKEKQRTIQAKKEVEQRRAGGYSRKYASKAKNLADDMVRNTARDLLYYAVTQDAMLIFENLSRGFGRQGKRTFMAERQYTRMEDWLTAKLAYEGLPSKTYLSKTLAQYTSKTCSNCGFTITSADYDRVLEKLKKTATGWMTTINGKELKVEGQITYYNRYKRQNVVKDLSVELDRLSEESVNNDISSWTKGRSGEALSLLKKRFSHRPVQEKFVCLNCGFETHADEQAALNIARSWLFLRSQEYKKYQTNKTTGNTDKRAFVETWQSFYRKKLKEVWKPAV

SEQ ID NO: 31604 - protein, 979 aa, synthetic construct
  REGION 1..979: note = engineered CasX variant
QEIGKRINKIRRRLVKDSNTKKAGKTGPMKTLLVRVMTPDLRERLENLRKKPENIPQPISNTSRANLNKLLTDYTEMKKAILHVYWEEFQKDPVGLMSRVAQPASKKIDQNKLKPEMDEKGNLTTAGFACSQCGQPLFVYKLEQVSEKGKAYTNYFGRCNVAEHEKLILLAQLKPEKDSDEAVTYSLGKFGQRALDFYSIHVTKESTHPVKPLAQIAGNRYASHPVGKALSDACMGTIASFLSKYQDIIIEHQKVVKGNQKRLESLRELAGKENLEYPSVTLPPQPHTKEGLDAYNEVIARVRMWVNLNLWQKLKLSRDDAKPLLRLKGFPSFPLVERQANEVDWWDMVCNVKKLINEKKEDGKVFWQNLAGYKRQEALRPYLSSEEDRKKGKKFARYQLGDLLLHLEKKHGEDWGKVYDEAWERIDKKVEGLSKHIKLEEERRSEDAQSKAALTDWLRAKASFVIEGLKEADKDEFCRCELKLQKWYGDLRGKPFAIEAENSILDISGFSKQYNCAFIWQKDGVKKLNLYLIINYFKGGKLRFKKIKPEAFEANRFYTVINKKSGEIVPMEVNFNFDDPNLIILPLAFGKRQGREFIWNDLLSLETGSLKLANGRVIEKTLYNRRTRQDEPALFVALTFERREVLDSSNIKPMNLIGVDRGENIPAVIALTDPEGCPLSRFKDSLGNPTHILRIGESYKEKQRTIQAKKEVEQRRAGGYSRKYASKAKNLADDMVRNTARDLLYYAVTQDAMLIFENLSRGFGRQGKRTFMAERQYTRMEDWLTAKLAYEGLPSKTYLSKTLAQYTSKTCSNCGFTITSADYDRVLEKLKKTATGWMTTINGKELKVEGQITYYNRYKRQNVVKDLSVELDRLSEESVNNDISSWTKGRSGEALSLLKKRFSHRPVQEKFVCLNCGFETHADEQAALNIARSWLFLRSQEYKKYQTNKTTGNTDKRAFVETWQSFYRKKLKEVWKPAV

SEQ ID NO: 31605 - protein, 979 aa, synthetic construct
  REGION 1..979: note = engineered CasX variant
QEIGKRINKIRRRLVKDSNTKKAGKTGPMKTLLVRVMTPDLRERLENLRKKPENIPQPISNTSRANLNKLLTDYTEMKKAILHVYWEEFQKDPVGLMSRVAQPASKKIDQNKLKPEMDEKGNLTTAGFACSQCGQPLFVYKLEQVSEKGKAYTNYFGRCNVAEHEKLILLAQLKPEKDSDEAVTYSLGKFGQRALDFYSIHVTKESTHPVKPLAQIAGNRYASSPVGKALSDACMGTIASFLSKYQDIIIEHQKVVKGNQKRLESLRELAGKENLEYPSVTLPPQPHTKEGLDAYNEVIARVRMWVNLNLWQKLKLSRDDAKPLLRLKGFPSFPLVERQANEVDWWDMVCNVKKLINEKKEDGKVFWQNLAGYKRQEALRPYLSSEEDRKKGKKFARYQLGDLLLHLEKKHGEDWGKVYDEAWERIDKKVEGLSKHIKLEEERRSEDAQSKAALTDWLRAKASFVIEGLKEADKDEFCRCELKLQKWYGDLRGKPFAIEAENSILDISGFSKQYNCAFIWQKDGVKKLNLYLIINYFKGGKLRFKKIKPEAFEANRFYTVINKKSGEIVPMEVNFNFDDPNLIILPLAFGKRQGREFIWNDLLSLETGSLKLANGRVIEKTLYNRRTRQDEPALFVALTFERREVLDSSNIKPMNLIGVDRGENIPAVIALTDPEGCPLSRFKDSLGNPTHILRIGESYKEKQRTIQAKKEVEQRRAGGYSRKYASKAKNLADDMVRNTARDLLYYAVTQDAMLIFENLSRGFGRQGKRTFMAERQYTRMEDWLTAKLAYEGLPSKTYLSKTLAQYTSKTCSNCGFTITSADYDRVLEKLKKTATGWMTTINGKELKVEGQITYYNRYKRQNVVKDLSVELDRLSEESVNNDISSWTKGRSGEALSLLKKRFSHRPVQEKFVCLNCGFETHADEQAALNIARSWLFLRSQEYKKYQTNKTTGNTDKRAFVETWQSFYRKKLKEVWKPAV

SEQ ID NO: 31606 - protein, 979 aa, synthetic construct
  REGION 1..979: note = engineered CasX variant
QEIGKRINKIRRRLVKDSNTKKAGKTGPMKTLLVRVMTPDLRERLENLRKKPENIPQPISNTSRANLNKLLTDYTEMKKAILHVYWEEFQKDPVGLMSRVAQPASKKIDQNKLKPEMDEKGNLTTAGFACSQCGQPLFVYKLEQVSEKGKAYTNYFGRCNVAEHEKLILLAQLKPEKDSDEAVTYSLGKFGQRALDFYSIHVTKESTHPVKPLAQIAGNRYASTPVGKALSDACMGTIASFLSKYQDIIIEHQKVVKGNQKRLESLRELAGKENLEYPSVTLPPQPHTKEGLDAYNEVIARVRMWVNLNLWQKLKLSRDDAKPLLRLKGFPSFPLVERQANEVDWWDMVCNVKKLINEKKEDGKVFWQNLAGYKRQEALRPYLSSEEDRKKGKKFARYQLGDLLLHLEKKHGEDWGKVYDEAWERIDKKVEGLSKHIKLEEERRSEDAQSKAALTDWLRAKASFVIEGLKEADKDEFCRCELKLQKWYGDLRGKPFAIEAENSILDISGFSKQYNCAFIWQKDGVKKLNLYLIINYFKGGKLRFKKIKPEAFEANRFYTVINKKSGEIVPMEVNFNFDDPNLIILPLAFGKRQGREFIWNDLLSLETGSLKLANGRVIEKTLYNRRTRQDEPALFVALTFERREVLDSSNIKPMNLIGVDRGENIPAVIALTDPEGCPLSRFKDSLGNPTHILRIGESYKEKQRTIQAKKEVEQRRAGGYSRKYASKAKNLADDMVRNTARDLLYYAVTQDAMLIFENLSRGFGRQGKRTFMAERQYTRMEDWLTAKLAYEGLPSKTYLSKTLAQYTSKTCSNCGFTITSADYDRVLEKLKKTATGWMTTINGKELKVEGQITYYNRYKRQNVVKDLSVELDRLSEESVNNDISSWTKGRSGEALSLLKKRFSHRPVQEKFVCLNCGFETHADEQAALNIARSWLFLRSQEYKKYQTNKTTGNTDKRAFVETWQSFYRKKLKEVWKPAV

SEQ ID NO: 31607 - protein, 979 aa, synthetic construct
  REGION 1..979: note = engineered CasX variant
QEIGKRINKIRRRLVKDSNTKKAGKTGPMKTLLVRVMTPDLRERLENLRKKPENIPQPISNTSRANLNKLLTDYTEMKKAILHVYWEEFQKDPVGLMSRVAQPASKKIDQNKLKPEMDEKGNLTTAGFACSQCGQPLFVYKLEQVSEKGKAYTNYFGRCNVAEHEKLILLAQLKPEKDSDEAVTYSLGKFGQRALDFYSIHVTKESTHPVKPLAQIAGNRYASAPVGKALSDACMGTIASFLSKYQDIIIEHQKVVKGNQKRLESLRELAGKENLEYPSVTLPPQPHTKEGLDAYNEVIARVRMWVNLNLWQKLKLSRDDAKPLLRLKGFPSFPLVERQANEVDWWDMVCNVKKLINEKKEDGKVFWQNLAGYKRQEALRPYLSSEEDRKKGKKFARYQLGDLLLHLEKKHGEDWGKVYDEAWERIDKKVEGLSKHIKLEEERRSEDAQSKAALTDWLRAKASFVIEGLKEADKDEFCRCELKLQKWYGDLRGKPFAIEAENSILDISGFSKQYNCAFIWQKDGVKKLNLYLIINYFKGGKLRFKKIKPEAFEANRFYTVINKKSGEIVPMEVNFNFDDPNLIILPLAFGKRQGREFIWNDLLSLETGSLKLANGRVIEKTLYNRRTRQDEPALFVALTFERREVLDSSNIKPMNLIGVDRGENIPAVIALTDPEGCPLSRFKDSLGNPTHILRIGESYKEKQRTIQAKKEVEQRRAGGYSRKYASKAKNLADDMVRNTARDLLYYAVTQDAMLIFENLSRGFGRQGKRTFMAERQYTRMEDWLTAKLAYEGLPSKTYLSKTLAQYTSKTCSNCGFTITSADYDRVLEKLKKTATGWMTTINGKELKVEGQITYYNRYKRQNVVKDLSVELDRLSEESVNNDISSWTKGRSGEALSLLKKRFSHRPVQEKFVCLNCGFETHADEQAALNIARSWLFLRSQEYKKYQTNKTTGNTDKRAFVETWQSFYRKKLKEVWKPAV

SEQ ID NO: 31608 - protein, 979 aa, synthetic construct
  REGION 1..979: note = engineered CasX variant
QEIGKRINKIRRRLVKDSNTKKAGKTGPMKTLLVRVMTPDLRERLENLRKKPENIPQPISNTSRANLNKLLTDYTEMKKAILHVYWEEFQKDPVGLMSRVAQPASKKIDQNKLKPEMDEKGNLTTAGFACSQCGQPLFVYKLEQVSEKGKAYTNYFGRCNVAEHEKLILLAQLKPEKDSDEAVTYSLGKFGQRALDFYSIHVTKESTHPVKPLAQIAGNRYASVPVGKALSDACMGTIASFLSKYQDIIIEHQKVVKGNQKRLESLRELAGKENLEYPSVTLPPQPHTKEGLDAYNEVIARVRMWVNLNLWQKLKLSRDDAKPLLRLKGFPSFPLVERQANEVDWWDMVCNVKKLINEKKEDGKVFWQNLAGYKRQEALRPYLSSEEDRKKGKKFARYQLGDLLLHLEKKHGEDWGKVYDEAWERIDKKVEGLSKHIKLEEERRSEDAQSKAALTDWLRAKASFVIEGLKEADKDEFCRCELKLQKWYGDLRGKPFAIEAENSILDISGFSKQYNCAFIWQKDGVKKLNLYLIINYFKGGKLRFKKIKPEAFEANRFYTVINKKSGEIVPMEVNFNFDDPNLIILPLAFGKRQGREFIWNDLLSLETGSLKLANGRVIEKTLYNRRTRQDEPALFVALTFERREVLDSSNIKPMNLIGVDRGENIPAVIALTDPEGCPLSRFKDSLGNPTHILRIGESYKEKQRTIQAKKEVEQRRAGGYSRKYASKAKNLADDMVRNTARDLLYYAVTQDAMLIFENLSRGFGRQGKRTFMAERQYTRMEDWLTAKLAYEGLPSKTYLSKTLAQYTSKTCSNCGFTITSADYDRVLEKLKKTATGWMTTINGKELKVEGQITYYNRYKRQNVVKDLSVELDRLSEESVNNDISSWTKGRSGEALSLLKKRFSHRPVQEKFVCLNCGFETHADEQAALNIARSWLFLRSQEYKKYQTNKTTGNTDKRAFVETWQSFYRKKLKEVWKPAV

SEQ ID NO: 31609 - protein, 979 aa, synthetic construct
  REGION 1..979: note = engineered CasX variant
QEIGKRINKIRRRLVKDSNTKKAGKTGPMKTLLVRVMTPDLRERLENLRKKPENIPQPISNTSRANLNKLLTDYTEMKKAILHVYWEEFQKDPVGLMSRVAQPASKKIDQNKLKPEMDEKGNLTTAGFACSQCGQPLFVYKLEQVSEKGKAYTNYFGRCNVAEHEKLIKLAQLKPEKDSDEAVTYSLGKFGQRALDFYSIHVTKESTHPVKPLAQIAGNRYASGPVGKALSDACMGTIASFLSKYQDIIIEHQKVVKGNQKRLESLRELAGKENLEYPSVTLPPQPHTKEGLDAYNEVIARVRMWVNLNLWQKLKLSRDDAKPLLRLKGFPSFPLVERQANEVDWWDMVCNVKKLINEKKEDGKVFWQNLAGYKRQEALRPYLSSEEDRKKGKKFARYQLGDLLLHLEKKHGEDWGKVYDEAWERIDKKVEGLSKHIKLEEERRSEDAQSKAALTDWLRAKASFVIEGLKEADKDEFCRCELKLQKWYGDLRGKPFAIEAENSILDISGFSKQYNCAFIWQKDGVKKLNLYLIINYFKGGKLRFKKIKPEAFEANRFYTVINKKSGEIVPMEVNFNFDDPNLIILPLAFGKRQGREFIWNDLLSLETGSLKLANGRVIEKTLYNRRTRQDEPALFVALTFERREVLDSSNIKPMNLIGVDRGENIPAVIALTDPEGCPLSRFKDSLGNPTHILRIGESYKEKQRTIQAKKEVEQRRAGGYSRKYASKAKNLADDMVRNTARDLLYYAVTQDAMLIFENLSRGFGRQGKRTFMAERQYTRMEDWLTAKLAYEGLPSKTYLSKTLAQYTSKTCSNCGFTITSADYDRVLEKLKKTATGWMTTINGKELKVEGQITYYNRYKRQNVVKDLSVELDRLSEESVNNDISSWTKGRSGEALSLLKKRFSHRPVQEKFVCLNCGFETHADEQAALNIARSWLFLRSQEYKKYQTNKTTGNTDKRAFVETWQSFYRKKLKEVWKPAV

SEQ ID NO: 31610 - protein, 978 aa, synthetic construct
  REGION 1..978: note = engineered CasX variant
QEIGKRINKIRRRLVKDSNTKKAGKTGPMKTLLVRVMTPDLRERLENLRKKPENIPQPISNTSRANLNKLLTDYTEMKKAILHVYWEEFQKDPVGLMSRVAQPASKKIDQNKLKPEMDEKGNLTTAGFACSQCGQPLFVYKLEQVSEKGKAYTNYFGRCNVAEHEKLILLAQLKPEKDSDEAVTYSLGKFGQRALDFYSIHVTKESTHPVKPLAQIAGNRYASPVGKALSDACMGTIASFLSKYQDIIIEHQKVVKGNQKRLESLRELAGKENLEYPSVTLPPQPHTKEGLDAYNEVIARVRMWVNLNLWQKLKLSRDDAKPLLRLKGFPSFPLVERQANEVDWWDMVCNVKKLINEKKEDGKVFWQNLAGYKRQEALRPYLSSEEDRKKGKKFARYQLGDLLLHLEKKHGEDWGKVYDEAWERIDKKVEGLSKHIKLEEERRSEDAQSKAALTDWLRAKASFVIEGLKEADKDEFCRCELKLQKWYGDLRGKPFAIEAENSILDISGFSKQYNCAFIWQKDGVKKLNLYLIINYFKGGKLRFKKIKPEAFEANRFYTVINKKSGEIVPMEVNFNFDDPNLIILPLAFGKRQGREFIWNDLLSLETGSLKLANGRVIEKTLYNRRTRQDEPALFVALTFERREVLDSSNIKPMNLIGVDRGENIPAVIALTDPEGCPLSRFKDSLGNPTHILRIGESYKEKQRTIQAKKEVEQRRAGGYSRKYASKAKNLADDMVRNTARDLLYYAVTQDAMLIFENLSRGFGRQGKRTFMAERQYTRMEDWLTAKLAYEGLPSKTYLSKTLAQYTSKTCSNCGFTITSADYDRVLEKLKKTATGWMTTINGKELKVEGQITYYNRYKRQNVVKDLSVELDRLSEESVNNDISSWTKGRSGEALSLLKKRFSHRPVQEKFVCLNCGFETHADEQAALNIARSWLFLRSQEYKKYQTNKTTGNTDKRAFVETWQSFYRKKLKEVWKPAV

SEQ ID NO: 31611 - protein, 979 aa, synthetic construct
  REGION 1..979: note = engineered CasX variant
QEIGKRINKIRRRLVKDSNTKKAGKTGPMKTLLVRVMTPDLRERLENLRKKPENIPQPISNTSRANLNKLLTDYTEMKKAILHVYWEEFQKDPVGLMSRVAQPASKKIDQNKLKPEMDEKGNLTTAGFACSQCGQPLFVYKLEQVSEKGKAYTNYFGRCNVAEHEKLILLAQLKPEKDSDEAVTYSLGKFGQRALDFYSIHVTKESTHPVKPLAQIAGNRYASYPVGKALSDACMGTIASFLSKYQDIIIEHQKVVKGNQKRLESLRELAGKENLEYPSVTLPPQPHTKEGVDAYNEVIARVRTWVNLNLWQKLKLSRDDAKPLLRLKGFPSFPLVERQANEVDWWDMVCNVKKLINEKKEDGKVFWQNLAGYKRQEALRPYLSSEEDRKKGKKFARYQLGDLLLHLEKKHGEDWGKVYDEAWERIDKKVEGLSKHIKLEEERRSEDAQSKAALTDWLRAKASFVIEGLKEADKDEFCRCELKLQKWYGDLRGKPFAIEAENSILDISGFSKQYNCAFIWQKDGVKKLNLYLIINYFKGGKLRFKKIKPEAFEANRFYTVINKKSGEIVPMEVNFNFDDPNLIILPLAFGKRQGREFIWNDLLSLETGSLKLANGRVIEKTLYNRRTRQDEPALFVALTFERREVLDSSNIKPMNLIGVDRGENIPAVIALTDPEGCPLSRFKDSLGNPTHILRIGESYKEKQRTIQAKKEVEQRRAGGYSRKYASKAKNLADDMVRNTARDLLYYAVTQDAMLIFENLSRGFGRQGKRTFMAERQYTRMEDWLTAKLAYEGLPSKTYLSKTLAQYTSKTCSNCGFTITSADYDRVLEKLKKTATGWMTTINGKELKVEGQITYYNRYKRQNVVKDLSVELDRLSEESVNNDISSWTKGRSGEALSLLKKRFSHRPVQEKFVCLNCGFETHADEQAALNIARSWLFLRSQEYKKYQTNKTTGNTDKRAFVETWQSFYRKKLKEVWKPAV

SEQ ID NO: 31612 - protein, 979 aa, synthetic construct
  REGION 1..979: note = engineered CasX variant
QEIGKRINKIRRRLVKDSNTKKAGKTGPMKTLLVRVMTPDLRERLENLRKKPENIPQPISNTSRANLNKLLTDYTEMKKAILHVYWEEFQKDPVGLMSRVAQPASKKIDQNKLKPEMDEKGNLTTAGFACSQCGQPLFVYKLEQVSEKGKAYTNYFGRCNVAEHEKLILLAQLKPEKDSDEAVTYSLGKFGQRALDFYSIHVTKESTHPVKPLAQIAGNRYASHPVGKALSDACMGTIASFLSKYQDIIIEHQKVVKGNQKRLESLRELAGKENLEYPSVTLPPQPHTKEGVDAYNEVIARVRTWVNLNLWQKLKLSRDDAKPLLRLKGFPSFPLVERQANEVDWWDMVCNVKKLINEKKEDGKVFWQNLAGYKRQEALRPYLSSEEDRKKGKKFARYQLGDLLLHLEKKHGEDWGKVYDEAWERIDKKVEGLSKHIKLEEERRSEDAQSKAALTDWLRAKASFVIEGLKEADKDEFCRCELKLQKWYGDLRGKPFAIEAENSILDISGFSKQYNCAFIWQKDGVKKLNLYLIINYFKGGKLRFKKIKPEAFEANRFYTVINKKSGEIVPMEVNFNFDDPNLIILPLAFGKRQGREFIWNDLLSLETGSLKLANGRVIEKTLYNRRTRQDEPALFVALTFERREVLDSSNIKPMNLIGVDRGENIPAVIALTDPEGCPLSRFKDSLGNPTHILRIGESYKEKQRTIQAKKEVEQRRAGGYSRKYASKAKNLADDMVRNTARDLLYYAVTQDAMLIFENLSRGFGRQGKRTFMAERQYTRMEDWLTAKLAYEGLPSKTYLSKTLAQYTSKTCSNCGFTITSADYDRVLEKLKKTATGWMTTINGKELKVEGQITYYNRYKRQNVVKDLSVELDRLSEESVNNDISSWTKGRSGEALSLLKKRFSHRPVQEKFVCLNCGFETHADEQAALNIARSWLFLRSQEYKKYQTNKTTGNTDKRAFVETWQSFYRKKLKEVWKPAV

SEQ ID NO: 31613 - protein, 979 aa, synthetic construct
  REGION 1..979: note = engineered CasX variant
QEIGKRINKIRRRLVKDSNTKKAGKTGPMKTLLVRVMTPDLRERLENLRKKPENIPQPISNTSRANLNKLLTDYTEMKKAILHVYWEEFQKDPVGLMSRVAQPASKKIDQNKLKPEMDEKGNLTTAGFACSQCGQPLFVYKLEQVSEKGKAYTNYFGRCNVAEHEKLILLAQLKPEKDSDEAVTYSLGKFGQRALDFYSIHVTKESTHPVKPLAQIAGNRYASSPVGKALSDACMGTIASFLSKYQDIIIEHQKVVKGNQKRLESLRELAGKENLEYPSVTLPPQPHTKEGVDAYNEVIARVRTWVNLNLWQKLKLSRDDAKPLLRLKGFPSFPLVERQANEVDWWDMVCNVKKLINEKKEDGKVFWQNLAGYKRQEALRPYLSSEEDRKKGKKFARYQLGDLLLHLEKKHGEDWGKVYDEAWERIDKKVEGLSKHIKLEEERRSEDAQSKAALTDWLRAKASFVIEGLKEADKDEFCRCELKLQKWYGDLRGKPFAIEAENSILDISGFSKQYNCAFIWQKDGVKKLNLYLIINYFKGGKLRFKKIKPEAFEANRFYTVINKKSGEIVPMEVNFNFDDPNLIILPLAFGKRQGREFIWNDLLSLETGSLKLANGRVIEKTLYNRRTRQDEPALFVALTFERREVLDSSNIKPMNLIGVDRGENIPAVIALTDPEGCPLSRFKDSLGNPTHILRIGESYKEKQRTIQAKKEVEQRRAGGYSRKYASKAKNLADDMVRNTARDLLYYAVTQDAMLIFENLSRGFGRQGKRTFMAERQYTRMEDWLTAKLAYEGLPSKTYLSKTLAQYTSKTCSNCGFTITSADYDRVLEKLKKTATGWMTTINGKELKVEGQITYYNRYKRQNVVKDLSVELDRLSEESVNNDISSWTKGRSGEALSLLKKRFSHRPVQEKFVCLNCGFETHADEQAALNIARSWLFLRSQEYKKYQTNKTTGNTDKRAFVETWQSFYRKKLKEVWKPAV

SEQ ID NO: 31614 - protein, 979 aa, synthetic construct
  REGION 1..979: note = engineered CasX variant
QEIGKRINKIRRRLVKDSNTKKAGKTGPMKTLLVRVMTPDLRERLENLRKKPENIPQPISNTSRANLNKLLTDYTEMKKAILHVYWEEFQKDPVGLMSRVAQPASKKIDQNKLKPEMDEKGNLTTAGFACSQCGQPLFVYKLEQVSEKGKAYTNYFGRCNVAEHEKLILLAQLKPEKDSDEAVTYSLGKFGQRALDFYSIHVTKESTHPVKPLAQIAGNRYASTPVGKALSDACMGTIASFLSKYQDIIIEHQKVVKGNQKRLESLRELAGKENLEYPSVTLPPQPHTKEGVDAYNEVIARVRTWVNLNLWQKLKLSRDDAKPLLRLKGFPSFPLVERQANEVDWWDMVCNVKKLINEKKEDGKVFWQNLAGYKRQEALRPYLSSEEDRKKGKKFARYQLGDLLLHLEKKHGEDWGKVYDEAWERIDKKVEGLSKHIKLEEERRSEDAQSKAALTDWLRAKASFVIEGLKEADKDEFCRCELKLQKWYGDLRGKPFAIEAENSILDISGFSKQYNCAFIWQKDGVKKLNLYLIINYFKGGKLRFKKIKPEAFEANRFYTVINKKSGEIVPMEVNFNFDDPNLIILPLAFGKRQGREFIWNDLLSLETGSLKLANGRVIEKTLYNRRTRQDEPALFVALTFERREVLDSSNIKPMNLIGVDRGENIPAVIALTDPEGCPLSRFKDSLGNPTHILRIGESYKEKQRTIQAKKEVEQRRAGGYSRKYASKAKNLADDMVRNTARDLLYYAVTQDAMLIFENLSRGFGRQGKRTFMAERQYTRMEDWLTAKLAYEGLPSKTYLSKTLAQYTSKTCSNCGFTITSADYDRVLEKLKKTATGWMTTINGKELKVEGQITYYNRYKRQNVVKDLSVELDRLSEESVNNDISSWTKGRSGEALSLLKKRFSHRPVQEKFVCLNCGFETHADEQAALNIARSWLFLRSQEYKKYQTNKTTGNTDKRAFVETWQSFYRKKLKEVWKPAV

SEQ ID NO: 31615 - protein, 979 aa, synthetic construct
  REGION 1..979: note = engineered CasX variant
QEIGKRINKIRRRLVKDSNTKKAGKTGPMKTLLVRVMTPDLRERLENLRKKPENIPQPISNTSRANLNKLLTDYTEMKKAILHVYWEEFQKDPVGLMSRVAQPASKKIDQNKLKPEMDEKGNLTTAGFACSQCGQPLFVYKLEQVSEKGKAYTNYFGRCNVAEHEKLILLAQLKPEKDSDEAVTYSLGKFGQRALDFYSIHVTKESTHPVKPLAQIAGNRYASAPVGKALSDACMGTIASFLSKYQDIIIEHQKVVKGNQKRLESLRELAGKENLEYPSVTLPPQPHTKEGVDAYNEVIARVRTWVNLNLWQKLKLSRDDAKPLLRLKGFPSFPLVERQANEVDWWDMVCNVKKLINEKKEDGKVFWQNLAGYKRQEALRPYLSSEEDRKKGKKFARYQLGDLLLHLEKKHGEDWGKVYDEAWERIDKKVEGLSKHIKLEEERRSEDAQSKAALTDWLRAKASFVIEGLKEADKDEFCRCELKLQKWYGDLRGKPFAIEAENSILDISGFSKQYNCAFIWQKDGVKKLNLYLIINYFKGGKLRFKKIKPEAFEANRFYTVINKKSGEIVPMEVNFNFDDPNLIILPLAFGKRQGREFIWNDLLSLETGSLKLANGRVIEKTLYNRRTRQDEPALFVALTFERREVLDSSNIKPMNLIGVDRGENIPAVIALTDPEGCPLSRFKDSLGNPTHILRIGESYKEKQRTIQAKKEVEQRRAGGYSRKYASKAKNLADDMVRNTARDLLYYAVTQDAMLIFENLSRGFGRQGKRTFMAERQYTRMEDWLTAKLAYEGLPSKTYLSKTLAQYTSKTCSNCGFTITSADYDRVLEKLKKTATGWMTTINGKELKVEGQITYYNRYKRQNVVKDLSVELDRLSEESVNNDISSWTKGRSGEALSLLKKRFSHRPVQEKFVCLNCGFETHADEQAALNIARSWLFLRSQEYKKYQTNKTTGNTDKRAFVETWQSFYRKKLKEVWKPAV

SEQ ID NO: 31616 - protein, 979 aa, synthetic construct
  REGION 1..979: note = engineered CasX variant
QEIGKRINKIRRRLVKDSNTKKAGKTGPMKTLLVRVMTPDLRERLENLRKKPENIPQPISNTSRANLNKLLTDYTEMKKAILHVYWEEFQKDPVGLMSRVAQPASKKIDQNKLKPEMDEKGNLTTAGFACSQCGQPLFVYKLEQVSEKGKAYTNYFGRCNVAEHEKLILLAQLKPEKDSDEAVTYSLGKFGQRALDFYSIHVTKESTHPVKPLAQIAGNRYASVPVGKALSDACMGTIASFLSKYQDIIIEHQKVVKGNQKRLESLRELAGKENLEYPSVTLPPQPHTKEGVDAYNEVIARVRTWVNLNLWQKLKLSRDDAKPLLRLKGFPSFPLVERQANEVDWWDMVCNVKKLINEKKEDGKVFWQNLAGYKRQEALRPYLSSEEDRKKGKKFARYQLGDLLLHLEKKHGEDWGKVYDEAWERIDKKVEGLSKHIKLEEERRSEDAQSKAALTDWLRAKASFVIEGLKEADKDEFCRCELKLQKWYGDLRGKPFAIEAENSILDISGFSKQYNCAFIWQKDGVKKLNLYLIINYFKGGKLRFKKIKPEAFEANRFYTVINKKSGEIVPMEVNFNFDDPNLIILPLAFGKRQGREFIWNDLLSLETGSLKLANGRVIEKTLYNRRTRQDEPALFVALTFERREVLDSSNIKPMNLIGVDRGENIPAVIALTDPEGCPLSRFKDSLGNPTHILRIGESYKEKQRTIQAKKEVEQRRAGGYSRKYASKAKNLADDMVRNTARDLLYYAVTQDAMLIFENLSRGFGRQGKRTFMAERQYTRMEDWLTAKLAYEGLPSKTYLSKTLAQYTSKTCSNCGFTITSADYDRVLEKLKKTATGWMTTINGKELKVEGQITYYNRYKRQNVVKDLSVELDRLSEESVNNDISSWTKGRSGEALSLLKKRFSHRPVQEKFVCLNCGFETHADEQAALNIARSWLFLRSQEYKKYQTNKTTGNTDKRAFVETWQSFYRKKLKEVWKPAV

SEQ ID NO: 31617 - protein, 979 aa, synthetic construct
  REGION 1..979: note = engineered CasX variant
QEIGKRINKIRRRLVKDSNTKKAGKTGPMKTLLVRVMTPDLRERLENLRKKPENIPQPISNTSRANLNKLLTDYTEMKKAILHVYWEEFQKDPVGLMSRVAQPASKKIDQNKLKPEMDEKGNLTTAGFACSQCGQPLFVYKLEQVSEKGKAYTNYFGRCNVAEHEKLIKLAQLKPEKDSDEAVTYSLGKFGQRALDFYSIHVTKESTHPVKPLAQIAGNRYASGPVGKALSDACMGTIASFLSKYQDIIIEHQKVVKGNQKRLESLRELAGKENLEYPSVTLPPQPHTKEGVDAYNEVIARVRTWVNLNLWQKLKLSRDDAKPLLRLKGFPSFPLVERQANEVDWWDMVCNVKKLINEKKEDGKVFWQNLAGYKRQEALRPYLSSEEDRKKGKKFARYQLGDLLLHLEKKHGEDWGKVYDEAWERIDKKVEGLSKHIKLEEERRSEDAQSKAALTDWLRAKASFVIEGLKEADKDEFCRCELKLQKWYGDLRGKPFAIEAENSILDISGFSKQYNCAFIWQKDGVKKLNLYLIINYFKGGKLRFKKIKPEAFEANRFYTVINKKSGEIVPMEVNFNFDDPNLIILPLAFGKRQGREFIWNDLLSLETGSLKLANGRVIEKTLYNRRTRQDEPALFVALTFERREVLDSSNIKPMNLIGVDRGENIPAVIALTDPEGCPLSRFKDSLGNPTHILRIGESYKEKQRTIQAKKEVEQRRAGGYSRKYASKAKNLADDMVRNTARDLLYYAVTQDAMLIFENLSRGFGRQGKRTFMAERQYTRMEDWLTAKLAYEGLPSKTYLSKTLAQYTSKTCSNCGFTITSADYDRVLEKLKKTATGWMTTINGKELKVEGQITYYNRYKRQNVVKDLSVELDRLSEESVNNDISSWTKGRSGEALSLLKKRFSHRPVQEKFVCLNCGFETHADEQAALNIARSWLFLRSQEYKKYQTNKTTGNTDKRAFVETWQSFYRKKLKEVWKPAV

SEQ ID NO: 31618 - protein, 978 aa, synthetic construct
  REGION 1..978: note = engineered CasX variant
QEIGKRINKIRRRLVKDSNTKKAGKTGPMKTLLVRVMTPDLRERLENLRKKPENIPQPISNTSRANLNKLLTDYTEMKKAILHVYWEEFQKDPVGLMSRVAQPASKKIDQNKLKPEMDEKGNLTTAGFACSQCGQPLFVYKLEQVSEKGKAYTNYFGRCNVAEHEKLILLAQLKPEKDSDEAVTYSLGKFGQRALDFYSIHVTKESTHPVKPLAQIAGNRYASPVGKALSDACMGTIASFLSKYQDIIIEHQKVVKGNQKRLESLRELAGKENLEYPSVTLPPQPHTKEGVDAYNEVIARVRTWVNLNLWQKLKLSRDDAKPLLRLKGFPSFPLVERQANEVDWWDMVCNVKKLINEKKEDGKVFWQNLAGYKRQEALRPYLSSEEDRKKGKKFARYQLGDLLLHLEKKHGEDWGKVYDEAWERIDKKVEGLSKHIKLEEERRSEDAQSKAALTDWLRAKASFVIEGLKEADKDEFCRCELKLQKWYGDLRGKPFAIEAENSILDISGFSKQYNCAFIWQKDGVKKLNLYLIINYFKGGKLRFKKIKPEAFEANRFYTVINKKSGEIVPMEVNFNFDDPNLIILPLAFGKRQGREFIWNDLLSLETGSLKLANGRVIEKTLYNRRTRQDEPALFVALTFERREVLDSSNIKPMNLIGVDRGENIPAVIALTDPEGCPLSRFKDSLGNPTHILRIGESYKEKQRTIQAKKEVEQRRAGGYSRKYASKAKNLADDMVRNTARDLLYYAVTQDAMLIFENLSRGFGRQGKRTFMAERQYTRMEDWLTAKLAYEGLPSKTYLSKTLAQYTSKTCSNCGFTITSADYDRVLEKLKKTATGWMTTINGKELKVEGQITYYNRYKRQNVVKDLSVELDRLSEESVNNDISSWTKGRSGEALSLLKKRFSHRPVQEKFVCLNCGFETHADEQAALNIARSWLFLRSQEYKKYQTNKTTGNTDKRAFVETWQSFYRKKLKEVWKPAV

SEQ ID NO: 31619 - protein, 979 aa, synthetic construct
  REGION 1..979: note = engineered CasX variant
QEIGKRINKIRRRLVKDSNTKKAGKTGPMKTLLVRVMTPDLRERLENLRKKPENIPQPISNTSRANLNKLLTDYTEMKKAILHVYWEEFQKDPVGLMSRVAQPASKKIDQNKLKPEMDEKGNLTTAGFACSQCGQPLFVYKLEQVSEKGKAYTNYFGRCNVAEHEKLILLAQLKPEKDSDEAVTYSLGKFGQRALDFYSIHVTKESTHPVKPLAQIAGNRYASYPVGKALSDACMGTIASFLSKYQDIIIEHQKVVKGNQKRLESLRELAGKENLEYPSVTLPPQPHTKEGVDAYNEVIARVRWWVNLNLWQKLKLSRDDAKPLLRLKGFPSFPLVERQANEVDWWDMVCNVKKLINEKKEDGKVFWQNLAGYKRQEALRPYLSSEEDRKKGKKFARYQLGDLLLHLEKKHGEDWGKVYDEAWERIDKKVEGLSKHIKLEEERRSEDAQSKAALTDWLRAKASFVIEGLKEADKDEFCRCELKLQKWYGDLRGKPFAIEAENSILDISGFSKQYNCAFIWQKDGVKKLNLYLIINYFKGGKLRFKKIKPEAFEANRFYTVINKKSGEIVPMEVNFNFDDPNLIILPLAFGKRQGREFIWNDLLSLETGSLKLANGRVIEKTLYNRRTRQDEPALFVALTFERREVLDSSNIKPMNLIGVDRGENIPAVIALTDPEGCPLSRFKDSLGNPTHILRIGESYKEKQRTIQAKKEVEQRRAGGYSRKYASKAKNLADDMVRNTARDLLYYAVTQDAMLIFENLSRGFGRQGKRTFMAERQYTRMEDWLTAKLAYEGLPSKTYLSKTLAQYTSKTCSNCGFTITSADYDRVLEKLKKTATGWMTTINGKELKVEGQITYYNRYKRQNVVKDLSVELDRLSEESVNNDISSWTKGRSGEALSLLKKRFSHRPVQEKFVCLNCGFETHADEQAALNIARSWLFLRSQEYKKYQTNKTTGNTDKRAFVETWQSFYRKKLKEVWKPAV

SEQ ID NO: 31620 - protein, 979 aa, synthetic construct
  REGION 1..979: note = engineered CasX variant
QEIGKRINKIRRRLVKDSNTKKAGKTGPMKTLLVRVMTPDLRERLENLRKKPENIPQPISNTSRANLNKLLTDYTEMKKAILHVYWEEFQKDPVGLMSRVAQPASKKIDQNKLKPEMDEKGNLTTAGFACSQCGQPLFVYKLEQVSEKGKAYTNYFGRCNVAEHEKLILLAQLKPEKDSDEAVTYSLGKFGQRALDFYSIHVTKESTHPVKPLAQIAGNRYASHPVGKALSDACMGTIASFLSKYQDIIIEHQKVVKGNQKRLESLRELAGKENLEYPSVTLPPQPHTKEGVDAYNEVIARVRWWVNLNLWQKLKLSRDDAKPLLRLKGFPSFPLVERQANEVDWWDMVCNVKKLINEKKEDGKVFWQNLAGYKRQEALRPYLSSEEDRKKGKKFARYQLGDLLLHLEKKHGEDWGKVYDEAWERIDKKVEGLSKHIKLEEERRSEDAQSKAALTDWLRAKASFVIEGLKEADKDEFCRCELKLQKWYGDLRGKPFAIEAENSILDISGFSKQYNCAFIWQKDGVKKLNLYLIINYFKGGKLRFKKIKPEAFEANRFYTVINKKSGEIVPMEVNFNFDDPNLIILPLAFGKRQGREFIWNDLLSLETGSLKLANGRVIEKTLYNRRTRQDEPALFVALTFERREVLDSSNIKPMNLIGVDRGENIPAVIALTDPEGCPLSRFKDSLGNPTHILRIGESYKEKQRTIQAKKEVEQRRAGGYSRKYASKAKNLADDMVRNTARDLLYYAVTQDAMLIFENLSRGFGRQGKRTFMAERQYTRMEDWLTAKLAYEGLPSKTYLSKTLAQYTSKTCSNCGFTITSADYDRVLEKLKKTATGWMTTINGKELKVEGQITYYNRYKRQNVVKDLSVELDRLSEESVNNDISSWTKGRSGEALSLLKKRFSHRPVQEKFVCLNCGFETHADEQAALNIARSWLFLRSQEYKKYQTNKTTGNTDKRAFVETWQSFYRKKLKEVWKPAV

SEQ ID NO: 31621 - protein, 979 aa, synthetic construct
  REGION 1..979: note = engineered CasX variant
QEIGKRINKIRRRLVKDSNTKKAGKTGPMKTLLVRVMTPDLRERLENLRKKPENIPQPISNTSRANLNKLLTDYTEMKKAILHVYWEEFQKDPVGLMSRVAQPASKKIDQNKLKPEMDEKGNLTTAGFACSQCGQPLFVYKLEQVSEKGKAYTNYFGRCNVAEHEKLILLAQLKPEKDSDEAVTYSLGKFGQRALDFYSIHVTKESTHPVKPLAQIAGNRYASSPVGKALSDACMGTIASFLSKYQDIIIEHQKVVKGNQKRLESLRELAGKENLEYPSVTLPPQPHTKEGVDAYNEVIARVRWWVNLNLWQKLKLSRDDAKPLLRLKGFPSFPLVERQANEVDWWDMVCNVKKLINEKKEDGKVFWQNLAGYKRQEALRPYLSSEEDRKKGKKFARYQLGDLLLHLEKKHGEDWGKVYDEAWERIDKKVEGLSKHIKLEEERRSEDAQSKAALTDWLRAKASFVIEGLKEADKDEFCRCELKLQKWYGDLRGKPFAIEAENSILDISGFSKQYNCAFIWQKDGVKKLNLYLIINYFKGGKLRFKKIKPEAFEANRFYTVINKKSGEIVPMEVNFNFDDPNLIILPLAFGKRQGREFIWNDLLSLETGSLKLANGRVIEKTLYNRRTRQDEPALFVALTFERREVLDSSNIKPMNLIGVDRGENIPAVIALTDPEGCPLSRFKDSLGNPTHILRIGESYKEKQRTIQAKKEVEQRRAGGYSRKYASKAKNLADDMVRNTARDLLYYAVTQDAMLIFENLSRGFGRQGKRTFMAERQYTRMEDWLTAKLAYEGLPSKTYLSKTLAQYTSKTCSNCGFTITSADYDRVLEKLKKTATGWMTTINGKELKVEGQITYYNRYKRQNVVKDLSVELDRLSEESVNNDISSWTKGRSGEALSLLKKRFSHRPVQEKFVCLNCGFETHADEQAALNIARSWLFLRSQEYKKYQTNKTTGNTDKRAFVETWQSFYRKKLKEVWKPAV

SEQ ID NO: 31622 - protein, 979 aa, synthetic construct
  REGION 1..979: note = engineered CasX variant
QEIGKRINKIRRRLVKDSNTKKAGKTGPMKTLLVRVMTPDLRERLENLRKKPENIPQPISNTSRANLNKLLTDYTEMKKAILHVYWEEFQKDPVGLMSRVAQPASKKIDQNKLKPEMDEKGNLTTAGFACSQCGQPLFVYKLEQVSEKGKAYTNYFGRCNVAEHEKLILLAQLKPEKDSDEAVTYSLGKFGQRALDFYSIHVTKESTHPVKPLAQIAGNRYASTPVGKALSDACMGTIASFLSKYQDIIIEHQKVVKGNQKRLESLRELAGKENLEYPSVTLPPQPHTKEGVDAYNEVIARVRWWVNLNLWQKLKLSRDDAKPLLRLKGFPSFPLVERQANEVDWWDMVCNVKKLINEKKEDGKVFWQNLAGYKRQEALRPYLSSEEDRKKGKKFARYQLGDLLLHLEKKHGEDWGKVYDEAWERIDKKVEGLSKHIKLEEERRSEDAQSKAALTDWLRAKASFVIEGLKEADKDEFCRCELKLQKWYGDLRGKPFAIEAENSILDISGFSKQYNCAFIWQKDGVKKLNLYLIINYFKGGKLRFKKIKPEAFEANRFYTVINKKSGEIVPMEVNFNFDDPNLIILPLAFGKRQGREFIWNDLLSLETGSLKLANGRVIEKTLYNRRTRQDEPALFVALTFERREVLDSSNIKPMNLIGVDRGENIPAVIALTDPEGCPLSRFKDSLGNPTHILRIGESYKEKQRTIQAKKEVEQRRAGGYSRKYASKAKNLADDMVRNTARDLLYYAVTQDAMLIFENLSRGFGRQGKRTFMAERQYTRMEDWLTAKLAYEGLPSKTYLSKTLAQYTSKTCSNCGFTITSADYDRVLEKLKKTATGWMTTINGKELKVEGQITYYNRYKRQNVVKDLSVELDRLSEESVNNDISSWTKGRSGEALSLLKKRFSHRPVQEKFVCLNCGFETHADEQAALNIARSWLFLRSQEYKKYQTNKTTGNTDKRAFVETWQSFYRKKLKEVWKPAV

SEQ ID NO: 31623 - protein, 979 aa, synthetic construct
  REGION 1..979: note = engineered CasX variant
QEIGKRINKIRRRLVKDSNTKKAGKTGPMKTLLVRVMTPDLRERLENLRKKPENIPQPISNTSRANLNKLLTDYTEMKKAILHVYWEEFQKDPVGLMSRVAQPASKKIDQNKLKPEMDEKGNLTTAGFACSQCGQPLFVYKLEQVSEKGKAYTNYFGRCNVAEHEKLILLAQLKPEKDSDEAVTYSLGKFGQRALDFYSIHVTKESTHPVKPLAQIAGNRYASAPVGKALSDACMGTIASFLSKYQDIIIEHQKVVKGNQKRLESLRELAGKENLEYPSVTLPPQPHTKEGVDAYNEVIARVRWWVNLNLWQKLKLSRDDAKPLLRLKGFPSFPLVERQANEVDWWDMVCNVKKLINEKKEDGKVFWQNLAGYKRQEALRPYLSSEEDRKKGKKFARYQLGDLLLHLEKKHGEDWGKVYDEAWERIDKKVEGLSKHIKLEEERRSEDAQSKAALTDWLRAKASFVIEGLKEADKDEFCRCELKLQKWYGDLRGKPFAIEAENSILDISGFSKQYNCAFIWQKDGVKKLNLYLIINYFKGGKLRFKKIKPEAFEANRFYTVINKKSGEIVPMEVNFNFDDPNLIILPLAFGKRQGREFIWNDLLSLETGSLKLANGRVIEKTLYNRRTRQDEPALFVALTFERREVLDSSNIKPMNLIGVDRGENIPAVIALTDPEGCPLSRFKDSLGNPTHILRIGESYKEKQRTIQAKKEVEQRRAGGYSRKYASKAKNLADDMVRNTARDLLYYAVTQDAMLIFENLSRGFGRQGKRTFMAERQYTRMEDWLTAKLAYEGLPSKTYLSKTLAQYTSKTCSNCGFTITSADYDRVLEKLKKTATGWMTTINGKELKVEGQITYYNRYKRQNVVKDLSVELDRLSEESVNNDISSWTKGRSGEALSLLKKRFSHRPVQEKFVCLNCGFETHADEQAALNIARSWLFLRSQEYKKYQTNKTTGNTDKRAFVETWQSFYRKKLKEVWKPAV

SEQ ID NO: 31624 - protein, 979 aa, synthetic construct
  REGION 1..979: note = engineered CasX variant
QEIGKRINKIRRRLVKDSNTKKAGKTGPMKTLLVRVMTPDLRERLENLRKKPENIPQPISNTSRANLNKLLTDYTEMKKAILHVYWEEFQKDPVGLMSRVAQPASKKIDQNKLKPEMDEKGNLTTAGFACSQCGQPLFVYKLEQVSEKGKAYTNYFGRCNVAEHEKLILLAQLKPEKDSDEAVTYSLGKFGQRALDFYSIHVTKESTHPVKPLAQIAGNRYASVPVGKALSDACMGTIASFLSKYQDIIIEHQKVVKGNQKRLESLRELAGKENLEYPSVTLPPQPHTKEGVDAYNEVIARVRWWVNLNLWQKLKLSRDDAKPLLRLKGFPSFPLVERQANEVDWWDMVCNVKKLINEKKEDGKVFWQNLAGYKRQEALRPYLSSEEDRKKGKKFARYQLGDLLLHLEKKHGEDWGKVYDEAWERIDKKVEGLSKHIKLEEERRSEDAQSKAALTDWLRAKASFVIEGLKEADKDEFCRCELKLQKWYGDLRGKPFAIEAENSILDISGFSKQYNCAFIWQKDGVKKLNLYLIINYFKGGKLRFKKIKPEAFEANRFYTVINKKSGEIVPMEVNFNFDDPNLIILPLAFGKRQGREFIWNDLLSLETGSLKLANGRVIEKTLYNRRTRQDEPALFVALTFERREVLDSSNIKPMNLIGVDRGENIPAVIALTDPEGCPLSRFKDSLGNPTHILRIGESYKEKQRTIQAKKEVEQRRAGGYSRKYASKAKNLADDMVRNTARDLLYYAVTQDAMLIFENLSRGFGRQGKRTFMAERQYTRMEDWLTAKLAYEGLPSKTYLSKTLAQYTSKTCSNCGFTITSADYDRVLEKLKKTATGWMTTINGKELKVEGQITYYNRYKRQNVVKDLSVELDRLSEESVNNDISSWTKGRSGEALSLLKKRFSHRPVQEKFVCLNCGFETHADEQAALNIARSWLFLRSQEYKKYQTNKTTGNTDKRAFVETWQSFYRKKLKEVWKPAV

SEQ ID NO: 31625 - protein, 979 aa, synthetic construct
  REGION 1..979: note = engineered CasX variant
QEIGKRINKIRRRLVKDSNTKKAGKTGPMKTLLVRVMTPDLRERLENLRKKPENIPQPISNTSRANLNKLLTDYTEMKKAILHVYWEEFQKDPVGLMSRVAQPASKKIDQNKLKPEMDEKGNLTTAGFACSQCGQPLFVYKLEQVSEKGKAYTNYFGRCNVAEHEKLIKLAQLKPEKDSDEAVTYSLGKFGQRALDFYSIHVTKESTHPVKPLAQIAGNRYASGPVGKALSDACMGTIASFLSKYQDIIIEHQKVVKGNQKRLESLRELAGKENLEYPSVTLPPQPHTKEGVDAYNEVIARVRWWVNLNLWQKLKLSRDDAKPLLRLKGFPSFPLVERQANEVDWWDMVCNVKKLINEKKEDGKVFWQNLAGYKRQEALRPYLSSEEDRKKGKKFARYQLGDLLLHLEKKHGEDWGKVYDEAWERIDKKVEGLSKHIKLEEERRSEDAQSKAALTDWLRAKASFVIEGLKEADKDEFCRCELKLQKWYGDLRGKPFAIEAENSILDISGFSKQYNCAFIWQKDGVKKLNLYLIINYFKGGKLRFKKIKPEAFEANRFYTVINKKSGEIVPMEVNFNFDDPNLIILPLAFGKRQGREFIWNDLLSLETGSLKLANGRVIEKTLYNRRTRQDEPALFVALTFERREVLDSSNIKPMNLIGVDRGENIPAVIALTDPEGCPLSRFKDSLGNPTHILRIGESYKEKQRTIQAKKEVEQRRAGGYSRKYASKAKNLADDMVRNTARDLLYYAVTQDAMLIFENLSRGFGRQGKRTFMAERQYTRMEDWLTAKLAYEGLPSKTYLSKTLAQYTSKTCSNCGFTITSADYDRVLEKLKKTATGWMTTINGKELKVEGQITYYNRYKRQNVVKDLSVELDRLSEESVNNDISSWTKGRSGEALSLLKKRFSHRPVQEKFVCLNCGFETHADEQAALNIARSWLFLRSQEYKKYQTNKTTGNTDKRAFVETWQSFYRKKLKEVWKPAV

SEQ ID NO: 31626 - protein, 978 aa, synthetic construct
  REGION 1..978: note = engineered CasX variant
QEIGKRINKIRRRLVKDSNTKKAGKTGPMKTLLVRVMTPDLRERLENLRKKPENIPQPISNTSRANLNKLLTDYTEMKKAILHVYWEEFQKDPVGLMSRVAQPASKKIDQNKLKPEMDEKGNLTTAGFACSQCGQPLFVYKLEQVSEKGKAYTNYFGRCNVAEHEKLILLAQLKPEKDSDEAVTYSLGKFGQRALDFYSIHVTKESTHPVKPLAQIAGNRYASPVGKALSDACMGTIASFLSKYQDIIIEHQKVVKGNQKRLESLRELAGKENLEYPSVTLPPQPHTKEGVDAYNEVIARVRWWVNLNLWQKLKLSRDDAKPLLRLKGFPSFPLVERQANEVDWWDMVCNVKKLINEKKEDGKVFWQNLAGYKRQEALRPYLSSEEDRKKGKKFARYQLGDLLLHLEKKHGEDWGKVYDEAWERIDKKVEGLSKHIKLEEERRSEDAQSKAALTDWLRAKASFVIEGLKEADKDEFCRCELKLQKWYGDLRGKPFAIEAENSILDISGFSKQYNCAFIWQKDGVKKLNLYLIINYFKGGKLRFKKIKPEAFEANRFYTVINKKSGEIVPMEVNFNFDDPNLIILPLAFGKRQGREFIWNDLLSLETGSLKLANGRVIEKTLYNRRTRQDEPALFVALTFERREVLDSSNIKPMNLIGVDRGENIPAVIALTDPEGCPLSRFKDSLGNPTHILRIGESYKEKQRTIQAKKEVEQRRAGGYSRKYASKAKNLADDMVRNTARDLLYYAVTQDAMLIFENLSRGFGRQGKRTFMAERQYTRMEDWLTAKLAYEGLPSKTYLSKTLAQYTSKTCSNCGFTITSADYDRVLEKLKKTATGWMTTINGKELKVEGQITYYNRYKRQNVVKDLSVELDRLSEESVNNDISSWTKGRSGEALSLLKKRFSHRPVQEKFVCLNCGFETHADEQAALNIARSWLFLRSQEYKKYQTNKTTGNTDKRAFVETWQSFYRKKLKEVWKPAV

SEQ ID NO: 31627 - protein, 980 aa, synthetic construct
  REGION 1..980: note = engineered CasX variant
QEIGKRINKIRRRLVKDSNTKKAGKTGPMKTLLVRVMTPDLRERLENLRKKPENIPQPISNTSRANLNKLLTDYTEMKKAILHVYWEEFQKDPVGLMSRVAQPASKKIDQNKLKPEMDEKGNLTTAGFACSQCGQPLFVYKLEQVSEKGKAYTNYFGRCNVAEHEKLILLAQLKPEKDSDEAVTYSLGKFGQRALDFYSIHVTKESTHPVKPLAQIAGNRYASYPVGKALSDACMGTIASFLSKYQDIIIEHQKVVKGNQKRLESLRELAGKENLEYPSVTLPPQPHTKEGVDAYNEVIARVRMWVNLNLWQKLKLSRDDAKPLLRLKGFPSFPLVERQQANEVDWWDMVCNVKKLINEKKEDGKVFWQNLAGYKRQEALRPYLSSEEDRKKGKKFARYQLGDLLLHLEKKHGEDWGKVYDEAWERIDKKVEGLSKHIKLEEERRSEDAQSKAALTDWLRAKASFVIEGLKEADKDEFCRCELKLQKWYGDLRGKPFAIEAENSILDISGFSKQYNCAFIWQKDGVKKLNLYLIINYFKGGKLRFKKIKPEAFEANRFYTVINKKSGEIVPMEVNFNFDDPNLIILPLAFGKRQGREFIWNDLLSLETGSLKLANGRVIEKTLYNRRTRQDEPALFVALTFERREVLDSSNIKPMNLIGVDRGENIPAVIALTDPEGCPLSRFKDSLGNPTHILRIGESYKEKQRTIQAKKEVEQRRAGGYSRKYASKAKNLADDMVRNTARDLLYYAVTQDAMLIFENLSRGFGRQGKRTFMAERQYTRMEDWLTAKLAYEGLPSKTYLSKTLAQYTSKTCSNCGFTITSADYDRVLEKLKKTATGWMTTINGKELKVEGQITYYNRYKRQNVVKDLSVELDRLSEESVNNDISSWTKGRSGEALSLLKKRFSHRPVQEKFVCLNCGFETHADEQAALNIARSWLFLRSQEYKKYQTNKTTGNTDKRAFVETWQSFYRKKLKEVWKPAV

SEQ ID NO: 31628 - protein, 980 aa, synthetic construct
  REGION 1..980: note = engineered CasX variant
QEIGKRINKIRRRLVKDSNTKKAGKTGPMKTLLVRVMTPDLRERLENLRKKPENIPQPISNTSRANLNKLLTDYTEMKKAILHVYWEEFQKDPVGLMSRVAQPASKKIDQNKLKPEMDEKGNLTTAGFACSQCGQPLFVYKLEQVSEKGKAYTNYFGRCNVAEHEKLILLAQLKPEKDSDEAVTYSLGKFGQRALDFYSIHVTKESTHPVKPLAQIAGNRYASHPVGKALSDACMGTIASFLSKYQDIIIEHQKVVKGNQKRLESLRELAGKENLEYPSVTLPPQPHTKEGVDAYNEVIARVRMWVNLNLWQKLKLSRDDAKPLLRLKGFPSFPLVERQQANEVDWWDMVCNVKKLINEKKEDGKVFWQNLAGYKRQEALRPYLSSEEDRKKGKKFARYQLGDLLLHLEKKHGEDWGKVYDEAWERIDKKVEGLSKHIKLEEERRSEDAQSKAALTDWLRAKASFVIEGLKEADKDEFCRCELKLQKWYGDLRGKPFAIEAENSILDISGFSKQYNCAFIWQKDGVKKLNLYLIINYFKGGKLRFKKIKPEAFEANRFYTVINKKSGEIVPMEVNFNFDDPNLIILPLAFGKRQGREFIWNDLLSLETGSLKLANGRVIEKTLYNRRTRQDEPALFVALTFERREVLDSSNIKPMNLIGVDRGENIPAVIALTDPEGCPLSRFKDSLGNPTHILRIGESYKEKQRTIQAKKEVEQRRAGGYSRKYASKAKNLADDMVRNTARDLLYYAVTQDAMLIFENLSRGFGRQGKRTFMAERQYTRMEDWLTAKLAYEGLPSKTYLSKTLAQYTSKTCSNCGFTITSADYDRVLEKLKKTATGWMTTINGKELKVEGQITYYNRYKRQNVVKDLSVELDRLSEESVNNDISSWTKGRSGEALSLLKKRFSHRPVQEKFVCLNCGFETHADEQAALNIARSWLFLRSQEYKKYQTNKTTGNTDKRAFVETWQSFYRKKLKEVWKPAV

SEQ ID NO: 31629 - protein, 980 aa, synthetic construct
  REGION 1..980: note = engineered CasX variant
QEIGKRINKIRRRLVKDSNTKKAGKTGPMKTLLVRVMTPDLRERLENLRKKPENIPQPISNTSRANLNKLLTDYTEMKKAILHVYWEEFQKDPVGLMSRVAQPASKKIDQNKLKPEMDEKGNLTTAGFACSQCGQPLFVYKLEQVSEKGKAYTNYFGRCNVAEHEKLILLAQLKPEKDSDEAVTYSLGKFGQRALDFYSIHVTKESTHPVKPLAQIAGNRYASSPVGKALSDACMGTIASFLSKYQDIIIEHQKVVKGNQKRLESLRELAGKENLEYPSVTLPPQPHTKEGVDAYNEVIARVRMWVNLNLWQKLKLSRDDAKPLLRLKGFPSFPLVERQQANEVDWWDMVCNVKKLINEKKEDGKVFWQNLAGYKRQEALRPYLSSEEDRKKGKKFARYQLGDLLLHLEKKHGEDWGKVYDEAWERIDKKVEGLSKHIKLEEERRSEDAQSKAALTDWLRAKASFVIEGLKEADKDEFCRCELKLQKWYGDLRGKPFAIEAENSILDISGFSKQYNCAFIWQKDGVKKLNLYLIINYFKGGKLRFKKIKPEAFEANRFYTVINKKSGEIVPMEVNFNFDDPNLIILPLAFGKRQGREFIWNDLLSLETGSLKLANGRVIEKTLYNRRTRQDEPALFVALTFERREVLDSSNIKPMNLIGVDRGENIPAVIALTDPEGCPLSRFKDSLGNPTHILRIGESYKEKQRTIQAKKEVEQRRAGGYSRKYASKAKNLADDMVRNTARDLLYYAVTQDAMLIFENLSRGFGRQGKRTFMAERQYTRMEDWLTAKLAYEGLPSKTYLSKTLAQYTSKTCSNCGFTITSADYDRVLEKLKKTATGWMTTINGKELKVEGQITYYNRYKRQNVVKDLSVELDRLSEESVNNDISSWTKGRSGEALSLLKKRFSHRPVQEKFVCLNCGFETHADEQAALNIARSWLFLRSQEYKKYQTNKTTGNTDKRAFVETWQSFYRKKLKEVWKPAV

SEQ ID NO: 31630 - protein, 980 aa, synthetic construct
  REGION 1..980: note = engineered CasX variant
QEIGKRINKIRRRLVKDSNTKKAGKTGPMKTLLVRVMTPDLRERLENLRKKPENIPQPISNTSRANLNKLLTDYTEMKKAILHVYWEEFQKDPVGLMSRVAQPASKKIDQNKLKPEMDEKGNLTTAGFACSQCGQPLFVYKLEQVSEKGKAYTNYFGRCNVAEHEKLILLAQLKPEKDSDEAVTYSLGKFGQRALDFYSIHVTKESTHPVKPLAQIAGNRYASTPVGKALSDACMGTIASFLSKYQDIIIEHQKVVKGNQKRLESLRELAGKENLEYPSVTLPPQPHTKEGVDAYNEVIARVRMWVNLNLWQKLKLSRDDAKPLLRLKGFPSFPLVERQQANEVDWWDMVCNVKKLINEKKEDGKVFWQNLAGYKRQEALRPYLSSEEDRKKGKKFARYQLGDLLLHLEKKHGEDWGKVYDEAWERIDKKVEGLSKHIKLEEERRSEDAQSKAALTDWLRAKASFVIEGLKEADKDEFCRCELKLQKWYGDLRGKPFAIEAENSILDISGFSKQYNCAFIWQKDGVKKLNLYLIINYFKGGKLRFKKIKPEAFEANRFYTVINKKSGEIVPMEVNFNFDDPNLIILPLAFGKRQGREFIWNDLLSLETGSLKLANGRVIEKTLYNRRTRQDEPALFVALTFERREVLDSSNIKPMNLIGVDRGENIPAVIALTDPEGCPLSRFKDSLGNPTHILRIGESYKEKQRTIQAKKEVEQRRAGGYSRKYASKAKNLADDMVRNTARDLLYYAVTQDAMLIFENLSRGFGRQGKRTFMAERQYTRMEDWLTAKLAYEGLPSKTYLSKTLAQYTSKTCSNCGFTITSADYDRVLEKLKKTATGWMTTINGKELKVEGQITYYNRYKRQNVVKDLSVELDRLSEESVNNDISSWTKGRSGEALSLLKKRFSHRPVQEKFVCLNCGFETHADEQAALNIARSWLFLRSQEYKKYQTNKTTGNTDKRAFVETWQSFYRKKLKEVWKPAV

SEQ ID NO: 31631 - protein, 980 aa, synthetic construct
  REGION 1..980: note = engineered CasX variant
QEIGKRINKIRRRLVKDSNTKKAGKTGPMKTLLVRVMTPDLRERLENLRKKPENIPQPISNTSRANLNKLLTDYTEMKKAILHVYWEEFQKDPVGLMSRVAQPASKKIDQNKLKPEMDEKGNLTTAGFACSQCGQPLFVYKLEQVSEKGKAYTNYFGRCNVAEHEKLILLAQLKPEKDSDEAVTYSLGKFGQRALDFYSIHVTKESTHPVKPLAQIAGNRYASAPVGKALSDACMGTIASFLSKYQDIIIEHQKVVKGNQKRLESLRELAGKENLEYPSVTLPPQPHTKEGVDAYNEVIARVRMWVNLNLWQKLKLSRDDAKPLLRLKGFPSFPLVERQQANEVDWWDMVCNVKKLINEKKEDGKVFWQNLAGYKRQEALRPYLSSEEDRKKGKKFARYQLGDLLLHLEKKHGEDWGKVYDEAWERIDKKVEGLSKHIKLEEERRSEDAQSKAALTDWLRAKASFVIEGLKEADKDEFCRCELKLQKWYGDLRGKPFAIEAENSILDISGFSKQYNCAFIWQKDGVKKLNLYLIINYFKGGKLRFKKIKPEAFEANRFYTVINKKSGEIVPMEVNFNFDDPNLIILPLAFGKRQGREFIWNDLLSLETGSLKLANGRVIEKTLYNRRTRQDEPALFVALTFERREVLDSSNIKPMNLIGVDRGENIPAVIALTDPEGCPLSRFKDSLGNPTHILRIGESYKEKQRTIQAKKEVEQRRAGGYSRKYASKAKNLADDMVRNTARDLLYYAVTQDAMLIFENLSRGFGRQGKRTFMAERQYTRMEDWLTAKLAYEGLPSKTYLSKTLAQYTSKTCSNCGFTITSADYDRVLEKLKKTATGWMTTINGKELKVEGQITYYNRYKRQNVVKDLSVELDRLSEESVNNDISSWTKGRSGEALSLLKKRFSHRPVQEKFVCLNCGFETHADEQAALNIARSWLFLRSQEYKKYQTNKTTGNTDKRAFVETWQSFYRKKLKEVWKPAV

SEQ ID NO: 31632 - protein, 980 aa, synthetic construct
  REGION 1..980: note = engineered CasX variant
QEIGKRINKIRRRLVKDSNTKKAGKTGPMKTLLVRVMTPDLRERLENLRKKPENIPQPISNTSRANLNKLLTDYTEMKKAILHVYWEEFQKDPVGLMSRVAQPASKKIDQNKLKPEMDEKGNLTTAGFACSQCGQPLFVYKLEQVSEKGKAYTNYFGRCNVAEHEKLILLAQLKPEKDSDEAVTYSLGKFGQRALDFYSIHVTKESTHPVKPLAQIAGNRYASVPVGKALSDACMGTIASFLSKYQDIIIEHQKVVKGNQKRLESLRELAGKENLEYPSVTLPPQPHTKEGVDAYNEVIARVRMWVNLNLWQKLKLSRDDAKPLLRLKGFPSFPLVERQQANEVDWWDMVCNVKKLINEKKEDGKVFWQNLAGYKRQEALRPYLSSEEDRKKGKKFARYQLGDLLLHLEKKHGEDWGKVYDEAWERIDKKVEGLSKHIKLEEERRSEDAQSKAALTDWLRAKASFVIEGLKEADKDEFCRCELKLQKWYGDLRGKPFAIEAENSILDISGFSKQYNCAFIWQKDGVKKLNLYLIINYFKGGKLRFKKIKPEAFEANRFYTVINKKSGEIVPMEVNFNFDDPNLIILPLAFGKRQGREFIWNDLLSLETGSLKLANGRVIEKTLYNRRTRQDEPALFVALTFERREVLDSSNIKPMNLIGVDRGENIPAVIALTDPEGCPLSRFKDSLGNPTHILRIGESYKEKQRTIQAKKEVEQRRAGGYSRKYASKAKNLADDMVRNTARDLLYYAVTQDAMLIFENLSRGFGRQGKRTFMAERQYTRMEDWLTAKLAYEGLPSKTYLSKTLAQYTSKTCSNCGFTITSADYDRVLEKLKKTATGWMTTINGKELKVEGQITYYNRYKRQNVVKDLSVELDRLSEESVNNDISSWTKGRSGEALSLLKKRFSHRPVQEKFVCLNCGFETHADEQAALNIARSWLFLRSQEYKKYQTNKTTGNTDKRAFVETWQSFYRKKLKEVWKPAV

SEQ ID NO: 31633 - protein, 980 aa, synthetic construct
  REGION 1..980: note = engineered CasX variant
QEIGKRINKIRRRLVKDSNTKKAGKTGPMKTLLVRVMTPDLRERLENLRKKPENIPQPISNTSRANLNKLLTDYTEMKKAILHVYWEEFQKDPVGLMSRVAQPASKKIDQNKLKPEMDEKGNLTTAGFACSQCGQPLFVYKLEQVSEKGKAYTNYFGRCNVAEHEKLIKLAQLKPEKDSDEAVTYSLGKFGQRALDFYSIHVTKESTHPVKPLAQIAGNRYASGPVGKALSDACMGTIASFLSKYQDIIIEHQKVVKGNQKRLESLRELAGKENLEYPSVTLPPQPHTKEGVDAYNEVIARVRMWVNLNLWQKLKLSRDDAKPLLRLKGFPSFPLVERQQANEVDWWDMVCNVKKLINEKKEDGKVFWQNLAGYKRQEALRPYLSSEEDRKKGKKFARYQLGDLLLHLEKKHGEDWGKVYDEAWERIDKKVEGLSKHIKLEEERRSEDAQSKAALTDWLRAKASFVIEGLKEADKDEFCRCELKLQKWYGDLRGKPFAIEAENSILDISGFSKQYNCAFIWQKDGVKKLNLYLIINYFKGGKLRFKKIKPEAFEANRFYTVINKKSGEIVPMEVNFNFDDPNLIILPLAFGKRQGREFIWNDLLSLETGSLKLANGRVIEKTLYNRRTRQDEPALFVALTFERREVLDSSNIKPMNLIGVDRGENIPAVIALTDPEGCPLSRFKDSLGNPTHILRIGESYKEKQRTIQAKKEVEQRRAGGYSRKYASKAKNLADDMVRNTARDLLYYAVTQDAMLIFENLSRGFGRQGKRTFMAERQYTRMEDWLTAKLAYEGLPSKTYLSKTLAQYTSKTCSNCGFTITSADYDRVLEKLKKTATGWMTTINGKELKVEGQITYYNRYKRQNVVKDLSVELDRLSEESVNNDISSWTKGRSGEALSLLKKRFSHRPVQEKFVCLNCGFETHADEQAALNIARSWLFLRSQEYKKYQTNKTTGNTDKRAFVETWQSFYRKKLKEVWKPAV

SEQ ID NO: 31634 - protein, 979 aa, synthetic construct
  REGION 1..979: note = engineered CasX variant
QEIGKRINKIRRRLVKDSNTKKAGKTGPMKTLLVRVMTPDLRERLENLRKKPENIPQPISNTSRANLNKLLTDYTEMKKAILHVYWEEFQKDPVGLMSRVAQPASKKIDQNKLKPEMDEKGNLTTAGFACSQCGQPLFVYKLEQVSEKGKAYTNYFGRCNVAEHEKLILLAQLKPEKDSDEAVTYSLGKFGQRALDFYSIHVTKESTHPVKPLAQIAGNRYASPVGKALSDACMGTIASFLSKYQDIIIEHQKVVKGNQKRLESLRELAGKENLEYPSVTLPPQPHTKEGVDAYNEVIARVRMWVNLNLWQKLKLSRDDAKPLLRLKGFPSFPLVERQQANEVDWWDMVCNVKKLINEKKEDGKVFWQNLAGYKRQEALRPYLSSEEDRKKGKKFARYQLGDLLLHLEKKHGEDWGKVYDEAWERIDKKVEGLSKHIKLEEERRSEDAQSKAALTDWLRAKASFVIEGLKEADKDEFCRCELKLQKWYGDLRGKPFAIEAENSILDISGFSKQYNCAFIWQKDGVKKLNLYLIINYFKGGKLRFKKIKPEAFEANRFYTVINKKSGEIVPMEVNFNFDDPNLIILPLAFGKRQGREFIWNDLLSLETGSLKLANGRVIEKTLYNRRTRQDEPALFVALTFERREVLDSSNIKPMNLIGVDRGENIPAVIALTDPEGCPLSRFKDSLGNPTHILRIGESYKEKQRTIQAKKEVEQRRAGGYSRKYASKAKNLADDMVRNTARDLLYYAVTQDAMLIFENLSRGFGRQGKRTFMAERQYTRMEDWLTAKLAYEGLPSKTYLSKTLAQYTSKTCSNCGFTITSADYDRVLEKLKKTATGWMTTINGKELKVEGQITYYNRYKRQNVVKDLSVELDRLSEESVNNDISSWTKGRSGEALSLLKKRFSHRPVQEKFVCLNCGFETHADEQAALNIARSWLFLRSQEYKKYQTNKTTGNTDKRAFVETWQSFYRKKLKEVWKPAV

SEQ ID NO: 31635 - protein, 980 aa, synthetic construct
  REGION 1..980: note = engineered CasX variant
QEIGKRINKIRRRLVKDSNTKKAGKTGPMKTLLVRVMTPDLRERLENLRKKPENIPQPISNTSRANLNKLLTDYTEMKKAILHVYWEEFQKDPVGLMSRVAQPASKKIDQNKLKPEMDEKGNLTTAGFACSQCGQPLFVYKLEQVSEKGKAYTNYFGRCNVAEHEKLILLAQLKPEKDSDEAVTYSLGKFGQRALDFYSIHVTKESTHPVKPLAQIAGNRYASYPVGKALSDACMGTIASFLSKYQDIIIEHQKVVKGNQKRLESLRELAGKENLEYPSVTLPPQPHTKEGVDAYNEVIARVRMWVNLNLWQKLKLSRDDAKPLLRLKGFPSFPLVERQANAEVDWWDMVCNVKKLINEKKEDGKVFWQNLAGYKRQEALRPYLSSEEDRKKGKKFARYQLGDLLLHLEKKHGEDWGKVYDEAWERIDKKVEGLSKHIKLEEERRSEDAQSKAALTDWLRAKASFVIEGLKEADKDEFCRCELKLQKWYGDLRGKPFAIEAENSILDISGFSKQYNCAFIWQKDGVKKLNLYLIINYFKGGKLRFKKIKPEAFEANRFYTVINKKSGEIVPMEVNFNFDDPNLIILPLAFGKRQGREFIWNDLLSLETGSLKLANGRVIEKTLYNRRTRQDEPALFVALTFERREVLDSSNIKPMNLIGVDRGENIPAVIALTDPEGCPLSRFKDSLGNPTHILRIGESYKEKQRTIQAKKEVEQRRAGGYSRKYASKAKNLADDMVRNTARDLLYYAVTQDAMLIFENLSRGFGRQGKRTFMAERQYTRMEDWLTAKLAYEGLPSKTYLSKTLAQYTSKTCSNCGFTITSADYDRVLEKLKKTATGWMTTINGKELKVEGQITYYNRYKRQNVVKDLSVELDRLSEESVNNDISSWTKGRSGEALSLLKKRFSHRPVQEKFVCLNCGFETHADEQAALNIARSWLFLRSQEYKKYQTNKTTGNTDKRAFVETWQSFYRKKLKEVWKPAV

SEQ ID NO: 31636 - protein, 980 aa, synthetic construct
  REGION 1..980: note = engineered CasX variant
QEIGKRINKIRRRLVKDSNTKKAGKTGPMKTLLVRVMTPDLRERLENLRKKPENIPQPISNTSRANLNKLLTDYTEMKKAILHVYWEEFQKDPVGLMSRVAQPASKKIDQNKLKPEMDEKGNLTTAGFACSQCGQPLFVYKLEQVSEKGKAYTNYFGRCNVAEHEKLILLAQLKPEKDSDEAVTYSLGKFGQRALDFYSIHVTKESTHPVKPLAQIAGNRYASHPVGKALSDACMGTIASFLSKYQDIIIEHQKVVKGNQKRLESLRELAGKENLEYPSVTLPPQPHTKEGVDAYNEVIARVRMWVNLNLWQKLKLSRDDAKPLLRLKGFPSFPLVERQANAEVDWWDMVCNVKKLINEKKEDGKVFWQNLAGYKRQEALRPYLSSEEDRKKGKKFARYQLGDLLLHLEKKHGEDWGKVYDEAWERIDKKVEGLSKHIKLEEERRSEDAQSKAALTDWLRAKASFVIEGLKEADKDEFCRCELKLQKWYGDLRGKPFAIEAENSILDISGFSKQYNCAFIWQKDGVKKLNLYLIINYFKGGKLRFKKIKPEAFEANRFYTVINKKSGEIVPMEVNFNFDDPNLIILPLAFGKRQGREFIWNDLLSLETGSLKLANGRVIEKTLYNRRTRQDEPALFVALTFERREVLDSSNIKPMNLIGVDRGENIPAVIALTDPEGCPLSRFKDSLGNPTHILRIGESYKEKQRTIQAKKEVEQRRAGGYSRKYASKAKNLADDMVRNTARDLLYYAVTQDAMLIFENLSRGFGRQGKRTFMAERQYTRMEDWLTAKLAYEGLPSKTYLSKTLAQYTSKTCSNCGFTITSADYDRVLEKLKKTATGWMTTINGKELKVEGQITYYNRYKRQNVVKDLSVELDRLSEESVNNDISSWTKGRSGEALSLLKKRFSHRPVQEKFVCLNCGFETHADEQAALNIARSWLFLRSQEYKKYQTNKTTGNTDKRAFVETWQSFYRKKLKEVWKPAV

SEQ ID NO: 31637 - protein, 980 aa, synthetic construct
  REGION 1..980: note = engineered CasX variant
QEIGKRINKIRRRLVKDSNTKKAGKTGPMKTLLVRVMTPDLRERLENLRKKPENIPQPISNTSRANLNKLLTDYTEMKKAILHVYWEEFQKDPVGLMSRVAQPASKKIDQNKLKPEMDEKGNLTTAGFACSQCGQPLFVYKLEQVSEKGKAYTNYFGRCNVAEHEKLILLAQLKPEKDSDEAVTYSLGKFGQRALDFYSIHVTKESTHPVKPLAQIAGNRYASSPVGKALSDACMGTIASFLSKYQDIIIEHQKVVKGNQKRLESLRELAGKENLEYPSVTLPPQPHTKEGVDAYNEVIARVRMWVNLNLWQKLKLSRDDAKPLLRLKGFPSFPLVERQANAEVDWWDMVCNVKKLINEKKEDGKVFWQNLAGYKRQEALRPYLSSEEDRKKGKKFARYQLGDLLLHLEKKHGEDWGKVYDEAWERIDKKVEGLSKHIKLEEERRSEDAQSKAALTDWLRAKASFVIEGLKEADKDEFCRCELKLQKWYGDLRGKPFAIEAENSILDISGFSKQYNCAFIWQKDGVKKLNLYLIINYFKGGKLRFKKIKPEAFEANRFYTVINKKSGEIVPMEVNFNFDDPNLIILPLAFGKRQGREFIWNDLLSLETGSLKLANGRVIEKTLYNRRTRQDEPALFVALTFERREVLDSSNIKPMNLIGVDRGENIPAVIALTDPEGCPLSRFKDSLGNPTHILRIGESYKEKQRTIQAKKEVEQRRAGGYSRKYASKAKNLADDMVRNTARDLLYYAVTQDAMLIFENLSRGFGRQGKRTFMAERQYTRMEDWLTAKLAYEGLPSKTYLSKTLAQYTSKTCSNCGFTITSADYDRVLEKLKKTATGWMTTINGKELKVEGQITYYNRYKRQNVVKDLSVELDRLSEESVNNDISSWTKGRSGEALSLLKKRFSHRPVQEKFVCLNCGFETHADEQAALNIARSWLFLRSQEYKKYQTNKTTGNTDKRAFVETWQSFYRKKLKEVWKPAV

SEQ ID NO: 31638 - protein, 980 aa, synthetic construct
  REGION 1..980: note = engineered CasX variant
QEIGKRINKIRRRLVKDSNTKKAGKTGPMKTLLVRVMTPDLRERLENLRKKPENIPQPISNTSRANLNKLLTDYTEMKKAILHVYWEEFQKDPVGLMSRVAQPASKKIDQNKLKPEMDEKGNLTTAGFACSQCGQPLFVYKLEQVSEKGKAYTNYFGRCNVAEHEKLILLAQLKPEKDSDEAVTYSLGKFGQRALDFYSIHVTKESTHPVKPLAQIAGNRYASTPVGKALSDACMGTIASFLSKYQDIIIEHQKVVKGNQKRLESLRELAGKENLEYPSVTLPPQPHTKEGVDAYNEVIARVRMWVNLNLWQKLKLSRDDAKPLLRLKGFPSFPLVERQANAEVDWWDMVCNVKKLINEKKEDGKVFWQNLAGYKRQEALRPYLSSEEDRKKGKKFARYQLGDLLLHLEKKHGEDWGKVYDEAWERIDKKVEGLSKHIKLEEERRSEDAQSKAALTDWLRAKASFVIEGLKEADKDEFCRCELKLQKWYGDLRGKPFAIEAENSILDISGFSKQYNCAFIWQKDGVKKLNLYLIINYFKGGKLRFKKIKPEAFEANRFYTVINKKSGEIVPMEVNFNFDDPNLIILPLAFGKRQGREFIWNDLLSLETGSLKLANGRVIEKTLYNRRTRQDEPALFVALTFERREVLDSSNIKPMNLIGVDRGENIPAVIALTDPEGCPLSRFKDSLGNPTHILRIGESYKEKQRTIQAKKEVEQRRAGGYSRKYASKAKNLADDMVRNTARDLLYYAVTQDAMLIFENLSRGFGRQGKRTFMAERQYTRMEDWLTAKLAYEGLPSKTYLSKTLAQYTSKTCSNCGFTITSADYDRVLEKLKKTATGWMTTINGKELKVEGQITYYNRYKRQNVVKDLSVELDRLSEESVNNDISSWTKGRSGEALSLLKKRFSHRPVQEKFVCLNCGFETHADEQAALNIARSWLFLRSQEYKKYQTNKTTGNTDKRAFVETWQSFYRKKLKEVWKPAV

SEQ ID NO: 31639 - protein, 980 aa, synthetic construct
  REGION 1..980: note = engineered CasX variant
QEIGKRINKIRRRLVKDSNTKKAGKTGPMKTLLVRVMTPDLRERLENLRKKPENIPQPISNTSRANLNKLLTDYTEMKKAILHVYWEEFQKDPVGLMSRVAQPASKKIDQNKLKPEMDEKGNLTTAGFACSQCGQPLFVYKLEQVSEKGKAYTNYFGRCNVAEHEKLILLAQLKPEKDSDEAVTYSLGKFGQRALDFYSIHVTKESTHPVKPLAQIAGNRYASAPVGKALSDACMGTIASFLSKYQDIIIEHQKVVKGNQKRLESLRELAGKENLEYPSVTLPPQPHTKEGVDAYNEVIARVRMWVNLNLWQKLKLSRDDAKPLLRLKGFPSFPLVERQANAEVDWWDMVCNVKKLINEKKEDGKVFWQNLAGYKRQEALRPYLSSEEDRKKGKKFARYQLGDLLLHLEKKHGEDWGKVYDEAWERIDKKVEGLSKHIKLEEERRSEDAQSKAALTDWLRAKASFVIEGLKEADKDEFCRCELKLQKWYGDLRGKPFAIEAENSILDISGFSKQYNCAFIWQKDGVKKLNLYLIINYFKGGKLRFKKIKPEAFEANRFYTVINKKSGEIVPMEVNFNFDDPNLIILPLAFGKRQGREFIWNDLLSLETGSLKLANGRVIEKTLYNRRTRQDEPALFVALTFERREVLDSSNIKPMNLIGVDRGENIPAVIALTDPEGCPLSRFKDSLGNPTHILRIGESYKEKQRTIQAKKEVEQRRAGGYSRKYASKAKNLADDMVRNTARDLLYYAVTQDAMLIFENLSRGFGRQGKRTFMAERQYTRMEDWLTAKLAYEGLPSKTYLSKTLAQYTSKTCSNCGFTITSADYDRVLEKLKKTATGWMTTINGKELKVEGQITYYNRYKRQNVVKDLSVELDRLSEESVNNDISSWTKGRSGEALSLLKKRFSHRPVQEKFVCLNCGFETHADEQAALNIARSWLFLRSQEYKKYQTNKTTGNTDKRAFVETWQSFYRKKLKEVWKPAV

SEQ ID NO: 31640 - protein, 980 aa, synthetic construct
  REGION 1..980: note = engineered CasX variant
QEIGKRINKIRRRLVKDSNTKKAGKTGPMKTLLVRVMTPDLRERLENLRKKPENIPQPISNTSRANLNKLLTDYTEMKKAILHVYWEEFQKDPVGLMSRVAQPASKKIDQNKLKPEMDEKGNLTTAGFACSQCGQPLFVYKLEQVSEKGKAYTNYFGRCNVAEHEKLILLAQLKPEKDSDEAVTYSLGKFGQRALDFYSIHVTKESTHPVKPLAQIAGNRYASVPVGKALSDACMGTIASFLSKYQDIIIEHQKVVKGNQKRLESLRELAGKENLEYPSVTLPPQPHTKEGVDAYNEVIARVRMWVNLNLWQKLKLSRDDAKPLLRLKGFPSFPLVERQANAEVDWWDMVCNVKKLINEKKEDGKVFWQNLAGYKRQEALRPYLSSEEDRKKGKKFARYQLGDLLLHLEKKHGEDWGKVYDEAWERIDKKVEGLSKHIKLEEERRSEDAQSKAALTDWLRAKASFVIEGLKEADKDEFCRCELKLQKWYGDLRGKPFAIEAENSILDISGFSKQYNCAFIWQKDGVKKLNLYLIINYFKGGKLRFKKIKPEAFEANRFYTVINKKSGEIVPMEVNFNFDDPNLIILPLAFGKRQGREFIWNDLLSLETGSLKLANGRVIEKTLYNRRTRQDEPALFVALTFERREVLDSSNIKPMNLIGVDRGENIPAVIALTDPEGCPLSRFKDSLGNPTHILRIGESYKEKQRTIQAKKEVEQRRAGGYSRKYASKAKNLADDMVRNTARDLLYYAVTQDAMLIFENLSRGFGRQGKRTFMAERQYTRMEDWLTAKLAYEGLPSKTYLSKTLAQYTSKTCSNCGFTITSADYDRVLEKLKKTATGWMTTINGKELKVEGQITYYNRYKRQNVVKDLSVELDRLSEESVNNDISSWTKGRSGEALSLLKKRFSHRPVQEKFVCLNCGFETHADEQAALNIARSWLFLRSQEYKKYQTNKTTGNTDKRAFVETWQSFYRKKLKEVWKPAV

SEQ ID NO: 31641 - protein, 980 aa, synthetic construct
  REGION 1..980: note = engineered CasX variant
QEIGKRINKIRRRLVKDSNTKKAGKTGPMKTLLVRVMTPDLRERLENLRKKPENIPQPISNTSRANLNKLLTDYTEMKKAILHVYWEEFQKDPVGLMSRVAQPASKKIDQNKLKPEMDEKGNLTTAGFACSQCGQPLFVYKLEQVSEKGKAYTNYFGRCNVAEHEKLIKLAQLKPEKDSDEAVTYSLGKFGQRALDFYSIHVTKESTHPVKPLAQIAGNRYASGPVGKALSDACMGTIASFLSKYQDIIIEHQKVVKGNQKRLESLRELAGKENLEYPSVTLPPQPHTKEGVDAYNEVIARVRMWVNLNLWQKLKLSRDDAKPLLRLKGFPSFPLVERQANAEVDWWDMVCNVKKLINEKKEDGKVFWQNLAGYKRQEALRPYLSSEEDRKKGKKFARYQLGDLLLHLEKKHGEDWGKVYDEAWERIDKKVEGLSKHIKLEEERRSEDAQSKAALTDWLRAKASFVIEGLKEADKDEFCRCELKLQKWYGDLRGKPFAIEAENSILDISGFSKQYNCAFIWQKDGVKKLNLYLIINYFKGGKLRFKKIKPEAFEANRFYTVINKKSGEIVPMEVNFNFDDPNLIILPLAFGKRQGREFIWNDLLSLETGSLKLANGRVIEKTLYNRRTRQDEPALFVALTFERREVLDSSNIKPMNLIGVDRGENIPAVIALTDPEGCPLSRFKDSLGNPTHILRIGESYKEKQRTIQAKKEVEQRRAGGYSRKYASKAKNLADDMVRNTARDLLYYAVTQDAMLIFENLSRGFGRQGKRTFMAERQYTRMEDWLTAKLAYEGLPSKTYLSKTLAQYTSKTCSNCGFTITSADYDRVLEKLKKTATGWMTTINGKELKVEGQITYYNRYKRQNVVKDLSVELDRLSEESVNNDISSWTKGRSGEALSLLKKRFSHRPVQEKFVCLNCGFETHADEQAALNIARSWLFLRSQEYKKYQTNKTTGNTDKRAFVETWQSFYRKKLKEVWKPAV

SEQ ID NO: 31642 - protein, 979 aa, synthetic construct
  REGION 1..979: note = engineered CasX variant
QEIGKRINKIRRRLVKDSNTKKAGKTGPMKTLLVRVMTPDLRERLENLRKKPENIPQPISNTSRANLNKLLTDYTEMKKAILHVYWEEFQKDPVGLMSRVAQPASKKIDQNKLKPEMDEKGNLTTAGFACSQCGQPLFVYKLEQVSEKGKAYTNYFGRCNVAEHEKLILLAQLKPEKDSDEAVTYSLGKFGQRALDFYSIHVTKESTHPVKPLAQIAGNRYASPVGKALSDACMGTIASFLSKYQDIIIEHQKVVKGNQKRLESLRELAGKENLEYPSVTLPPQPHTKEGVDAYNEVIARVRMWVNLNLWQKLKLSRDDAKPLLRLKGFPSFPLVERQANAEVDWWDMVCNVKKLINEKKEDGKVFWQNLAGYKRQEALRPYLSSEEDRKKGKKFARYQLGDLLLHLEKKHGEDWGKVYDEAWERIDKKVEGLSKHIKLEEERRSEDAQSKAALTDWLRAKASFVIEGLKEADKDEFCRCELKLQKWYGDLRGKPFAIEAENSILDISGFSKQYNCAFIWQKDGVKKLNLYLIINYFKGGKLRFKKIKPEAFEANRFYTVINKKSGEIVPMEVNFNFDDPNLIILPLAFGKRQGREFIWNDLLSLETGSLKLANGRVIEKTLYNRRTRQDEPALFVALTFERREVLDSSNIKPMNLIGVDRGENIPAVIALTDPEGCPLSRFKDSLGNPTHILRIGESYKEKQRTIQAKKEVEQRRAGGYSRKYASKAKNLADDMVRNTARDLLYYAVTQDAMLIFENLSRGFGRQGKRTFMAERQYTRMEDWLTAKLAYEGLPSKTYLSKTLAQYTSKTCSNCGFTITSADYDRVLEKLKKTATGWMTTINGKELKVEGQITYYNRYKRQNVVKDLSVELDRLSEESVNNDISSWTKGRSGEALSLLKKRFSHRPVQEKFVCLNCGFETHADEQAALNIARSWLFLRSQEYKKYQTNKTTGNTDKRAFVETWQSFYRKKLKEVWKPAV

SEQ ID NO: 31643 - protein, 979 aa, synthetic construct
  REGION 1..979: note = engineered CasX variant
QEIGKRINKIRRRLVKDSNTKKAGKTGPMKTLLVRVMTPDLRERLENLRKKPENIPQPISNTSRANLNKLLTDYTEMKKAILHVYWEEFQKDPVGLMSRVAQPASKKIDQNKLKPEMDEKGNLTTAGFACSQCGQPLFVYKLEQVSEKGKAYTNYFGRCNVAEHEKLILLAQLKPEKDSDEAVTYSLGKFGQRALDFYSIHVTKESTHPVKPLAQIAGNRYASYPVGKALSDACMGTIASFLSKYQDIIIEHQKVVKGNQKRLESLRELAGKENLEYPSVTLPPQPHTKEGVDAYNEVIARVRMWVNLNLWQKLKLSRDDAKPLLRLKGFPSFPLVERQANEVDWWDMVCNVKKLINEKKEDGKVFWQNLAGYKRQEALRPYLSSEEDRKKGKKFARTQLGDLLLHLEKKHGEDWGKVYDEAWERIDKKVEGLSKHIKLEEERRSEDAQSKAALTDWLRAKASFVIEGLKEADKDEFCRCELKLQKWYGDLRGKPFAIEAENSILDISGFSKQYNCAFIWQKDGVKKLNLYLIINYFKGGKLRFKKIKPEAFEANRFYTVINKKSGEIVPMEVNFNFDDPNLIILPLAFGKRQGREFIWNDLLSLETGSLKLANGRVIEKTLYNRRTRQDEPALFVALTFERREVLDSSNIKPMNLIGVDRGENIPAVIALTDPEGCPLSRFKDSLGNPTHILRIGESYKEKQRTIQAKKEVEQRRAGGYSRKYASKAKNLADDMVRNTARDLLYYAVTQDAMLIFENLSRGFGRQGKRTFMAERQYTRMEDWLTAKLAYEGLPSKTYLSKTLAQYTSKTCSNCGFTITSADYDRVLEKLKKTATGWMTTINGKELKVEGQITYYNRYKRQNVVKDLSVELDRLSEESVNNDISSWTKGRSGEALSLLKKRFSHRPVQEKFVCLNCGFETHADEQAALNIARSWLFLRSQEYKKYQTNKTTGNTDKRAFVETWQSFYRKKLKEVWKPAV

SEQ ID NO: 31644 - protein, 979 aa, synthetic construct
  REGION 1..979: note = engineered CasX variant
QEIGKRINKIRRRLVKDSNTKKAGKTGPMKTLLVRVMTPDLRERLENLRKKPENIPQPISNTSRANLNKLLTDYTEMKKAILHVYWEEFQKDPVGLMSRVAQPASKKIDQNKLKPEMDEKGNLTTAGFACSQCGQPLFVYKLEQVSEKGKAYTNYFGRCNVAEHEKLILLAQLKPEKDSDEAVTYSLGKFGQRALDFYSIHVTKESTHPVKPLAQIAGNRYASHPVGKALSDACMGTIASFLSKYQDIIIEHQKVVKGNQKRLESLRELAGKENLEYPSVTLPPQPHTKEGVDAYNEVIARVRMWVNLNLWQKLKLSRDDAKPLLRLKGFPSFPLVERQANEVDWWDMVCNVKKLINEKKEDGKVFWQNLAGYKRQEALRPYLSSEEDRKKGKKFARTQLGDLLLHLEKKHGEDWGKVYDEAWERIDKKVEGLSKHIKLEEERRSEDAQSKAALTDWLRAKASFVIEGLKEADKDEFCRCELKLQKWYGDLRGKPFAIEAENSILDISGFSKQYNCAFIWQKDGVKKLNLYLIINYFKGGKLRFKKIKPEAFEANRFYTVINKKSGEIVPMEVNFNFDDPNLIILPLAFGKRQGREFIWNDLLSLETGSLKLANGRVIEKTLYNRRTRQDEPALFVALTFERREVLDSSNIKPMNLIGVDRGENIPAVIALTDPEGCPLSRFKDSLGNPTHILRIGESYKEKQRTIQAKKEVEQRRAGGYSRKYASKAKNLADDMVRNTARDLLYYAVTQDAMLIFENLSRGFGRQGKRTFMAERQYTRMEDWLTAKLAYEGLPSKTYLSKTLAQYTSKTCSNCGFTITSADYDRVLEKLKKTATGWMTTINGKELKVEGQITYYNRYKRQNVVKDLSVELDRLSEESVNNDISSWTKGRSGEALSLLKKRFSHRPVQEKFVCLNCGFETHADEQAALNIARSWLFLRSQEYKKYQTNKTTGNTDKRAFVETWQSFYRKKLKEVWKPAV

SEQ ID NO: 31645 - protein, 979 aa, synthetic construct
  REGION 1..979: note = engineered CasX variant
QEIGKRINKIRRRLVKDSNTKKAGKTGPMKTLLVRVMTPDLRERLENLRKKPENIPQPISNTSRANLNKLLTDYTEMKKAILHVYWEEFQKDPVGLMSRVAQPASKKIDQNKLKPEMDEKGNLTTAGFACSQCGQPLFVYKLEQVSEKGKAYTNYFGRCNVAEHEKLILLAQLKPEKDSDEAVTYSLGKFGQRALDFYSIHVTKESTHPVKPLAQIAGNRYASSPVGKALSDACMGTIASFLSKYQDIIIEHQKVVKGNQKRLESLRELAGKENLEYPSVTLPPQPHTKEGVDAYNEVIARVRMWVNLNLWQKLKLSRDDAKPLLRLKGFPSFPLVERQANEVDWWDMVCNVKKLINEKKEDGKVFWQNLAGYKRQEALRPYLSSEEDRKKGKKFARTQLGDLLLHLEKKHGEDWGKVYDEAWERIDKKVEGLSKHIKLEEERRSEDAQSKAALTDWLRAKASFVIEGLKEADKDEFCRCELKLQKWYGDLRGKPFAIEAENSILDISGFSKQYNCAFIWQKDGVKKLNLYLIINYFKGGKLRFKKIKPEAFEANRFYTVINKKSGEIVPMEVNFNFDDPNLIILPLAFGKRQGREFIWNDLLSLETGSLKLANGRVIEKTLYNRRTRQDEPALFVALTFERREVLDSSNIKPMNLIGVDRGENIPAVIALTDPEGCPLSRFKDSLGNPTHILRIGESYKEKQRTIQAKKEVEQRRAGGYSRKYASKAKNLADDMVRNTARDLLYYAVTQDAMLIFENLSRGFGRQGKRTFMAERQYTRMEDWLTAKLAYEGLPSKTYLSKTLAQYTSKTCSNCGFTITSADYDRVLEKLKKTATGWMTTINGKELKVEGQITYYNRYKRQNVVKDLSVELDRLSEESVNNDISSWTKGRSGEALSLLKKRFSHRPVQEKFVCLNCGFETHADEQAALNIARSWLFLRSQEYKKYQTNKTTGNTDKRAFVETWQSFYRKKLKEVWKPAV

SEQ ID NO: 31646 - protein, 979 aa, synthetic construct
  REGION 1..979: note = engineered CasX variant
QEIGKRINKIRRRLVKDSNTKKAGKTGPMKTLLVRVMTPDLRERLENLRKKPENIPQPISNTSRANLNKLLTDYTEMKKAILHVYWEEFQKDPVGLMSRVAQPASKKIDQNKLKPEMDEKGNLTTAGFACSQCGQPLFVYKLEQVSEKGKAYTNYFGRCNVAEHEKLILLAQLKPEKDSDEAVTYSLGKFGQRALDFYSIHVTKESTHPVKPLAQIAGNRYASTPVGKALSDACMGTIASFLSKYQDIIIEHQKVVKGNQKRLESLRELAGKENLEYPSVTLPPQPHTKEGVDAYNEVIARVRMWVNLNLWQKLKLSRDDAKPLLRLKGFPSFPLVERQANEVDWWDMVCNVKKLINEKKEDGKVFWQNLAGYKRQEALRPYLSSEEDRKKGKKFARTQLGDLLLHLEKKHGEDWGKVYDEAWERIDKKVEGLSKHIKLEEERRSEDAQSKAALTDWLRAKASFVIEGLKEADKDEFCRCELKLQKWYGDLRGKPFAIEAENSILDISGFSKQYNCAFIWQKDGVKKLNLYLIINYFKGGKLRFKKIKPEAFEANRFYTVINKKSGEIVPMEVNFNFDDPNLIILPLAFGKRQGREFIWNDLLSLETGSLKLANGRVIEKTLYNRRTRQDEPALFVALTFERREVLDSSNIKPMNLIGVDRGENIPAVIALTDPEGCPLSRFKDSLGNPTHILRIGESYKEKQRTIQAKKEVEQRRAGGYSRKYASKAKNLADDMVRNTARDLLYYAVTQDAMLIFENLSRGFGRQGKRTFMAERQYTRMEDWLTAKLAYEGLPSKTYLSKTLAQYTSKTCSNCGFTITSADYDRVLEKLKKTATGWMTTINGKELKVEGQITYYNRYKRQNVVKDLSVELDRLSEESVNNDISSWTKGRSGEALSLLKKRFSHRPVQEKFVCLNCGFETHADEQAALNIARSWLFLRSQEYKKYQTNKTTGNTDKRAFVETWQSFYRKKLKEVWKPAV

SEQ ID NO: 31647 - protein, 979 aa, synthetic construct
  REGION 1..979: note = engineered CasX variant
QEIGKRINKIRRRLVKDSNTKKAGKTGPMKTLLVRVMTPDLRERLENLRKKPENIPQPISNTSRANLNKLLTDYTEMKKAILHVYWEEFQKDPVGLMSRVAQPASKKIDQNKLKPEMDEKGNLTTAGFACSQCGQPLFVYKLEQVSEKGKAYTNYFGRCNVAEHEKLILLAQLKPEKDSDEAVTYSLGKFGQRALDFYSIHVTKESTHPVKPLAQIAGNRYASAPVGKALSDACMGTIASFLSKYQDIIIEHQKVVKGNQKRLESLRELAGKENLEYPSVTLPPQPHTKEGVDAYNEVIARVRMWVNLNLWQKLKLSRDDAKPLLRLKGFPSFPLVERQANEVDWWDMVCNVKKLINEKKEDGKVFWQNLAGYKRQEALRPYLSSEEDRKKGKKFARTQLGDLLLHLEKKHGEDWGKVYDEAWERIDKKVEGLSKHIKLEEERRSEDAQSKAALTDWLRAKASFVIEGLKEADKDEFCRCELKLQKWYGDLRGKPFAIEAENSILDISGFSKQYNCAFIWQKDGVKKLNLYLIINYFKGGKLRFKKIKPEAFEANRFYTVINKKSGEIVPMEVNFNFDDPNLIILPLAFGKRQGREFIWNDLLSLETGSLKLANGRVIEKTLYNRRTRQDEPALFVALTFERREVLDSSNIKPMNLIGVDRGENIPAVIALTDPEGCPLSRFKDSLGNPTHILRIGESYKEKQRTIQAKKEVEQRRAGGYSRKYASKAKNLADDMVRNTARDLLYYAVTQDAMLIFENLSRGFGRQGKRTFMAERQYTRMEDWLTAKLAYEGLPSKTYLSKTLAQYTSKTCSNCGFTITSADYDRVLEKLKKTATGWMTTINGKELKVEGQITYYNRYKRQNVVKDLSVELDRLSEESVNNDISSWTKGRSGEALSLLKKRFSHRPVQEKFVCLNCGFETHADEQAALNIARSWLFLRSQEYKKYQTNKTTGNTDKRAFVETWQSFYRKKLKEVWKPAV

SEQ ID NO: 31648 - protein, 979 aa, synthetic construct
  REGION 1..979: note = engineered CasX variant
QEIGKRINKIRRRLVKDSNTKKAGKTGPMKTLLVRVMTPDLRERLENLRKKPENIPQPISNTSRANLNKLLTDYTEMKKAILHVYWEEFQKDPVGLMSRVAQPASKKIDQNKLKPEMDEKGNLTTAGFACSQCGQPLFVYKLEQVSEKGKAYTNYFGRCNVAEHEKLILLAQLKPEKDSDEAVTYSLGKFGQRALDFYSIHVTKESTHPVKPLAQIAGNRYASVPVGKALSDACMGTIASFLSKYQDIIIEHQKVVKGNQKRLESLRELAGKENLEYPSVTLPPQPHTKEGVDAYNEVIARVRMWVNLNLWQKLKLSRDDAKPLLRLKGFPSFPLVERQANEVDWWDMVCNVKKLINEKKEDGKVFWQNLAGYKRQEALRPYLSSEEDRKKGKKFARTQLGDLLLHLEKKHGEDWGKVYDEAWERIDKKVEGLSKHIKLEEERRSEDAQSKAALTDWLRAKASFVIEGLKEADKDEFCRCELKLQKWYGDLRGKPFAIEAENSILDISGFSKQYNCAFIWQKDGVKKLNLYLIINYFKGGKLRFKKIKPEAFEANRFYTVINKKSGEIVPMEVNFNFDDPNLIILPLAFGKRQGREFIWNDLLSLETGSLKLANGRVIEKTLYNRRTRQDEPALFVALTFERREVLDSSNIKPMNLIGVDRGENIPAVIALTDPEGCPLSRFKDSLGNPTHILRIGESYKEKQRTIQAKKEVEQRRAGGYSRKYASKAKNLADDMVRNTARDLLYYAVTQDAMLIFENLSRGFGRQGKRTFMAERQYTRMEDWLTAKLAYEGLPSKTYLSKTLAQYTSKTCSNCGFTITSADYDRVLEKLKKTATGWMTTINGKELKVEGQITYYNRYKRQNVVKDLSVELDRLSEESVNNDISSWTKGRSGEALSLLKKRFSHRPVQEKFVCLNCGFETHADEQAALNIARSWLFLRSQEYKKYQTNKTTGNTDKRAFVETWQSFYRKKLKEVWKPAV

SEQ ID NO: 31649 - protein, 979 aa, synthetic construct
  REGION 1..979: note = engineered CasX variant
QEIGKRINKIRRRLVKDSNTKKAGKTGPMKTLLVRVMTPDLRERLENLRKKPENIPQPISNTSRANLNKLLTDYTEMKKAILHVYWEEFQKDPVGLMSRVAQPASKKIDQNKLKPEMDEKGNLTTAGFACSQCGQPLFVYKLEQVSEKGKAYTNYFGRCNVAEHEKLIKLAQLKPEKDSDEAVTYSLGKFGQRALDFYSIHVTKESTHPVKPLAQIAGNRYASGPVGKALSDACMGTIASFLSKYQDIIIEHQKVVKGNQKRLESLRELAGKENLEYPSVTLPPQPHTKEGVDAYNEVIARVRMWVNLNLWQKLKLSRDDAKPLLRLKGFPSFPLVERQANEVDWWDMVCNVKKLINEKKEDGKVFWQNLAGYKRQEALRPYLSSEEDRKKGKKFARTQLGDLLLHLEKKHGEDWGKVYDEAWERIDKKVEGLSKHIKLEEERRSEDAQSKAALTDWLRAKASFVIEGLKEADKDEFCRCELKLQKWYGDLRGKPFAIEAENSILDISGFSKQYNCAFIWQKDGVKKLNLYLIINYFKGGKLRFKKIKPEAFEANRFYTVINKKSGEIVPMEVNFNFDDPNLIILPLAFGKRQGREFIWNDLLSLETGSLKLANGRVIEKTLYNRRTRQDEPALFVALTFERREVLDSSNIKPMNLIGVDRGENIPAVIALTDPEGCPLSRFKDSLGNPTHILRIGESYKEKQRTIQAKKEVEQRRAGGYSRKYASKAKNLADDMVRNTARDLLYYAVTQDAMLIFENLSRGFGRQGKRTFMAERQYTRMEDWLTAKLAYEGLPSKTYLSKTLAQYTSKTCSNCGFTITSADYDRVLEKLKKTATGWMTTINGKELKVEGQITYYNRYKRQNVVKDLSVELDRLSEESVNNDISSWTKGRSGEALSLLKKRFSHRPVQEKFVCLNCGFETHADEQAALNIARSWLFLRSQEYKKYQTNKTTGNTDKRAFVETWQSFYRKKLKEVWKPAV

SEQ ID NO: 31650 - protein, 978 aa, synthetic construct
  REGION 1..978: note = engineered CasX variant
QEIGKRINKIRRRLVKDSNTKKAGKTGPMKTLLVRVMTPDLRERLENLRKKPENIPQPISNTSRANLNKLLTDYTEMKKAILHVYWEEFQKDPVGLMSRVAQPASKKIDQNKLKPEMDEKGNLTTAGFACSQCGQPLFVYKLEQVSEKGKAYTNYFGRCNVAEHEKLILLAQLKPEKDSDEAVTYSLGKFGQRALDFYSIHVTKESTHPVKPLAQIAGNRYASPVGKALSDACMGTIASFLSKYQDIIIEHQKVVKGNQKRLESLRELAGKENLEYPSVTLPPQPHTKEGVDAYNEVIARVRMWVNLNLWQKLKLSRDDAKPLLRLKGFPSFPLVERQANEVDWWDMVCNVKKLINEKKEDGKVFWQNLAGYKRQEALRPYLSSEEDRKKGKKFARTQLGDLLLHLEKKHGEDWGKVYDEAWERIDKKVEGLSKHIKLEEERRSEDAQSKAALTDWLRAKASFVIEGLKEADKDEFCRCELKLQKWYGDLRGKPFAIEAENSILDISGFSKQYNCAFIWQKDGVKKLNLYLIINYFKGGKLRFKKIKPEAFEANRFYTVINKKSGEIVPMEVNFNFDDPNLIILPLAFGKRQGREFIWNDLLSLETGSLKLANGRVIEKTLYNRRTRQDEPALFVALTFERREVLDSSNIKPMNLIGVDRGENIPAVIALTDPEGCPLSRFKDSLGNPTHILRIGESYKEKQRTIQAKKEVEQRRAGGYSRKYASKAKNLADDMVRNTARDLLYYAVTQDAMLIFENLSRGFGRQGKRTFMAERQYTRMEDWLTAKLAYEGLPSKTYLSKTLAQYTSKTCSNCGFTITSADYDRVLEKLKKTATGWMTTINGKELKVEGQITYYNRYKRQNVVKDLSVELDRLSEESVNNDISSWTKGRSGEALSLLKKRFSHRPVQEKFVCLNCGFETHADEQAALNIARSWLFLRSQEYKKYQTNKTTGNTDKRAFVETWQSFYRKKLKEVWKPAV

SEQ ID NO: 31651 - protein, 980 aa, synthetic construct
  REGION 1..980: note = engineered CasX variant
QEIGKRINKIRRRLVKDSNTKKAGKTGPMKTLLVRVMTPDLRERLENLRKKPENIPQPISNTSRANLNKLLTDYTEMKKAILHVYWEEFQKDPVGLMSRVAQPASKKIDQNKLKPEMDEKGNLTTAGFACSQCGQPLFVYKLEQVSEKGKAYTNYFGRCNVAEHEKLILLAQLKPEKDSDEAVTYSLGKFGQRALDFYSIHVTKESTHPVKPLAQIAGNRYASYPVGKALSDACMGTIASFLSKYQDIIIEHQKVVKGNQKRLESLRELAGKENLEYPSVTLPPQPHTKEGVDAYNEVIARVRMWVNLNLWQKLKLSRDDAKPLLRLKGFPSFPLVERQANEVDWWDMVCNVKKLINEKKEDGKVFWQNLAGYKRQEALRPYLSSEEDRKKGKKFARYQLGDLLLHLEKKHEGEDWGKVYDEAWERIDKKVEGLSKHIKLEEERRSEDAQSKAALTDWLRAKASFVIEGLKEADKDEFCRCELKLQKWYGDLRGKPFAIEAENSILDISGFSKQYNCAFIWQKDGVKKLNLYLIINYFKGGKLRFKKIKPEAFEANRFYTVINKKSGEIVPMEVNFNFDDPNLIILPLAFGKRQGREFIWNDLLSLETGSLKLANGRVIEKTLYNRRTRQDEPALFVALTFERREVLDSSNIKPMNLIGVDRGENIPAVIALTDPEGCPLSRFKDSLGNPTHILRIGESYKEKQRTIQAKKEVEQRRAGGYSRKYASKAKNLADDMVRNTARDLLYYAVTQDAMLIFENLSRGFGRQGKRTFMAERQYTRMEDWLTAKLAYEGLPSKTYLSKTLAQYTSKTCSNCGFTITSADYDRVLEKLKKTATGWMTTINGKELKVEGQITYYNRYKRQNVVKDLSVELDRLSEESVNNDISSWTKGRSGEALSLLKKRFSHRPVQEKFVCLNCGFETHADEQAALNIARSWLFLRSQEYKKYQTNKTTGNTDKRAFVETWQSFYRKKLKEVWKPAV

SEQ ID NO: 31652 - protein, 980 aa, synthetic construct
  REGION 1..980: note = engineered CasX variant
QEIGKRINKIRRRLVKDSNTKKAGKTGPMKTLLVRVMTPDLRERLENLRKKPENIPQPISNTSRANLNKLLTDYTEMKKAILHVYWEEFQKDPVGLMSRVAQPASKKIDQNKLKPEMDEKGNLTTAGFACSQCGQPLFVYKLEQVSEKGKAYTNYFGRCNVAEHEKLILLAQLKPEKDSDEAVTYSLGKFGQRALDFYSIHVTKESTHPVKPLAQIAGNRYASHPVGKALSDACMGTIASFLSKYQDIIIEHQKVVKGNQKRLESLRELAGKENLEYPSVTLPPQPHTKEGVDAYNEVIARVRMWVNLNLWQKLKLSRDDAKPLLRLKGFPSFPLVERQANEVDWWDMVCNVKKLINEKKEDGKVFWQNLAGYKRQEALRPYLSSEEDRKKGKKFARYQLGDLLLHLEKKHEGEDWGKVYDEAWERIDKKVEGLSKHIKLEEERRSEDAQSKAALTDWLRAKASFVIEGLKEADKDEFCRCELKLQKWYGDLRGKPFAIEAENSILDISGFSKQYNCAFIWQKDGVKKLNLYLIINYFKGGKLRFKKIKPEAFEANRFYTVINKKSGEIVPMEVNFNFDDPNLIILPLAFGKRQGREFIWNDLLSLETGSLKLANGRVIEKTLYNRRTRQDEPALFVALTFERREVLDSSNIKPMNLIGVDRGENIPAVIALTDPEGCPLSRFKDSLGNPTHILRIGESYKEKQRTIQAKKEVEQRRAGGYSRKYASKAKNLADDMVRNTARDLLYYAVTQDAMLIFENLSRGFGRQGKRTFMAERQYTRMEDWLTAKLAYEGLPSKTYLSKTLAQYTSKTCSNCGFTITSADYDRVLEKLKKTATGWMTTINGKELKVEGQITYYNRYKRQNVVKDLSVELDRLSEESVNNDISSWTKGRSGEALSLLKKRFSHRPVQEKFVCLNCGFETHADEQAALNIARSWLFLRSQEYKKYQTNKTTGNTDKRAFVETWQSFYRKKLKEVWKPAV

SEQ ID NO: 31653 - protein, 980 aa, synthetic construct
  REGION 1..980: note = engineered CasX variant
QEIGKRINKIRRRLVKDSNTKKAGKTGPMKTLLVRVMTPDLRERLENLRKKPENIPQPISNTSRANLNKLLTDYTEMKKAILHVYWEEFQKDPVGLMSRVAQPASKKIDQNKLKPEMDEKGNLTTAGFACSQCGQPLFVYKLEQVSEKGKAYTNYFGRCNVAEHEKLILLAQLKPEKDSDEAVTYSLGKFGQRALDFYSIHVTKESTHPVKPLAQIAGNRYASSPVGKALSDACMGTIASFLSKYQDIIIEHQKVVKGNQKRLESLRELAGKENLEYPSVTLPPQPHTKEGVDAYNEVIARVRMWVNLNLWQKLKLSRDDAKPLLRLKGFPSFPLVERQANEVDWWDMVCNVKKLINEKKEDGKVFWQNLAGYKRQEALRPYLSSEEDRKKGKKFARYQLGDLLLHLEKKHEGEDWGKVYDEAWERIDKKVEGLSKHIKLEEERRSEDAQSKAALTDWLRAKASFVIEGLKEADKDEFCRCELKLQKWYGDLRGKPFAIEAENSILDISGFSKQYNCAFIWQKDGVKKLNLYLIINYFKGGKLRFKKIKPEAFEANRFYTVINKKSGEIVPMEVNFNFDDPNLIILPLAFGKRQGREFIWNDLLSLETGSLKLANGRVIEKTLYNRRTRQDEPALFVALTFERREVLDSSNIKPMNLIGVDRGENIPAVIALTDPEGCPLSRFKDSLGNPTHILRIGESYKEKQRTIQAKKEVEQRRAGGYSRKYASKAKNLADDMVRNTARDLLYYAVTQDAMLIFENLSRGFGRQGKRTFMAERQYTRMEDWLTAKLAYEGLPSKTYLSKTLAQYTSKTCSNCGFTITSADYDRVLEKLKKTATGWMTTINGKELKVEGQITYYNRYKRQNVVKDLSVELDRLSEESVNNDISSWTKGRSGEALSLLKKRFSHRPVQEKFVCLNCGFETHADEQAALNIARSWLFLRSQEYKKYQTNKTTGNTDKRAFVETWQSFYRKKLKEVWKPAV

SEQ ID NO: 31654 - protein, 980 aa, synthetic construct
  REGION 1..980: note = engineered CasX variant
QEIGKRINKIRRRLVKDSNTKKAGKTGPMKTLLVRVMTPDLRERLENLRKKPENIPQPISNTSRANLNKLLTDYTEMKKAILHVYWEEFQKDPVGLMSRVAQPASKKIDQNKLKPEMDEKGNLTTAGFACSQCGQPLFVYKLEQVSEKGKAYTNYFGRCNVAEHEKLILLAQLKPEKDSDEAVTYSLGKFGQRALDFYSIHVTKESTHPVKPLAQIAGNRYASTPVGKALSDACMGTIASFLSKYQDIIIEHQKVVKGNQKRLESLRELAGKENLEYPSVTLPPQPHTKEGVDAYNEVIARVRMWVNLNLWQKLKLSRDDAKPLLRLKGFPSFPLVERQANEVDWWDMVCNVKKLINEKKEDGKVFWQNLAGYKRQEALRPYLSSEEDRKKGKKFARYQLGDLLLHLEKKHEGEDWGKVYDEAWERIDKKVEGLSKHIKLEEERRSEDAQSKAALTDWLRAKASFVIEGLKEADKDEFCRCELKLQKWYGDLRGKPFAIEAENSILDISGFSKQYNCAFIWQKDGVKKLNLYLIINYFKGGKLRFKKIKPEAFEANRFYTVINKKSGEIVPMEVNFNFDDPNLIILPLAFGKRQGREFIWNDLLSLETGSLKLANGRVIEKTLYNRRTRQDEPALFVALTFERREVLDSSNIKPMNLIGVDRGENIPAVIALTDPEGCPLSRFKDSLGNPTHILRIGESYKEKQRTIQAKKEVEQRRAGGYSRKYASKAKNLADDMVRNTARDLLYYAVTQDAMLIFENLSRGFGRQGKRTFMAERQYTRMEDWLTAKLAYEGLPSKTYLSKTLAQYTSKTCSNCGFTITSADYDRVLEKLKKTATGWMTTINGKELKVEGQITYYNRYKRQNVVKDLSVELDRLSEESVNNDISSWTKGRSGEALSLLKKRFSHRPVQEKFVCLNCGFETHADEQAALNIARSWLFLRSQEYKKYQTNKTTGNTDKRAFVETWQSFYRKKLKEVWKPAV

SEQ ID NO: 31655 - protein, 980 aa, synthetic construct
  REGION 1..980: note = engineered CasX variant
QEIGKRINKIRRRLVKDSNTKKAGKTGPMKTLLVRVMTPDLRERLENLRKKPENIPQPISNTSRANLNKLLTDYTEMKKAILHVYWEEFQKDPVGLMSRVAQPASKKIDQNKLKPEMDEKGNLTTAGFACSQCGQPLFVYKLEQVSEKGKAYTNYFGRCNVAEHEKLILLAQLKPEKDSDEAVTYSLGKFGQRALDFYSIHVTKESTHPVKPLAQIAGNRYASAPVGKALSDACMGTIASFLSKYQDIIIEHQKVVKGNQKRLESLRELAGKENLEYPSVTLPPQPHTKEGVDAYNEVIARVRMWVNLNLWQKLKLSRDDAKPLLRLKGFPSFPLVERQANEVDWWDMVCNVKKLINEKKEDGKVFWQNLAGYKRQEALRPYLSSEEDRKKGKKFARYQLGDLLLHLEKKHEGEDWGKVYDEAWERIDKKVEGLSKHIKLEEERRSEDAQSKAALTDWLRAKASFVIEGLKEADKDEFCRCELKLQKWYGDLRGKPFAIEAENSILDISGFSKQYNCAFIWQKDGVKKLNLYLIINYFKGGKLRFKKIKPEAFEANRFYTVINKKSGEIVPMEVNFNFDDPNLIILPLAFGKRQGREFIWNDLLSLETGSLKLANGRVIEKTLYNRRTRQDEPALFVALTFERREVLDSSNIKPMNLIGVDRGENIPAVIALTDPEGCPLSRFKDSLGNPTHILRIGESYKEKQRTIQAKKEVEQRRAGGYSRKYASKAKNLADDMVRNTARDLLYYAVTQDAMLIFENLSRGFGRQGKRTFMAERQYTRMEDWLTAKLAYEGLPSKTYLSKTLAQYTSKTCSNCGFTITSADYDRVLEKLKKTATGWMTTINGKELKVEGQITYYNRYKRQNVVKDLSVELDRLSEESVNNDISSWTKGRSGEALSLLKKRFSHRPVQEKFVCLNCGFETHADEQAALNIARSWLFLRSQEYKKYQTNKTTGNTDKRAFVETWQSFYRKKLKEVWKPAV

SEQ ID NO: 31656 - protein, 980 aa, synthetic construct
  REGION 1..980: note = engineered CasX variant
QEIGKRINKIRRRLVKDSNTKKAGKTGPMKTLLVRVMTPDLRERLENLRKKPENIPQPISNTSRANLNKLLTDYTEMKKAILHVYWEEFQKDPVGLMSRVAQPASKKIDQNKLKPEMDEKGNLTTAGFACSQCGQPLFVYKLEQVSEKGKAYTNYFGRCNVAEHEKLILLAQLKPEKDSDEAVTYSLGKFGQRALDFYSIHVTKESTHPVKPLAQIAGNRYASVPVGKALSDACMGTIASFLSKYQDIIIEHQKVVKGNQKRLESLRELAGKENLEYPSVTLPPQPHTKEGVDAYNEVIARVRMWVNLNLWQKLKLSRDDAKPLLRLKGFPSFPLVERQANEVDWWDMVCNVKKLINEKKEDGKVFWQNLAGYKRQEALRPYLSSEEDRKKGKKFARYQLGDLLLHLEKKHEGEDWGKVYDEAWERIDKKVEGLSKHIKLEEERRSEDAQSKAALTDWLRAKASFVIEGLKEADKDEFCRCELKLQKWYGDLRGKPFAIEAENSILDISGFSKQYNCAFIWQKDGVKKLNLYLIINYFKGGKLRFKKIKPEAFEANRFYTVINKKSGEIVPMEVNFNFDDPNLIILPLAFGKRQGREFIWNDLLSLETGSLKLANGRVIEKTLYNRRTRQDEPALFVALTFERREVLDSSNIKPMNLIGVDRGENIPAVIALTDPEGCPLSRFKDSLGNPTHILRIGESYKEKQRTIQAKKEVEQRRAGGYSRKYASKAKNLADDMVRNTARDLLYYAVTQDAMLIFENLSRGFGRQGKRTFMAERQYTRMEDWLTAKLAYEGLPSKTYLSKTLAQYTSKTCSNCGFTITSADYDRVLEKLKKTATGWMTTINGKELKVEGQITYYNRYKRQNVVKDLSVELDRLSEESVNNDISSWTKGRSGEALSLLKKRFSHRPVQEKFVCLNCGFETHADEQAALNIARSWLFLRSQEYKKYQTNKTTGNTDKRAFVETWQSFYRKKLKEVWKPAV

SEQ ID NO: 31657 - protein, 980 aa, synthetic construct
  REGION 1..980: note = engineered CasX variant
QEIGKRINKIRRRLVKDSNTKKAGKTGPMKTLLVRVMTPDLRERLENLRKKPENIPQPISNTSRANLNKLLTDYTEMKKAILHVYWEEFQKDPVGLMSRVAQPASKKIDQNKLKPEMDEKGNLTTAGFACSQCGQPLFVYKLEQVSEKGKAYTNYFGRCNVAEHEKLIKLAQLKPEKDSDEAVTYSLGKFGQRALDFYSIHVTKESTHPVKPLAQIAGNRYASGPVGKALSDACMGTIASFLSKYQDIIIEHQKVVKGNQKRLESLRELAGKENLEYPSVTLPPQPHTKEGVDAYNEVIARVRMWVNLNLWQKLKLSRDDAKPLLRLKGFPSFPLVERQANEVDWWDMVCNVKKLINEKKEDGKVFWQNLAGYKRQEALRPYLSSEEDRKKGKKFARYQLGDLLLHLEKKHEGEDWGKVYDEAWERIDKKVEGLSKHIKLEEERRSEDAQSKAALTDWLRAKASFVIEGLKEADKDEFCRCELKLQKWYGDLRGKPFAIEAENSILDISGFSKQYNCAFIWQKDGVKKLNLYLIINYFKGGKLRFKKIKPEAFEANRFYTVINKKSGEIVPMEVNFNFDDPNLIILPLAFGKRQGREFIWNDLLSLETGSLKLANGRVIEKTLYNRRTRQDEPALFVALTFERREVLDSSNIKPMNLIGVDRGENIPAVIALTDPEGCPLSRFKDSLGNPTHILRIGESYKEKQRTIQAKKEVEQRRAGGYSRKYASKAKNLADDMVRNTARDLLYYAVTQDAMLIFENLSRGFGRQGKRTFMAERQYTRMEDWLTAKLAYEGLPSKTYLSKTLAQYTSKTCSNCGFTITSADYDRVLEKLKKTATGWMTTINGKELKVEGQITYYNRYKRQNVVKDLSVELDRLSEESVNNDISSWTKGRSGEALSLLKKRFSHRPVQEKFVCLNCGFETHADEQAALNIARSWLFLRSQEYKKYQTNKTTGNTDKRAFVETWQSFYRKKLKEVWKPAV

SEQ ID NO: 31658 - protein, 979 aa, synthetic construct
  REGION 1..979: note = engineered CasX variant
QEIGKRINKIRRRLVKDSNTKKAGKTGPMKTLLVRVMTPDLRERLENLRKKPENIPQPISNTSRANLNKLLTDYTEMKKAILHVYWEEFQKDPVGLMSRVAQPASKKIDQNKLKPEMDEKGNLTTAGFACSQCGQPLFVYKLEQVSEKGKAYTNYFGRCNVAEHEKLILLAQLKPEKDSDEAVTYSLGKFGQRALDFYSIHVTKESTHPVKPLAQIAGNRYASPVGKALSDACMGTIASFLSKYQDIIIEHQKVVKGNQKRLESLRELAGKENLEYPSVTLPPQPHTKEGVDAYNEVIARVRMWVNLNLWQKLKLSRDDAKPLLRLKGFPSFPLVERQANEVDWWDMVCNVKKLINEKKEDGKVFWQNLAGYKRQEALRPYLSSEEDRKKGKKFARYQLGDLLLHLEKKHEGEDWGKVYDEAWERIDKKVEGLSKHIKLEEERRSEDAQSKAALTDWLRAKASFVIEGLKEADKDEFCRCELKLQKWYGDLRGKPFAIEAENSILDISGFSKQYNCAFIWQKDGVKKLNLYLIINYFKGGKLRFKKIKPEAFEANRFYTVINKKSGEIVPMEVNFNFDDPNLIILPLAFGKRQGREFIWNDLLSLETGSLKLANGRVIEKTLYNRRTRQDEPALFVALTFERREVLDSSNIKPMNLIGVDRGENIPAVIALTDPEGCPLSRFKDSLGNPTHILRIGESYKEKQRTIQAKKEVEQRRAGGYSRKYASKAKNLADDMVRNTARDLLYYAVTQDAMLIFENLSRGFGRQGKRTFMAERQYTRMEDWLTAKLAYEGLPSKTYLSKTLAQYTSKTCSNCGFTITSADYDRVLEKLKKTATGWMTTINGKELKVEGQITYYNRYKRQNVVKDLSVELDRLSEESVNNDISSWTKGRSGEALSLLKKRFSHRPVQEKFVCLNCGFETHADEQAALNIARSWLFLRSQEYKKYQTNKTTGNTDKRAFVETWQSFYRKKLKEVWKPAV

SEQ ID NO: 31659 - protein, 979 aa, synthetic construct
  REGION 1..979: note = engineered CasX variant
QEIGKRINKIRRRLVKDSNTKKAGKTGPMKTLLVRVMTPDLRERLENLRKKPENIPQPISNTSRANLNKLLTDYTEMKKAILHVYWEEFQKDPVGLMSRVAQPASKKIDQNKLKPEMDEKGNLTTAGFACSQCGQPLFVYKLEQVSEKGKAYTNYFGRCNVAEHEKLILLAQLKPEKDSDEAVTYSLGKFGQRALDFYSIHVTKESTHPVKPLAQIAGNRYASYPVGKALSDACMGTIASFLSKYQDIIIEHQKVVKGNQKRLESLRELAGKENLEYPSVTLPPQPHTKEGVDAYNEVIARVRMWVNLNLWQKLKLSRDDAKPLLRLKGFPSFPLVERQANEVDWWDMVCNVKKLINEKKEDGKVFWQNLAGYKRQEALRPYLSSEEDRKKGKKFARYQLGDLLLHLEKKHGEDWGKVYDEAWERIDKKVEGLSKHIKLEEERRSEDAQSKAALTDWLRAKASFVIEGLKEADKDEFCRCDLKLQKWYGDLRGKPFAIEAENSILDISGFSKQYNCAFIWQKDGVKKLNLYLIINYFKGGKLRFKKIKPEAFEANRFYTVINKKSGEIVPMEVNFNFDDPNLIILPLAFGKRQGREFIWNDLLSLETGSLKLANGRVIEKTLYNRRTRQDEPALFVALTFERREVLDSSNIKPMNLIGVDRGENIPAVIALTDPEGCPLSRFKDSLGNPTHILRIGESYKEKQRTIQAKKEVEQRRAGGYSRKYASKAKNLADDMVRNTARDLLYYAVTQDAMLIFENLSRGFGRQGKRTFMAERQYTRMEDWLTAKLAYEGLPSKTYLSKTLAQYTSKTCSNCGFTITSADYDRVLEKLKKTATGWMTTINGKELKVEGQITYYNRYKRQNVVKDLSVELDRLSEESVNNDISSWTKGRSGEALSLLKKRFSHRPVQEKFVCLNCGFETHADEQAALNIARSWLFLRSQEYKKYQTNKTTGNTDKRAFVETWQSFYRKKLKEVWKPAV

SEQ ID NO: 31660 - protein, 979 aa, synthetic construct
  REGION 1..979: note = engineered CasX variant
QEIGKRINKIRRRLVKDSNTKKAGKTGPMKTLLVRVMTPDLRERLENLRKKPENIPQPISNTSRANLNKLLTDYTEMKKAILHVYWEEFQKDPVGLMSRVAQPASKKIDQNKLKPEMDEKGNLTTAGFACSQCGQPLFVYKLEQVSEKGKAYTNYFGRCNVAEHEKLILLAQLKPEKDSDEAVTYSLGKFGQRALDFYSIHVTKESTHPVKPLAQIAGNRYASHPVGKALSDACMGTIASFLSKYQDIIIEHQKVVKGNQKRLESLRELAGKENLEYPSVTLPPQPHTKEGVDAYNEVIARVRMWVNLNLWQKLKLSRDDAKPLLRLKGFPSFPLVERQANEVDWWDMVCNVKKLINEKKEDGKVFWQNLAGYKRQEALRPYLSSEEDRKKGKKFARYQLGDLLLHLEKKHGEDWGKVYDEAWERIDKKVEGLSKHIKLEEERRSEDAQSKAALTDWLRAKASFVIEGLKEADKDEFCRCDLKLQKWYGDLRGKPFAIEAENSILDISGFSKQYNCAFIWQKDGVKKLNLYLIINYFKGGKLRFKKIKPEAFEANRFYTVINKKSGEIVPMEVNFNFDDPNLIILPLAFGKRQGREFIWNDLLSLETGSLKLANGRVIEKTLYNRRTRQDEPALFVALTFERREVLDSSNIKPMNLIGVDRGENIPAVIALTDPEGCPLSRFKDSLGNPTHILRIGESYKEKQRTIQAKKEVEQRRAGGYSRKYASKAKNLADDMVRNTARDLLYYAVTQDAMLIFENLSRGFGRQGKRTFMAERQYTRMEDWLTAKLAYEGLPSKTYLSKTLAQYTSKTCSNCGFTITSADYDRVLEKLKKTATGWMTTINGKELKVEGQITYYNRYKRQNVVKDLSVELDRLSEESVNNDISSWTKGRSGEALSLLKKRFSHRPVQEKFVCLNCGFETHADEQAALNIARSWLFLRSQEYKKYQTNKTTGNTDKRAFVETWQSFYRKKLKEVWKPAV

SEQ ID NO: 31661 - protein, 979 aa, synthetic construct
  REGION 1..979: note = engineered CasX variant
QEIGKRINKIRRRLVKDSNTKKAGKTGPMKTLLVRVMTPDLRERLENLRKKPENIPQPISNTSRANLNKLLTDYTEMKKAILHVYWEEFQKDPVGLMSRVAQPASKKIDQNKLKPEMDEKGNLTTAGFACSQCGQPLFVYKLEQVSEKGKAYTNYFGRCNVAEHEKLILLAQLKPEKDSDEAVTYSLGKFGQRALDFYSIHVTKESTHPVKPLAQIAGNRYASSPVGKALSDACMGTIASFLSKYQDIIIEHQKVVKGNQKRLESLRELAGKENLEYPSVTLPPQPHTKEGVDAYNEVIARVRMWVNLNLWQKLKLSRDDAKPLLRLKGFPSFPLVERQANEVDWWDMVCNVKKLINEKKEDGKVFWQNLAGYKRQEALRPYLSSEEDRKKGKKFARYQLGDLLLHLEKKHGEDWGKVYDEAWERIDKKVEGLSKHIKLEEERRSEDAQSKAALTDWLRAKASFVIEGLKEADKDEFCRCDLKLQKWYGDLRGKPFAIEAENSILDISGFSKQYNCAFIWQKDGVKKLNLYLIINYFKGGKLRFKKIKPEAFEANRFYTVINKKSGEIVPMEVNFNFDDPNLIILPLAFGKRQGREFIWNDLLSLETGSLKLANGRVIEKTLYNRRTRQDEPALFVALTFERREVLDSSNIKPMNLIGVDRGENIPAVIALTDPEGCPLSRFKDSLGNPTHILRIGESYKEKQRTIQAKKEVEQRRAGGYSRKYASKAKNLADDMVRNTARDLLYYAVTQDAMLIFENLSRGFGRQGKRTFMAERQYTRMEDWLTAKLAYEGLPSKTYLSKTLAQYTSKTCSNCGFTITSADYDRVLEKLKKTATGWMTTINGKELKVEGQITYYNRYKRQNVVKDLSVELDRLSEESVNNDISSWTKGRSGEALSLLKKRFSHRPVQEKFVCLNCGFETHADEQAALNIARSWLFLRSQEYKKYQTNKTTGNTDKRAFVETWQSFYRKKLKEVWKPAV

SEQ ID NO: 31662 - protein, 979 aa, synthetic construct
  REGION 1..979: note = engineered CasX variant
QEIGKRINKIRRRLVKDSNTKKAGKTGPMKTLLVRVMTPDLRERLENLRKKPENIPQPISNTSRANLNKLLTDYTEMKKAILHVYWEEFQKDPVGLMSRVAQPASKKIDQNKLKPEMDEKGNLTTAGFACSQCGQPLFVYKLEQVSEKGKAYTNYFGRCNVAEHEKLILLAQLKPEKDSDEAVTYSLGKFGQRALDFYSIHVTKESTHPVKPLAQIAGNRYASTPVGKALSDACMGTIASFLSKYQDIIIEHQKVVKGNQKRLESLRELAGKENLEYPSVTLPPQPHTKEGVDAYNEVIARVRMWVNLNLWQKLKLSRDDAKPLLRLKGFPSFPLVERQANEVDWWDMVCNVKKLINEKKEDGKVFWQNLAGYKRQEALRPYLSSEEDRKKGKKFARYQLGDLLLHLEKKHGEDWGKVYDEAWERIDKKVEGLSKHIKLEEERRSEDAQSKAALTDWLRAKASFVIEGLKEADKDEFCRCDLKLQKWYGDLRGKPFAIEAENSILDISGFSKQYNCAFIWQKDGVKKLNLYLIINYFKGGKLRFKKIKPEAFEANRFYTVINKKSGEIVPMEVNFNFDDPNLIILPLAFGKRQGREFIWNDLLSLETGSLKLANGRVIEKTLYNRRTRQDEPALFVALTFERREVLDSSNIKPMNLIGVDRGENIPAVIALTDPEGCPLSRFKDSLGNPTHILRIGESYKEKQRTIQAKKEVEQRRAGGYSRKYASKAKNLADDMVRNTARDLLYYAVTQDAMLIFENLSRGFGRQGKRTFMAERQYTRMEDWLTAKLAYEGLPSKTYLSKTLAQYTSKTCSNCGFTITSADYDRVLEKLKKTATGWMTTINGKELKVEGQITYYNRYKRQNVVKDLSVELDRLSEESVNNDISSWTKGRSGEALSLLKKRFSHRPVQEKFVCLNCGFETHADEQAALNIARSWLFLRSQEYKKYQTNKTTGNTDKRAFVETWQSFYRKKLKEVWKPAV

SEQ ID NO: 31663 - protein, 979 aa, synthetic construct
  REGION 1..979: note = engineered CasX variant
QEIGKRINKIRRRLVKDSNTKKAGKTGPMKTLLVRVMTPDLRERLENLRKKPENIPQPISNTSRANLNKLLTDYTEMKKAILHVYWEEFQKDPVGLMSRVAQPASKKIDQNKLKPEMDEKGNLTTAGFACSQCGQPLFVYKLEQVSEKGKAYTNYFGRCNVAEHEKLILLAQLKPEKDSDEAVTYSLGKFGQRALDFYSIHVTKESTHPVKPLAQIAGNRYASAPVGKALSDACMGTIASFLSKYQDIIIEHQKVVKGNQKRLESLRELAGKENLEYPSVTLPPQPHTKEGVDAYNEVIARVRMWVNLNLWQKLKLSRDDAKPLLRLKGFPSFPLVERQANEVDWWDMVCNVKKLINEKKEDGKVFWQNLAGYKRQEALRPYLSSEEDRKKGKKFARYQLGDLLLHLEKKHGEDWGKVYDEAWERIDKKVEGLSKHIKLEEERRSEDAQSKAALTDWLRAKASFVIEGLKEADKDEFCRCDLKLQKWYGDLRGKPFAIEAENSILDISGFSKQYNCAFIWQKDGVKKLNLYLIINYFKGGKLRFKKIKPEAFEANRFYTVINKKSGEIVPMEVNFNFDDPNLIILPLAFGKRQGREFIWNDLLSLETGSLKLANGRVIEKTLYNRRTRQDEPALFVALTFERREVLDSSNIKPMNLIGVDRGENIPAVIALTDPEGCPLSRFKDSLGNPTHILRIGESYKEKQRTIQAKKEVEQRRAGGYSRKYASKAKNLADDMVRNTARDLLYYAVTQDAMLIFENLSRGFGRQGKRTFMAERQYTRMEDWLTAKLAYEGLPSKTYLSKTLAQYTSKTCSNCGFTITSADYDRVLEKLKKTATGWMTTINGKELKVEGQITYYNRYKRQNVVKDLSVELDRLSEESVNNDISSWTKGRSGEALSLLKKRFSHRPVQEKFVCLNCGFETHADEQAALNIARSWLFLRSQEYKKYQTNKTTGNTDKRAFVETWQSFYRKKLKEVWKPAV

SEQ ID NO: 31664 - protein, 979 aa, synthetic construct
  REGION 1..979: note = engineered CasX variant
QEIGKRINKIRRRLVKDSNTKKAGKTGPMKTLLVRVMTPDLRERLENLRKKPENIPQPISNTSRANLNKLLTDYTEMKKAILHVYWEEFQKDPVGLMSRVAQPASKKIDQNKLKPEMDEKGNLTTAGFACSQCGQPLFVYKLEQVSEKGKAYTNYFGRCNVAEHEKLILLAQLKPEKDSDEAVTYSLGKFGQRALDFYSIHVTKESTHPVKPLAQIAGNRYASVPVGKALSDACMGTIASFLSKYQDIIIEHQKVVKGNQKRLESLRELAGKENLEYPSVTLPPQPHTKEGVDAYNEVIARVRMWVNLNLWQKLKLSRDDAKPLLRLKGFPSFPLVERQANEVDWWDMVCNVKKLINEKKEDGKVFWQNLAGYKRQEALRPYLSSEEDRKKGKKFARYQLGDLLLHLEKKHGEDWGKVYDEAWERIDKKVEGLSKHIKLEEERRSEDAQSKAALTDWLRAKASFVIEGLKEADKDEFCRCDLKLQKWYGDLRGKPFAIEAENSILDISGFSKQYNCAFIWQKDGVKKLNLYLIINYFKGGKLRFKKIKPEAFEANRFYTVINKKSGEIVPMEVNFNFDDPNLIILPLAFGKRQGREFIWNDLLSLETGSLKLANGRVIEKTLYNRRTRQDEPALFVALTFERREVLDSSNIKPMNLIGVDRGENIPAVIALTDPEGCPLSRFKDSLGNPTHILRIGESYKEKQRTIQAKKEVEQRRAGGYSRKYASKAKNLADDMVRNTARDLLYYAVTQDAMLIFENLSRGFGRQGKRTFMAERQYTRMEDWLTAKLAYEGLPSKTYLSKTLAQYTSKTCSNCGFTITSADYDRVLEKLKKTATGWMTTINGKELKVEGQITYYNRYKRQNVVKDLSVELDRLSEESVNNDISSWTKGRSGEALSLLKKRFSHRPVQEKFVCLNCGFETHADEQAALNIARSWLFLRSQEYKKYQTNKTTGNTDKRAFVETWQSFYRKKLKEVWKPAV

SEQ ID NO: 31665 - protein, 979 aa, synthetic construct
  REGION 1..979: note = engineered CasX variant
QEIGKRINKIRRRLVKDSNTKKAGKTGPMKTLLVRVMTPDLRERLENLRKKPENIPQPISNTSRANLNKLLTDYTEMKKAILHVYWEEFQKDPVGLMSRVAQPASKKIDQNKLKPEMDEKGNLTTAGFACSQCGQPLFVYKLEQVSEKGKAYTNYFGRCNVAEHEKLIKLAQLKPEKDSDEAVTYSLGKFGQRALDFYSIHVTKESTHPVKPLAQIAGNRYASGPVGKALSDACMGTIASFLSKYQDIIIEHQKVVKGNQKRLESLRELAGKENLEYPSVTLPPQPHTKEGVDAYNEVIARVRMWVNLNLWQKLKLSRDDAKPLLRLKGFPSFPLVERQANEVDWWDMVCNVKKLINEKKEDGKVFWQNLAGYKRQEALRPYLSSEEDRKKGKKFARYQLGDLLLHLEKKHGEDWGKVYDEAWERIDKKVEGLSKHIKLEEERRSEDAQSKAALTDWLRAKASFVIEGLKEADKDEFCRCDLKLQKWYGDLRGKPFAIEAENSILDISGFSKQYNCAFIWQKDGVKKLNLYLIINYFKGGKLRFKKIKPEAFEANRFYTVINKKSGEIVPMEVNFNFDDPNLIILPLAFGKRQGREFIWNDLLSLETGSLKLANGRVIEKTLYNRRTRQDEPALFVALTFERREVLDSSNIKPMNLIGVDRGENIPAVIALTDPEGCPLSRFKDSLGNPTHILRIGESYKEKQRTIQAKKEVEQRRAGGYSRKYASKAKNLADDMVRNTARDLLYYAVTQDAMLIFENLSRGFGRQGKRTFMAERQYTRMEDWLTAKLAYEGLPSKTYLSKTLAQYTSKTCSNCGFTITSADYDRVLEKLKKTATGWMTTINGKELKVEGQITYYNRYKRQNVVKDLSVELDRLSEESVNNDISSWTKGRSGEALSLLKKRFSHRPVQEKFVCLNCGFETHADEQAALNIARSWLFLRSQEYKKYQTNKTTGNTDKRAFVETWQSFYRKKLKEVWKPAV

SEQ ID NO: 31666 - protein, 978 aa, synthetic construct
  REGION 1..978: note = engineered CasX variant
QEIGKRINKIRRRLVKDSNTKKAGKTGPMKTLLVRVMTPDLRERLENLRKKPENIPQPISNTSRANLNKLLTDYTEMKKAILHVYWEEFQKDPVGLMSRVAQPASKKIDQNKLKPEMDEKGNLTTAGFACSQCGQPLFVYKLEQVSEKGKAYTNYFGRCNVAEHEKLILLAQLKPEKDSDEAVTYSLGKFGQRALDFYSIHVTKESTHPVKPLAQIAGNRYASPVGKALSDACMGTIASFLSKYQDIIIEHQKVVKGNQKRLESLRELAGKENLEYPSVTLPPQPHTKEGVDAYNEVIARVRMWVNLNLWQKLKLSRDDAKPLLRLKGFPSFPLVERQANEVDWWDMVCNVKKLINEKKEDGKVFWQNLAGYKRQEALRPYLSSEEDRKKGKKFARYQLGDLLLHLEKKHGEDWGKVYDEAWERIDKKVEGLSKHIKLEEERRSEDAQSKAALTDWLRAKASFVIEGLKEADKDEFCRCDLKLQKWYGDLRGKPFAIEAENSILDISGFSKQYNCAFIWQKDGVKKLNLYLIINYFKGGKLRFKKIKPEAFEANRFYTVINKKSGEIVPMEVNFNFDDPNLIILPLAFGKRQGREFIWNDLLSLETGSLKLANGRVIEKTLYNRRTRQDEPALFVALTFERREVLDSSNIKPMNLIGVDRGENIPAVIALTDPEGCPLSRFKDSLGNPTHILRIGESYKEKQRTIQAKKEVEQRRAGGYSRKYASKAKNLADDMVRNTARDLLYYAVTQDAMLIFENLSRGFGRQGKRTFMAERQYTRMEDWLTAKLAYEGLPSKTYLSKTLAQYTSKTCSNCGFTITSADYDRVLEKLKKTATGWMTTINGKELKVEGQITYYNRYKRQNVVKDLSVELDRLSEESVNNDISSWTKGRSGEALSLLKKRFSHRPVQEKFVCLNCGFETHADEQAALNIARSWLFLRSQEYKKYQTNKTTGNTDKRAFVETWQSFYRKKLKEVWKPAV

SEQ ID NO: 31667 - protein, 979 aa, synthetic construct
  REGION 1..979: note = engineered CasX variant
QEIGKRINKIRRRLVKDSNTKKAGKTGPMKTLLVRVMTPDLRERLENLRKKPENIPQPISNTSRANLNKLLTDYTEMKKAILHVYWEEFQKDPVGLMSRVAQPASKKIDQNKLKPEMDEKGNLTTAGFACSQCGQPLFVYKLEQVSEKGKAYTNYFGRCNVAEHEKLILLAQLKPEKDSDEAVTYSLGKFGQRALDFYSIHVTKESTHPVKPLAQIAGNRYASYPVGKALSDACMGTIASFLSKYQDIIIEHQKVVKGNQKRLESLRELAGKENLEYPSVTLPPQPHTKEGVDAYNEVIARVRMWVNLNLWQKLKLSRDDAKPLLRLKGFPSFPLVERQANEVDWWDMVCNVKKLINEKKEDGKVFWQNLAGYKRQEALRPYLSSEEDRKKGKKFARYQLGDLLLHLEKKHGEDWGKVYDEAWERIDKKVEGLSKHIKLEEERRSEDAQSKAALTDWLRAKASFVIEGLKEADKDEFCRCELKLQKWYGDLRGKPFAIEAENSILDISGFSKQYNCAFIWQKDGVKKLNLYLIINYFKGGKLRFKKIKPEAFEANRFYTVINKKSGEIVPMEVNFNFDDPNLIILPLAFGKRFGREFIWNDLLSLETGSLKLANGRVIEKTLYNRRTRQDEPALFVALTFERREVLDSSNIKPMNLIGVDRGENIPAVIALTDPEGCPLSRFKDSLGNPTHILRIGESYKEKQRTIQAKKEVEQRRAGGYSRKYASKAKNLADDMVRNTARDLLYYAVTQDAMLIFENLSRGFGRQGKRTFMAERQYTRMEDWLTAKLAYEGLPSKTYLSKTLAQYTSKTCSNCGFTITSADYDRVLEKLKKTATGWMTTINGKELKVEGQITYYNRYKRQNVVKDLSVELDRLSEESVNNDISSWTKGRSGEALSLLKKRFSHRPVQEKFVCLNCGFETHADEQAALNIARSWLFLRSQEYKKYQTNKTTGNTDKRAFVETWQSFYRKKLKEVWKPAV

SEQ ID NO: 31668 - protein, 979 aa, synthetic construct
  REGION 1..979: note = engineered CasX variant
QEIGKRINKIRRRLVKDSNTKKAGKTGPMKTLLVRVMTPDLRERLENLRKKPENIPQPISNTSRANLNKLLTDYTEMKKAILHVYWEEFQKDPVGLMSRVAQPASKKIDQNKLKPEMDEKGNLTTAGFACSQCGQPLFVYKLEQVSEKGKAYTNYFGRCNVAEHEKLILLAQLKPEKDSDEAVTYSLGKFGQRALDFYSIHVTKESTHPVKPLAQIAGNRYASHPVGKALSDACMGTIASFLSKYQDIIIEHQKVVKGNQKRLESLRELAGKENLEYPSVTLPPQPHTKEGVDAYNEVIARVRMWVNLNLWQKLKLSRDDAKPLLRLKGFPSFPLVERQANEVDWWDMVCNVKKLINEKKEDGKVFWQNLAGYKRQEALRPYLSSEEDRKKGKKFARYQLGDLLLHLEKKHGEDWGKVYDEAWERIDKKVEGLSKHIKLEEERRSEDAQSKAALTDWLRAKASFVIEGLKEADKDEFCRCELKLQKWYGDLRGKPFAIEAENSILDISGFSKQYNCAFIWQKDGVKKLNLYLIINYFKGGKLRFKKIKPEAFEANRFYTVINKKSGEIVPMEVNFNFDDPNLIILPLAFGKRFGREFIWNDLLSLETGSLKLANGRVIEKTLYNRRTRQDEPALFVALTFERREVLDSSNIKPMNLIGVDRGENIPAVIALTDPEGCPLSRFKDSLGNPTHILRIGESYKEKQRTIQAKKEVEQRRAGGYSRKYASKAKNLADDMVRNTARDLLYYAVTQDAMLIFENLSRGFGRQGKRTFMAERQYTRMEDWLTAKLAYEGLPSKTYLSKTLAQYTSKTCSNCGFTITSADYDRVLEKLKKTATGWMTTINGKELKVEGQITYYNRYKRQNVVKDLSVELDRLSEESVNNDISSWTKGRSGEALSLLKKRFSHRPVQEKFVCLNCGFETHADEQAALNIARSWLFLRSQEYKKYQTNKTTGNTDKRAFVETWQSFYRKKLKEVWKPAV

SEQ ID NO: 31669 - protein, 979 aa, synthetic construct
  REGION 1..979: note = engineered CasX variant
QEIGKRINKIRRRLVKDSNTKKAGKTGPMKTLLVRVMTPDLRERLENLRKKPENIPQPISNTSRANLNKLLTDYTEMKKAILHVYWEEFQKDPVGLMSRVAQPASKKIDQNKLKPEMDEKGNLTTAGFACSQCGQPLFVYKLEQVSEKGKAYTNYFGRCNVAEHEKLILLAQLKPEKDSDEAVTYSLGKFGQRALDFYSIHVTKESTHPVKPLAQIAGNRYASSPVGKALSDACMGTIASFLSKYQDIIIEHQKVVKGNQKRLESLRELAGKENLEYPSVTLPPQPHTKEGVDAYNEVIARVRMWVNLNLWQKLKLSRDDAKPLLRLKGFPSFPLVERQANEVDWWDMVCNVKKLINEKKEDGKVFWQNLAGYKRQEALRPYLSSEEDRKKGKKFARYQLGDLLLHLEKKHGEDWGKVYDEAWERIDKKVEGLSKHIKLEEERRSEDAQSKAALTDWLRAKASFVIEGLKEADKDEFCRCELKLQKWYGDLRGKPFAIEAENSILDISGFSKQYNCAFIWQKDGVKKLNLYLIINYFKGGKLRFKKIKPEAFEANRFYTVINKKSGEIVPMEVNFNFDDPNLIILPLAFGKRFGREFIWNDLLSLETGSLKLANGRVIEKTLYNRRTRQDEPALFVALTFERREVLDSSNIKPMNLIGVDRGENIPAVIALTDPEGCPLSRFKDSLGNPTHILRIGESYKEKQRTIQAKKEVEQRRAGGYSRKYASKAKNLADDMVRNTARDLLYYAVTQDAMLIFENLSRGFGRQGKRTFMAERQYTRMEDWLTAKLAYEGLPSKTYLSKTLAQYTSKTCSNCGFTITSADYDRVLEKLKKTATGWMTTINGKELKVEGQITYYNRYKRQNVVKDLSVELDRLSEESVNNDISSWTKGRSGEALSLLKKRFSHRPVQEKFVCLNCGFETHADEQAALNIARSWLFLRSQEYKKYQTNKTTGNTDKRAFVETWQSFYRKKLKEVWKPAV

SEQ ID NO: 31670 - protein, 979 aa, synthetic construct
  REGION 1..979: note = engineered CasX variant
QEIGKRINKIRRRLVKDSNTKKAGKTGPMKTLLVRVMTPDLRERLENLRKKPENIPQPISNTSRANLNKLLTDYTEMKKAILHVYWEEFQKDPVGLMSRVAQPASKKIDQNKLKPEMDEKGNLTTAGFACSQCGQPLFVYKLEQVSEKGKAYTNYFGRCNVAEHEKLILLAQLKPEKDSDEAVTYSLGKFGQRALDFYSIHVTKESTHPVKPLAQIAGNRYASTPVGKALSDACMGTIASFLSKYQDIIIEHQKVVKGNQKRLESLRELAGKENLEYPSVTLPPQPHTKEGVDAYNEVIARVRMWVNLNLWQKLKLSRDDAKPLLRLKGFPSFPLVERQANEVDWWDMVCNVKKLINEKKEDGKVFWQNLAGYKRQEALRPYLSSEEDRKKGKKFARYQLGDLLLHLEKKHGEDWGKVYDEAWERIDKKVEGLSKHIKLEEERRSEDAQSKAALTDWLRAKASFVIEGLKEADKDEFCRCELKLQKWYGDLRGKPFAIEAENSILDISGFSKQYNCAFIWQKDGVKKLNLYLIINYFKGGKLRFKKIKPEAFEANRFYTVINKKSGEIVPMEVNFNFDDPNLIILPLAFGKRFGREFIWNDLLSLETGSLKLANGRVIEKTLYNRRTRQDEPALFVALTFERREVLDSSNIKPMNLIGVDRGENIPAVIALTDPEGCPLSRFKDSLGNPTHILRIGESYKEKQRTIQAKKEVEQRRAGGYSRKYASKAKNLADDMVRNTARDLLYYAVTQDAMLIFENLSRGFGRQGKRTFMAERQYTRMEDWLTAKLAYEGLPSKTYLSKTLAQYTSKTCSNCGFTITSADYDRVLEKLKKTATGWMTTINGKELKVEGQITYYNRYKRQNVVKDLSVELDRLSEESVNNDISSWTKGRSGEALSLLKKRFSHRPVQEKFVCLNCGFETHADEQAALNIARSWLFLRSQEYKKYQTNKTTGNTDKRAFVETWQSFYRKKLKEVWKPAV

SEQ ID NO: 31671 - protein, 979 aa, synthetic construct
  REGION 1..979: note = engineered CasX variant
QEIGKRINKIRRRLVKDSNTKKAGKTGPMKTLLVRVMTPDLRERLENLRKKPENIPQPISNTSRANLNKLLTDYTEMKKAILHVYWEEFQKDPVGLMSRVAQPASKKIDQNKLKPEMDEKGNLTTAGFACSQCGQPLFVYKLEQVSEKGKAYTNYFGRCNVAEHEKLILLAQLKPEKDSDEAVTYSLGKFGQRALDFYSIHVTKESTHPVKPLAQIAGNRYASAPVGKALSDACMGTIASFLSKYQDIIIEHQKVVKGNQKRLESLRELAGKENLEYPSVTLPPQPHTKEGVDAYNEVIARVRMWVNLNLWQKLKLSRDDAKPLLRLKGFPSFPLVERQANEVDWWDMVCNVKKLINEKKEDGKVFWQNLAGYKRQEALRPYLSSEEDRKKGKKFARYQLGDLLLHLEKKHGEDWGKVYDEAWERIDKKVEGLSKHIKLEEERRSEDAQSKAALTDWLRAKASFVIEGLKEADKDEFCRCELKLQKWYGDLRGKPFAIEAENSILDISGFSKQYNCAFIWQKDGVKKLNLYLIINYFKGGKLRFKKIKPEAFEANRFYTVINKKSGEIVPMEVNFNFDDPNLIILPLAFGKRFGREFIWNDLLSLETGSLKLANGRVIEKTLYNRRTRQDEPALFVALTFERREVLDSSNIKPMNLIGVDRGENIPAVIALTDPEGCPLSRFKDSLGNPTHILRIGESYKEKQRTIQAKKEVEQRRAGGYSRKYASKAKNLADDMVRNTARDLLYYAVTQDAMLIFENLSRGFGRQGKRTFMAERQYTRMEDWLTAKLAYEGLPSKTYLSKTLAQYTSKTCSNCGFTITSADYDRVLEKLKKTATGWMTTINGKELKVEGQITYYNRYKRQNVVKDLSVELDRLSEESVNNDISSWTKGRSGEALSLLKKRFSHRPVQEKFVCLNCGFETHADEQAALNIARSWLFLRSQEYKKYQTNKTTGNTDKRAFVETWQSFYRKKLKEVWKPAV

SEQ ID NO: 31672 - protein, 979 aa, synthetic construct
  REGION 1..979: note = engineered CasX variant
QEIGKRINKIRRRLVKDSNTKKAGKTGPMKTLLVRVMTPDLRERLENLRKKPENIPQPISNTSRANLNKLLTDYTEMKKAILHVYWEEFQKDPVGLMSRVAQPASKKIDQNKLKPEMDEKGNLTTAGFACSQCGQPLFVYKLEQVSEKGKAYTNYFGRCNVAEHEKLILLAQLKPEKDSDEAVTYSLGKFGQRALDFYSIHVTKESTHPVKPLAQIAGNRYASVPVGKALSDACMGTIASFLSKYQDIIIEHQKVVKGNQKRLESLRELAGKENLEYPSVTLPPQPHTKEGVDAYNEVIARVRMWVNLNLWQKLKLSRDDAKPLLRLKGFPSFPLVERQANEVDWWDMVCNVKKLINEKKEDGKVFWQNLAGYKRQEALRPYLSSEEDRKKGKKFARYQLGDLLLHLEKKHGEDWGKVYDEAWERIDKKVEGLSKHIKLEEERRSEDAQSKAALTDWLRAKASFVIEGLKEADKDEFCRCELKLQKWYGDLRGKPFAIEAENSILDISGFSKQYNCAFIWQKDGVKKLNLYLIINYFKGGKLRFKKIKPEAFEANRFYTVINKKSGEIVPMEVNFNFDDPNLIILPLAFGKRFGREFIWNDLLSLETGSLKLANGRVIEKTLYNRRTRQDEPALFVALTFERREVLDSSNIKPMNLIGVDRGENIPAVIALTDPEGCPLSRFKDSLGNPTHILRIGESYKEKQRTIQAKKEVEQRRAGGYSRKYASKAKNLADDMVRNTARDLLYYAVTQDAMLIFENLSRGFGRQGKRTFMAERQYTRMEDWLTAKLAYEGLPSKTYLSKTLAQYTSKTCSNCGFTITSADYDRVLEKLKKTATGWMTTINGKELKVEGQITYYNRYKRQNVVKDLSVELDRLSEESVNNDISSWTKGRSGEALSLLKKRFSHRPVQEKFVCLNCGFETHADEQAALNIARSWLFLRSQEYKKYQTNKTTGNTDKRAFVETWQSFYRKKLKEVWKPAV

SEQ ID NO: 31673 - protein, 979 aa, synthetic construct
  REGION 1..979: note = engineered CasX variant
QEIGKRINKIRRRLVKDSNTKKAGKTGPMKTLLVRVMTPDLRERLENLRKKPENIPQPISNTSRANLNKLLTDYTEMKKAILHVYWEEFQKDPVGLMSRVAQPASKKIDQNKLKPEMDEKGNLTTAGFACSQCGQPLFVYKLEQVSEKGKAYTNYFGRCNVAEHEKLIKLAQLKPEKDSDEAVTYSLGKFGQRALDFYSIHVTKESTHPVKPLAQIAGNRYASGPVGKALSDACMGTIASFLSKYQDIIIEHQKVVKGNQKRLESLRELAGKENLEYPSVTLPPQPHTKEGVDAYNEVIARVRMWVNLNLWQKLKLSRDDAKPLLRLKGFPSFPLVERQANEVDWWDMVCNVKKLINEKKEDGKVFWQNLAGYKRQEALRPYLSSEEDRKKGKKFARYQLGDLLLHLEKKHGEDWGKVYDEAWERIDKKVEGLSKHIKLEEERRSEDAQSKAALTDWLRAKASFVIEGLKEADKDEFCRCELKLQKWYGDLRGKPFAIEAENSILDISGFSKQYNCAFIWQKDGVKKLNLYLIINYFKGGKLRFKKIKPEAFEANRFYTVINKKSGEIVPMEVNFNFDDPNLIILPLAFGKRFGREFIWNDLLSLETGSLKLANGRVIEKTLYNRRTRQDEPALFVALTFERREVLDSSNIKPMNLIGVDRGENIPAVIALTDPEGCPLSRFKDSLGNPTHILRIGESYKEKQRTIQAKKEVEQRRAGGYSRKYASKAKNLADDMVRNTARDLLYYAVTQDAMLIFENLSRGFGRQGKRTFMAERQYTRMEDWLTAKLAYEGLPSKTYLSKTLAQYTSKTCSNCGFTITSADYDRVLEKLKKTATGWMTTINGKELKVEGQITYYNRYKRQNVVKDLSVELDRLSEESVNNDISSWTKGRSGEALSLLKKRFSHRPVQEKFVCLNCGFETHADEQAALNIARSWLFLRSQEYKKYQTNKTTGNTDKRAFVETWQSFYRKKLKEVWKPAV

SEQ ID NO: 31674 - protein, 978 aa, synthetic construct
  REGION 1..978: note = engineered CasX variant
QEIGKRINKIRRRLVKDSNTKKAGKTGPMKTLLVRVMTPDLRERLENLRKKPENIPQPISNTSRANLNKLLTDYTEMKKAILHVYWEEFQKDPVGLMSRVAQPASKKIDQNKLKPEMDEKGNLTTAGFACSQCGQPLFVYKLEQVSEKGKAYTNYFGRCNVAEHEKLILLAQLKPEKDSDEAVTYSLGKFGQRALDFYSIHVTKESTHPVKPLAQIAGNRYASPVGKALSDACMGTIASFLSKYQDIIIEHQKVVKGNQKRLESLRELAGKENLEYPSVTLPPQPHTKEGVDAYNEVIARVRMWVNLNLWQKLKLSRDDAKPLLRLKGFPSFPLVERQANEVDWWDMVCNVKKLINEKKEDGKVFWQNLAGYKRQEALRPYLSSEEDRKKGKKFARYQLGDLLLHLEKKHGEDWGKVYDEAWERIDKKVEGLSKHIKLEEERRSEDAQSKAALTDWLRAKASFVIEGLKEADKDEFCRCELKLQKWYGDLRGKPFAIEAENSILDISGFSKQYNCAFIWQKDGVKKLNLYLIINYFKGGKLRFKKIKPEAFEANRFYTVINKKSGEIVPMEVNFNFDDPNLIILPLAFGKRFGREFIWNDLLSLETGSLKLANGRVIEKTLYNRRTRQDEPALFVALTFERREVLDSSNIKPMNLIGVDRGENIPAVIALTDPEGCPLSRFKDSLGNPTHILRIGESYKEKQRTIQAKKEVEQRRAGGYSRKYASKAKNLADDMVRNTARDLLYYAVTQDAMLIFENLSRGFGRQGKRTFMAERQYTRMEDWLTAKLAYEGLPSKTYLSKTLAQYTSKTCSNCGFTITSADYDRVLEKLKKTATGWMTTINGKELKVEGQITYYNRYKRQNVVKDLSVELDRLSEESVNNDISSWTKGRSGEALSLLKKRFSHRPVQEKFVCLNCGFETHADEQAALNIARSWLFLRSQEYKKYQTNKTTGNTDKRAFVETWQSFYRKKLKEVWKPAV

SEQ ID NO: 31675 - protein, 979 aa, synthetic construct
  REGION 1..979: note = engineered CasX variant
QEIGKRINKIRRRLVKDSNTKKAGKTGPMKTLLVRVMTPDLRERLENLRKKPENIPQPISNTSRANLNKLLTDYTEMKKAILHVYWEEFQKDPVGLMSRVAQPASKKIDQNKLKPEMDEKGNLTTAGFACSQCGQPLFVYKLEQVSEKGKAYTNYFGRCNVAEHEKLILLAQLKPEKDSDEAVTYSLGKFGQRALDFYSIHVTKESTHPVKPLAQIAGNRYASYPVGKALSDACMGTIASFLSKYQDIIIEHQKVVKGNQKRLESLRELAGKENLEYPSVTLPPQPHTKEGVDAYNEVIARVRMWVNLNLWQKLKLSRDDAKPLLRLKGFPSFPLVERQANEVDWWDMVCNVKKLINEKKEDGKVFWQNLAGYKRQEALRPYLSSEEDRKKGKKFARYQLGDLLLHLEKKHGEDWGKVYDEAWERIDKKVEGLSKHIKLEEERRSEDAQSKAALTDWLRAKASFVIEGLKEADKDEFCRCELKLQKWYGDLRGKPFAIEAENSILDISGFSKQYNCAFIWQKDGVKKLNLYLIINYFKGGKLRFKKIKPEAFEANRFYTVINKKSGEIVPMEVNFNFDDPNLIILPLAFGKRVGREFIWNDLLSLETGSLKLANGRVIEKTLYNRRTRQDEPALFVALTFERREVLDSSNIKPMNLIGVDRGENIPAVIALTDPEGCPLSRFKDSLGNPTHILRIGESYKEKQRTIQAKKEVEQRRAGGYSRKYASKAKNLADDMVRNTARDLLYYAVTQDAMLIFENLSRGFGRQGKRTFMAERQYTRMEDWLTAKLAYEGLPSKTYLSKTLAQYTSKTCSNCGFTITSADYDRVLEKLKKTATGWMTTINGKELKVEGQITYYNRYKRQNVVKDLSVELDRLSEESVNNDISSWTKGRSGEALSLLKKRFSHRPVQEKFVCLNCGFETHADEQAALNIARSWLFLRSQEYKKYQTNKTTGNTDKRAFVETWQSFYRKKLKEVWKPAV

SEQ ID NO: 31676 - protein, 979 aa, synthetic construct
  REGION 1..979: note = engineered CasX variant
QEIGKRINKIRRRLVKDSNTKKAGKTGPMKTLLVRVMTPDLRERLENLRKKPENIPQPISNTSRANLNKLLTDYTEMKKAILHVYWEEFQKDPVGLMSRVAQPASKKIDQNKLKPEMDEKGNLTTAGFACSQCGQPLFVYKLEQVSEKGKAYTNYFGRCNVAEHEKLILLAQLKPEKDSDEAVTYSLGKFGQRALDFYSIHVTKESTHPVKPLAQIAGNRYASHPVGKALSDACMGTIASFLSKYQDIIIEHQKVVKGNQKRLESLRELAGKENLEYPSVTLPPQPHTKEGVDAYNEVIARVRMWVNLNLWQKLKLSRDDAKPLLRLKGFPSFPLVERQANEVDWWDMVCNVKKLINEKKEDGKVFWQNLAGYKRQEALRPYLSSEEDRKKGKKFARYQLGDLLLHLEKKHGEDWGKVYDEAWERIDKKVEGLSKHIKLEEERRSEDAQSKAALTDWLRAKASFVIEGLKEADKDEFCRCELKLQKWYGDLRGKPFAIEAENSILDISGFSKQYNCAFIWQKDGVKKLNLYLIINYFKGGKLRFKKIKPEAFEANRFYTVINKKSGEIVPMEVNFNFDDPNLIILPLAFGKRVGREFIWNDLLSLETGSLKLANGRVIEKTLYNRRTRQDEPALFVALTFERREVLDSSNIKPMNLIGVDRGENIPAVIALTDPEGCPLSRFKDSLGNPTHILRIGESYKEKQRTIQAKKEVEQRRAGGYSRKYASKAKNLADDMVRNTARDLLYYAVTQDAMLIFENLSRGFGRQGKRTFMAERQYTRMEDWLTAKLAYEGLPSKTYLSKTLAQYTSKTCSNCGFTITSADYDRVLEKLKKTATGWMTTINGKELKVEGQITYYNRYKRQNVVKDLSVELDRLSEESVNNDISSWTKGRSGEALSLLKKRFSHRPVQEKFVCLNCGFETHADEQAALNIARSWLFLRSQEYKKYQTNKTTGNTDKRAFVETWQSFYRKKLKEVWKPAV

SEQ ID NO: 31677 - protein, 979 aa, synthetic construct
  REGION 1..979: note = engineered CasX variant
QEIGKRINKIRRRLVKDSNTKKAGKTGPMKTLLVRVMTPDLRERLENLRKKPENIPQPISNTSRANLNKLLTDYTEMKKAILHVYWEEFQKDPVGLMSRVAQPASKKIDQNKLKPEMDEKGNLTTAGFACSQCGQPLFVYKLEQVSEKGKAYTNYFGRCNVAEHEKLILLAQLKPEKDSDEAVTYSLGKFGQRALDFYSIHVTKESTHPVKPLAQIAGNRYASSPVGKALSDACMGTIASFLSKYQDIIIEHQKVVKGNQKRLESLRELAGKENLEYPSVTLPPQPHTKEGVDAYNEVIARVRMWVNLNLWQKLKLSRDDAKPLLRLKGFPSFPLVERQANEVDWWDMVCNVKKLINEKKEDGKVFWQNLAGYKRQEALRPYLSSEEDRKKGKKFARYQLGDLLLHLEKKHGEDWGKVYDEAWERIDKKVEGLSKHIKLEEERRSEDAQSKAALTDWLRAKASFVIEGLKEADKDEFCRCELKLQKWYGDLRGKPFAIEAENSILDISGFSKQYNCAFIWQKDGVKKLNLYLIINYFKGGKLRFKKIKPEAFEANRFYTVINKKSGEIVPMEVNFNFDDPNLIILPLAFGKRVGREFIWNDLLSLETGSLKLANGRVIEKTLYNRRTRQDEPALFVALTFERREVLDSSNIKPMNLIGVDRGENIPAVIALTDPEGCPLSRFKDSLGNPTHILRIGESYKEKQRTIQAKKEVEQRRAGGYSRKYASKAKNLADDMVRNTARDLLYYAVTQDAMLIFENLSRGFGRQGKRTFMAERQYTRMEDWLTAKLAYEGLPSKTYLSKTLAQYTSKTCSNCGFTITSADYDRVLEKLKKTATGWMTTINGKELKVEGQITYYNRYKRQNVVKDLSVELDRLSEESVNNDISSWTKGRSGEALSLLKKRFSHRPVQEKFVCLNCGFETHADEQAALNIARSWLFLRSQEYKKYQTNKTTGNTDKRAFVETWQSFYRKKLKEVWKPAV

SEQ ID NO: 31678 - protein, 979 aa, synthetic construct
  REGION 1..979: note = engineered CasX variant
QEIGKRINKIRRRLVKDSNTKKAGKTGPMKTLLVRVMTPDLRERLENLRKKPENIPQPISNTSRANLNKLLTDYTEMKKAILHVYWEEFQKDPVGLMSRVAQPASKKIDQNKLKPEMDEKGNLTTAGFACSQCGQPLFVYKLEQVSEKGKAYTNYFGRCNVAEHEKLILLAQLKPEKDSDEAVTYSLGKFGQRALDFYSIHVTKESTHPVKPLAQIAGNRYASTPVGKALSDACMGTIASFLSKYQDIIIEHQKVVKGNQKRLESLRELAGKENLEYPSVTLPPQPHTKEGVDAYNEVIARVRMWVNLNLWQKLKLSRDDAKPLLRLKGFPSFPLVERQANEVDWWDMVCNVKKLINEKKEDGKVFWQNLAGYKRQEALRPYLSSEEDRKKGKKFARYQLGDLLLHLEKKHGEDWGKVYDEAWERIDKKVEGLSKHIKLEEERRSEDAQSKAALTDWLRAKASFVIEGLKEADKDEFCRCELKLQKWYGDLRGKPFAIEAENSILDISGFSKQYNCAFIWQKDGVKKLNLYLIINYFKGGKLRFKKIKPEAFEANRFYTVINKKSGEIVPMEVNFNFDDPNLIILPLAFGKRVGREFIWNDLLSLETGSLKLANGRVIEKTLYNRRTRQDEPALFVALTFERREVLDSSNIKPMNLIGVDRGENIPAVIALTDPEGCPLSRFKDSLGNPTHILRIGESYKEKQRTIQAKKEVEQRRAGGYSRKYASKAKNLADDMVRNTARDLLYYAVTQDAMLIFENLSRGFGRQGKRTFMAERQYTRMEDWLTAKLAYEGLPSKTYLSKTLAQYTSKTCSNCGFTITSADYDRVLEKLKKTATGWMTTINGKELKVEGQITYYNRYKRQNVVKDLSVELDRLSEESVNNDISSWTKGRSGEALSLLKKRFSHRPVQEKFVCLNCGFETHADEQAALNIARSWLFLRSQEYKKYQTNKTTGNTDKRAFVETWQSFYRKKLKEVWKPAV

SEQ ID NO: 31679 - protein, 979 aa, synthetic construct
  REGION 1..979: note = engineered CasX variant
QEIGKRINKIRRRLVKDSNTKKAGKTGPMKTLLVRVMTPDLRERLENLRKKPENIPQPISNTSRANLNKLLTDYTEMKKAILHVYWEEFQKDPVGLMSRVAQPASKKIDQNKLKPEMDEKGNLTTAGFACSQCGQPLFVYKLEQVSEKGKAYTNYFGRCNVAEHEKLILLAQLKPEKDSDEAVTYSLGKFGQRALDFYSIHVTKESTHPVKPLAQIAGNRYASAPVGKALSDACMGTIASFLSKYQDIIIEHQKVVKGNQKRLESLRELAGKENLEYPSVTLPPQPHTKEGVDAYNEVIARVRMWVNLNLWQKLKLSRDDAKPLLRLKGFPSFPLVERQANEVDWWDMVCNVKKLINEKKEDGKVFWQNLAGYKRQEALRPYLSSEEDRKKGKKFARYQLGDLLLHLEKKHGEDWGKVYDEAWERIDKKVEGLSKHIKLEEERRSEDAQSKAALTDWLRAKASFVIEGLKEADKDEFCRCELKLQKWYGDLRGKPFAIEAENSILDISGFSKQYNCAFIWQKDGVKKLNLYLIINYFKGGKLRFKKIKPEAFEANRFYTVINKKSGEIVPMEVNFNFDDPNLIILPLAFGKRVGREFIWNDLLSLETGSLKLANGRVIEKTLYNRRTRQDEPALFVALTFERREVLDSSNIKPMNLIGVDRGENIPAVIALTDPEGCPLSRFKDSLGNPTHILRIGESYKEKQRTIQAKKEVEQRRAGGYSRKYASKAKNLADDMVRNTARDLLYYAVTQDAMLIFENLSRGFGRQGKRTFMAERQYTRMEDWLTAKLAYEGLPSKTYLSKTLAQYTSKTCSNCGFTITSADYDRVLEKLKKTATGWMTTINGKELKVEGQITYYNRYKRQNVVKDLSVELDRLSEESVNNDISSWTKGRSGEALSLLKKRFSHRPVQEKFVCLNCGFETHADEQAALNIARSWLFLRSQEYKKYQTNKTTGNTDKRAFVETWQSFYRKKLKEVWKPAV

SEQ ID NO: 31680 - protein, 979 aa, synthetic construct
  REGION 1..979: note = engineered CasX variant
QEIGKRINKIRRRLVKDSNTKKAGKTGPMKTLLVRVMTPDLRERLENLRKKPENIPQPISNTSRANLNKLLTDYTEMKKAILHVYWEEFQKDPVGLMSRVAQPASKKIDQNKLKPEMDEKGNLTTAGFACSQCGQPLFVYKLEQVSEKGKAYTNYFGRCNVAEHEKLILLAQLKPEKDSDEAVTYSLGKFGQRALDFYSIHVTKESTHPVKPLAQIAGNRYASVPVGKALSDACMGTIASFLSKYQDIIIEHQKVVKGNQKRLESLRELAGKENLEYPSVTLPPQPHTKEGVDAYNEVIARVRMWVNLNLWQKLKLSRDDAKPLLRLKGFPSFPLVERQANEVDWWDMVCNVKKLINEKKEDGKVFWQNLAGYKRQEALRPYLSSEEDRKKGKKFARYQLGDLLLHLEKKHGEDWGKVYDEAWERIDKKVEGLSKHIKLEEERRSEDAQSKAALTDWLRAKASFVIEGLKEADKDEFCRCELKLQKWYGDLRGKPFAIEAENSILDISGFSKQYNCAFIWQKDGVKKLNLYLIINYFKGGKLRFKKIKPEAFEANRFYTVINKKSGEIVPMEVNFNFDDPNLIILPLAFGKRVGREFIWNDLLSLETGSLKLANGRVIEKTLYNRRTRQDEPALFVALTFERREVLDSSNIKPMNLIGVDRGENIPAVIALTDPEGCPLSRFKDSLGNPTHILRIGESYKEKQRTIQAKKEVEQRRAGGYSRKYASKAKNLADDMVRNTARDLLYYAVTQDAMLIFENLSRGFGRQGKRTFMAERQYTRMEDWLTAKLAYEGLPSKTYLSKTLAQYTSKTCSNCGFTITSADYDRVLEKLKKTATGWMTTINGKELKVEGQITYYNRYKRQNVVKDLSVELDRLSEESVNNDISSWTKGRSGEALSLLKKRFSHRPVQEKFVCLNCGFETHADEQAALNIARSWLFLRSQEYKKYQTNKTTGNTDKRAFVETWQSFYRKKLKEVWKPAV

SEQ ID NO: 31681 - protein, 979 aa, synthetic construct
  REGION 1..979: note = engineered CasX variant
QEIGKRINKIRRRLVKDSNTKKAGKTGPMKTLLVRVMTPDLRERLENLRKKPENIPQPISNTSRANLNKLLTDYTEMKKAILHVYWEEFQKDPVGLMSRVAQPASKKIDQNKLKPEMDEKGNLTTAGFACSQCGQPLFVYKLEQVSEKGKAYTNYFGRCNVAEHEKLIKLAQLKPEKDSDEAVTYSLGKFGQRALDFYSIHVTKESTHPVKPLAQIAGNRYASGPVGKALSDACMGTIASFLSKYQDIIIEHQKVVKGNQKRLESLRELAGKENLEYPSVTLPPQPHTKEGVDAYNEVIARVRMWVNLNLWQKLKLSRDDAKPLLRLKGFPSFPLVERQANEVDWWDMVCNVKKLINEKKEDGKVFWQNLAGYKRQEALRPYLSSEEDRKKGKKFARYQLGDLLLHLEKKHGEDWGKVYDEAWERIDKKVEGLSKHIKLEEERRSEDAQSKAALTDWLRAKASFVIEGLKEADKDEFCRCELKLQKWYGDLRGKPFAIEAENSILDISGFSKQYNCAFIWQKDGVKKLNLYLIINYFKGGKLRFKKIKPEAFEANRFYTVINKKSGEIVPMEVNFNFDDPNLIILPLAFGKRVGREFIWNDLLSLETGSLKLANGRVIEKTLYNRRTRQDEPALFVALTFERREVLDSSNIKPMNLIGVDRGENIPAVIALTDPEGCPLSRFKDSLGNPTHILRIGESYKEKQRTIQAKKEVEQRRAGGYSRKYASKAKNLADDMVRNTARDLLYYAVTQDAMLIFENLSRGFGRQGKRTFMAERQYTRMEDWLTAKLAYEGLPSKTYLSKTLAQYTSKTCSNCGFTITSADYDRVLEKLKKTATGWMTTINGKELKVEGQITYYNRYKRQNVVKDLSVELDRLSEESVNNDISSWTKGRSGEALSLLKKRFSHRPVQEKFVCLNCGFETHADEQAALNIARSWLFLRSQEYKKYQTNKTTGNTDKRAFVETWQSFYRKKLKEVWKPAV

SEQ ID NO: 31682 - protein, 978 aa, synthetic construct
  REGION 1..978: note = engineered CasX variant
QEIGKRINKIRRRLVKDSNTKKAGKTGPMKTLLVRVMTPDLRERLENLRKKPENIPQPISNTSRANLNKLLTDYTEMKKAILHVYWEEFQKDPVGLMSRVAQPASKKIDQNKLKPEMDEKGNLTTAGFACSQCGQPLFVYKLEQVSEKGKAYTNYFGRCNVAEHEKLILLAQLKPEKDSDEAVTYSLGKFGQRALDFYSIHVTKESTHPVKPLAQIAGNRYASPVGKALSDACMGTIASFLSKYQDIIIEHQKVVKGNQKRLESLRELAGKENLEYPSVTLPPQPHTKEGVDAYNEVIARVRMWVNLNLWQKLKLSRDDAKPLLRLKGFPSFPLVERQANEVDWWDMVCNVKKLINEKKEDGKVFWQNLAGYKRQEALRPYLSSEEDRKKGKKFARYQLGDLLLHLEKKHGEDWGKVYDEAWERIDKKVEGLSKHIKLEEERRSEDAQSKAALTDWLRAKASFVIEGLKEADKDEFCRCELKLQKWYGDLRGKPFAIEAENSILDISGFSKQYNCAFIWQKDGVKKLNLYLIINYFKGGKLRFKKIKPEAFEANRFYTVINKKSGEIVPMEVNFNFDDPNLIILPLAFGKRVGREFIWNDLLSLETGSLKLANGRVIEKTLYNRRTRQDEPALFVALTFERREVLDSSNIKPMNLIGVDRGENIPAVIALTDPEGCPLSRFKDSLGNPTHILRIGESYKEKQRTIQAKKEVEQRRAGGYSRKYASKAKNLADDMVRNTARDLLYYAVTQDAMLIFENLSRGFGRQGKRTFMAERQYTRMEDWLTAKLAYEGLPSKTYLSKTLAQYTSKTCSNCGFTITSADYDRVLEKLKKTATGWMTTINGKELKVEGQITYYNRYKRQNVVKDLSVELDRLSEESVNNDISSWTKGRSGEALSLLKKRFSHRPVQEKFVCLNCGFETHADEQAALNIARSWLFLRSQEYKKYQTNKTTGNTDKRAFVETWQSFYRKKLKEVWKPAV

SEQ ID NO: 31683 - protein, 980 aa, synthetic construct
  REGION 1..980: note = engineered CasX variant
QEIGKRINKIRRRLVKDSNTKKAGKTGPMKTLLVRVMTPDLRERLENLRKKPENIPQPISNTSRANLNKLLTDYTEMKKAILHVYWEEFQKDPVGLMSRVAQPASKKIDQNKLKPEMDEKGNLTTAGFACSQCGQPLFVYKLEQVSEKGKAYTNYFGRCNVAEHEKLILLAQLKPEKDSDEAVTYSLGKFGQRALDFYSIHVTKESTHPVKPLAQIAGNRYASYPVGKALSDACMGTIASFLSKYQDIIIEHQKVVKGNQKRLESLRELAGKENLEYPSVTLPPQPHTKEGVDAYNEVIARVRMWVNLNLWQKLKLSRDDAKPLLRLKGFPSFPLVERQANEVDWWDMVCNVKKLINEKKEDGKVFWQNLAGYKRQEALRPYLSSEEDRKKGKKFARYQLGDLLLHLEKKHGEDWGKVYDEAWERIDKKVEGLSKHIKLEEERRSEDAQSKAALTDWLRAKASFVIEGLKEADKDEFCRCELKLQKWYGDLRGKPFAIEAENSILDISGFSKQYNCAFIWQKDGVKKLNLYLIINYFKGGKLRFKKIKPEAFEANRFYTVINKKSGEIVPMEVNFNFDDPNLIILPLAFGKRQGREFIWNDLLSLETGSLKLANGRVIEKTLYNRRTRQDEPALFVALTFERREVLDSSNIKTPMNLIGVDRGENIPAVIALTDPEGCPLSRFKDSLGNPTHILRIGESYKEKQRTIQAKKEVEQRRAGGYSRKYASKAKNLADDMVRNTARDLLYYAVTQDAMLIFENLSRGFGRQGKRTFMAERQYTRMEDWLTAKLAYEGLPSKTYLSKTLAQYTSKTCSNCGFTITSADYDRVLEKLKKTATGWMTTINGKELKVEGQITYYNRYKRQNVVKDLSVELDRLSEESVNNDISSWTKGRSGEALSLLKKRFSHRPVQEKFVCLNCGFETHADEQAALNIARSWLFLRSQEYKKYQTNKTTGNTDKRAFVETWQSFYRKKLKEVWKPAV

SEQ ID NO: 31684 - protein, 980 aa, synthetic construct
  REGION 1..980: note = engineered CasX variant
QEIGKRINKIRRRLVKDSNTKKAGKTGPMKTLLVRVMTPDLRERLENLRKKPENIPQPISNTSRANLNKLLTDYTEMKKAILHVYWEEFQKDPVGLMSRVAQPASKKIDQNKLKPEMDEKGNLTTAGFACSQCGQPLFVYKLEQVSEKGKAYTNYFGRCNVAEHEKLILLAQLKPEKDSDEAVTYSLGKFGQRALDFYSIHVTKESTHPVKPLAQIAGNRYASHPVGKALSDACMGTIASFLSKYQDIIIEHQKVVKGNQKRLESLRELAGKENLEYPSVTLPPQPHTKEGVDAYNEVIARVRMWVNLNLWQKLKLSRDDAKPLLRLKGFPSFPLVERQANEVDWWDMVCNVKKLINEKKEDGKVFWQNLAGYKRQEALRPYLSSEEDRKKGKKFARYQLGDLLLHLEKKHGEDWGKVYDEAWERIDKKVEGLSKHIKLEEERRSEDAQSKAALTDWLRAKASFVIEGLKEADKDEFCRCELKLQKWYGDLRGKPFAIEAENSILDISGFSKQYNCAFIWQKDGVKKLNLYLIINYFKGGKLRFKKIKPEAFEANRFYTVINKKSGEIVPMEVNFNFDDPNLIILPLAFGKRQGREFIWNDLLSLETGSLKLANGRVIEKTLYNRRTRQDEPALFVALTFERREVLDSSNIKTPMNLIGVDRGENIPAVIALTDPEGCPLSRFKDSLGNPTHILRIGESYKEKQRTIQAKKEVEQRRAGGYSRKYASKAKNLADDMVRNTARDLLYYAVTQDAMLIFENLSRGFGRQGKRTFMAERQYTRMEDWLTAKLAYEGLPSKTYLSKTLAQYTSKTCSNCGFTITSADYDRVLEKLKKTATGWMTTINGKELKVEGQITYYNRYKRQNVVKDLSVELDRLSEESVNNDISSWTKGRSGEALSLLKKRFSHRPVQEKFVCLNCGFETHADEQAALNIARSWLFLRSQEYKKYQTNKTTGNTDKRAFVETWQSFYRKKLKEVWKPAV

SEQ ID NO: 31685 - protein, 980 aa, synthetic construct
  REGION 1..980: note = engineered CasX variant
QEIGKRINKIRRRLVKDSNTKKAGKTGPMKTLLVRVMTPDLRERLENLRKKPENIPQPISNTSRANLNKLLTDYTEMKKAILHVYWEEFQKDPVGLMSRVAQPASKKIDQNKLKPEMDEKGNLTTAGFACSQCGQPLFVYKLEQVSEKGKAYTNYFGRCNVAEHEKLILLAQLKPEKDSDEAVTYSLGKFGQRALDFYSIHVTKESTHPVKPLAQIAGNRYASSPVGKALSDACMGTIASFLSKYQDIIIEHQKVVKGNQKRLESLRELAGKENLEYPSVTLPPQPHTKEGVDAYNEVIARVRMWVNLNLWQKLKLSRDDAKPLLRLKGFPSFPLVERQANEVDWWDMVCNVKKLINEKKEDGKVFWQNLAGYKRQEALRPYLSSEEDRKKGKKFARYQLGDLLLHLEKKHGEDWGKVYDEAWERIDKKVEGLSKHIKLEEERRSEDAQSKAALTDWLRAKASFVIEGLKEADKDEFCRCELKLQKWYGDLRGKPFAIEAENSILDISGFSKQYNCAFIWQKDGVKKLNLYLIINYFKGGKLRFKKIKPEAFEANRFYTVINKKSGEIVPMEVNFNFDDPNLIILPLAFGKRQGREFIWNDLLSLETGSLKLANGRVIEKTLYNRRTRQDEPALFVALTFERREVLDSSNIKTPMNLIGVDRGENIPAVIALTDPEGCPLSRFKDSLGNPTHILRIGESYKEKQRTIQAKKEVEQRRAGGYSRKYASKAKNLADDMVRNTARDLLYYAVTQDAMLIFENLSRGFGRQGKRTFMAERQYTRMEDWLTAKLAYEGLPSKTYLSKTLAQYTSKTCSNCGFTITSADYDRVLEKLKKTATGWMTTINGKELKVEGQITYYNRYKRQNVVKDLSVELDRLSEESVNNDISSWTKGRSGEALSLLKKRFSHRPVQEKFVCLNCGFETHADEQAALNIARSWLFLRSQEYKKYQTNKTTGNTDKRAFVETWQSFYRKKLKEVWKPAV

SEQ ID NO: 31686 - protein, 980 aa, synthetic construct
  REGION 1..980: note = engineered CasX variant
QEIGKRINKIRRRLVKDSNTKKAGKTGPMKTLLVRVMTPDLRERLENLRKKPENIPQPISNTSRANLNKLLTDYTEMKKAILHVYWEEFQKDPVGLMSRVAQPASKKIDQNKLKPEMDEKGNLTTAGFACSQCGQPLFVYKLEQVSEKGKAYTNYFGRCNVAEHEKLILLAQLKPEKDSDEAVTYSLGKFGQRALDFYSIHVTKESTHPVKPLAQIAGNRYASTPVGKALSDACMGTIASFLSKYQDIIIEHQKVVKGNQKRLESLRELAGKENLEYPSVTLPPQPHTKEGVDAYNEVIARVRMWVNLNLWQKLKLSRDDAKPLLRLKGFPSFPLVERQANEVDWWDMVCNVKKLINEKKEDGKVFWQNLAGYKRQEALRPYLSSEEDRKKGKKFARYQLGDLLLHLEKKHGEDWGKVYDEAWERIDKKVEGLSKHIKLEEERRSEDAQSKAALTDWLRAKASFVIEGLKEADKDEFCRCELKLQKWYGDLRGKPFAIEAENSILDISGFSKQYNCAFIWQKDGVKKLNLYLIINYFKGGKLRFKKIKPEAFEANRFYTVINKKSGEIVPMEVNFNFDDPNLIILPLAFGKRQGREFIWNDLLSLETGSLKLANGRVIEKTLYNRRTRQDEPALFVALTFERREVLDSSNIKTPMNLIGVDRGENIPAVIALTDPEGCPLSRFKDSLGNPTHILRIGESYKEKQRTIQAKKEVEQRRAGGYSRKYASKAKNLADDMVRNTARDLLYYAVTQDAMLIFENLSRGFGRQGKRTFMAERQYTRMEDWLTAKLAYEGLPSKTYLSKTLAQYTSKTCSNCGFTITSADYDRVLEKLKKTATGWMTTINGKELKVEGQITYYNRYKRQNVVKDLSVELDRLSEESVNNDISSWTKGRSGEALSLLKKRFSHRPVQEKFVCLNCGFETHADEQAALNIARSWLFLRSQEYKKYQTNKTTGNTDKRAFVETWQSFYRKKLKEVWKPAV

SEQ ID NO: 31687 - protein, 980 aa, synthetic construct
  REGION 1..980: note = engineered CasX variant
QEIGKRINKIRRRLVKDSNTKKAGKTGPMKTLLVRVMTPDLRERLENLRKKPENIPQPISNTSRANLNKLLTDYTEMKKAILHVYWEEFQKDPVGLMSRVAQPASKKIDQNKLKPEMDEKGNLTTAGFACSQCGQPLFVYKLEQVSEKGKAYTNYFGRCNVAEHEKLILLAQLKPEKDSDEAVTYSLGKFGQRALDFYSIHVTKESTHPVKPLAQIAGNRYASAPVGKALSDACMGTIASFLSKYQDIIIEHQKVVKGNQKRLESLRELAGKENLEYPSVTLPPQPHTKEGVDAYNEVIARVRMWVNLNLWQKLKLSRDDAKPLLRLKGFPSFPLVERQANEVDWWDMVCNVKKLINEKKEDGKVFWQNLAGYKRQEALRPYLSSEEDRKKGKKFARYQLGDLLLHLEKKHGEDWGKVYDEAWERIDKKVEGLSKHIKLEEERRSEDAQSKAALTDWLRAKASFVIEGLKEADKDEFCRCELKLQKWYGDLRGKPFAIEAENSILDISGFSKQYNCAFIWQKDGVKKLNLYLIINYFKGGKLRFKKIKPEAFEANRFYTVINKKSGEIVPMEVNFNFDDPNLIILPLAFGKRQGREFIWNDLLSLETGSLKLANGRVIEKTLYNRRTRQDEPALFVALTFERREVLDSSNIKTPMNLIGVDRGENIPAVIALTDPEGCPLSRFKDSLGNPTHILRIGESYKEKQRTIQAKKEVEQRRAGGYSRKYASKAKNLADDMVRNTARDLLYYAVTQDAMLIFENLSRGFGRQGKRTFMAERQYTRMEDWLTAKLAYEGLPSKTYLSKTLAQYTSKTCSNCGFTITSADYDRVLEKLKKTATGWMTTINGKELKVEGQITYYNRYKRQNVVKDLSVELDRLSEESVNNDISSWTKGRSGEALSLLKKRFSHRPVQEKFVCLNCGFETHADEQAALNIARSWLFLRSQEYKKYQTNKTTGNTDKRAFVETWQSFYRKKLKEVWKPAV

SEQ ID NO: 31688 - protein, 980 aa, synthetic construct
  REGION 1..980: note = engineered CasX variant
QEIGKRINKIRRRLVKDSNTKKAGKTGPMKTLLVRVMTPDLRERLENLRKKPENIPQPISNTSRANLNKLLTDYTEMKKAILHVYWEEFQKDPVGLMSRVAQPASKKIDQNKLKPEMDEKGNLTTAGFACSQCGQPLFVYKLEQVSEKGKAYTNYFGRCNVAEHEKLILLAQLKPEKDSDEAVTYSLGKFGQRALDFYSIHVTKESTHPVKPLAQIAGNRYASVPVGKALSDACMGTIASFLSKYQDIIIEHQKVVKGNQKRLESLRELAGKENLEYPSVTLPPQPHTKEGVDAYNEVIARVRMWVNLNLWQKLKLSRDDAKPLLRLKGFPSFPLVERQANEVDWWDMVCNVKKLINEKKEDGKVFWQNLAGYKRQEALRPYLSSEEDRKKGKKFARYQLGDLLLHLEKKHGEDWGKVYDEAWERIDKKVEGLSKHIKLEEERRSEDAQSKAALTDWLRAKASFVIEGLKEADKDEFCRCELKLQKWYGDLRGKPFAIEAENSILDISGFSKQYNCAFIWQKDGVKKLNLYLIINYFKGGKLRFKKIKPEAFEANRFYTVINKKSGEIVPMEVNFNFDDPNLIILPLAFGKRQGREFIWNDLLSLETGSLKLANGRVIEKTLYNRRTRQDEPALFVALTFERREVLDSSNIKTPMNLIGVDRGENIPAVIALTDPEGCPLSRFKDSLGNPTHILRIGESYKEKQRTIQAKKEVEQRRAGGYSRKYASKAKNLADDMVRNTARDLLYYAVTQDAMLIFENLSRGFGRQGKRTFMAERQYTRMEDWLTAKLAYEGLPSKTYLSKTLAQYTSKTCSNCGFTITSADYDRVLEKLKKTATGWMTTINGKELKVEGQITYYNRYKRQNVVKDLSVELDRLSEESVNNDISSWTKGRSGEALSLLKKRFSHRPVQEKFVCLNCGFETHADEQAALNIARSWLFLRSQEYKKYQTNKTTGNTDKRAFVETWQSFYRKKLKEVWKPAV

SEQ ID NO: 31689 - protein, 980 aa, synthetic construct
  REGION 1..980: note = engineered CasX variant
QEIGKRINKIRRRLVKDSNTKKAGKTGPMKTLLVRVMTPDLRERLENLRKKPENIPQPISNTSRANLNKLLTDYTEMKKAILHVYWEEFQKDPVGLMSRVAQPASKKIDQNKLKPEMDEKGNLTTAGFACSQCGQPLFVYKLEQVSEKGKAYTNYFGRCNVAEHEKLIKLAQLKPEKDSDEAVTYSLGKFGQRALDFYSIHVTKESTHPVKPLAQIAGNRYASGPVGKALSDACMGTIASFLSKYQDIIIEHQKVVKGNQKRLESLRELAGKENLEYPSVTLPPQPHTKEGVDAYNEVIARVRMWVNLNLWQKLKLSRDDAKPLLRLKGFPSFPLVERQANEVDWWDMVCNVKKLINEKKEDGKVFWQNLAGYKRQEALRPYLSSEEDRKKGKKFARYQLGDLLLHLEKKHGEDWGKVYDEAWERIDKKVEGLSKHIKLEEERRSEDAQSKAALTDWLRAKASFVIEGLKEADKDEFCRCELKLQKWYGDLRGKPFAIEAENSILDISGFSKQYNCAFIWQKDGVKKLNLYLIINYFKGGKLRFKKIKPEAFEANRFYTVINKKSGEIVPMEVNFNFDDPNLIILPLAFGKRQGREFIWNDLLSLETGSLKLANGRVIEKTLYNRRTRQDEPALFVALTFERREVLDSSNIKTPMNLIGVDRGENIPAVIALTDPEGCPLSRFKDSLGNPTHILRIGESYKEKQRTIQAKKEVEQRRAGGYSRKYASKAKNLADDMVRNTARDLLYYAVTQDAMLIFENLSRGFGRQGKRTFMAERQYTRMEDWLTAKLAYEGLPSKTYLSKTLAQYTSKTCSNCGFTITSADYDRVLEKLKKTATGWMTTINGKELKVEGQITYYNRYKRQNVVKDLSVELDRLSEESVNNDISSWTKGRSGEALSLLKKRFSHRPVQEKFVCLNCGFETHADEQAALNIARSWLFLRSQEYKKYQTNKTTGNTDKRAFVETWQSFYRKKLKEVWKPAV

SEQ ID NO: 31690 - protein, 979 aa, synthetic construct
  REGION 1..979: note = engineered CasX variant
QEIGKRINKIRRRLVKDSNTKKAGKTGPMKTLLVRVMTPDLRERLENLRKKPENIPQPISNTSRANLNKLLTDYTEMKKAILHVYWEEFQKDPVGLMSRVAQPASKKIDQNKLKPEMDEKGNLTTAGFACSQCGQPLFVYKLEQVSEKGKAYTNYFGRCNVAEHEKLILLAQLKPEKDSDEAVTYSLGKFGQRALDFYSIHVTKESTHPVKPLAQIAGNRYASPVGKALSDACMGTIASFLSKYQDIIIEHQKVVKGNQKRLESLRELAGKENLEYPSVTLPPQPHTKEGVDAYNEVIARVRMWVNLNLWQKLKLSRDDAKPLLRLKGFPSFPLVERQANEVDWWDMVCNVKKLINEKKEDGKVFWQNLAGYKRQEALRPYLSSEEDRKKGKKFARYQLGDLLLHLEKKHGEDWGKVYDEAWERIDKKVEGLSKHIKLEEERRSEDAQSKAALTDWLRAKASFVIEGLKEADKDEFCRCELKLQKWYGDLRGKPFAIEAENSILDISGFSKQYNCAFIWQKDGVKKLNLYLIINYFKGGKLRFKKIKPEAFEANRFYTVINKKSGEIVPMEVNFNFDDPNLIILPLAFGKRQGREFIWNDLLSLETGSLKLANGRVIEKTLYNRRTRQDEPALFVALTFERREVLDSSNIKTPMNLIGVDRGENIPAVIALTDPEGCPLSRFKDSLGNPTHILRIGESYKEKQRTIQAKKEVEQRRAGGYSRKYASKAKNLADDMVRNTARDLLYYAVTQDAMLIFENLSRGFGRQGKRTFMAERQYTRMEDWLTAKLAYEGLPSKTYLSKTLAQYTSKTCSNCGFTITSADYDRVLEKLKKTATGWMTTINGKELKVEGQITYYNRYKRQNVVKDLSVELDRLSEESVNNDISSWTKGRSGEALSLLKKRFSHRPVQEKFVCLNCGFETHADEQAALNIARSWLFLRSQEYKKYQTNKTTGNTDKRAFVETWQSFYRKKLKEVWKPAV

SEQ ID NO: 31691 - protein, 980 aa, synthetic construct
  REGION 1..980: note = engineered CasX variant
QEIGKRINKIRRRLVKDSNTKKAGKTGPMKTLLVRVMTPDLRERLENLRKKPENIPQPISNTSRANLNKLLTDYTEMKKAILHVYWEEFQKDPVGLMSRVAQPASKKIDQNKLKPEMDEKGNLTTAGFACSQCGQPLFVYKLEQVSEKGKAYTNYFGRCNVAEHEKLILLAQLKPEKDSDEAVTYSLGKFGQRALDFYSIHVTKESTHPVKPLAQIAGNRYASYPVGKALSDACMGTIASFLSKYQDIIIEHQKVVKGNQKRLESLRELAGKENLEYPSVTLPPQPHTKEGVDAYNEVIARVRMWVNLNLWQKLKLSRDDAKPLLRLKGFPSFPLVERQANEVDWWDMVCNVKKLINEKKEDGKVFWQNLAGYKRQEALRPYLSSEEDRKKGKKFARYQLGDLLLHLEKKHGEDWGKVYDEAWERIDKKVEGLSKHIKLEEERRSEDAQSKAALTDWLRAKASFVIEGLKEADKDEFCRCELKLQKWYGDLRGKPFAIEAENSILDISGFSKQYNCAFIWQKDGVKKLNLYLIINYFKGGKLRFKKIKPEAFEANRFYTVINKKSGEIVPMEVNFNFDDPNLIILPLAFGKRQGREFIWNDLLSLETGSLKLANGRVIEKTLYNRRTRQDEPALFVALTFERREVLDSSNIKPMSNLIGVDRGENIPAVIALTDPEGCPLSRFKDSLGNPTHILRIGESYKEKQRTIQAKKEVEQRRAGGYSRKYASKAKNLADDMVRNTARDLLYYAVTQDAMLIFENLSRGFGRQGKRTFMAERQYTRMEDWLTAKLAYEGLPSKTYLSKTLAQYTSKTCSNCGFTITSADYDRVLEKLKKTATGWMTTINGKELKVEGQITYYNRYKRQNVVKDLSVELDRLSEESVNNDISSWTKGRSGEALSLLKKRFSHRPVQEKFVCLNCGFETHADEQAALNIARSWLFLRSQEYKKYQTNKTTGNTDKRAFVETWQSFYRKKLKEVWKPAV

SEQ ID NO: 31692 - protein, 980 aa, synthetic construct
  REGION 1..980: note = engineered CasX variant
QEIGKRINKIRRRLVKDSNTKKAGKTGPMKTLLVRVMTPDLRERLENLRKKPENIPQPISNTSRANLNKLLTDYTEMKKAILHVYWEEFQKDPVGLMSRVAQPASKKIDQNKLKPEMDEKGNLTTAGFACSQCGQPLFVYKLEQVSEKGKAYTNYFGRCNVAEHEKLILLAQLKPEKDSDEAVTYSLGKFGQRALDFYSIHVTKESTHPVKPLAQIAGNRYASHPVGKALSDACMGTIASFLSKYQDIIIEHQKVVKGNQKRLESLRELAGKENLEYPSVTLPPQPHTKEGVDAYNEVIARVRMWVNLNLWQKLKLSRDDAKPLLRLKGFPSFPLVERQANEVDWWDMVCNVKKLINEKKEDGKVFWQNLAGYKRQEALRPYLSSEEDRKKGKKFARYQLGDLLLHLEKKHGEDWGKVYDEAWERIDKKVEGLSKHIKLEEERRSEDAQSKAALTDWLRAKASFVIEGLKEADKDEFCRCELKLQKWYGDLRGKPFAIEAENSILDISGFSKQYNCAFIWQKDGVKKLNLYLIINYFKGGKLRFKKIKPEAFEANRFYTVINKKSGEIVPMEVNFNFDDPNLIILPLAFGKRQGREFIWNDLLSLETGSLKLANGRVIEKTLYNRRTRQDEPALFVALTFERREVLDSSNIKPMSNLIGVDRGENIPAVIALTDPEGCPLSRFKDSLGNPTHILRIGESYKEKQRTIQAKKEVEQRRAGGYSRKYASKAKNLADDMVRNTARDLLYYAVTQDAMLIFENLSRGFGRQGKRTFMAERQYTRMEDWLTAKLAYEGLPSKTYLSKTLAQYTSKTCSNCGFTITSADYDRVLEKLKKTATGWMTTINGKELKVEGQITYYNRYKRQNVVKDLSVELDRLSEESVNNDISSWTKGRSGEALSLLKKRFSHRPVQEKFVCLNCGFETHADEQAALNIARSWLFLRSQEYKKYQTNKTTGNTDKRAFVETWQSFYRKKLKEVWKPAV

SEQ ID NO: 31693 - protein, 980 aa, synthetic construct
  REGION 1..980: note = engineered CasX variant
QEIGKRINKIRRRLVKDSNTKKAGKTGPMKTLLVRVMTPDLRERLENLRKKPENIPQPISNTSRANLNKLLTDYTEMKKAILHVYWEEFQKDPVGLMSRVAQPASKKIDQNKLKPEMDEKGNLTTAGFACSQCGQPLFVYKLEQVSEKGKAYTNYFGRCNVAEHEKLILLAQLKPEKDSDEAVTYSLGKFGQRALDFYSIHVTKESTHPVKPLAQIAGNRYASSPVGKALSDACMGTIASFLSKYQDIIIEHQKVVKGNQKRLESLRELAGKENLEYPSVTLPPQPHTKEGVDAYNEVIARVRMWVNLNLWQKLKLSRDDAKPLLRLKGFPSFPLVERQANEVDWWDMVCNVKKLINEKKEDGKVFWQNLAGYKRQEALRPYLSSEEDRKKGKKFARYQLGDLLLHLEKKHGEDWGKVYDEAWERIDKKVEGLSKHIKLEEERRSEDAQSKAALTDWLRAKASFVIEGLKEADKDEFCRCELKLQKWYGDLRGKPFAIEAENSILDISGFSKQYNCAFIWQKDGVKKLNLYLIINYFKGGKLRFKKIKPEAFEANRFYTVINKKSGEIVPMEVNFNFDDPNLIILPLAFGKRQGREFIWNDLLSLETGSLKLANGRVIEKTLYNRRTRQDEPALFVALTFERREVLDSSNIKPMSNLIGVDRGENIPAVIALTDPEGCPLSRFKDSLGNPTHILRIGESYKEKQRTIQAKKEVEQRRAGGYSRKYASKAKNLADDMVRNTARDLLYYAVTQDAMLIFENLSRGFGRQGKRTFMAERQYTRMEDWLTAKLAYEGLPSKTYLSKTLAQYTSKTCSNCGFTITSADYDRVLEKLKKTATGWMTTINGKELKVEGQITYYNRYKRQNVVKDLSVELDRLSEESVNNDISSWTKGRSGEALSLLKKRFSHRPVQEKFVCLNCGFETHADEQAALNIARSWLFLRSQEYKKYQTNKTTGNTDKRAFVETWQSFYRKKLKEVWKPAV

SEQ ID NO: 31694 - protein, 980 aa, synthetic construct
  REGION 1..980: note = engineered CasX variant
QEIGKRINKIRRRLVKDSNTKKAGKTGPMKTLLVRVMTPDLRERLENLRKKPENIPQPISNTSRANLNKLLTDYTEMKKAILHVYWEEFQKDPVGLMSRVAQPASKKIDQNKLKPEMDEKGNLTTAGFACSQCGQPLFVYKLEQVSEKGKAYTNYFGRCNVAEHEKLILLAQLKPEKDSDEAVTYSLGKFGQRALDFYSIHVTKESTHPVKPLAQIAGNRYASTPVGKALSDACMGTIASFLSKYQDIIIEHQKVVKGNQKRLESLRELAGKENLEYPSVTLPPQPHTKEGVDAYNEVIARVRMWVNLNLWQKLKLSRDDAKPLLRLKGFPSFPLVERQANEVDWWDMVCNVKKLINEKKEDGKVFWQNLAGYKRQEALRPYLSSEEDRKKGKKFARYQLGDLLLHLEKKHGEDWGKVYDEAWERIDKKVEGLSKHIKLEEERRSEDAQSKAALTDWLRAKASFVIEGLKEADKDEFCRCELKLQKWYGDLRGKPFAIEAENSILDISGFSKQYNCAFIWQKDGVKKLNLYLIINYFKGGKLRFKKIKPEAFEANRFYTVINKKSGEIVPMEVNFNFDDPNLIILPLAFGKRQGREFIWNDLLSLETGSLKLANGRVIEKTLYNRRTRQDEPALFVALTFERREVLDSSNIKPMSNLIGVDRGENIPAVIALTDPEGCPLSRFKDSLGNPTHILRIGESYKEKQRTIQAKKEVEQRRAGGYSRKYASKAKNLADDMVRNTARDLLYYAVTQDAMLIFENLSRGFGRQGKRTFMAERQYTRMEDWLTAKLAYEGLPSKTYLSKTLAQYTSKTCSNCGFTITSADYDRVLEKLKKTATGWMTTINGKELKVEGQITYYNRYKRQNVVKDLSVELDRLSEESVNNDISSWTKGRSGEALSLLKKRFSHRPVQEKFVCLNCGFETHADEQAALNIARSWLFLRSQEYKKYQTNKTTGNTDKRAFVETWQSFYRKKLKEVWKPAV

SEQ ID NO: 31695 - protein, 980 aa, synthetic construct
  REGION 1..980: note = engineered CasX variant
QEIGKRINKIRRRLVKDSNTKKAGKTGPMKTLLVRVMTPDLRERLENLRKKPENIPQPISNTSRANLNKLLTDYTEMKKAILHVYWEEFQKDPVGLMSRVAQPASKKIDQNKLKPEMDEKGNLTTAGFACSQCGQPLFVYKLEQVSEKGKAYTNYFGRCNVAEHEKLILLAQLKPEKDSDEAVTYSLGKFGQRALDFYSIHVTKESTHPVKPLAQIAGNRYASAPVGKALSDACMGTIASFLSKYQDIIIEHQKVVKGNQKRLESLRELAGKENLEYPSVTLPPQPHTKEGVDAYNEVIARVRMWVNLNLWQKLKLSRDDAKPLLRLKGFPSFPLVERQANEVDWWDMVCNVKKLINEKKEDGKVFWQNLAGYKRQEALRPYLSSEEDRKKGKKFARYQLGDLLLHLEKKHGEDWGKVYDEAWERIDKKVEGLSKHIKLEEERRSEDAQSKAALTDWLRAKASFVIEGLKEADKDEFCRCELKLQKWYGDLRGKPFAIEAENSILDISGFSKQYNCAFIWQKDGVKKLNLYLIINYFKGGKLRFKKIKPEAFEANRFYTVINKKSGEIVPMEVNFNFDDPNLIILPLAFGKRQGREFIWNDLLSLETGSLKLANGRVIEKTLYNRRTRQDEPALFVALTFERREVLDSSNIKPMSNLIGVDRGENIPAVIALTDPEGCPLSRFKDSLGNPTHILRIGESYKEKQRTIQAKKEVEQRRAGGYSRKYASKAKNLADDMVRNTARDLLYYAVTQDAMLIFENLSRGFGRQGKRTFMAERQYTRMEDWLTAKLAYEGLPSKTYLSKTLAQYTSKTCSNCGFTITSADYDRVLEKLKKTATGWMTTINGKELKVEGQITYYNRYKRQNVVKDLSVELDRLSEESVNNDISSWTKGRSGEALSLLKKRFSHRPVQEKFVCLNCGFETHADEQAALNIARSWLFLRSQEYKKYQTNKTTGNTDKRAFVETWQSFYRKKLKEVWKPAV

SEQ ID NO: 31696 - protein, 980 aa, synthetic construct
  REGION 1..980: note = engineered CasX variant
QEIGKRINKIRRRLVKDSNTKKAGKTGPMKTLLVRVMTPDLRERLENLRKKPENIPQPISNTSRANLNKLLTDYTEMKKAILHVYWEEFQKDPVGLMSRVAQPASKKIDQNKLKPEMDEKGNLTTAGFACSQCGQPLFVYKLEQVSEKGKAYTNYFGRCNVAEHEKLILLAQLKPEKDSDEAVTYSLGKFGQRALDFYSIHVTKESTHPVKPLAQIAGNRYASVPVGKALSDACMGTIASFLSKYQDIIIEHQKVVKGNQKRLESLRELAGKENLEYPSVTLPPQPHTKEGVDAYNEVIARVRMWVNLNLWQKLKLSRDDAKPLLRLKGFPSFPLVERQANEVDWWDMVCNVKKLINEKKEDGKVFWQNLAGYKRQEALRPYLSSEEDRKKGKKFARYQLGDLLLHLEKKHGEDWGKVYDEAWERIDKKVEGLSKHIKLEEERRSEDAQSKAALTDWLRAKASFVIEGLKEADKDEFCRCELKLQKWYGDLRGKPFAIEAENSILDISGFSKQYNCAFIWQKDGVKKLNLYLIINYFKGGKLRFKKIKPEAFEANRFYTVINKKSGEIVPMEVNFNFDDPNLIILPLAFGKRQGREFIWNDLLSLETGSLKLANGRVIEKTLYNRRTRQDEPALFVALTFERREVLDSSNIKPMSNLIGVDRGENIPAVIALTDPEGCPLSRFKDSLGNPTHILRIGESYKEKQRTIQAKKEVEQRRAGGYSRKYASKAKNLADDMVRNTARDLLYYAVTQDAMLIFENLSRGFGRQGKRTFMAERQYTRMEDWLTAKLAYEGLPSKTYLSKTLAQYTSKTCSNCGFTITSADYDRVLEKLKKTATGWMTTINGKELKVEGQITYYNRYKRQNVVKDLSVELDRLSEESVNNDISSWTKGRSGEALSLLKKRFSHRPVQEKFVCLNCGFETHADEQAALNIARSWLFLRSQEYKKYQTNKTTGNTDKRAFVETWQSFYRKKLKEVWKPAV

SEQ ID NO: 31697 - protein, 980 aa, synthetic construct
  REGION 1..980: note = engineered CasX variant
QEIGKRINKIRRRLVKDSNTKKAGKTGPMKTLLVRVMTPDLRERLENLRKKPENIPQPISNTSRANLNKLLTDYTEMKKAILHVYWEEFQKDPVGLMSRVAQPASKKIDQNKLKPEMDEKGNLTTAGFACSQCGQPLFVYKLEQVSEKGKAYTNYFGRCNVAEHEKLIKLAQLKPEKDSDEAVTYSLGKFGQRALDFYSIHVTKESTHPVKPLAQIAGNRYASGPVGKALSDACMGTIASFLSKYQDIIIEHQKVVKGNQKRLESLRELAGKENLEYPSVTLPPQPHTKEGVDAYNEVIARVRMWVNLNLWQKLKLSRDDAKPLLRLKGFPSFPLVERQANEVDWWDMVCNVKKLINEKKEDGKVFWQNLAGYKRQEALRPYLSSEEDRKKGKKFARYQLGDLLLHLEKKHGEDWGKVYDEAWERIDKKVEGLSKHIKLEEERRSEDAQSKAALTDWLRAKASFVIEGLKEADKDEFCRCELKLQKWYGDLRGKPFAIEAENSILDISGFSKQYNCAFIWQKDGVKKLNLYLIINYFKGGKLRFKKIKPEAFEANRFYTVINKKSGEIVPMEVNFNFDDPNLIILPLAFGKRQGREFIWNDLLSLETGSLKLANGRVIEKTLYNRRTRQDEPALFVALTFERREVLDSSNIKPMSNLIGVDRGENIPAVIALTDPEGCPLSRFKDSLGNPTHILRIGESYKEKQRTIQAKKEVEQRRAGGYSRKYASKAKNLADDMVRNTARDLLYYAVTQDAMLIFENLSRGFGRQGKRTFMAERQYTRMEDWLTAKLAYEGLPSKTYLSKTLAQYTSKTCSNCGFTITSADYDRVLEKLKKTATGWMTTINGKELKVEGQITYYNRYKRQNVVKDLSVELDRLSEESVNNDISSWTKGRSGEALSLLKKRFSHRPVQEKFVCLNCGFETHADEQAALNIARSWLFLRSQEYKKYQTNKTTGNTDKRAFVETWQSFYRKKLKEVWKPAV

SEQ ID NO: 31698 - protein, 979 aa, synthetic construct
  REGION 1..979: note = engineered CasX variant
QEIGKRINKIRRRLVKDSNTKKAGKTGPMKTLLVRVMTPDLRERLENLRKKPENIPQPISNTSRANLNKLLTDYTEMKKAILHVYWEEFQKDPVGLMSRVAQPASKKIDQNKLKPEMDEKGNLTTAGFACSQCGQPLFVYKLEQVSEKGKAYTNYFGRCNVAEHEKLILLAQLKPEKDSDEAVTYSLGKFGQRALDFYSIHVTKESTHPVKPLAQIAGNRYASPVGKALSDACMGTIASFLSKYQDIIIEHQKVVKGNQKRLESLRELAGKENLEYPSVTLPPQPHTKEGVDAYNEVIARVRMWVNLNLWQKLKLSRDDAKPLLRLKGFPSFPLVERQANEVDWWDMVCNVKKLINEKKEDGKVFWQNLAGYKRQEALRPYLSSEEDRKKGKKFARYQLGDLLLHLEKKHGEDWGKVYDEAWERIDKKVEGLSKHIKLEEERRSEDAQSKAALTDWLRAKASFVIEGLKEADKDEFCRCELKLQKWYGDLRGKPFAIEAENSILDISGFSKQYNCAFIWQKDGVKKLNLYLIINYFKGGKLRFKKIKPEAFEANRFYTVINKKSGEIVPMEVNFNFDDPNLIILPLAFGKRQGREFIWNDLLSLETGSLKLANGRVIEKTLYNRRTRQDEPALFVALTFERREVLDSSNIKPMSNLIGVDRGENIPAVIALTDPEGCPLSRFKDSLGNPTHILRIGESYKEKQRTIQAKKEVEQRRAGGYSRKYASKAKNLADDMVRNTARDLLYYAVTQDAMLIFENLSRGFGRQGKRTFMAERQYTRMEDWLTAKLAYEGLPSKTYLSKTLAQYTSKTCSNCGFTITSADYDRVLEKLKKTATGWMTTINGKELKVEGQITYYNRYKRQNVVKDLSVELDRLSEESVNNDISSWTKGRSGEALSLLKKRFSHRPVQEKFVCLNCGFETHADEQAALNIARSWLFLRSQEYKKYQTNKTTGNTDKRAFVETWQSFYRKKLKEVWKPAV

SEQ ID NO: 31699 - protein, 979 aa, synthetic construct
  REGION 1..979: note = engineered CasX variant
QEIGKRINKIRRRLVKDSNTKKAGKTGPMKTLLVRVMTPDLRERLENLRKKPENIPQPISNTSRANLNKLLTDYTEMKKAILHVYWEEFQKDPVGLMSRVAQPASKKIDQNKLKPEMDEKGNLTTAGFACSQCGQPLFVYKLEQVSEKGKAYTNYFGRCNVAEHEKLILLAQLKPEKDSDEAVTYSLGKFGQRALDFYSIHVTKESTHPVKPLAQIAGNRYASYPVGKALSDACMGTIASFLSKYQDIIIEHQKVVKGNQKRLESLRELAGKENLEYPSVTLPPQPHTKEGVDAYNEVIARVRMWVNLNLWQKLKLSRDDAKPLLRLKGFPSFPLVERQANEVDWWDMVCNVKKLINEKKEDGKVFWQNLAGYKRQEALRPYLSSEEDRKKGKKFARYQLGDLLLHLEKKHGEDWGKVYDEAWERIDKKVEGLSKHIKLEEERRSEDAQSKAALTDWLRAKASFVIEGLKEADKDEFCRCELKLQKWYGDLRGKPFAIEAENSILDISGFSKQYNCAFIWQKDGVKKLNLYLIINYFKGGKLRFKKIKPEAFEANRFYTVINKKSGEIVPMEVNFNFDDPNLIILPLAFGKRQGREFIWNDLLSLETGSLKLANGRVIEKTLYNRRTRQDEPALFVALTFERREVLDSSNIKPMNLIGVDRGENIPAVIALTDPEGCPLSRFKDSLGNPTHILRIRESYKEKQRTIQAKKEVEQRRAGGYSRKYASKAKNLADDMVRNTARDLLYYAVTQDAMLIFENLSRGFGRQGKRTFMAERQYTRMEDWLTAKLAYEGLPSKTYLSKTLAQYTSKTCSNCGFTITSADYDRVLEKLKKTATGWMTTINGKELKVEGQITYYNRYKRQNVVKDLSVELDRLSEESVNNDISSWTKGRSGEALSLLKKRFSHRPVQEKFVCLNCGFETHADEQAALNIARSWLFLRSQEYKKYQTNKTTGNTDKRAFVETWQSFYRKKLKEVWKPAV

SEQ ID NO: 31700 - protein, 979 aa, synthetic construct
  REGION 1..979: note = engineered CasX variant
QEIGKRINKIRRRLVKDSNTKKAGKTGPMKTLLVRVMTPDLRERLENLRKKPENIPQPISNTSRANLNKLLTDYTEMKKAILHVYWEEFQKDPVGLMSRVAQPASKKIDQNKLKPEMDEKGNLTTAGFACSQCGQPLFVYKLEQVSEKGKAYTNYFGRCNVAEHEKLILLAQLKPEKDSDEAVTYSLGKFGQRALDFYSIHVTKESTHPVKPLAQIAGNRYASHPVGKALSDACMGTIASFLSKYQDIIIEHQKVVKGNQKRLESLRELAGKENLEYPSVTLPPQPHTKEGVDAYNEVIARVRMWVNLNLWQKLKLSRDDAKPLLRLKGFPSFPLVERQANEVDWWDMVCNVKKLINEKKEDGKVFWQNLAGYKRQEALRPYLSSEEDRKKGKKFARYQLGDLLLHLEKKHGEDWGKVYDEAWERIDKKVEGLSKHIKLEEERRSEDAQSKAALTDWLRAKASFVIEGLKEADKDEFCRCELKLQKWYGDLRGKPFAIEAENSILDISGFSKQYNCAFIWQKDGVKKLNLYLIINYFKGGKLRFKKIKPEAFEANRFYTVINKKSGEIVPMEVNFNFDDPNLIILPLAFGKRQGREFIWNDLLSLETGSLKLANGRVIEKTLYNRRTRQDEPALFVALTFERREVLDSSNIKPMNLIGVDRGENIPAVIALTDPEGCPLSRFKDSLGNPTHILRIRESYKEKQRTIQAKKEVEQRRAGGYSRKYASKAKNLADDMVRNTARDLLYYAVTQDAMLIFENLSRGFGRQGKRTFMAERQYTRMEDWLTAKLAYEGLPSKTYLSKTLAQYTSKTCSNCGFTITSADYDRVLEKLKKTATGWMTTINGKELKVEGQITYYNRYKRQNVVKDLSVELDRLSEESVNNDISSWTKGRSGEALSLLKKRFSHRPVQEKFVCLNCGFETHADEQAALNIARSWLFLRSQEYKKYQTNKTTGNTDKRAFVETWQSFYRKKLKEVWKPAV

SEQ ID NO: 31701 - protein, 979 aa, synthetic construct
  REGION 1..979: note = engineered CasX variant
QEIGKRINKIRRRLVKDSNTKKAGKTGPMKTLLVRVMTPDLRERLENLRKKPENIPQPISNTSRANLNKLLTDYTEMKKAILHVYWEEFQKDPVGLMSRVAQPASKKIDQNKLKPEMDEKGNLTTAGFACSQCGQPLFVYKLEQVSEKGKAYTNYFGRCNVAEHEKLILLAQLKPEKDSDEAVTYSLGKFGQRALDFYSIHVTKESTHPVKPLAQIAGNRYASSPVGKALSDACMGTIASFLSKYQDIIIEHQKVVKGNQKRLESLRELAGKENLEYPSVTLPPQPHTKEGVDAYNEVIARVRMWVNLNLWQKLKLSRDDAKPLLRLKGFPSFPLVERQANEVDWWDMVCNVKKLINEKKEDGKVFWQNLAGYKRQEALRPYLSSEEDRKKGKKFARYQLGDLLLHLEKKHGEDWGKVYDEAWERIDKKVEGLSKHIKLEEERRSEDAQSKAALTDWLRAKASFVIEGLKEADKDEFCRCELKLQKWYGDLRGKPFAIEAENSILDISGFSKQYNCAFIWQKDGVKKLNLYLIINYFKGGKLRFKKIKPEAFEANRFYTVINKKSGEIVPMEVNFNFDDPNLIILPLAFGKRQGREFIWNDLLSLETGSLKLANGRVIEKTLYNRRTRQDEPALFVALTFERREVLDSSNIKPMNLIGVDRGENIPAVIALTDPEGCPLSRFKDSLGNPTHILRIRESYKEKQRTIQAKKEVEQRRAGGYSRKYASKAKNLADDMVRNTARDLLYYAVTQDAMLIFENLSRGFGRQGKRTFMAERQYTRMEDWLTAKLAYEGLPSKTYLSKTLAQYTSKTCSNCGFTITSADYDRVLEKLKKTATGWMTTINGKELKVEGQITYYNRYKRQNVVKDLSVELDRLSEESVNNDISSWTKGRSGEALSLLKKRFSHRPVQEKFVCLNCGFETHADEQAALNIARSWLFLRSQEYKKYQTNKTTGNTDKRAFVETWQSFYRKKLKEVWKPAV

SEQ ID NO: 31702 - protein, 979 aa, synthetic construct
  REGION 1..979: note = engineered CasX variant
QEIGKRINKIRRRLVKDSNTKKAGKTGPMKTLLVRVMTPDLRERLENLRKKPENIPQPISNTSRANLNKLLTDYTEMKKAILHVYWEEFQKDPVGLMSRVAQPASKKIDQNKLKPEMDEKGNLTTAGFACSQCGQPLFVYKLEQVSEKGKAYTNYFGRCNVAEHEKLILLAQLKPEKDSDEAVTYSLGKFGQRALDFYSIHVTKESTHPVKPLAQIAGNRYASTPVGKALSDACMGTIASFLSKYQDIIIEHQKVVKGNQKRLESLRELAGKENLEYPSVTLPPQPHTKEGVDAYNEVIARVRMWVNLNLWQKLKLSRDDAKPLLRLKGFPSFPLVERQANEVDWWDMVCNVKKLINEKKEDGKVFWQNLAGYKRQEALRPYLSSEEDRKKGKKFARYQLGDLLLHLEKKHGEDWGKVYDEAWERIDKKVEGLSKHIKLEEERRSEDAQSKAALTDWLRAKASFVIEGLKEADKDEFCRCELKLQKWYGDLRGKPFAIEAENSILDISGFSKQYNCAFIWQKDGVKKLNLYLIINYFKGGKLRFKKIKPEAFEANRFYTVINKKSGEIVPMEVNFNFDDPNLIILPLAFGKRQGREFIWNDLLSLETGSLKLANGRVIEKTLYNRRTRQDEPALFVALTFERREVLDSSNIKPMNLIGVDRGENIPAVIALTDPEGCPLSRFKDSLGNPTHILRIRESYKEKQRTIQAKKEVEQRRAGGYSRKYASKAKNLADDMVRNTARDLLYYAVTQDAMLIFENLSRGFGRQGKRTFMAERQYTRMEDWLTAKLAYEGLPSKTYLSKTLAQYTSKTCSNCGFTITSADYDRVLEKLKKTATGWMTTINGKELKVEGQITYYNRYKRQNVVKDLSVELDRLSEESVNNDISSWTKGRSGEALSLLKKRFSHRPVQEKFVCLNCGFETHADEQAALNIARSWLFLRSQEYKKYQTNKTTGNTDKRAFVETWQSFYRKKLKEVWKPAV

SEQ ID NO: 31703 - protein, 979 aa, synthetic construct
  REGION 1..979: note = engineered CasX variant
QEIGKRINKIRRRLVKDSNTKKAGKTGPMKTLLVRVMTPDLRERLENLRKKPENIPQPISNTSRANLNKLLTDYTEMKKAILHVYWEEFQKDPVGLMSRVAQPASKKIDQNKLKPEMDEKGNLTTAGFACSQCGQPLFVYKLEQVSEKGKAYTNYFGRCNVAEHEKLILLAQLKPEKDSDEAVTYSLGKFGQRALDFYSIHVTKESTHPVKPLAQIAGNRYASAPVGKALSDACMGTIASFLSKYQDIIIEHQKVVKGNQKRLESLRELAGKENLEYPSVTLPPQPHTKEGVDAYNEVIARVRMWVNLNLWQKLKLSRDDAKPLLRLKGFPSFPLVERQANEVDWWDMVCNVKKLINEKKEDGKVFWQNLAGYKRQEALRPYLSSEEDRKKGKKFARYQLGDLLLHLEKKHGEDWGKVYDEAWERIDKKVEGLSKHIKLEEERRSEDAQSKAALTDWLRAKASFVIEGLKEADKDEFCRCELKLQKWYGDLRGKPFAIEAENSILDISGFSKQYNCAFIWQKDGVKKLNLYLIINYFKGGKLRFKKIKPEAFEANRFYTVINKKSGEIVPMEVNFNFDDPNLIILPLAFGKRQGREFIWNDLLSLETGSLKLANGRVIEKTLYNRRTRQDEPALFVALTFERREVLDSSNIKPMNLIGVDRGENIPAVIALTDPEGCPLSRFKDSLGNPTHILRIRESYKEKQRTIQAKKEVEQRRAGGYSRKYASKAKNLADDMVRNTARDLLYYAVTQDAMLIFENLSRGFGRQGKRTFMAERQYTRMEDWLTAKLAYEGLPSKTYLSKTLAQYTSKTCSNCGFTITSADYDRVLEKLKKTATGWMTTINGKELKVEGQITYYNRYKRQNVVKDLSVELDRLSEESVNNDISSWTKGRSGEALSLLKKRFSHRPVQEKFVCLNCGFETHADEQAALNIARSWLFLRSQEYKKYQTNKTTGNTDKRAFVETWQSFYRKKLKEVWKPAV

SEQ ID NO: 31704 - protein, 979 aa, synthetic construct
  REGION 1..979: note = engineered CasX variant
QEIGKRINKIRRRLVKDSNTKKAGKTGPMKTLLVRVMTPDLRERLENLRKKPENIPQPISNTSRANLNKLLTDYTEMKKAILHVYWEEFQKDPVGLMSRVAQPASKKIDQNKLKPEMDEKGNLTTAGFACSQCGQPLFVYKLEQVSEKGKAYTNYFGRCNVAEHEKLILLAQLKPEKDSDEAVTYSLGKFGQRALDFYSIHVTKESTHPVKPLAQIAGNRYASVPVGKALSDACMGTIASFLSKYQDIIIEHQKVVKGNQKRLESLRELAGKENLEYPSVTLPPQPHTKEGVDAYNEVIARVRMWVNLNLWQKLKLSRDDAKPLLRLKGFPSFPLVERQANEVDWWDMVCNVKKLINEKKEDGKVFWQNLAGYKRQEALRPYLSSEEDRKKGKKFARYQLGDLLLHLEKKHGEDWGKVYDEAWERIDKKVEGLSKHIKLEEERRSEDAQSKAALTDWLRAKASFVIEGLKEADKDEFCRCELKLQKWYGDLRGKPFAIEAENSILDISGFSKQYNCAFIWQKDGVKKLNLYLIINYFKGGKLRFKKIKPEAFEANRFYTVINKKSGEIVPMEVNFNFDDPNLIILPLAFGKRQGREFIWNDLLSLETGSLKLANGRVIEKTLYNRRTRQDEPALFVALTFERREVLDSSNIKPMNLIGVDRGENIPAVIALTDPEGCPLSRFKDSLGNPTHILRIRESYKEKQRTIQAKKEVEQRRAGGYSRKYASKAKNLADDMVRNTARDLLYYAVTQDAMLIFENLSRGFGRQGKRTFMAERQYTRMEDWLTAKLAYEGLPSKTYLSKTLAQYTSKTCSNCGFTITSADYDRVLEKLKKTATGWMTTINGKELKVEGQITYYNRYKRQNVVKDLSVELDRLSEESVNNDISSWTKGRSGEALSLLKKRFSHRPVQEKFVCLNCGFETHADEQAALNIARSWLFLRSQEYKKYQTNKTTGNTDKRAFVETWQSFYRKKLKEVWKPAV

SEQ ID NO: 31705 - protein, 979 aa, synthetic construct
  REGION 1..979: note = engineered CasX variant
QEIGKRINKIRRRLVKDSNTKKAGKTGPMKTLLVRVMTPDLRERLENLRKKPENIPQPISNTSRANLNKLLTDYTEMKKAILHVYWEEFQKDPVGLMSRVAQPASKKIDQNKLKPEMDEKGNLTTAGFACSQCGQPLFVYKLEQVSEKGKAYTNYFGRCNVAEHEKLIKLAQLKPEKDSDEAVTYSLGKFGQRALDFYSIHVTKESTHPVKPLAQIAGNRYASGPVGKALSDACMGTIASFLSKYQDIIIEHQKVVKGNQKRLESLRELAGKENLEYPSVTLPPQPHTKEGVDAYNEVIARVRMWVNLNLWQKLKLSRDDAKPLLRLKGFPSFPLVERQANEVDWWDMVCNVKKLINEKKEDGKVFWQNLAGYKRQEALRPYLSSEEDRKKGKKFARYQLGDLLLHLEKKHGEDWGKVYDEAWERIDKKVEGLSKHIKLEEERRSEDAQSKAALTDWLRAKASFVIEGLKEADKDEFCRCELKLQKWYGDLRGKPFAIEAENSILDISGFSKQYNCAFIWQKDGVKKLNLYLIINYFKGGKLRFKKIKPEAFEANRFYTVINKKSGEIVPMEVNFNFDDPNLIILPLAFGKRQGREFIWNDLLSLETGSLKLANGRVIEKTLYNRRTRQDEPALFVALTFERREVLDSSNIKPMNLIGVDRGENIPAVIALTDPEGCPLSRFKDSLGNPTHILRIRESYKEKQRTIQAKKEVEQRRAGGYSRKYASKAKNLADDMVRNTARDLLYYAVTQDAMLIFENLSRGFGRQGKRTFMAERQYTRMEDWLTAKLAYEGLPSKTYLSKTLAQYTSKTCSNCGFTITSADYDRVLEKLKKTATGWMTTINGKELKVEGQITYYNRYKRQNVVKDLSVELDRLSEESVNNDISSWTKGRSGEALSLLKKRFSHRPVQEKFVCLNCGFETHADEQAALNIARSWLFLRSQEYKKYQTNKTTGNTDKRAFVETWQSFYRKKLKEVWKPAV

SEQ ID NO: 31706 - protein, 978 aa, synthetic construct
  REGION 1..978: note = engineered CasX variant
QEIGKRINKIRRRLVKDSNTKKAGKTGPMKTLLVRVMTPDLRERLENLRKKPENIPQPISNTSRANLNKLLTDYTEMKKAILHVYWEEFQKDPVGLMSRVAQPASKKIDQNKLKPEMDEKGNLTTAGFACSQCGQPLFVYKLEQVSEKGKAYTNYFGRCNVAEHEKLILLAQLKPEKDSDEAVTYSLGKFGQRALDFYSIHVTKESTHPVKPLAQIAGNRYASPVGKALSDACMGTIASFLSKYQDIIIEHQKVVKGNQKRLESLRELAGKENLEYPSVTLPPQPHTKEGVDAYNEVIARVRMWVNLNLWQKLKLSRDDAKPLLRLKGFPSFPLVERQANEVDWWDMVCNVKKLINEKKEDGKVFWQNLAGYKRQEALRPYLSSEEDRKKGKKFARYQLGDLLLHLEKKHGEDWGKVYDEAWERIDKKVEGLSKHIKLEEERRSEDAQSKAALTDWLRAKASFVIEGLKEADKDEFCRCELKLQKWYGDLRGKPFAIEAENSILDISGFSKQYNCAFIWQKDGVKKLNLYLIINYFKGGKLRFKKIKPEAFEANRFYTVINKKSGEIVPMEVNFNFDDPNLIILPLAFGKRQGREFIWNDLLSLETGSLKLANGRVIEKTLYNRRTRQDEPALFVALTFERREVLDSSNIKPMNLIGVDRGENIPAVIALTDPEGCPLSRFKDSLGNPTHILRIRESYKEKQRTIQAKKEVEQRRAGGYSRKYASKAKNLADDMVRNTARDLLYYAVTQDAMLIFENLSRGFGRQGKRTFMAERQYTRMEDWLTAKLAYEGLPSKTYLSKTLAQYTSKTCSNCGFTITSADYDRVLEKLKKTATGWMTTINGKELKVEGQITYYNRYKRQNVVKDLSVELDRLSEESVNNDISSWTKGRSGEALSLLKKRFSHRPVQEKFVCLNCGFETHADEQAALNIARSWLFLRSQEYKKYQTNKTTGNTDKRAFVETWQSFYRKKLKEVWKPAV

SEQ ID NO: 31707 - protein, 979 aa, synthetic construct
  REGION 1..979: note = engineered CasX variant
QEIGKRINKIRRRLVKDSNTKKAGKTGPMKTLLVRVMTPDLRERLENLRKKPENIPQPISNTSRANLNKLLTDYTEMKKAILHVYWEEFQKDPVGLMSRVAQPASKKIDQNKLKPEMDEKGNLTTAGFACSQCGQPLFVYKLEQVSEKGKAYTNYFGRCNVAEHEKLILLAQLKPEKDSDEAVTYSLGKFGQRALDFYSIHVTKESTHPVKPLAQIAGNRYASYPVGKALSDACMGTIASFLSKYQDIIIEHQKVVKGNQKRLESLRELAGKENLEYPSVTLPPQPHTKEGVDAYNEVIARVRMWVNLNLWQKLKLSRDDAKPLLRLKGFPSFPLVERQANEVDWWDMVCNVKKLINEKKEDGKVFWQNLAGYKRQEALRPYLSSEEDRKKGKKFARYQLGDLLLHLEKKHGEDWGKVYDEAWERIDKKVEGLSKHIKLEEERRSEDAQSKAALTDWLRAKASFVIEGLKEADKDEFCRCELKLQKWYGDLRGKPFAIEAENSILDISGFSKQYNCAFIWQKDGVKKLNLYLIINYFKGGKLRFKKIKPEAFEANRFYTVINKKSGEIVPMEVNFNFDDPNLIILPLAFGKRQGREFIWNDLLSLETGSLKLANGRVIEKTLYNRRTRQDEPALFVALTFERREVLDSSNIKPMNLIGVDRGENIPAVIALTDPEGCPLSRFKDSLGNPTHILRIGESYKEKQRTIQAKKEVEQRRAGGYSRKYASKAKNLADDMVRNTARDLLYYAVTQDAMLIFENLSRGFGRQGKRTFSAERQYTRMEDWLTAKLAYEGLPSKTYLSKTLAQYTSKTCSNCGFTITSADYDRVLEKLKKTATGWMTTINGKELKVEGQITYYNRYKRQNVVKDLSVELDRLSEESVNNDISSWTKGRSGEALSLLKKRFSHRPVQEKFVCLNCGFETHADEQAALNIARSWLFLRSQEYKKYQTNKTTGNTDKRAFVETWQSFYRKKLKEVWKPAV

SEQ ID NO: 31708 - protein, 979 aa, synthetic construct
  REGION 1..979: note = engineered CasX variant
QEIGKRINKIRRRLVKDSNTKKAGKTGPMKTLLVRVMTPDLRERLENLRKKPENIPQPISNTSRANLNKLLTDYTEMKKAILHVYWEEFQKDPVGLMSRVAQPASKKIDQNKLKPEMDEKGNLTTAGFACSQCGQPLFVYKLEQVSEKGKAYTNYFGRCNVAEHEKLILLAQLKPEKDSDEAVTYSLGKFGQRALDFYSIHVTKESTHPVKPLAQIAGNRYASHPVGKALSDACMGTIASFLSKYQDIIIEHQKVVKGNQKRLESLRELAGKENLEYPSVTLPPQPHTKEGVDAYNEVIARVRMWVNLNLWQKLKLSRDDAKPLLRLKGFPSFPLVERQANEVDWWDMVCNVKKLINEKKEDGKVFWQNLAGYKRQEALRPYLSSEEDRKKGKKFARYQLGDLLLHLEKKHGEDWGKVYDEAWERIDKKVEGLSKHIKLEEERRSEDAQSKAALTDWLRAKASFVIEGLKEADKDEFCRCELKLQKWYGDLRGKPFAIEAENSILDISGFSKQYNCAFIWQKDGVKKLNLYLIINYFKGGKLRFKKIKPEAFEANRFYTVINKKSGEIVPMEVNFNFDDPNLIILPLAFGKRQGREFIWNDLLSLETGSLKLANGRVIEKTLYNRRTRQDEPALFVALTFERREVLDSSNIKPMNLIGVDRGENIPAVIALTDPEGCPLSRFKDSLGNPTHILRIGESYKEKQRTIQAKKEVEQRRAGGYSRKYASKAKNLADDMVRNTARDLLYYAVTQDAMLIFENLSRGFGRQGKRTFSAERQYTRMEDWLTAKLAYEGLPSKTYLSKTLAQYTSKTCSNCGFTITSADYDRVLEKLKKTATGWMTTINGKELKVEGQITYYNRYKRQNVVKDLSVELDRLSEESVNNDISSWTKGRSGEALSLLKKRFSHRPVQEKFVCLNCGFETHADEQAALNIARSWLFLRSQEYKKYQTNKTTGNTDKRAFVETWQSFYRKKLKEVWKPAV

SEQ ID NO: 31709 - protein, 979 aa, synthetic construct
  REGION 1..979: note = engineered CasX variant
QEIGKRINKIRRRLVKDSNTKKAGKTGPMKTLLVRVMTPDLRERLENLRKKPENIPQPISNTSRANLNKLLTDYTEMKKAILHVYWEEFQKDPVGLMSRVAQPASKKIDQNKLKPEMDEKGNLTTAGFACSQCGQPLFVYKLEQVSEKGKAYTNYFGRCNVAEHEKLILLAQLKPEKDSDEAVTYSLGKFGQRALDFYSIHVTKESTHPVKPLAQIAGNRYASSPVGKALSDACMGTIASFLSKYQDIIIEHQKVVKGNQKRLESLRELAGKENLEYPSVTLPPQPHTKEGVDAYNEVIARVRMWVNLNLWQKLKLSRDDAKPLLRLKGFPSFPLVERQANEVDWWDMVCNVKKLINEKKEDGKVFWQNLAGYKRQEALRPYLSSEEDRKKGKKFARYQLGDLLLHLEKKHGEDWGKVYDEAWERIDKKVEGLSKHIKLEEERRSEDAQSKAALTDWLRAKASFVIEGLKEADKDEFCRCELKLQKWYGDLRGKPFAIEAENSILDISGFSKQYNCAFIWQKDGVKKLNLYLIINYFKGGKLRFKKIKPEAFEANRFYTVINKKSGEIVPMEVNFNFDDPNLIILPLAFGKRQGREFIWNDLLSLETGSLKLANGRVIEKTLYNRRTRQDEPALFVALTFERREVLDSSNIKPMNLIGVDRGENIPAVIALTDPEGCPLSRFKDSLGNPTHILRIGESYKEKQRTIQAKKEVEQRRAGGYSRKYASKAKNLADDMVRNTARDLLYYAVTQDAMLIFENLSRGFGRQGKRTFSAERQYTRMEDWLTAKLAYEGLPSKTYLSKTLAQYTSKTCSNCGFTITSADYDRVLEKLKKTATGWMTTINGKELKVEGQITYYNRYKRQNVVKDLSVELDRLSEESVNNDISSWTKGRSGEALSLLKKRFSHRPVQEKFVCLNCGFETHADEQAALNIARSWLFLRSQEYKKYQTNKTTGNTDKRAFVETWQSFYRKKLKEVWKPAV

SEQ ID NO: 31710 - protein, 979 aa, synthetic construct
  REGION 1..979: note = engineered CasX variant
QEIGKRINKIRRRLVKDSNTKKAGKTGPMKTLLVRVMTPDLRERLENLRKKPENIPQPISNTSRANLNKLLTDYTEMKKAILHVYWEEFQKDPVGLMSRVAQPASKKIDQNKLKPEMDEKGNLTTAGFACSQCGQPLFVYKLEQVSEKGKAYTNYFGRCNVAEHEKLILLAQLKPEKDSDEAVTYSLGKFGQRALDFYSIHVTKESTHPVKPLAQIAGNRYASTPVGKALSDACMGTIASFLSKYQDIIIEHQKVVKGNQKRLESLRELAGKENLEYPSVTLPPQPHTKEGVDAYNEVIARVRMWVNLNLWQKLKLSRDDAKPLLRLKGFPSFPLVERQANEVDWWDMVCNVKKLINEKKEDGKVFWQNLAGYKRQEALRPYLSSEEDRKKGKKFARYQLGDLLLHLEKKHGEDWGKVYDEAWERIDKKVEGLSKHIKLEEERRSEDAQSKAALTDWLRAKASFVIEGLKEADKDEFCRCELKLQKWYGDLRGKPFAIEAENSILDISGFSKQYNCAFIWQKDGVKKLNLYLIINYFKGGKLRFKKIKPEAFEANRFYTVINKKSGEIVPMEVNFNFDDPNLIILPLAFGKRQGREFIWNDLLSLETGSLKLANGRVIEKTLYNRRTRQDEPALFVALTFERREVLDSSNIKPMNLIGVDRGENIPAVIALTDPEGCPLSRFKDSLGNPTHILRIGESYKEKQRTIQAKKEVEQRRAGGYSRKYASKAKNLADDMVRNTARDLLYYAVTQDAMLIFENLSRGFGRQGKRTFSAERQYTRMEDWLTAKLAYEGLPSKTYLSKTLAQYTSKTCSNCGFTITSADYDRVLEKLKKTATGWMTTINGKELKVEGQITYYNRYKRQNVVKDLSVELDRLSEESVNNDISSWTKGRSGEALSLLKKRFSHRPVQEKFVCLNCGFETHADEQAALNIARSWLFLRSQEYKKYQTNKTTGNTDKRAFVETWQSFYRKKLKEVWKPAV

SEQ ID NO: 31711 - protein, 979 aa, synthetic construct
  REGION 1..979: note = engineered CasX variant
QEIGKRINKIRRRLVKDSNTKKAGKTGPMKTLLVRVMTPDLRERLENLRKKPENIPQPISNTSRANLNKLLTDYTEMKKAILHVYWEEFQKDPVGLMSRVAQPASKKIDQNKLKPEMDEKGNLTTAGFACSQCGQPLFVYKLEQVSEKGKAYTNYFGRCNVAEHEKLILLAQLKPEKDSDEAVTYSLGKFGQRALDFYSIHVTKESTHPVKPLAQIAGNRYASAPVGKALSDACMGTIASFLSKYQDIIIEHQKVVKGNQKRLESLRELAGKENLEYPSVTLPPQPHTKEGVDAYNEVIARVRMWVNLNLWQKLKLSRDDAKPLLRLKGFPSFPLVERQANEVDWWDMVCNVKKLINEKKEDGKVFWQNLAGYKRQEALRPYLSSEEDRKKGKKFARYQLGDLLLHLEKKHGEDWGKVYDEAWERIDKKVEGLSKHIKLEEERRSEDAQSKAALTDWLRAKASFVIEGLKEADKDEFCRCELKLQKWYGDLRGKPFAIEAENSILDISGFSKQYNCAFIWQKDGVKKLNLYLIINYFKGGKLRFKKIKPEAFEANRFYTVINKKSGEIVPMEVNFNFDDPNLIILPLAFGKRQGREFIWNDLLSLETGSLKLANGRVIEKTLYNRRTRQDEPALFVALTFERREVLDSSNIKPMNLIGVDRGENIPAVIALTDPEGCPLSRFKDSLGNPTHILRIGESYKEKQRTIQAKKEVEQRRAGGYSRKYASKAKNLADDMVRNTARDLLYYAVTQDAMLIFENLSRGFGRQGKRTFSAERQYTRMEDWLTAKLAYEGLPSKTYLSKTLAQYTSKTCSNCGFTITSADYDRVLEKLKKTATGWMTTINGKELKVEGQITYYNRYKRQNVVKDLSVELDRLSEESVNNDISSWTKGRSGEALSLLKKRFSHRPVQEKFVCLNCGFETHADEQAALNIARSWLFLRSQEYKKYQTNKTTGNTDKRAFVETWQSFYRKKLKEVWKPAV

SEQ ID NO: 31712 - protein, 979 aa, synthetic construct
  REGION 1..979: note = engineered CasX variant
QEIGKRINKIRRRLVKDSNTKKAGKTGPMKTLLVRVMTPDLRERLENLRKKPENIPQPISNTSRANLNKLLTDYTEMKKAILHVYWEEFQKDPVGLMSRVAQPASKKIDQNKLKPEMDEKGNLTTAGFACSQCGQPLFVYKLEQVSEKGKAYTNYFGRCNVAEHEKLILLAQLKPEKDSDEAVTYSLGKFGQRALDFYSIHVTKESTHPVKPLAQIAGNRYASVPVGKALSDACMGTIASFLSKYQDIIIEHQKVVKGNQKRLESLRELAGKENLEYPSVTLPPQPHTKEGVDAYNEVIARVRMWVNLNLWQKLKLSRDDAKPLLRLKGFPSFPLVERQANEVDWWDMVCNVKKLINEKKEDGKVFWQNLAGYKRQEALRPYLSSEEDRKKGKKFARYQLGDLLLHLEKKHGEDWGKVYDEAWERIDKKVEGLSKHIKLEEERRSEDAQSKAALTDWLRAKASFVIEGLKEADKDEFCRCELKLQKWYGDLRGKPFAIEAENSILDISGFSKQYNCAFIWQKDGVKKLNLYLIINYFKGGKLRFKKIKPEAFEANRFYTVINKKSGEIVPMEVNFNFDDPNLIILPLAFGKRQGREFIWNDLLSLETGSLKLANGRVIEKTLYNRRTRQDEPALFVALTFERREVLDSSNIKPMNLIGVDRGENIPAVIALTDPEGCPLSRFKDSLGNPTHILRIGESYKEKQRTIQAKKEVEQRRAGGYSRKYASKAKNLADDMVRNTARDLLYYAVTQDAMLIFENLSRGFGRQGKRTFSAERQYTRMEDWLTAKLAYEGLPSKTYLSKTLAQYTSKTCSNCGFTITSADYDRVLEKLKKTATGWMTTINGKELKVEGQITYYNRYKRQNVVKDLSVELDRLSEESVNNDISSWTKGRSGEALSLLKKRFSHRPVQEKFVCLNCGFETHADEQAALNIARSWLFLRSQEYKKYQTNKTTGNTDKRAFVETWQSFYRKKLKEVWKPAV

SEQ ID NO: 31713 - protein, 979 aa, synthetic construct
  REGION 1..979: note = engineered CasX variant
QEIGKRINKIRRRLVKDSNTKKAGKTGPMKTLLVRVMTPDLRERLENLRKKPENIPQPISNTSRANLNKLLTDYTEMKKAILHVYWEEFQKDPVGLMSRVAQPASKKIDQNKLKPEMDEKGNLTTAGFACSQCGQPLFVYKLEQVSEKGKAYTNYFGRCNVAEHEKLIKLAQLKPEKDSDEAVTYSLGKFGQRALDFYSIHVTKESTHPVKPLAQIAGNRYASGPVGKALSDACMGTIASFLSKYQDIIIEHQKVVKGNQKRLESLRELAGKENLEYPSVTLPPQPHTKEGVDAYNEVIARVRMWVNLNLWQKLKLSRDDAKPLLRLKGFPSFPLVERQANEVDWWDMVCNVKKLINEKKEDGKVFWQNLAGYKRQEALRPYLSSEEDRKKGKKFARYQLGDLLLHLEKKHGEDWGKVYDEAWERIDKKVEGLSKHIKLEEERRSEDAQSKAALTDWLRAKASFVIEGLKEADKDEFCRCELKLQKWYGDLRGKPFAIEAENSILDISGFSKQYNCAFIWQKDGVKKLNLYLIINYFKGGKLRFKKIKPEAFEANRFYTVINKKSGEIVPMEVNFNFDDPNLIILPLAFGKRQGREFIWNDLLSLETGSLKLANGRVIEKTLYNRRTRQDEPALFVALTFERREVLDSSNIKPMNLIGVDRGENIPAVIALTDPEGCPLSRFKDSLGNPTHILRIGESYKEKQRTIQAKKEVEQRRAGGYSRKYASKAKNLADDMVRNTARDLLYYAVTQDAMLIFENLSRGFGRQGKRTFSAERQYTRMEDWLTAKLAYEGLPSKTYLSKTLAQYTSKTCSNCGFTITSADYDRVLEKLKKTATGWMTTINGKELKVEGQITYYNRYKRQNVVKDLSVELDRLSEESVNNDISSWTKGRSGEALSLLKKRFSHRPVQEKFVCLNCGFETHADEQAALNIARSWLFLRSQEYKKYQTNKTTGNTDKRAFVETWQSFYRKKLKEVWKPAV

SEQ ID NO: 31714 - protein, 978 aa, synthetic construct
  REGION 1..978: note = engineered CasX variant
QEIGKRINKIRRRLVKDSNTKKAGKTGPMKTLLVRVMTPDLRERLENLRKKPENIPQPISNTSRANLNKLLTDYTEMKKAILHVYWEEFQKDPVGLMSRVAQPASKKIDQNKLKPEMDEKGNLTTAGFACSQCGQPLFVYKLEQVSEKGKAYTNYFGRCNVAEHEKLILLAQLKPEKDSDEAVTYSLGKFGQRALDFYSIHVTKESTHPVKPLAQIAGNRYASPVGKALSDACMGTIASFLSKYQDIIIEHQKVVKGNQKRLESLRELAGKENLEYPSVTLPPQPHTKEGVDAYNEVIARVRMWVNLNLWQKLKLSRDDAKPLLRLKGFPSFPLVERQANEVDWWDMVCNVKKLINEKKEDGKVFWQNLAGYKRQEALRPYLSSEEDRKKGKKFARYQLGDLLLHLEKKHGEDWGKVYDEAWERIDKKVEGLSKHIKLEEERRSEDAQSKAALTDWLRAKASFVIEGLKEADKDEFCRCELKLQKWYGDLRGKPFAIEAENSILDISGFSKQYNCAFIWQKDGVKKLNLYLIINYFKGGKLRFKKIKPEAFEANRFYTVINKKSGEIVPMEVNFNFDDPNLIILPLAFGKRQGREFIWNDLLSLETGSLKLANGRVIEKTLYNRRTRQDEPALFVALTFERREVLDSSNIKPMNLIGVDRGENIPAVIALTDPEGCPLSRFKDSLGNPTHILRIGESYKEKQRTIQAKKEVEQRRAGGYSRKYASKAKNLADDMVRNTARDLLYYAVTQDAMLIFENLSRGFGRQGKRTFSAERQYTRMEDWLTAKLAYEGLPSKTYLSKTLAQYTSKTCSNCGFTITSADYDRVLEKLKKTATGWMTTINGKELKVEGQITYYNRYKRQNVVKDLSVELDRLSEESVNNDISSWTKGRSGEALSLLKKRFSHRPVQEKFVCLNCGFETHADEQAALNIARSWLFLRSQEYKKYQTNKTTGNTDKRAFVETWQSFYRKKLKEVWKPAV

SEQ ID NO: 31715 - protein, 979 aa, synthetic construct
  REGION 1..979: note = engineered CasX variant
QEIGKRINKIRRRLVKDSNTKKAGKTGPMKTLLVRVMTPDLRERLENLRKKPENIPQPISNTSRANLNKLLTDYTEMKKAILHVYWEEFQKDPVGLMSRVAQPASKKIDQNKLKPEMDEKGNLTTAGFACSQCGQPLFVYKLEQVSEKGKAYTNYFGRCNVAEHEKLILLAQLKPEKDSDEAVTYSLGKFGQRALDFYSIHVTKESTHPVKPLAQIAGNRYASYPVGKALSDACMGTIASFLSKYQDIIIEHQKVVKGNQKRLESLRELAGKENLEYPSVTLPPQPHTKEGVDAYNEVIARVRMWVNLNLWQKLKLSRDDAKPLLRLKGFPSFPLVERQANEVDWWDMVCNVKKLINEKKEDGKVFWQNLAGYKRQEALRPYLSSEEDRKKGKKFARYQLGDLLLHLEKKHGEDWGKVYDEAWERIDKKVEGLSKHIKLEEERRSEDAQSKAALTDWLRAKASFVIEGLKEADKDEFCRCELKLQKWYGDLRGKPFAIEAENSILDISGFSKQYNCAFIWQKDGVKKLNLYLIINYFKGGKLRFKKIKPEAFEANRFYTVINKKSGEIVPMEVNFNFDDPNLIILPLAFGKRQGREFIWNDLLSLETGSLKLANGRVIEKTLYNRRTRQDEPALFVALTFERREVLDSSNIKPMNLIGVDRGENIPAVIALTDPEGCPLSRFKDSLGNPTHILRIGESYKEKQRTIQAKKEVEQRRAGGYSRKYASKAKNLADDMVRNTARDLLYYAVTQDAMLIFENLSRGFGRQGKRTFMAERQYTRMEDWLTAKLAYEGLPSKTYLSKTLAQYTSKTCSNCGFTITSADYDRVLEKLKKTATGWMTTINGKELKVEGQITYYNRYKRQNVVKDLSVELDRLSEESVNNDISSWDKGRSGEALSLLKKRFSHRPVQEKFVCLNCGFETHADEQAALNIARSWLFLRSQEYKKYQTNKTTGNTDKRAFVETWQSFYRKKLKEVWKPAV

SEQ ID NO: 31716 - protein, 979 aa, synthetic construct
  REGION 1..979: note = engineered CasX variant
QEIGKRINKIRRRLVKDSNTKKAGKTGPMKTLLVRVMTPDLRERLENLRKKPENIPQPISNTSRANLNKLLTDYTEMKKAILHVYWEEFQKDPVGLMSRVAQPASKKIDQNKLKPEMDEKGNLTTAGFACSQCGQPLFVYKLEQVSEKGKAYTNYFGRCNVAEHEKLILLAQLKPEKDSDEAVTYSLGKFGQRALDFYSIHVTKESTHPVKPLAQIAGNRYASHPVGKALSDACMGTIASFLSKYQDIIIEHQKVVKGNQKRLESLRELAGKENLEYPSVTLPPQPHTKEGVDAYNEVIARVRMWVNLNLWQKLKLSRDDAKPLLRLKGFPSFPLVERQANEVDWWDMVCNVKKLINEKKEDGKVFWQNLAGYKRQEALRPYLSSEEDRKKGKKFARYQLGDLLLHLEKKHGEDWGKVYDEAWERIDKKVEGLSKHIKLEEERRSEDAQSKAALTDWLRAKASFVIEGLKEADKDEFCRCELKLQKWYGDLRGKPFAIEAENSILDISGFSKQYNCAFIWQKDGVKKLNLYLIINYFKGGKLRFKKIKPEAFEANRFYTVINKKSGEIVPMEVNFNFDDPNLIILPLAFGKRQGREFIWNDLLSLETGSLKLANGRVIEKTLYNRRTRQDEPALFVALTFERREVLDSSNIKPMNLIGVDRGENIPAVIALTDPEGCPLSRFKDSLGNPTHILRIGESYKEKQRTIQAKKEVEQRRAGGYSRKYASKAKNLADDMVRNTARDLLYYAVTQDAMLIFENLSRGFGRQGKRTFMAERQYTRMEDWLTAKLAYEGLPSKTYLSKTLAQYTSKTCSNCGFTITSADYDRVLEKLKKTATGWMTTINGKELKVEGQITYYNRYKRQNVVKDLSVELDRLSEESVNNDISSWDKGRSGEALSLLKKRFSHRPVQEKFVCLNCGFETHADEQAALNIARSWLFLRSQEYKKYQTNKTTGNTDKRAFVETWQSFYRKKLKEVWKPAV

SEQ ID NO: 31717 - protein, 979 aa, synthetic construct
  REGION 1..979: note = engineered CasX variant
QEIGKRINKIRRRLVKDSNTKKAGKTGPMKTLLVRVMTPDLRERLENLRKKPENIPQPISNTSRANLNKLLTDYTEMKKAILHVYWEEFQKDPVGLMSRVAQPASKKIDQNKLKPEMDEKGNLTTAGFACSQCGQPLFVYKLEQVSEKGKAYTNYFGRCNVAEHEKLILLAQLKPEKDSDEAVTYSLGKFGQRALDFYSIHVTKESTHPVKPLAQIAGNRYASSPVGKALSDACMGTIASFLSKYQDIIIEHQKVVKGNQKRLESLRELAGKENLEYPSVTLPPQPHTKEGVDAYNEVIARVRMWVNLNLWQKLKLSRDDAKPLLRLKGFPSFPLVERQANEVDWWDMVCNVKKLINEKKEDGKVFWQNLAGYKRQEALRPYLSSEEDRKKGKKFARYQLGDLLLHLEKKHGEDWGKVYDEAWERIDKKVEGLSKHIKLEEERRSEDAQSKAALTDWLRAKASFVIEGLKEADKDEFCRCELKLQKWYGDLRGKPFAIEAENSILDISGFSKQYNCAFIWQKDGVKKLNLYLIINYFKGGKLRFKKIKPEAFEANRFYTVINKKSGEIVPMEVNFNFDDPNLIILPLAFGKRQGREFIWNDLLSLETGSLKLANGRVIEKTLYNRRTRQDEPALFVALTFERREVLDSSNIKPMNLIGVDRGENIPAVIALTDPEGCPLSRFKDSLGNPTHILRIGESYKEKQRTIQAKKEVEQRRAGGYSRKYASKAKNLADDMVRNTARDLLYYAVTQDAMLIFENLSRGFGRQGKRTFMAERQYTRMEDWLTAKLAYEGLPSKTYLSKTLAQYTSKTCSNCGFTITSADYDRVLEKLKKTATGWMTTINGKELKVEGQITYYNRYKRQNVVKDLSVELDRLSEESVNNDISSWDKGRSGEALSLLKKRFSHRPVQEKFVCLNCGFETHADEQAALNIARSWLFLRSQEYKKYQTNKTTGNTDKRAFVETWQSFYRKKLKEVWKPAV

SEQ ID NO: 31718 - protein, 979 aa, synthetic construct
  REGION 1..979: note = engineered CasX variant
QEIGKRINKIRRRLVKDSNTKKAGKTGPMKTLLVRVMTPDLRERLENLRKKPENIPQPISNTSRANLNKLLTDYTEMKKAILHVYWEEFQKDPVGLMSRVAQPASKKIDQNKLKPEMDEKGNLTTAGFACSQCGQPLFVYKLEQVSEKGKAYTNYFGRCNVAEHEKLILLAQLKPEKDSDEAVTYSLGKFGQRALDFYSIHVTKESTHPVKPLAQIAGNRYASTPVGKALSDACMGTIASFLSKYQDIIIEHQKVVKGNQKRLESLRELAGKENLEYPSVTLPPQPHTKEGVDAYNEVIARVRMWVNLNLWQKLKLSRDDAKPLLRLKGFPSFPLVERQANEVDWWDMVCNVKKLINEKKEDGKVFWQNLAGYKRQEALRPYLSSEEDRKKGKKFARYQLGDLLLHLEKKHGEDWGKVYDEAWERIDKKVEGLSKHIKLEEERRSEDAQSKAALTDWLRAKASFVIEGLKEADKDEFCRCELKLQKWYGDLRGKPFAIEAENSILDISGFSKQYNCAFIWQKDGVKKLNLYLIINYFKGGKLRFKKIKPEAFEANRFYTVINKKSGEIVPMEVNFNFDDPNLIILPLAFGKRQGREFIWNDLLSLETGSLKLANGRVIEKTLYNRRTRQDEPALFVALTFERREVLDSSNIKPMNLIGVDRGENIPAVIALTDPEGCPLSRFKDSLGNPTHILRIGESYKEKQRTIQAKKEVEQRRAGGYSRKYASKAKNLADDMVRNTARDLLYYAVTQDAMLIFENLSRGFGRQGKRTFMAERQYTRMEDWLTAKLAYEGLPSKTYLSKTLAQYTSKTCSNCGFTITSADYDRVLEKLKKTATGWMTTINGKELKVEGQITYYNRYKRQNVVKDLSVELDRLSEESVNNDISSWDKGRSGEALSLLKKRFSHRPVQEKFVCLNCGFETHADEQAALNIARSWLFLRSQEYKKYQTNKTTGNTDKRAFVETWQSFYRKKLKEVWKPAV

SEQ ID NO: 31719 - protein, 979 aa, synthetic construct
  REGION 1..979: note = engineered CasX variant
QEIGKRINKIRRRLVKDSNTKKAGKTGPMKTLLVRVMTPDLRERLENLRKKPENIPQPISNTSRANLNKLLTDYTEMKKAILHVYWEEFQKDPVGLMSRVAQPASKKIDQNKLKPEMDEKGNLTTAGFACSQCGQPLFVYKLEQVSEKGKAYTNYFGRCNVAEHEKLILLAQLKPEKDSDEAVTYSLGKFGQRALDFYSIHVTKESTHPVKPLAQIAGNRYASAPVGKALSDACMGTIASFLSKYQDIIIEHQKVVKGNQKRLESLRELAGKENLEYPSVTLPPQPHTKEGVDAYNEVIARVRMWVNLNLWQKLKLSRDDAKPLLRLKGFPSFPLVERQANEVDWWDMVCNVKKLINEKKEDGKVFWQNLAGYKRQEALRPYLSSEEDRKKGKKFARYQLGDLLLHLEKKHGEDWGKVYDEAWERIDKKVEGLSKHIKLEEERRSEDAQSKAALTDWLRAKASFVIEGLKEADKDEFCRCELKLQKWYGDLRGKPFAIEAENSILDISGFSKQYNCAFIWQKDGVKKLNLYLIINYFKGGKLRFKKIKPEAFEANRFYTVINKKSGEIVPMEVNFNFDDPNLIILPLAFGKRQGREFIWNDLLSLETGSLKLANGRVIEKTLYNRRTRQDEPALFVALTFERREVLDSSNIKPMNLIGVDRGENIPAVIALTDPEGCPLSRFKDSLGNPTHILRIGESYKEKQRTIQAKKEVEQRRAGGYSRKYASKAKNLADDMVRNTARDLLYYAVTQDAMLIFENLSRGFGRQGKRTFMAERQYTRMEDWLTAKLAYEGLPSKTYLSKTLAQYTSKTCSNCGFTITSADYDRVLEKLKKTATGWMTTINGKELKVEGQITYYNRYKRQNVVKDLSVELDRLSEESVNNDISSWDKGRSGEALSLLKKRFSHRPVQEKFVCLNCGFETHADEQAALNIARSWLFLRSQEYKKYQTNKTTGNTDKRAFVETWQSFYRKKLKEVWKPAV

SEQ ID NO: 31720 - protein, 979 aa, synthetic construct
  REGION 1..979: note = engineered CasX variant
QEIGKRINKIRRRLVKDSNTKKAGKTGPMKTLLVRVMTPDLRERLENLRKKPENIPQPISNTSRANLNKLLTDYTEMKKAILHVYWEEFQKDPVGLMSRVAQPASKKIDQNKLKPEMDEKGNLTTAGFACSQCGQPLFVYKLEQVSEKGKAYTNYFGRCNVAEHEKLILLAQLKPEKDSDEAVTYSLGKFGQRALDFYSIHVTKESTHPVKPLAQIAGNRYASVPVGKALSDACMGTIASFLSKYQDIIIEHQKVVKGNQKRLESLRELAGKENLEYPSVTLPPQPHTKEGVDAYNEVIARVRMWVNLNLWQKLKLSRDDAKPLLRLKGFPSFPLVERQANEVDWWDMVCNVKKLINEKKEDGKVFWQNLAGYKRQEALRPYLSSEEDRKKGKKFARYQLGDLLLHLEKKHGEDWGKVYDEAWERIDKKVEGLSKHIKLEEERRSEDAQSKAALTDWLRAKASFVIEGLKEADKDEFCRCELKLQKWYGDLRGKPFAIEAENSILDISGFSKQYNCAFIWQKDGVKKLNLYLIINYFKGGKLRFKKIKPEAFEANRFYTVINKKSGEIVPMEVNFNFDDPNLIILPLAFGKRQGREFIWNDLLSLETGSLKLANGRVIEKTLYNRRTRQDEPALFVALTFERREVLDSSNIKPMNLIGVDRGENIPAVIALTDPEGCPLSRFKDSLGNPTHILRIGESYKEKQRTIQAKKEVEQRRAGGYSRKYASKAKNLADDMVRNTARDLLYYAVTQDAMLIFENLSRGFGRQGKRTFMAERQYTRMEDWLTAKLAYEGLPSKTYLSKTLAQYTSKTCSNCGFTITSADYDRVLEKLKKTATGWMTTINGKELKVEGQITYYNRYKRQNVVKDLSVELDRLSEESVNNDISSWDKGRSGEALSLLKKRFSHRPVQEKFVCLNCGFETHADEQAALNIARSWLFLRSQEYKKYQTNKTTGNTDKRAFVETWQSFYRKKLKEVWKPAV

SEQ ID NO: 31721 - protein, 979 aa, synthetic construct
  REGION 1..979: note = engineered CasX variant
QEIGKRINKIRRRLVKDSNTKKAGKTGPMKTLLVRVMTPDLRERLENLRKKPENIPQPISNTSRANLNKLLTDYTEMKKAILHVYWEEFQKDPVGLMSRVAQPASKKIDQNKLKPEMDEKGNLTTAGFACSQCGQPLFVYKLEQVSEKGKAYTNYFGRCNVAEHEKLIKLAQLKPEKDSDEAVTYSLGKFGQRALDFYSIHVTKESTHPVKPLAQIAGNRYASGPVGKALSDACMGTIASFLSKYQDIIIEHQKVVKGNQKRLESLRELAGKENLEYPSVTLPPQPHTKEGVDAYNEVIARVRMWVNLNLWQKLKLSRDDAKPLLRLKGFPSFPLVERQANEVDWWDMVCNVKKLINEKKEDGKVFWQNLAGYKRQEALRPYLSSEEDRKKGKKFARYQLGDLLLHLEKKHGEDWGKVYDEAWERIDKKVEGLSKHIKLEEERRSEDAQSKAALTDWLRAKASFVIEGLKEADKDEFCRCELKLQKWYGDLRGKPFAIEAENSILDISGFSKQYNCAFIWQKDGVKKLNLYLIINYFKGGKLRFKKIKPEAFEANRFYTVINKKSGEIVPMEVNFNFDDPNLIILPLAFGKRQGREFIWNDLLSLETGSLKLANGRVIEKTLYNRRTRQDEPALFVALTFERREVLDSSNIKPMNLIGVDRGENIPAVIALTDPEGCPLSRFKDSLGNPTHILRIGESYKEKQRTIQAKKEVEQRRAGGYSRKYASKAKNLADDMVRNTARDLLYYAVTQDAMLIFENLSRGFGRQGKRTFMAERQYTRMEDWLTAKLAYEGLPSKTYLSKTLAQYTSKTCSNCGFTITSADYDRVLEKLKKTATGWMTTINGKELKVEGQITYYNRYKRQNVVKDLSVELDRLSEESVNNDISSWDKGRSGEALSLLKKRFSHRPVQEKFVCLNCGFETHADEQAALNIARSWLFLRSQEYKKYQTNKTTGNTDKRAFVETWQSFYRKKLKEVWKPAV

SEQ ID NO: 31722 - protein, 978 aa, synthetic construct
  REGION 1..978: note = engineered CasX variant
QEIGKRINKIRRRLVKDSNTKKAGKTGPMKTLLVRVMTPDLRERLENLRKKPENIPQPISNTSRANLNKLLTDYTEMKKAILHVYWEEFQKDPVGLMSRVAQPASKKIDQNKLKPEMDEKGNLTTAGFACSQCGQPLFVYKLEQVSEKGKAYTNYFGRCNVAEHEKLILLAQLKPEKDSDEAVTYSLGKFGQRALDFYSIHVTKESTHPVKPLAQIAGNRYASPVGKALSDACMGTIASFLSKYQDIIIEHQKVVKGNQKRLESLRELAGKENLEYPSVTLPPQPHTKEGVDAYNEVIARVRMWVNLNLWQKLKLSRDDAKPLLRLKGFPSFPLVERQANEVDWWDMVCNVKKLINEKKEDGKVFWQNLAGYKRQEALRPYLSSEEDRKKGKKFARYQLGDLLLHLEKKHGEDWGKVYDEAWERIDKKVEGLSKHIKLEEERRSEDAQSKAALTDWLRAKASFVIEGLKEADKDEFCRCELKLQKWYGDLRGKPFAIEAENSILDISGFSKQYNCAFIWQKDGVKKLNLYLIINYFKGGKLRFKKIKPEAFEANRFYTVINKKSGEIVPMEVNFNFDDPNLIILPLAFGKRQGREFIWNDLLSLETGSLKLANGRVIEKTLYNRRTRQDEPALFVALTFERREVLDSSNIKPMNLIGVDRGENIPAVIALTDPEGCPLSRFKDSLGNPTHILRIGESYKEKQRTIQAKKEVEQRRAGGYSRKYASKAKNLADDMVRNTARDLLYYAVTQDAMLIFENLSRGFGRQGKRTFMAERQYTRMEDWLTAKLAYEGLPSKTYLSKTLAQYTSKTCSNCGFTITSADYDRVLEKLKKTATGWMTTINGKELKVEGQITYYNRYKRQNVVKDLSVELDRLSEESVNNDISSWDKGRSGEALSLLKKRFSHRPVQEKFVCLNCGFETHADEQAALNIARSWLFLRSQEYKKYQTNKTTGNTDKRAFVETWQSFYRKKLKEVWKPAV

SEQ ID NO: 31723 - protein, 979 aa, synthetic construct
  REGION 1..979: note = engineered CasX variant
QEIGKRINKIRRRLVKDSNTKKAGKTGPMKTLLVRVMTPDLRERLENLRKKPENIPQPISNTSRANLNKLLTDYTEMKKAILHVYWEEFQVDPVGLMSRVAQPASKKIDQNKLKPEMDEKGNLTTAGFACSQCGQPLFVYKLEQVSEKGKAYTNYFGRCNVAEHEKLILLAQLKPEKDSDEAVTYSLGKFGQRALDFYSIHVTKESTHPVKPLAQIAGNRYASYPVGKALSDACMGTIASFLSKYQDIIIEHQKVVKGNQKRLESLRELAGKENLEYPSVTLPPQPHTKEGVDAYNEVIARVRMWVNLNLWQKLKLSRDDAKPLLRLKGFPSFPLVERQANEVDWWDMVCNVKKLINEKKEDGKVFWQNLAGYKRQEALRPYLSSEEDRKKGKKFARYQLGDLLLHLEKKHGEDWGKVYDEAWERIDKKVEGLSKHIKLEEERRSEDAQSKAALTDWLRAKASFVIEGLKEADKDEFCRCELKLQKWYGDLRGKPFAIEAENSILDISGFSKQYNCAFIWQKDGVKKLNLYLIINYFKGGKLRFKKIKPEAFEANRFYTVINKKSGEIVPMEVNFNFDDPNLIILPLAFGKRQGREFIWNDLLSLETGSLKLANGRVIEKTLYNRRTRQDEPALFVALTFERREVLDSSNIKPMNLIGVDRGENIPAVIALTDPEGCPLSRFKDSLGNPTHILRIGESYKEKQRTIQAKKEVEQRRAGGYSRKYASKAKNLADDMVRNTARDLLYYAVTQDAMLIFENLSRGFGRQGKRTFMAERQYTRMEDWLTAKLAYEGLPSKTYLSKTLAQYTSKTCSNCGFTITSADYDRVLEKLKKTATGWMTTINGKELKVEGQITYYNRYKRQNVVKDLSVELDRLSEESVNNDISSWTKGRSGEALSLLKKRFSHRPVQEKFVCLNCGFETHADEQAALNIARSWLFLRSQEYKKYQTNKTTGNTDKRAFVETWQSFYRKKLKEVWKPAV

SEQ ID NO: 31724 - protein, 979 aa, synthetic construct
  REGION 1..979: note = engineered CasX variant
QEIGKRINKIRRRLVKDSNTKKAGKTGPMKTLLVRVMTPDLRERLENLRKKPENIPQPISNTSRANLNKLLTDYTEMKKAILHVYWEEFQVDPVGLMSRVAQPASKKIDQNKLKPEMDEKGNLTTAGFACSQCGQPLFVYKLEQVSEKGKAYTNYFGRCNVAEHEKLILLAQLKPEKDSDEAVTYSLGKFGQRALDFYSIHVTKESTHPVKPLAQIAGNRYASHPVGKALSDACMGTIASFLSKYQDIIIEHQKVVKGNQKRLESLRELAGKENLEYPSVTLPPQPHTKEGVDAYNEVIARVRMWVNLNLWQKLKLSRDDAKPLLRLKGFPSFPLVERQANEVDWWDMVCNVKKLINEKKEDGKVFWQNLAGYKRQEALRPYLSSEEDRKKGKKFARYQLGDLLLHLEKKHGEDWGKVYDEAWERIDKKVEGLSKHIKLEEERRSEDAQSKAALTDWLRAKASFVIEGLKEADKDEFCRCELKLQKWYGDLRGKPFAIEAENSILDISGFSKQYNCAFIWQKDGVKKLNLYLIINYFKGGKLRFKKIKPEAFEANRFYTVINKKSGEIVPMEVNFNFDDPNLIILPLAFGKRQGREFIWNDLLSLETGSLKLANGRVIEKTLYNRRTRQDEPALFVALTFERREVLDSSNIKPMNLIGVDRGENIPAVIALTDPEGCPLSRFKDSLGNPTHILRIGESYKEKQRTIQAKKEVEQRRAGGYSRKYASKAKNLADDMVRNTARDLLYYAVTQDAMLIFENLSRGFGRQGKRTFMAERQYTRMEDWLTAKLAYEGLPSKTYLSKTLAQYTSKTCSNCGFTITSADYDRVLEKLKKTATGWMTTINGKELKVEGQITYYNRYKRQNVVKDLSVELDRLSEESVNNDISSWTKGRSGEALSLLKKRFSHRPVQEKFVCLNCGFETHADEQAALNIARSWLFLRSQEYKKYQTNKTTGNTDKRAFVETWQSFYRKKLKEVWKPAV

SEQ ID NO: 31725 - protein, 979 aa, synthetic construct
  REGION 1..979: note = engineered CasX variant
QEIGKRINKIRRRLVKDSNTKKAGKTGPMKTLLVRVMTPDLRERLENLRKKPENIPQPISNTSRANLNKLLTDYTEMKKAILHVYWEEFQVDPVGLMSRVAQPASKKIDQNKLKPEMDEKGNLTTAGFACSQCGQPLFVYKLEQVSEKGKAYTNYFGRCNVAEHEKLILLAQLKPEKDSDEAVTYSLGKFGQRALDFYSIHVTKESTHPVKPLAQIAGNRYASSPVGKALSDACMGTIASFLSKYQDIIIEHQKVVKGNQKRLESLRELAGKENLEYPSVTLPPQPHTKEGVDAYNEVIARVRMWVNLNLWQKLKLSRDDAKPLLRLKGFPSFPLVERQANEVDWWDMVCNVKKLINEKKEDGKVFWQNLAGYKRQEALRPYLSSEEDRKKGKKFARYQLGDLLLHLEKKHGEDWGKVYDEAWERIDKKVEGLSKHIKLEEERRSEDAQSKAALTDWLRAKASFVIEGLKEADKDEFCRCELKLQKWYGDLRGKPFAIEAENSILDISGFSKQYNCAFIWQKDGVKKLNLYLIINYFKGGKLRFKKIKPEAFEANRFYTVINKKSGEIVPMEVNFNFDDPNLIILPLAFGKRQGREFIWNDLLSLETGSLKLANGRVIEKTLYNRRTRQDEPALFVALTFERREVLDSSNIKPMNLIGVDRGENIPAVIALTDPEGCPLSRFKDSLGNPTHILRIGESYKEKQRTIQAKKEVEQRRAGGYSRKYASKAKNLADDMVRNTARDLLYYAVTQDAMLIFENLSRGFGRQGKRTFMAERQYTRMEDWLTAKLAYEGLPSKTYLSKTLAQYTSKTCSNCGFTITSADYDRVLEKLKKTATGWMTTINGKELKVEGQITYYNRYKRQNVVKDLSVELDRLSEESVNNDISSWTKGRSGEALSLLKKRFSHRPVQEKFVCLNCGFETHADEQAALNIARSWLFLRSQEYKKYQTNKTTGNTDKRAFVETWQSFYRKKLKEVWKPAV

SEQ ID NO: 31726 - protein, 979 aa, synthetic construct
  REGION 1..979: note = engineered CasX variant
QEIGKRINKIRRRLVKDSNTKKAGKTGPMKTLLVRVMTPDLRERLENLRKKPENIPQPISNTSRANLNKLLTDYTEMKKAILHVYWEEFQVDPVGLMSRVAQPASKKIDQNKLKPEMDEKGNLTTAGFACSQCGQPLFVYKLEQVSEKGKAYTNYFGRCNVAEHEKLILLAQLKPEKDSDEAVTYSLGKFGQRALDFYSIHVTKESTHPVKPLAQIAGNRYASTPVGKALSDACMGTIASFLSKYQDIIIEHQKVVKGNQKRLESLRELAGKENLEYPSVTLPPQPHTKEGVDAYNEVIARVRMWVNLNLWQKLKLSRDDAKPLLRLKGFPSFPLVERQANEVDWWDMVCNVKKLINEKKEDGKVFWQNLAGYKRQEALRPYLSSEEDRKKGKKFARYQLGDLLLHLEKKHGEDWGKVYDEAWERIDKKVEGLSKHIKLEEERRSEDAQSKAALTDWLRAKASFVIEGLKEADKDEFCRCELKLQKWYGDLRGKPFAIEAENSILDISGFSKQYNCAFIWQKDGVKKLNLYLIINYFKGGKLRFKKIKPEAFEANRFYTVINKKSGEIVPMEVNFNFDDPNLIILPLAFGKRQGREFIWNDLLSLETGSLKLANGRVIEKTLYNRRTRQDEPALFVALTFERREVLDSSNIKPMNLIGVDRGENIPAVIALTDPEGCPLSRFKDSLGNPTHILRIGESYKEKQRTIQAKKEVEQRRAGGYSRKYASKAKNLADDMVRNTARDLLYYAVTQDAMLIFENLSRGFGRQGKRTFMAERQYTRMEDWLTAKLAYEGLPSKTYLSKTLAQYTSKTCSNCGFTITSADYDRVLEKLKKTATGWMTTINGKELKVEGQITYYNRYKRQNVVKDLSVELDRLSEESVNNDISSWTKGRSGEALSLLKKRFSHRPVQEKFVCLNCGFETHADEQAALNIARSWLFLRSQEYKKYQTNKTTGNTDKRAFVETWQSFYRKKLKEVWKPAV

SEQ ID NO: 31727 - protein, 979 aa, synthetic construct
  REGION 1..979: note = engineered CasX variant
QEIGKRINKIRRRLVKDSNTKKAGKTGPMKTLLVRVMTPDLRERLENLRKKPENIPQPISNTSRANLNKLLTDYTEMKKAILHVYWEEFQVDPVGLMSRVAQPASKKIDQNKLKPEMDEKGNLTTAGFACSQCGQPLFVYKLEQVSEKGKAYTNYFGRCNVAEHEKLILLAQLKPEKDSDEAVTYSLGKFGQRALDFYSIHVTKESTHPVKPLAQIAGNRYASAPVGKALSDACMGTIASFLSKYQDIIIEHQKVVKGNQKRLESLRELAGKENLEYPSVTLPPQPHTKEGVDAYNEVIARVRMWVNLNLWQKLKLSRDDAKPLLRLKGFPSFPLVERQANEVDWWDMVCNVKKLINEKKEDGKVFWQNLAGYKRQEALRPYLSSEEDRKKGKKFARYQLGDLLLHLEKKHGEDWGKVYDEAWERIDKKVEGLSKHIKLEEERRSEDAQSKAALTDWLRAKASFVIEGLKEADKDEFCRCELKLQKWYGDLRGKPFAIEAENSILDISGFSKQYNCAFIWQKDGVKKLNLYLIINYFKGGKLRFKKIKPEAFEANRFYTVINKKSGEIVPMEVNFNFDDPNLIILPLAFGKRQGREFIWNDLLSLETGSLKLANGRVIEKTLYNRRTRQDEPALFVALTFERREVLDSSNIKPMNLIGVDRGENIPAVIALTDPEGCPLSRFKDSLGNPTHILRIGESYKEKQRTIQAKKEVEQRRAGGYSRKYASKAKNLADDMVRNTARDLLYYAVTQDAMLIFENLSRGFGRQGKRTFMAERQYTRMEDWLTAKLAYEGLPSKTYLSKTLAQYTSKTCSNCGFTITSADYDRVLEKLKKTATGWMTTINGKELKVEGQITYYNRYKRQNVVKDLSVELDRLSEESVNNDISSWTKGRSGEALSLLKKRFSHRPVQEKFVCLNCGFETHADEQAALNIARSWLFLRSQEYKKYQTNKTTGNTDKRAFVETWQSFYRKKLKEVWKPAV

SEQ ID NO: 31728 - protein, 979 aa, synthetic construct
  REGION 1..979: note = engineered CasX variant
QEIGKRINKIRRRLVKDSNTKKAGKTGPMKTLLVRVMTPDLRERLENLRKKPENIPQPISNTSRANLNKLLTDYTEMKKAILHVYWEEFQVDPVGLMSRVAQPASKKIDQNKLKPEMDEKGNLTTAGFACSQCGQPLFVYKLEQVSEKGKAYTNYFGRCNVAEHEKLILLAQLKPEKDSDEAVTYSLGKFGQRALDFYSIHVTKESTHPVKPLAQIAGNRYASVPVGKALSDACMGTIASFLSKYQDIIIEHQKVVKGNQKRLESLRELAGKENLEYPSVTLPPQPHTKEGVDAYNEVIARVRMWVNLNLWQKLKLSRDDAKPLLRLKGFPSFPLVERQANEVDWWDMVCNVKKLINEKKEDGKVFWQNLAGYKRQEALRPYLSSEEDRKKGKKFARYQLGDLLLHLEKKHGEDWGKVYDEAWERIDKKVEGLSKHIKLEEERRSEDAQSKAALTDWLRAKASFVIEGLKEADKDEFCRCELKLQKWYGDLRGKPFAIEAENSILDISGFSKQYNCAFIWQKDGVKKLNLYLIINYFKGGKLRFKKIKPEAFEANRFYTVINKKSGEIVPMEVNFNFDDPNLIILPLAFGKRQGREFIWNDLLSLETGSLKLANGRVIEKTLYNRRTRQDEPALFVALTFERREVLDSSNIKPMNLIGVDRGENIPAVIALTDPEGCPLSRFKDSLGNPTHILRIGESYKEKQRTIQAKKEVEQRRAGGYSRKYASKAKNLADDMVRNTARDLLYYAVTQDAMLIFENLSRGFGRQGKRTFMAERQYTRMEDWLTAKLAYEGLPSKTYLSKTLAQYTSKTCSNCGFTITSADYDRVLEKLKKTATGWMTTINGKELKVEGQITYYNRYKRQNVVKDLSVELDRLSEESVNNDISSWTKGRSGEALSLLKKRFSHRPVQEKFVCLNCGFETHADEQAALNIARSWLFLRSQEYKKYQTNKTTGNTDKRAFVETWQSFYRKKLKEVWKPAV

SEQ ID NO: 31729 - protein, 979 aa, synthetic construct
  REGION 1..979: note = engineered CasX variant
QEIGKRINKIRRRLVKDSNTKKAGKTGPMKTLLVRVMTPDLRERLENLRKKPENIPQPISNTSRANLNKLLTDYTEMKKAILHVYWEEFQVDPVGLMSRVAQPASKKIDQNKLKPEMDEKGNLTTAGFACSQCGQPLFVYKLEQVSEKGKAYTNYFGRCNVAEHEKLIKLAQLKPEKDSDEAVTYSLGKFGQRALDFYSIHVTKESTHPVKPLAQIAGNRYASGPVGKALSDACMGTIASFLSKYQDIIIEHQKVVKGNQKRLESLRELAGKENLEYPSVTLPPQPHTKEGVDAYNEVIARVRMWVNLNLWQKLKLSRDDAKPLLRLKGFPSFPLVERQANEVDWWDMVCNVKKLINEKKEDGKVFWQNLAGYKRQEALRPYLSSEEDRKKGKKFARYQLGDLLLHLEKKHGEDWGKVYDEAWERIDKKVEGLSKHIKLEEERRSEDAQSKAALTDWLRAKASFVIEGLKEADKDEFCRCELKLQKWYGDLRGKPFAIEAENSILDISGFSKQYNCAFIWQKDGVKKLNLYLIINYFKGGKLRFKKIKPEAFEANRFYTVINKKSGEIVPMEVNFNFDDPNLIILPLAFGKRQGREFIWNDLLSLETGSLKLANGRVIEKTLYNRRTRQDEPALFVALTFERREVLDSSNIKPMNLIGVDRGENIPAVIALTDPEGCPLSRFKDSLGNPTHILRIGESYKEKQRTIQAKKEVEQRRAGGYSRKYASKAKNLADDMVRNTARDLLYYAVTQDAMLIFENLSRGFGRQGKRTFMAERQYTRMEDWLTAKLAYEGLPSKTYLSKTLAQYTSKTCSNCGFTITSADYDRVLEKLKKTATGWMTTINGKELKVEGQITYYNRYKRQNVVKDLSVELDRLSEESVNNDISSWTKGRSGEALSLLKKRFSHRPVQEKFVCLNCGFETHADEQAALNIARSWLFLRSQEYKKYQTNKTTGNTDKRAFVETWQSFYRKKLKEVWKPAV

SEQ ID NO: 31730 - protein, 978 aa, synthetic construct
  REGION 1..978: note = engineered CasX variant
QEIGKRINKIRRRLVKDSNTKKAGKTGPMKTLLVRVMTPDLRERLENLRKKPENIPQPISNTSRANLNKLLTDYTEMKKAILHVYWEEFQVDPVGLMSRVAQPASKKIDQNKLKPEMDEKGNLTTAGFACSQCGQPLFVYKLEQVSEKGKAYTNYFGRCNVAEHEKLILLAQLKPEKDSDEAVTYSLGKFGQRALDFYSIHVTKESTHPVKPLAQIAGNRYASPVGKALSDACMGTIASFLSKYQDIIIEHQKVVKGNQKRLESLRELAGKENLEYPSVTLPPQPHTKEGVDAYNEVIARVRMWVNLNLWQKLKLSRDDAKPLLRLKGFPSFPLVERQANEVDWWDMVCNVKKLINEKKEDGKVFWQNLAGYKRQEALRPYLSSEEDRKKGKKFARYQLGDLLLHLEKKHGEDWGKVYDEAWERIDKKVEGLSKHIKLEEERRSEDAQSKAALTDWLRAKASFVIEGLKEADKDEFCRCELKLQKWYGDLRGKPFAIEAENSILDISGFSKQYNCAFIWQKDGVKKLNLYLIINYFKGGKLRFKKIKPEAFEANRFYTVINKKSGEIVPMEVNFNFDDPNLIILPLAFGKRQGREFIWNDLLSLETGSLKLANGRVIEKTLYNRRTRQDEPALFVALTFERREVLDSSNIKPMNLIGVDRGENIPAVIALTDPEGCPLSRFKDSLGNPTHILRIGESYKEKQRTIQAKKEVEQRRAGGYSRKYASKAKNLADDMVRNTARDLLYYAVTQDAMLIFENLSRGFGRQGKRTFMAERQYTRMEDWLTAKLAYEGLPSKTYLSKTLAQYTSKTCSNCGFTITSADYDRVLEKLKKTATGWMTTINGKELKVEGQITYYNRYKRQNVVKDLSVELDRLSEESVNNDISSWTKGRSGEALSLLKKRFSHRPVQEKFVCLNCGFETHADEQAALNIARSWLFLRSQEYKKYQTNKTTGNTDKRAFVETWQSFYRKKLKEVWKPAV

SEQ ID NO: 31731 - protein, 979 aa, synthetic construct
  REGION 1..979: note = engineered CasX variant
QEIGKRLNKIRRRLVKDSNTKKAGKTGPMKTLLVRVMTPDLRERLENLRKKPENIPQPISNTSRANLNKLLTDYTEMKKAILHVYWEEFQKDPVGLMSRVAQPASKKIDQNKLKPEMDEKGNLTTAGFACSQCGQPLFVYKLEQVSEKGKAYTNYFGRCNVAEHEKLILLAQLKPEKDSDEAVTYSLGKFGQRALDFYSIHVTKESTHPVKPLAQIAGNRYASYPVGKALSDACMGTIASFLSKYQDIIIEHQKVVKGNQKRLESLRELAGKENLEYPSVTLPPQPHTKEGVDAYNEVIARVRMWVNLNLWQKLKLSRDDAKPLLRLKGFPSFPLVERQANEVDWWDMVCNVKKLINEKKEDGKVFWQNLAGYKRQEALRPYLSSEEDRKKGKKFARYQLGDLLLHLEKKHGEDWGKVYDEAWERIDKKVEGLSKHIKLEEERRSEDAQSKAALTDWLRAKASFVIEGLKEADKDEFCRCELKLQKWYGDLRGKPFAIEAENSILDISGFSKQYNCAFIWQKDGVKKLNLYLIINYFKGGKLRFKKIKPEAFEANRFYTVINKKSGEIVPMEVNFNFDDPNLIILPLAFGKRQGREFIWNDLLSLETGSLKLANGRVIEKTLYNRRTRQDEPALFVALTFERREVLDSSNIKPMNLIGVDRGENIPAVIALTDPEGCPLSRFKDSLGNPTHILRIGESYKEKQRTIQAKKEVEQRRAGGYSRKYASKAKNLADDMVRNTARDLLYYAVTQDAMLIFENLSRGFGRQGKRTFMAERQYTRMEDWLTAKLAYEGLPSKTYLSKTLAQYTSKTCSNCGFTITSADYDRVLEKLKKTATGWMTTINGKELKVEGQITYYNRYKRQNVVKDLSVELDRLSEESVNNDISSWTKGRSGEALSLLKKRFSHRPVQEKFVCLNCGFETHADEQAALNIARSWLFLRSQEYKKYQTNKTTGNTDKRAFVETWQSFYRKKLKEVWKPAV

SEQ ID NO: 31732 - protein, 979 aa, synthetic construct
  REGION 1..979: note = engineered CasX variant
QEIGKRLNKIRRRLVKDSNTKKAGKTGPMKTLLVRVMTPDLRERLENLRKKPENIPQPISNTSRANLNKLLTDYTEMKKAILHVYWEEFQKDPVGLMSRVAQPASKKIDQNKLKPEMDEKGNLTTAGFACSQCGQPLFVYKLEQVSEKGKAYTNYFGRCNVAEHEKLILLAQLKPEKDSDEAVTYSLGKFGQRALDFYSIHVTKESTHPVKPLAQIAGNRYASHPVGKALSDACMGTIASFLSKYQDIIIEHQKVVKGNQKRLESLRELAGKENLEYPSVTLPPQPHTKEGVDAYNEVIARVRMWVNLNLWQKLKLSRDDAKPLLRLKGFPSFPLVERQANEVDWWDMVCNVKKLINEKKEDGKVFWQNLAGYKRQEALRPYLSSEEDRKKGKKFARYQLGDLLLHLEKKHGEDWGKVYDEAWERIDKKVEGLSKHIKLEEERRSEDAQSKAALTDWLRAKASFVIEGLKEADKDEFCRCELKLQKWYGDLRGKPFAIEAENSILDISGFSKQYNCAFIWQKDGVKKLNLYLIINYFKGGKLRFKKIKPEAFEANRFYTVINKKSGEIVPMEVNFNFDDPNLIILPLAFGKRQGREFIWNDLLSLETGSLKLANGRVIEKTLYNRRTRQDEPALFVALTFERREVLDSSNIKPMNLIGVDRGENIPAVIALTDPEGCPLSRFKDSLGNPTHILRIGESYKEKQRTIQAKKEVEQRRAGGYSRKYASKAKNLADDMVRNTARDLLYYAVTQDAMLIFENLSRGFGRQGKRTFMAERQYTRMEDWLTAKLAYEGLPSKTYLSKTLAQYTSKTCSNCGFTITSADYDRVLEKLKKTATGWMTTINGKELKVEGQITYYNRYKRQNVVKDLSVELDRLSEESVNNDISSWTKGRSGEALSLLKKRFSHRPVQEKFVCLNCGFETHADEQAALNIARSWLFLRSQEYKKYQTNKTTGNTDKRAFVETWQSFYRKKLKEVWKPAV

SEQ ID NO: 31733 - protein, 979 aa, synthetic construct
  REGION 1..979: note = engineered CasX variant
QEIGKRLNKIRRRLVKDSNTKKAGKTGPMKTLLVRVMTPDLRERLENLRKKPENIPQPISNTSRANLNKLLTDYTEMKKAILHVYWEEFQKDPVGLMSRVAQPASKKIDQNKLKPEMDEKGNLTTAGFACSQCGQPLFVYKLEQVSEKGKAYTNYFGRCNVAEHEKLILLAQLKPEKDSDEAVTYSLGKFGQRALDFYSIHVTKESTHPVKPLAQIAGNRYASSPVGKALSDACMGTIASFLSKYQDIIIEHQKVVKGNQKRLESLRELAGKENLEYPSVTLPPQPHTKEGVDAYNEVIARVRMWVNLNLWQKLKLSRDDAKPLLRLKGFPSFPLVERQANEVDWWDMVCNVKKLINEKKEDGKVFWQNLAGYKRQEALRPYLSSEEDRKKGKKFARYQLGDLLLHLEKKHGEDWGKVYDEAWERIDKKVEGLSKHIKLEEERRSEDAQSKAALTDWLRAKASFVIEGLKEADKDEFCRCELKLQKWYGDLRGKPFAIEAENSILDISGFSKQYNCAFIWQKDGVKKLNLYLIINYFKGGKLRFKKIKPEAFEANRFYTVINKKSGEIVPMEVNFNFDDPNLIILPLAFGKRQGREFIWNDLLSLETGSLKLANGRVIEKTLYNRRTRQDEPALFVALTFERREVLDSSNIKPMNLIGVDRGENIPAVIALTDPEGCPLSRFKDSLGNPTHILRIGESYKEKQRTIQAKKEVEQRRAGGYSRKYASKAKNLADDMVRNTARDLLYYAVTQDAMLIFENLSRGFGRQGKRTFMAERQYTRMEDWLTAKLAYEGLPSKTYLSKTLAQYTSKTCSNCGFTITSADYDRVLEKLKKTATGWMTTINGKELKVEGQITYYNRYKRQNVVKDLSVELDRLSEESVNNDISSWTKGRSGEALSLLKKRFSHRPVQEKFVCLNCGFETHADEQAALNIARSWLFLRSQEYKKYQTNKTTGNTDKRAFVETWQSFYRKKLKEVWKPAV

SEQ ID NO: 31734 - protein, 979 aa, synthetic construct
  REGION 1..979: note = engineered CasX variant
QEIGKRLNKIRRRLVKDSNTKKAGKTGPMKTLLVRVMTPDLRERLENLRKKPENIPQPISNTSRANLNKLLTDYTEMKKAILHVYWEEFQKDPVGLMSRVAQPASKKIDQNKLKPEMDEKGNLTTAGFACSQCGQPLFVYKLEQVSEKGKAYTNYFGRCNVAEHEKLILLAQLKPEKDSDEAVTYSLGKFGQRALDFYSIHVTKESTHPVKPLAQIAGNRYASTPVGKALSDACMGTIASFLSKYQDIIIEHQKVVKGNQKRLESLRELAGKENLEYPSVTLPPQPHTKEGVDAYNEVIARVRMWVNLNLWQKLKLSRDDAKPLLRLKGFPSFPLVERQANEVDWWDMVCNVKKLINEKKEDGKVFWQNLAGYKRQEALRPYLSSEEDRKKGKKFARYQLGDLLLHLEKKHGEDWGKVYDEAWERIDKKVEGLSKHIKLEEERRSEDAQSKAALTDWLRAKASFVIEGLKEADKDEFCRCELKLQKWYGDLRGKPFAIEAENSILDISGFSKQYNCAFIWQKDGVKKLNLYLIINYFKGGKLRFKKIKPEAFEANRFYTVINKKSGEIVPMEVNFNFDDPNLIILPLAFGKRQGREFIWNDLLSLETGSLKLANGRVIEKTLYNRRTRQDEPALFVALTFERREVLDSSNIKPMNLIGVDRGENIPAVIALTDPEGCPLSRFKDSLGNPTHILRIGESYKEKQRTIQAKKEVEQRRAGGYSRKYASKAKNLADDMVRNTARDLLYYAVTQDAMLIFENLSRGFGRQGKRTFMAERQYTRMEDWLTAKLAYEGLPSKTYLSKTLAQYTSKTCSNCGFTITSADYDRVLEKLKKTATGWMTTINGKELKVEGQITYYNRYKRQNVVKDLSVELDRLSEESVNNDISSWTKGRSGEALSLLKKRFSHRPVQEKFVCLNCGFETHADEQAALNIARSWLFLRSQEYKKYQTNKTTGNTDKRAFVETWQSFYRKKLKEVWKPAV

SEQ ID NO: 31735 - protein, 979 aa, synthetic construct
  REGION 1..979: note = engineered CasX variant
QEIGKRLNKIRRRLVKDSNTKKAGKTGPMKTLLVRVMTPDLRERLENLRKKPENIPQPISNTSRANLNKLLTDYTEMKKAILHVYWEEFQKDPVGLMSRVAQPASKKIDQNKLKPEMDEKGNLTTAGFACSQCGQPLFVYKLEQVSEKGKAYTNYFGRCNVAEHEKLILLAQLKPEKDSDEAVTYSLGKFGQRALDFYSIHVTKESTHPVKPLAQIAGNRYASAPVGKALSDACMGTIASFLSKYQDIIIEHQKVVKGNQKRLESLRELAGKENLEYPSVTLPPQPHTKEGVDAYNEVIARVRMWVNLNLWQKLKLSRDDAKPLLRLKGFPSFPLVERQANEVDWWDMVCNVKKLINEKKEDGKVFWQNLAGYKRQEALRPYLSSEEDRKKGKKFARYQLGDLLLHLEKKHGEDWGKVYDEAWERIDKKVEGLSKHIKLEEERRSEDAQSKAALTDWLRAKASFVIEGLKEADKDEFCRCELKLQKWYGDLRGKPFAIEAENSILDISGFSKQYNCAFIWQKDGVKKLNLYLIINYFKGGKLRFKKIKPEAFEANRFYTVINKKSGEIVPMEVNFNFDDPNLIILPLAFGKRQGREFIWNDLLSLETGSLKLANGRVIEKTLYNRRTRQDEPALFVALTFERREVLDSSNIKPMNLIGVDRGENIPAVIALTDPEGCPLSRFKDSLGNPTHILRIGESYKEKQRTIQAKKEVEQRRAGGYSRKYASKAKNLADDMVRNTARDLLYYAVTQDAMLIFENLSRGFGRQGKRTFMAERQYTRMEDWLTAKLAYEGLPSKTYLSKTLAQYTSKTCSNCGFTITSADYDRVLEKLKKTATGWMTTINGKELKVEGQITYYNRYKRQNVVKDLSVELDRLSEESVNNDISSWTKGRSGEALSLLKKRFSHRPVQEKFVCLNCGFETHADEQAALNIARSWLFLRSQEYKKYQTNKTTGNTDKRAFVETWQSFYRKKLKEVWKPAV

SEQ ID NO: 31736 - protein, 979 aa, synthetic construct
  REGION 1..979: note = engineered CasX variant
QEIGKRLNKIRRRLVKDSNTKKAGKTGPMKTLLVRVMTPDLRERLENLRKKPENIPQPISNTSRANLNKLLTDYTEMKKAILHVYWEEFQKDPVGLMSRVAQPASKKIDQNKLKPEMDEKGNLTTAGFACSQCGQPLFVYKLEQVSEKGKAYTNYFGRCNVAEHEKLILLAQLKPEKDSDEAVTYSLGKFGQRALDFYSIHVTKESTHPVKPLAQIAGNRYASVPVGKALSDACMGTIASFLSKYQDIIIEHQKVVKGNQKRLESLRELAGKENLEYPSVTLPPQPHTKEGVDAYNEVIARVRMWVNLNLWQKLKLSRDDAKPLLRLKGFPSFPLVERQANEVDWWDMVCNVKKLINEKKEDGKVFWQNLAGYKRQEALRPYLSSEEDRKKGKKFARYQLGDLLLHLEKKHGEDWGKVYDEAWERIDKKVEGLSKHIKLEEERRSEDAQSKAALTDWLRAKASFVIEGLKEADKDEFCRCELKLQKWYGDLRGKPFAIEAENSILDISGFSKQYNCAFIWQKDGVKKLNLYLIINYFKGGKLRFKKIKPEAFEANRFYTVINKKSGEIVPMEVNFNFDDPNLIILPLAFGKRQGREFIWNDLLSLETGSLKLANGRVIEKTLYNRRTRQDEPALFVALTFERREVLDSSNIKPMNLIGVDRGENIPAVIALTDPEGCPLSRFKDSLGNPTHILRIGESYKEKQRTIQAKKEVEQRRAGGYSRKYASKAKNLADDMVRNTARDLLYYAVTQDAMLIFENLSRGFGRQGKRTFMAERQYTRMEDWLTAKLAYEGLPSKTYLSKTLAQYTSKTCSNCGFTITSADYDRVLEKLKKTATGWMTTINGKELKVEGQITYYNRYKRQNVVKDLSVELDRLSEESVNNDISSWTKGRSGEALSLLKKRFSHRPVQEKFVCLNCGFETHADEQAALNIARSWLFLRSQEYKKYQTNKTTGNTDKRAFVETWQSFYRKKLKEVWKPAV

SEQ ID NO: 31737 - protein, 979 aa, synthetic construct
  REGION 1..979: note = engineered CasX variant
QEIGKRLNKIRRRLVKDSNTKKAGKTGPMKTLLVRVMTPDLRERLENLRKKPENIPQPISNTSRANLNKLLTDYTEMKKAILHVYWEEFQKDPVGLMSRVAQPASKKIDQNKLKPEMDEKGNLTTAGFACSQCGQPLFVYKLEQVSEKGKAYTNYFGRCNVAEHEKLIKLAQLKPEKDSDEAVTYSLGKFGQRALDFYSIHVTKESTHPVKPLAQIAGNRYASGPVGKALSDACMGTIASFLSKYQDIIIEHQKVVKGNQKRLESLRELAGKENLEYPSVTLPPQPHTKEGVDAYNEVIARVRMWVNLNLWQKLKLSRDDAKPLLRLKGFPSFPLVERQANEVDWWDMVCNVKKLINEKKEDGKVFWQNLAGYKRQEALRPYLSSEEDRKKGKKFARYQLGDLLLHLEKKHGEDWGKVYDEAWERIDKKVEGLSKHIKLEEERRSEDAQSKAALTDWLRAKASFVIEGLKEADKDEFCRCELKLQKWYGDLRGKPFAIEAENSILDISGFSKQYNCAFIWQKDGVKKLNLYLIINYFKGGKLRFKKIKPEAFEANRFYTVINKKSGEIVPMEVNFNFDDPNLIILPLAFGKRQGREFIWNDLLSLETGSLKLANGRVIEKTLYNRRTRQDEPALFVALTFERREVLDSSNIKPMNLIGVDRGENIPAVIALTDPEGCPLSRFKDSLGNPTHILRIGESYKEKQRTIQAKKEVEQRRAGGYSRKYASKAKNLADDMVRNTARDLLYYAVTQDAMLIFENLSRGFGRQGKRTFMAERQYTRMEDWLTAKLAYEGLPSKTYLSKTLAQYTSKTCSNCGFTITSADYDRVLEKLKKTATGWMTTINGKELKVEGQITYYNRYKRQNVVKDLSVELDRLSEESVNNDISSWTKGRSGEALSLLKKRFSHRPVQEKFVCLNCGFETHADEQAALNIARSWLFLRSQEYKKYQTNKTTGNTDKRAFVETWQSFYRKKLKEVWKPAV

SEQ ID NO: 31738 - protein, 978 aa, synthetic construct
  REGION 1..978: note = engineered CasX variant
QEIGKRLNKIRRRLVKDSNTKKAGKTGPMKTLLVRVMTPDLRERLENLRKKPENIPQPISNTSRANLNKLLTDYTEMKKAILHVYWEEFQKDPVGLMSRVAQPASKKIDQNKLKPEMDEKGNLTTAGFACSQCGQPLFVYKLEQVSEKGKAYTNYFGRCNVAEHEKLILLAQLKPEKDSDEAVTYSLGKFGQRALDFYSIHVTKESTHPVKPLAQIAGNRYASPVGKALSDACMGTIASFLSKYQDIIIEHQKVVKGNQKRLESLRELAGKENLEYPSVTLPPQPHTKEGVDAYNEVIARVRMWVNLNLWQKLKLSRDDAKPLLRLKGFPSFPLVERQANEVDWWDMVCNVKKLINEKKEDGKVFWQNLAGYKRQEALRPYLSSEEDRKKGKKFARYQLGDLLLHLEKKHGEDWGKVYDEAWERIDKKVEGLSKHIKLEEERRSEDAQSKAALTDWLRAKASFVIEGLKEADKDEFCRCELKLQKWYGDLRGKPFAIEAENSILDISGFSKQYNCAFIWQKDGVKKLNLYLIINYFKGGKLRFKKIKPEAFEANRFYTVINKKSGEIVPMEVNFNFDDPNLIILPLAFGKRQGREFIWNDLLSLETGSLKLANGRVIEKTLYNRRTRQDEPALFVALTFERREVLDSSNIKPMNLIGVDRGENIPAVIALTDPEGCPLSRFKDSLGNPTHILRIGESYKEKQRTIQAKKEVEQRRAGGYSRKYASKAKNLADDMVRNTARDLLYYAVTQDAMLIFENLSRGFGRQGKRTFMAERQYTRMEDWLTAKLAYEGLPSKTYLSKTLAQYTSKTCSNCGFTITSADYDRVLEKLKKTATGWMTTINGKELKVEGQITYYNRYKRQNVVKDLSVELDRLSEESVNNDISSWTKGRSGEALSLLKKRFSHRPVQEKFVCLNCGFETHADEQAALNIARSWLFLRSQEYKKYQTNKTTGNTDKRAFVETWQSFYRKKLKEVWKPAV

SEQ ID NO: 31739 - protein, 979 aa, synthetic construct
  REGION 1..979: note = engineered CasX variant
QEIGKRINKIRRRLVKDSNTKKAGKTGPMKTLLVRVMTPDLRERLENLRKKPENIPQPISNTSRANLNKLLTDYTEMKKAILHVYWEEFQKDPVGLMSRVAQPASKKIDQNKLKPEMDEKGNLTTAGFACSQCGQPLFVYKLEQVSEKGKAYTNYVGRCNVAEHEKLILLAQLKPEKDSDEAVTYSLGKFGQRALDFYSIHVTKESTHPVKPLAQIAGNRYASYPVGKALSDACMGTIASFLSKYQDIIIEHQKVVKGNQKRLESLRELAGKENLEYPSVTLPPQPHTKEGVDAYNEVIARVRMWVNLNLWQKLKLSRDDAKPLLRLKGFPSFPLVERQANEVDWWDMVCNVKKLINEKKEDGKVFWQNLAGYKRQEALRPYLSSEEDRKKGKKFARYQLGDLLLHLEKKHGEDWGKVYDEAWERIDKKVEGLSKHIKLEEERRSEDAQSKAALTDWLRAKASFVIEGLKEADKDEFCRCELKLQKWYGDLRGKPFAIEAENSILDISGFSKQYNCAFIWQKDGVKKLNLYLIINYFKGGKLRFKKIKPEAFEANRFYTVINKKSGEIVPMEVNFNFDDPNLIILPLAFGKRQGREFIWNDLLSLETGSLKLANGRVIEKTLYNRRTRQDEPALFVALTFERREVLDSSNIKPMNLIGVDRGENIPAVIALTDPEGCPLSRFKDSLGNPTHILRIGESYKEKQRTIQAKKEVEQRRAGGYSRKYASKAKNLADDMVRNTARDLLYYAVTQDAMLIFENLSRGFGRQGKRTFMAERQYTRMEDWLTAKLAYEGLPSKTYLSKTLAQYTSKTCSNCGFTITSADYDRVLEKLKKTATGWMTTINGKELKVEGQITYYNRYKRQNVVKDLSVELDRLSEESVNNDISSWTKGRSGEALSLLKKRFSHRPVQEKFVCLNCGFETHADEQAALNIARSWLFLRSQEYKKYQTNKTTGNTDKRAFVETWQSFYRKKLKEVWKPAV

SEQ ID NO: 31740 - protein, 979 aa, synthetic construct
  REGION 1..979: note = engineered CasX variant
QEIGKRINKIRRRLVKDSNTKKAGKTGPMKTLLVRVMTPDLRERLENLRKKPENIPQPISNTSRANLNKLLTDYTEMKKAILHVYWEEFQKDPVGLMSRVAQPASKKIDQNKLKPEMDEKGNLTTAGFACSQCGQPLFVYKLEQVSEKGKAYTNYVGRCNVAEHEKLILLAQLKPEKDSDEAVTYSLGKFGQRALDFYSIHVTKESTHPVKPLAQIAGNRYASHPVGKALSDACMGTIASFLSKYQDIIIEHQKVVKGNQKRLESLRELAGKENLEYPSVTLPPQPHTKEGVDAYNEVIARVRMWVNLNLWQKLKLSRDDAKPLLRLKGFPSFPLVERQANEVDWWDMVCNVKKLINEKKEDGKVFWQNLAGYKRQEALRPYLSSEEDRKKGKKFARYQLGDLLLHLEKKHGEDWGKVYDEAWERIDKKVEGLSKHIKLEEERRSEDAQSKAALTDWLRAKASFVIEGLKEADKDEFCRCELKLQKWYGDLRGKPFAIEAENSILDISGFSKQYNCAFIWQKDGVKKLNLYLIINYFKGGKLRFKKIKPEAFEANRFYTVINKKSGEIVPMEVNFNFDDPNLIILPLAFGKRQGREFIWNDLLSLETGSLKLANGRVIEKTLYNRRTRQDEPALFVALTFERREVLDSSNIKPMNLIGVDRGENIPAVIALTDPEGCPLSRFKDSLGNPTHILRIGESYKEKQRTIQAKKEVEQRRAGGYSRKYASKAKNLADDMVRNTARDLLYYAVTQDAMLIFENLSRGFGRQGKRTFMAERQYTRMEDWLTAKLAYEGLPSKTYLSKTLAQYTSKTCSNCGFTITSADYDRVLEKLKKTATGWMTTINGKELKVEGQITYYNRYKRQNVVKDLSVELDRLSEESVNNDISSWTKGRSGEALSLLKKRFSHRPVQEKFVCLNCGFETHADEQAALNIARSWLFLRSQEYKKYQTNKTTGNTDKRAFVETWQSFYRKKLKEVWKPAV

SEQ ID NO: 31741 - protein, 979 aa, synthetic construct
  REGION 1..979: note = engineered CasX variant
QEIGKRINKIRRRLVKDSNTKKAGKTGPMKTLLVRVMTPDLRERLENLRKKPENIPQPISNTSRANLNKLLTDYTEMKKAILHVYWEEFQKDPVGLMSRVAQPASKKIDQNKLKPEMDEKGNLTTAGFACSQCGQPLFVYKLEQVSEKGKAYTNYVGRCNVAEHEKLILLAQLKPEKDSDEAVTYSLGKFGQRALDFYSIHVTKESTHPVKPLAQIAGNRYASSPVGKALSDACMGTIASFLSKYQDIIIEHQKVVKGNQKRLESLRELAGKENLEYPSVTLPPQPHTKEGVDAYNEVIARVRMWVNLNLWQKLKLSRDDAKPLLRLKGFPSFPLVERQANEVDWWDMVCNVKKLINEKKEDGKVFWQNLAGYKRQEALRPYLSSEEDRKKGKKFARYQLGDLLLHLEKKHGEDWGKVYDEAWERIDKKVEGLSKHIKLEEERRSEDAQSKAALTDWLRAKASFVIEGLKEADKDEFCRCELKLQKWYGDLRGKPFAIEAENSILDISGFSKQYNCAFIWQKDGVKKLNLYLIINYFKGGKLRFKKIKPEAFEANRFYTVINKKSGEIVPMEVNFNFDDPNLIILPLAFGKRQGREFIWNDLLSLETGSLKLANGRVIEKTLYNRRTRQDEPALFVALTFERREVLDSSNIKPMNLIGVDRGENIPAVIALTDPEGCPLSRFKDSLGNPTHILRIGESYKEKQRTIQAKKEVEQRRAGGYSRKYASKAKNLADDMVRNTARDLLYYAVTQDAMLIFENLSRGFGRQGKRTFMAERQYTRMEDWLTAKLAYEGLPSKTYLSKTLAQYTSKTCSNCGFTITSADYDRVLEKLKKTATGWMTTINGKELKVEGQITYYNRYKRQNVVKDLSVELDRLSEESVNNDISSWTKGRSGEALSLLKKRFSHRPVQEKFVCLNCGFETHADEQAALNIARSWLFLRSQEYKKYQTNKTTGNTDKRAFVETWQSFYRKKLKEVWKPAV

SEQ ID NO: 31742 - protein, 979 aa, synthetic construct
  REGION 1..979: note = engineered CasX variant
QEIGKRINKIRRRLVKDSNTKKAGKTGPMKTLLVRVMTPDLRERLENLRKKPENIPQPISNTSRANLNKLLTDYTEMKKAILHVYWEEFQKDPVGLMSRVAQPASKKIDQNKLKPEMDEKGNLTTAGFACSQCGQPLFVYKLEQVSEKGKAYTNYVGRCNVAEHEKLILLAQLKPEKDSDEAVTYSLGKFGQRALDFYSIHVTKESTHPVKPLAQIAGNRYASTPVGKALSDACMGTIASFLSKYQDIIIEHQKVVKGNQKRLESLRELAGKENLEYPSVTLPPQPHTKEGVDAYNEVIARVRMWVNLNLWQKLKLSRDDAKPLLRLKGFPSFPLVERQANEVDWWDMVCNVKKLINEKKEDGKVFWQNLAGYKRQEALRPYLSSEEDRKKGKKFARYQLGDLLLHLEKKHGEDWGKVYDEAWERIDKKVEGLSKHIKLEEERRSEDAQSKAALTDWLRAKASFVIEGLKEADKDEFCRCELKLQKWYGDLRGKPFAIEAENSILDISGFSKQYNCAFIWQKDGVKKLNLYLIINYFKGGKLRFKKIKPEAFEANRFYTVINKKSGEIVPMEVNFNFDDPNLIILPLAFGKRQGREFIWNDLLSLETGSLKLANGRVIEKTLYNRRTRQDEPALFVALTFERREVLDSSNIKPMNLIGVDRGENIPAVIALTDPEGCPLSRFKDSLGNPTHILRIGESYKEKQRTIQAKKEVEQRRAGGYSRKYASKAKNLADDMVRNTARDLLYYAVTQDAMLIFENLSRGFGRQGKRTFMAERQYTRMEDWLTAKLAYEGLPSKTYLSKTLAQYTSKTCSNCGFTITSADYDRVLEKLKKTATGWMTTINGKELKVEGQITYYNRYKRQNVVKDLSVELDRLSEESVNNDISSWTKGRSGEALSLLKKRFSHRPVQEKFVCLNCGFETHADEQAALNIARSWLFLRSQEYKKYQTNKTTGNTDKRAFVETWQSFYRKKLKEVWKPAV

SEQ ID NO: 31743 - protein, 979 aa, synthetic construct
  REGION 1..979: note = engineered CasX variant
QEIGKRINKIRRRLVKDSNTKKAGKTGPMKTLLVRVMTPDLRERLENLRKKPENIPQPISNTSRANLNKLLTDYTEMKKAILHVYWEEFQKDPVGLMSRVAQPASKKIDQNKLKPEMDEKGNLTTAGFACSQCGQPLFVYKLEQVSEKGKAYTNYVGRCNVAEHEKLILLAQLKPEKDSDEAVTYSLGKFGQRALDFYSIHVTKESTHPVKPLAQIAGNRYASAPVGKALSDACMGTIASFLSKYQDIIIEHQKVVKGNQKRLESLRELAGKENLEYPSVTLPPQPHTKEGVDAYNEVIARVRMWVNLNLWQKLKLSRDDAKPLLRLKGFPSFPLVERQANEVDWWDMVCNVKKLINEKKEDGKVFWQNLAGYKRQEALRPYLSSEEDRKKGKKFARYQLGDLLLHLEKKHGEDWGKVYDEAWERIDKKVEGLSKHIKLEEERRSEDAQSKAALTDWLRAKASFVIEGLKEADKDEFCRCELKLQKWYGDLRGKPFAIEAENSILDISGFSKQYNCAFIWQKDGVKKLNLYLIINYFKGGKLRFKKIKPEAFEANRFYTVINKKSGEIVPMEVNFNFDDPNLIILPLAFGKRQGREFIWNDLLSLETGSLKLANGRVIEKTLYNRRTRQDEPALFVALTFERREVLDSSNIKPMNLIGVDRGENIPAVIALTDPEGCPLSRFKDSLGNPTHILRIGESYKEKQRTIQAKKEVEQRRAGGYSRKYASKAKNLADDMVRNTARDLLYYAVTQDAMLIFENLSRGFGRQGKRTFMAERQYTRMEDWLTAKLAYEGLPSKTYLSKTLAQYTSKTCSNCGFTITSADYDRVLEKLKKTATGWMTTINGKELKVEGQITYYNRYKRQNVVKDLSVELDRLSEESVNNDISSWTKGRSGEALSLLKKRFSHRPVQEKFVCLNCGFETHADEQAALNIARSWLFLRSQEYKKYQTNKTTGNTDKRAFVETWQSFYRKKLKEVWKPAV

SEQ ID NO: 31744 - protein, 979 aa, synthetic construct
  REGION 1..979: note = engineered CasX variant
QEIGKRINKIRRRLVKDSNTKKAGKTGPMKTLLVRVMTPDLRERLENLRKKPENIPQPISNTSRANLNKLLTDYTEMKKAILHVYWEEFQKDPVGLMSRVAQPASKKIDQNKLKPEMDEKGNLTTAGFACSQCGQPLFVYKLEQVSEKGKAYTNYVGRCNVAEHEKLILLAQLKPEKDSDEAVTYSLGKFGQRALDFYSIHVTKESTHPVKPLAQIAGNRYASVPVGKALSDACMGTIASFLSKYQDIIIEHQKVVKGNQKRLESLRELAGKENLEYPSVTLPPQPHTKEGVDAYNEVIARVRMWVNLNLWQKLKLSRDDAKPLLRLKGFPSFPLVERQANEVDWWDMVCNVKKLINEKKEDGKVFWQNLAGYKRQEALRPYLSSEEDRKKGKKFARYQLGDLLLHLEKKHGEDWGKVYDEAWERIDKKVEGLSKHIKLEEERRSEDAQSKAALTDWLRAKASFVIEGLKEADKDEFCRCELKLQKWYGDLRGKPFAIEAENSILDISGFSKQYNCAFIWQKDGVKKLNLYLIINYFKGGKLRFKKIKPEAFEANRFYTVINKKSGEIVPMEVNFNFDDPNLIILPLAFGKRQGREFIWNDLLSLETGSLKLANGRVIEKTLYNRRTRQDEPALFVALTFERREVLDSSNIKPMNLIGVDRGENIPAVIALTDPEGCPLSRFKDSLGNPTHILRIGESYKEKQRTIQAKKEVEQRRAGGYSRKYASKAKNLADDMVRNTARDLLYYAVTQDAMLIFENLSRGFGRQGKRTFMAERQYTRMEDWLTAKLAYEGLPSKTYLSKTLAQYTSKTCSNCGFTITSADYDRVLEKLKKTATGWMTTINGKELKVEGQITYYNRYKRQNVVKDLSVELDRLSEESVNNDISSWTKGRSGEALSLLKKRFSHRPVQEKFVCLNCGFETHADEQAALNIARSWLFLRSQEYKKYQTNKTTGNTDKRAFVETWQSFYRKKLKEVWKPAV

SEQ ID NO: 31745 - protein, 979 aa, synthetic construct
  REGION 1..979: note = engineered CasX variant
QEIGKRINKIRRRLVKDSNTKKAGKTGPMKTLLVRVMTPDLRERLENLRKKPENIPQPISNTSRANLNKLLTDYTEMKKAILHVYWEEFQKDPVGLMSRVAQPASKKIDQNKLKPEMDEKGNLTTAGFACSQCGQPLFVYKLEQVSEKGKAYTNYVGRCNVAEHEKLIKLAQLKPEKDSDEAVTYSLGKFGQRALDFYSIHVTKESTHPVKPLAQIAGNRYASGPVGKALSDACMGTIASFLSKYQDIIIEHQKVVKGNQKRLESLRELAGKENLEYPSVTLPPQPHTKEGVDAYNEVIARVRMWVNLNLWQKLKLSRDDAKPLLRLKGFPSFPLVERQANEVDWWDMVCNVKKLINEKKEDGKVFWQNLAGYKRQEALRPYLSSEEDRKKGKKFARYQLGDLLLHLEKKHGEDWGKVYDEAWERIDKKVEGLSKHIKLEEERRSEDAQSKAALTDWLRAKASFVIEGLKEADKDEFCRCELKLQKWYGDLRGKPFAIEAENSILDISGFSKQYNCAFIWQKDGVKKLNLYLIINYFKGGKLRFKKIKPEAFEANRFYTVINKKSGEIVPMEVNFNFDDPNLIILPLAFGKRQGREFIWNDLLSLETGSLKLANGRVIEKTLYNRRTRQDEPALFVALTFERREVLDSSNIKPMNLIGVDRGENIPAVIALTDPEGCPLSRFKDSLGNPTHILRIGESYKEKQRTIQAKKEVEQRRAGGYSRKYASKAKNLADDMVRNTARDLLYYAVTQDAMLIFENLSRGFGRQGKRTFMAERQYTRMEDWLTAKLAYEGLPSKTYLSKTLAQYTSKTCSNCGFTITSADYDRVLEKLKKTATGWMTTINGKELKVEGQITYYNRYKRQNVVKDLSVELDRLSEESVNNDISSWTKGRSGEALSLLKKRFSHRPVQEKFVCLNCGFETHADEQAALNIARSWLFLRSQEYKKYQTNKTTGNTDKRAFVETWQSFYRKKLKEVWKPAV

SEQ ID NO: 31746 - protein, 978 aa, synthetic construct
  REGION 1..978: note = engineered CasX variant
QEIGKRINKIRRRLVKDSNTKKAGKTGPMKTLLVRVMTPDLRERLENLRKKPENIPQPISNTSRANLNKLLTDYTEMKKAILHVYWEEFQKDPVGLMSRVAQPASKKIDQNKLKPEMDEKGNLTTAGFACSQCGQPLFVYKLEQVSEKGKAYTNYVGRCNVAEHEKLILLAQLKPEKDSDEAVTYSLGKFGQRALDFYSIHVTKESTHPVKPLAQIAGNRYASPVGKALSDACMGTIASFLSKYQDIIIEHQKVVKGNQKRLESLRELAGKENLEYPSVTLPPQPHTKEGVDAYNEVIARVRMWVNLNLWQKLKLSRDDAKPLLRLKGFPSFPLVERQANEVDWWDMVCNVKKLINEKKEDGKVFWQNLAGYKRQEALRPYLSSEEDRKKGKKFARYQLGDLLLHLEKKHGEDWGKVYDEAWERIDKKVEGLSKHIKLEEERRSEDAQSKAALTDWLRAKASFVIEGLKEADKDEFCRCELKLQKWYGDLRGKPFAIEAENSILDISGFSKQYNCAFIWQKDGVKKLNLYLIINYFKGGKLRFKKIKPEAFEANRFYTVINKKSGEIVPMEVNFNFDDPNLIILPLAFGKRQGREFIWNDLLSLETGSLKLANGRVIEKTLYNRRTRQDEPALFVALTFERREVLDSSNIKPMNLIGVDRGENIPAVIALTDPEGCPLSRFKDSLGNPTHILRIGESYKEKQRTIQAKKEVEQRRAGGYSRKYASKAKNLADDMVRNTARDLLYYAVTQDAMLIFENLSRGFGRQGKRTFMAERQYTRMEDWLTAKLAYEGLPSKTYLSKTLAQYTSKTCSNCGFTITSADYDRVLEKLKKTATGWMTTINGKELKVEGQITYYNRYKRQNVVKDLSVELDRLSEESVNNDISSWTKGRSGEALSLLKKRFSHRPVQEKFVCLNCGFETHADEQAALNIARSWLFLRSQEYKKYQTNKTTGNTDKRAFVETWQSFYRKKLKEVWKPAV

SEQ ID NO: 31747 - protein, 979 aa, synthetic construct
  REGION 1..979: note = engineered CasX variant
QEIGKRINKIRRRLVKDSNTKKAGKTGPMKTLLVRVMTPDLRERLENLRKKPENIPQPISNTSRANLNKLLTDYTEMKKAILHVYWEEFQKDPVGLMSRVAQPASKKIDQNKLKPEMDEKGNLTTAGFACSQCGQPLFVYKLEQVSEKGKAYTNYFGRCNVAEHEKLILLAQLKPEKDSDEAVTYSLGKFGQRALDFYSIHVTKESTHPVKPLAQIAGNRYASYPVGKALSDACMGTIASFLSKYQDIIIEHQKVVKGNQKRLESLRELAGKENLEYPSVTLPPQPHTKEGVDAYNEVIARVRMWVNLNLWQKLKLSRDDAKPLLRLKGFPSFPLVERQANEVDWWDMVCNVKKLINEKKEDGKVFWQNLAGYKRQEALRPYLSSEEDRKKGKKFARYQLGDLLLHLEKKHGEDWGKVYDEAWERIDKKVEGLSKHIKLEEERRSEDAQSKAALTDWLRAKASFVIEGLKEADKDEFCRCELKLQKWYGDLRGKPFAIEAENSILDISGFSKQYNCAFIWQKDGVKKLNLYLIINYFKGGKLRFKKIKPEAFEANRFYTVINKKSGEIVPMEVNFNFDDPNLIILPLAFGKRQGREFIWNDLLSLETGSLKLANGRVIEKTLYNRRTRQDEPALFVALTFERREVLDSSNIKPMNLIGVDRGENIPAVIALTDPEGCPLSRFKDSLGNPTHILRIGESYKEKQRTIQAKKEVEQRRAGGYSRKYASKAKNLADDMVRNTARDLLYYAVTQDAMLIFENLSRGFGRQGKRTFMAERQYTRMEDWLTAKLAYEGLASKTYLSKTLAQYTSKTCSNCGFTITSADYDRVLEKLKKTATGWMTTINGKELKVEGQITYYNRYKRQNVVKDLSVELDRLSEESVNNDISSWTKGRSGEALSLLKKRFSHRPVQEKFVCLNCGFETHADEQAALNIARSWLFLRSQEYKKYQTNKTTGNTDKRAFVETWQSFYRKKLKEVWKPAV

SEQ ID NO: 31748 - protein, 979 aa, synthetic construct
  REGION 1..979: note = engineered CasX variant
QEIGKRINKIRRRLVKDSNTKKAGKTGPMKTLLVRVMTPDLRERLENLRKKPENIPQPISNTSRANLNKLLTDYTEMKKAILHVYWEEFQKDPVGLMSRVAQPASKKIDQNKLKPEMDEKGNLTTAGFACSQCGQPLFVYKLEQVSEKGKAYTNYFGRCNVAEHEKLILLAQLKPEKDSDEAVTYSLGKFGQRALDFYSIHVTKESTHPVKPLAQIAGNRYASHPVGKALSDACMGTIASFLSKYQDIIIEHQKVVKGNQKRLESLRELAGKENLEYPSVTLPPQPHTKEGVDAYNEVIARVRMWVNLNLWQKLKLSRDDAKPLLRLKGFPSFPLVERQANEVDWWDMVCNVKKLINEKKEDGKVFWQNLAGYKRQEALRPYLSSEEDRKKGKKFARYQLGDLLLHLEKKHGEDWGKVYDEAWERIDKKVEGLSKHIKLEEERRSEDAQSKAALTDWLRAKASFVIEGLKEADKDEFCRCELKLQKWYGDLRGKPFAIEAENSILDISGFSKQYNCAFIWQKDGVKKLNLYLIINYFKGGKLRFKKIKPEAFEANRFYTVINKKSGEIVPMEVNFNFDDPNLIILPLAFGKRQGREFIWNDLLSLETGSLKLANGRVIEKTLYNRRTRQDEPALFVALTFERREVLDSSNIKPMNLIGVDRGENIPAVIALTDPEGCPLSRFKDSLGNPTHILRIGESYKEKQRTIQAKKEVEQRRAGGYSRKYASKAKNLADDMVRNTARDLLYYAVTQDAMLIFENLSRGFGRQGKRTFMAERQYTRMEDWLTAKLAYEGLASKTYLSKTLAQYTSKTCSNCGFTITSADYDRVLEKLKKTATGWMTTINGKELKVEGQITYYNRYKRQNVVKDLSVELDRLSEESVNNDISSWTKGRSGEALSLLKKRFSHRPVQEKFVCLNCGFETHADEQAALNIARSWLFLRSQEYKKYQTNKTTGNTDKRAFVETWQSFYRKKLKEVWKPAV

SEQ ID NO: 31749 - protein, 979 aa, synthetic construct
  REGION 1..979: note = engineered CasX variant
QEIGKRINKIRRRLVKDSNTKKAGKTGPMKTLLVRVMTPDLRERLENLRKKPENIPQPISNTSRANLNKLLTDYTEMKKAILHVYWEEFQKDPVGLMSRVAQPASKKIDQNKLKPEMDEKGNLTTAGFACSQCGQPLFVYKLEQVSEKGKAYTNYFGRCNVAEHEKLILLAQLKPEKDSDEAVTYSLGKFGQRALDFYSIHVTKESTHPVKPLAQIAGNRYASSPVGKALSDACMGTIASFLSKYQDIIIEHQKVVKGNQKRLESLRELAGKENLEYPSVTLPPQPHTKEGVDAYNEVIARVRMWVNLNLWQKLKLSRDDAKPLLRLKGFPSFPLVERQANEVDWWDMVCNVKKLINEKKEDGKVFWQNLAGYKRQEALRPYLSSEEDRKKGKKFARYQLGDLLLHLEKKHGEDWGKVYDEAWERIDKKVEGLSKHIKLEEERRSEDAQSKAALTDWLRAKASFVIEGLKEADKDEFCRCELKLQKWYGDLRGKPFAIEAENSILDISGFSKQYNCAFIWQKDGVKKLNLYLIINYFKGGKLRFKKIKPEAFEANRFYTVINKKSGEIVPMEVNFNFDDPNLIILPLAFGKRQGREFIWNDLLSLETGSLKLANGRVIEKTLYNRRTRQDEPALFVALTFERREVLDSSNIKPMNLIGVDRGENIPAVIALTDPEGCPLSRFKDSLGNPTHILRIGESYKEKQRTIQAKKEVEQRRAGGYSRKYASKAKNLADDMVRNTARDLLYYAVTQDAMLIFENLSRGFGRQGKRTFMAERQYTRMEDWLTAKLAYEGLASKTYLSKTLAQYTSKTCSNCGFTITSADYDRVLEKLKKTATGWMTTINGKELKVEGQITYYNRYKRQNVVKDLSVELDRLSEESVNNDISSWTKGRSGEALSLLKKRFSHRPVQEKFVCLNCGFETHADEQAALNIARSWLFLRSQEYKKYQTNKTTGNTDKRAFVETWQSFYRKKLKEVWKPAV

SEQ ID NO: 31750 - protein, 979 aa, synthetic construct
  REGION 1..979: note = engineered CasX variant
QEIGKRINKIRRRLVKDSNTKKAGKTGPMKTLLVRVMTPDLRERLENLRKKPENIPQPISNTSRANLNKLLTDYTEMKKAILHVYWEEFQKDPVGLMSRVAQPASKKIDQNKLKPEMDEKGNLTTAGFACSQCGQPLFVYKLEQVSEKGKAYTNYFGRCNVAEHEKLILLAQLKPEKDSDEAVTYSLGKFGQRALDFYSIHVTKESTHPVKPLAQIAGNRYASTPVGKALSDACMGTIASFLSKYQDIIIEHQKVVKGNQKRLESLRELAGKENLEYPSVTLPPQPHTKEGVDAYNEVIARVRMWVNLNLWQKLKLSRDDAKPLLRLKGFPSFPLVERQANEVDWWDMVCNVKKLINEKKEDGKVFWQNLAGYKRQEALRPYLSSEEDRKKGKKFARYQLGDLLLHLEKKHGEDWGKVYDEAWERIDKKVEGLSKHIKLEEERRSEDAQSKAALTDWLRAKASFVIEGLKEADKDEFCRCELKLQKWYGDLRGKPFAIEAENSILDISGFSKQYNCAFIWQKDGVKKLNLYLIINYFKGGKLRFKKIKPEAFEANRFYTVINKKSGEIVPMEVNFNFDDPNLIILPLAFGKRQGREFIWNDLLSLETGSLKLANGRVIEKTLYNRRTRQDEPALFVALTFERREVLDSSNIKPMNLIGVDRGENIPAVIALTDPEGCPLSRFKDSLGNPTHILRIGESYKEKQRTIQAKKEVEQRRAGGYSRKYASKAKNLADDMVRNTARDLLYYAVTQDAMLIFENLSRGFGRQGKRTFMAERQYTRMEDWLTAKLAYEGLASKTYLSKTLAQYTSKTCSNCGFTITSADYDRVLEKLKKTATGWMTTINGKELKVEGQITYYNRYKRQNVVKDLSVELDRLSEESVNNDISSWTKGRSGEALSLLKKRFSHRPVQEKFVCLNCGFETHADEQAALNIARSWLFLRSQEYKKYQTNKTTGNTDKRAFVETWQSFYRKKLKEVWKPAV

SEQ ID NO: 31751 - protein, 979 aa, synthetic construct
  REGION 1..979: note = engineered CasX variant
QEIGKRINKIRRRLVKDSNTKKAGKTGPMKTLLVRVMTPDLRERLENLRKKPENIPQPISNTSRANLNKLLTDYTEMKKAILHVYWEEFQKDPVGLMSRVAQPASKKIDQNKLKPEMDEKGNLTTAGFACSQCGQPLFVYKLEQVSEKGKAYTNYFGRCNVAEHEKLILLAQLKPEKDSDEAVTYSLGKFGQRALDFYSIHVTKESTHPVKPLAQIAGNRYASAPVGKALSDACMGTIASFLSKYQDIIIEHQKVVKGNQKRLESLRELAGKENLEYPSVTLPPQPHTKEGVDAYNEVIARVRMWVNLNLWQKLKLSRDDAKPLLRLKGFPSFPLVERQANEVDWWDMVCNVKKLINEKKEDGKVFWQNLAGYKRQEALRPYLSSEEDRKKGKKFARYQLGDLLLHLEKKHGEDWGKVYDEAWERIDKKVEGLSKHIKLEEERRSEDAQSKAALTDWLRAKASFVIEGLKEADKDEFCRCELKLQKWYGDLRGKPFAIEAENSILDISGFSKQYNCAFIWQKDGVKKLNLYLIINYFKGGKLRFKKIKPEAFEANRFYTVINKKSGEIVPMEVNFNFDDPNLIILPLAFGKRQGREFIWNDLLSLETGSLKLANGRVIEKTLYNRRTRQDEPALFVALTFERREVLDSSNIKPMNLIGVDRGENIPAVIALTDPEGCPLSRFKDSLGNPTHILRIGESYKEKQRTIQAKKEVEQRRAGGYSRKYASKAKNLADDMVRNTARDLLYYAVTQDAMLIFENLSRGFGRQGKRTFMAERQYTRMEDWLTAKLAYEGLASKTYLSKTLAQYTSKTCSNCGFTITSADYDRVLEKLKKTATGWMTTINGKELKVEGQITYYNRYKRQNVVKDLSVELDRLSEESVNNDISSWTKGRSGEALSLLKKRFSHRPVQEKFVCLNCGFETHADEQAALNIARSWLFLRSQEYKKYQTNKTTGNTDKRAFVETWQSFYRKKLKEVWKPAV

SEQ ID NO: 31752 - protein, 979 aa, synthetic construct
  REGION 1..979: note = engineered CasX variant
QEIGKRINKIRRRLVKDSNTKKAGKTGPMKTLLVRVMTPDLRERLENLRKKPENIPQPISNTSRANLNKLLTDYTEMKKAILHVYWEEFQKDPVGLMSRVAQPASKKIDQNKLKPEMDEKGNLTTAGFACSQCGQPLFVYKLEQVSEKGKAYTNYFGRCNVAEHEKLILLAQLKPEKDSDEAVTYSLGKFGQRALDFYSIHVTKESTHPVKPLAQIAGNRYASVPVGKALSDACMGTIASFLSKYQDIIIEHQKVVKGNQKRLESLRELAGKENLEYPSVTLPPQPHTKEGVDAYNEVIARVRMWVNLNLWQKLKLSRDDAKPLLRLKGFPSFPLVERQANEVDWWDMVCNVKKLINEKKEDGKVFWQNLAGYKRQEALRPYLSSEEDRKKGKKFARYQLGDLLLHLEKKHGEDWGKVYDEAWERIDKKVEGLSKHIKLEEERRSEDAQSKAALTDWLRAKASFVIEGLKEADKDEFCRCELKLQKWYGDLRGKPFAIEAENSILDISGFSKQYNCAFIWQKDGVKKLNLYLIINYFKGGKLRFKKIKPEAFEANRFYTVINKKSGEIVPMEVNFNFDDPNLIILPLAFGKRQGREFIWNDLLSLETGSLKLANGRVIEKTLYNRRTRQDEPALFVALTFERREVLDSSNIKPMNLIGVDRGENIPAVIALTDPEGCPLSRFKDSLGNPTHILRIGESYKEKQRTIQAKKEVEQRRAGGYSRKYASKAKNLADDMVRNTARDLLYYAVTQDAMLIFENLSRGFGRQGKRTFMAERQYTRMEDWLTAKLAYEGLASKTYLSKTLAQYTSKTCSNCGFTITSADYDRVLEKLKKTATGWMTTINGKELKVEGQITYYNRYKRQNVVKDLSVELDRLSEESVNNDISSWTKGRSGEALSLLKKRFSHRPVQEKFVCLNCGFETHADEQAALNIARSWLFLRSQEYKKYQTNKTTGNTDKRAFVETWQSFYRKKLKEVWKPAV

SEQ ID NO: 31753 - protein, 979 aa, synthetic construct
  REGION 1..979: note = engineered CasX variant
QEIGKRINKIRRRLVKDSNTKKAGKTGPMKTLLVRVMTPDLRERLENLRKKPENIPQPISNTSRANLNKLLTDYTEMKKAILHVYWEEFQKDPVGLMSRVAQPASKKIDQNKLKPEMDEKGNLTTAGFACSQCGQPLFVYKLEQVSEKGKAYTNYFGRCNVAEHEKLIKLAQLKPEKDSDEAVTYSLGKFGQRALDFYSIHVTKESTHPVKPLAQIAGNRYASGPVGKALSDACMGTIASFLSKYQDIIIEHQKVVKGNQKRLESLRELAGKENLEYPSVTLPPQPHTKEGVDAYNEVIARVRMWVNLNLWQKLKLSRDDAKPLLRLKGFPSFPLVERQANEVDWWDMVCNVKKLINEKKEDGKVFWQNLAGYKRQEALRPYLSSEEDRKKGKKFARYQLGDLLLHLEKKHGEDWGKVYDEAWERIDKKVEGLSKHIKLEEERRSEDAQSKAALTDWLRAKASFVIEGLKEADKDEFCRCELKLQKWYGDLRGKPFAIEAENSILDISGFSKQYNCAFIWQKDGVKKLNLYLIINYFKGGKLRFKKIKPEAFEANRFYTVINKKSGEIVPMEVNFNFDDPNLIILPLAFGKRQGREFIWNDLLSLETGSLKLANGRVIEKTLYNRRTRQDEPALFVALTFERREVLDSSNIKPMNLIGVDRGENIPAVIALTDPEGCPLSRFKDSLGNPTHILRIGESYKEKQRTIQAKKEVEQRRAGGYSRKYASKAKNLADDMVRNTARDLLYYAVTQDAMLIFENLSRGFGRQGKRTFMAERQYTRMEDWLTAKLAYEGLASKTYLSKTLAQYTSKTCSNCGFTITSADYDRVLEKLKKTATGWMTTINGKELKVEGQITYYNRYKRQNVVKDLSVELDRLSEESVNNDISSWTKGRSGEALSLLKKRFSHRPVQEKFVCLNCGFETHADEQAALNIARSWLFLRSQEYKKYQTNKTTGNTDKRAFVETWQSFYRKKLKEVWKPAV

SEQ ID NO: 31754 - protein, 978 aa, synthetic construct
  REGION 1..978: note = engineered CasX variant
QEIGKRINKIRRRLVKDSNTKKAGKTGPMKTLLVRVMTPDLRERLENLRKKPENIPQPISNTSRANLNKLLTDYTEMKKAILHVYWEEFQKDPVGLMSRVAQPASKKIDQNKLKPEMDEKGNLTTAGFACSQCGQPLFVYKLEQVSEKGKAYTNYFGRCNVAEHEKLILLAQLKPEKDSDEAVTYSLGKFGQRALDFYSIHVTKESTHPVKPLAQIAGNRYASPVGKALSDACMGTIASFLSKYQDIIIEHQKVVKGNQKRLESLRELAGKENLEYPSVTLPPQPHTKEGVDAYNEVIARVRMWVNLNLWQKLKLSRDDAKPLLRLKGFPSFPLVERQANEVDWWDMVCNVKKLINEKKEDGKVFWQNLAGYKRQEALRPYLSSEEDRKKGKKFARYQLGDLLLHLEKKHGEDWGKVYDEAWERIDKKVEGLSKHIKLEEERRSEDAQSKAALTDWLRAKASFVIEGLKEADKDEFCRCELKLQKWYGDLRGKPFAIEAENSILDISGFSKQYNCAFIWQKDGVKKLNLYLIINYFKGGKLRFKKIKPEAFEANRFYTVINKKSGEIVPMEVNFNFDDPNLIILPLAFGKRQGREFIWNDLLSLETGSLKLANGRVIEKTLYNRRTRQDEPALFVALTFERREVLDSSNIKPMNLIGVDRGENIPAVIALTDPEGCPLSRFKDSLGNPTHILRIGESYKEKQRTIQAKKEVEQRRAGGYSRKYASKAKNLADDMVRNTARDLLYYAVTQDAMLIFENLSRGFGRQGKRTFMAERQYTRMEDWLTAKLAYEGLASKTYLSKTLAQYTSKTCSNCGFTITSADYDRVLEKLKKTATGWMTTINGKELKVEGQITYYNRYKRQNVVKDLSVELDRLSEESVNNDISSWTKGRSGEALSLLKKRFSHRPVQEKFVCLNCGFETHADEQAALNIARSWLFLRSQEYKKYQTNKTTGNTDKRAFVETWQSFYRKKLKEVWKPAV

SEQ ID NO: 31755 - protein, 979 aa, synthetic construct
  REGION 1..979: note = engineered CasX variant
QEIGKRINKIRRRLVKDSNTKKAGKTGPMKTLLVRVMTPDLRERLENLRKKPENIPQPISNTSRANLNKLLTDYTEMKKAILHVYWEEFQKDPVGLMSRVAQPASKKIDQNKLKPEMDEKGNLTTAGFACSQCGQPLFVYKLEQVSEKGKAYTNYFGRCNVAEHEKLILLAQLKPEKDSDEAVTYSLGKFGQRALDFYSIHVTKESTHPVKPLAQIAGNRYASYPVGKALSDACMGTIASFLSKYQDIIIEHQKVVKGNQKRLESLRELAGKENLEYPSVTLPPQPHTKEGVDAYNEVIARVRMWVNLNLWQKLKLSRDDAKPLLRLKGFPSFPLVERQANEVDWWDMVCNVKKLINEKKEDGKVFWQNLAGYKRQEALRPYLSSEEDRKKGKKFARYQLGDLLLHLEKKHGEDWGKVYDEAWERIDKKVEGLSKHIKLEEERRSEDAQSKAALTDWLRAKASFVIEGLKEADKDEFCRCELKLQKWYGDLRGKPFAIEAENSILDISGFSKQYNCAFIWQKDGVKKLNLYLIINYFKGGKLRFKKIKPEAFEANRFYTVINKKSGEIVPMEVNFNFDDPNLIILPLAFGKRQGREFIWNDLLSLETGSLKLANGRVIEKTLYNRRTRQDEPALFVALTFERREVLDSSNIKPMNLIGVDRGENIPAVIALTDPEGCPLSRFKDSLGNPTHILRIGESYKEKQRTIQAKKEVEQRRAGGYSRKYASKAKNLADDMVRNTARDLLYYAVTQDAMLIFENLSRGFGRQGKRTFMAERQYTRMEDWLTAKLAYEGLPSKVYLSKTLAQYTSKTCSNCGFTITSADYDRVLEKLKKTATGWMTTINGKELKVEGQITYYNRYKRQNVVKDLSVELDRLSEESVNNDISSWTKGRSGEALSLLKKRFSHRPVQEKFVCLNCGFETHADEQAALNIARSWLFLRSQEYKKYQTNKTTGNTDKRAFVETWQSFYRKKLKEVWKPAV

SEQ ID NO: 31756 - protein, 979 aa, synthetic construct
  REGION 1..979: note = engineered CasX variant
QEIGKRINKIRRRLVKDSNTKKAGKTGPMKTLLVRVMTPDLRERLENLRKKPENIPQPISNTSRANLNKLLTDYTEMKKAILHVYWEEFQKDPVGLMSRVAQPASKKIDQNKLKPEMDEKGNLTTAGFACSQCGQPLFVYKLEQVSEKGKAYTNYFGRCNVAEHEKLILLAQLKPEKDSDEAVTYSLGKFGQRALDFYSIHVTKESTHPVKPLAQIAGNRYASHPVGKALSDACMGTIASFLSKYQDIIIEHQKVVKGNQKRLESLRELAGKENLEYPSVTLPPQPHTKEGVDAYNEVIARVRMWVNLNLWQKLKLSRDDAKPLLRLKGFPSFPLVERQANEVDWWDMVCNVKKLINEKKEDGKVFWQNLAGYKRQEALRPYLSSEEDRKKGKKFARYQLGDLLLHLEKKHGEDWGKVYDEAWERIDKKVEGLSKHIKLEEERRSEDAQSKAALTDWLRAKASFVIEGLKEADKDEFCRCELKLQKWYGDLRGKPFAIEAENSILDISGFSKQYNCAFIWQKDGVKKLNLYLIINYFKGGKLRFKKIKPEAFEANRFYTVINKKSGEIVPMEVNFNFDDPNLIILPLAFGKRQGREFIWNDLLSLETGSLKLANGRVIEKTLYNRRTRQDEPALFVALTFERREVLDSSNIKPMNLIGVDRGENIPAVIALTDPEGCPLSRFKDSLGNPTHILRIGESYKEKQRTIQAKKEVEQRRAGGYSRKYASKAKNLADDMVRNTARDLLYYAVTQDAMLIFENLSRGFGRQGKRTFMAERQYTRMEDWLTAKLAYEGLPSKVYLSKTLAQYTSKTCSNCGFTITSADYDRVLEKLKKTATGWMTTINGKELKVEGQITYYNRYKRQNVVKDLSVELDRLSEESVNNDISSWTKGRSGEALSLLKKRFSHRPVQEKFVCLNCGFETHADEQAALNIARSWLFLRSQEYKKYQTNKTTGNTDKRAFVETWQSFYRKKLKEVWKPAV

SEQ ID NO: 31757 - protein, 979 aa, synthetic construct
  REGION 1..979: note = engineered CasX variant
QEIGKRINKIRRRLVKDSNTKKAGKTGPMKTLLVRVMTPDLRERLENLRKKPENIPQPISNTSRANLNKLLTDYTEMKKAILHVYWEEFQKDPVGLMSRVAQPASKKIDQNKLKPEMDEKGNLTTAGFACSQCGQPLFVYKLEQVSEKGKAYTNYFGRCNVAEHEKLILLAQLKPEKDSDEAVTYSLGKFGQRALDFYSIHVTKESTHPVKPLAQIAGNRYASSPVGKALSDACMGTIASFLSKYQDIIIEHQKVVKGNQKRLESLRELAGKENLEYPSVTLPPQPHTKEGVDAYNEVIARVRMWVNLNLWQKLKLSRDDAKPLLRLKGFPSFPLVERQANEVDWWDMVCNVKKLINEKKEDGKVFWQNLAGYKRQEALRPYLSSEEDRKKGKKFARYQLGDLLLHLEKKHGEDWGKVYDEAWERIDKKVEGLSKHIKLEEERRSEDAQSKAALTDWLRAKASFVIEGLKEADKDEFCRCELKLQKWYGDLRGKPFAIEAENSILDISGFSKQYNCAFIWQKDGVKKLNLYLIINYFKGGKLRFKKIKPEAFEANRFYTVINKKSGEIVPMEVNFNFDDPNLIILPLAFGKRQGREFIWNDLLSLETGSLKLANGRVIEKTLYNRRTRQDEPALFVALTFERREVLDSSNIKPMNLIGVDRGENIPAVIALTDPEGCPLSRFKDSLGNPTHILRIGESYKEKQRTIQAKKEVEQRRAGGYSRKYASKAKNLADDMVRNTARDLLYYAVTQDAMLIFENLSRGFGRQGKRTFMAERQYTRMEDWLTAKLAYEGLPSKVYLSKTLAQYTSKTCSNCGFTITSADYDRVLEKLKKTATGWMTTINGKELKVEGQITYYNRYKRQNVVKDLSVELDRLSEESVNNDISSWTKGRSGEALSLLKKRFSHRPVQEKFVCLNCGFETHADEQAALNIARSWLFLRSQEYKKYQTNKTTGNTDKRAFVETWQSFYRKKLKEVWKPAV

SEQ ID NO: 31758 - protein, 979 aa, synthetic construct
  REGION 1..979: note = engineered CasX variant
QEIGKRINKIRRRLVKDSNTKKAGKTGPMKTLLVRVMTPDLRERLENLRKKPENIPQPISNTSRANLNKLLTDYTEMKKAILHVYWEEFQKDPVGLMSRVAQPASKKIDQNKLKPEMDEKGNLTTAGFACSQCGQPLFVYKLEQVSEKGKAYTNYFGRCNVAEHEKLILLAQLKPEKDSDEAVTYSLGKFGQRALDFYSIHVTKESTHPVKPLAQIAGNRYASTPVGKALSDACMGTIASFLSKYQDIIIEHQKVVKGNQKRLESLRELAGKENLEYPSVTLPPQPHTKEGVDAYNEVIARVRMWVNLNLWQKLKLSRDDAKPLLRLKGFPSFPLVERQANEVDWWDMVCNVKKLINEKKEDGKVFWQNLAGYKRQEALRPYLSSEEDRKKGKKFARYQLGDLLLHLEKKHGEDWGKVYDEAWERIDKKVEGLSKHIKLEEERRSEDAQSKAALTDWLRAKASFVIEGLKEADKDEFCRCELKLQKWYGDLRGKPFAIEAENSILDISGFSKQYNCAFIWQKDGVKKLNLYLIINYFKGGKLRFKKIKPEAFEANRFYTVINKKSGEIVPMEVNFNFDDPNLIILPLAFGKRQGREFIWNDLLSLETGSLKLANGRVIEKTLYNRRTRQDEPALFVALTFERREVLDSSNIKPMNLIGVDRGENIPAVIALTDPEGCPLSRFKDSLGNPTHILRIGESYKEKQRTIQAKKEVEQRRAGGYSRKYASKAKNLADDMVRNTARDLLYYAVTQDAMLIFENLSRGFGRQGKRTFMAERQYTRMEDWLTAKLAYEGLPSKVYLSKTLAQYTSKTCSNCGFTITSADYDRVLEKLKKTATGWMTTINGKELKVEGQITYYNRYKRQNVVKDLSVELDRLSEESVNNDISSWTKGRSGEALSLLKKRFSHRPVQEKFVCLNCGFETHADEQAALNIARSWLFLRSQEYKKYQTNKTTGNTDKRAFVETWQSFYRKKLKEVWKPAV

SEQ ID NO: 31759 - protein, 979 aa, synthetic construct
  REGION 1..979: note = engineered CasX variant
QEIGKRINKIRRRLVKDSNTKKAGKTGPMKTLLVRVMTPDLRERLENLRKKPENIPQPISNTSRANLNKLLTDYTEMKKAILHVYWEEFQKDPVGLMSRVAQPASKKIDQNKLKPEMDEKGNLTTAGFACSQCGQPLFVYKLEQVSEKGKAYTNYFGRCNVAEHEKLILLAQLKPEKDSDEAVTYSLGKFGQRALDFYSIHVTKESTHPVKPLAQIAGNRYASAPVGKALSDACMGTIASFLSKYQDIIIEHQKVVKGNQKRLESLRELAGKENLEYPSVTLPPQPHTKEGVDAYNEVIARVRMWVNLNLWQKLKLSRDDAKPLLRLKGFPSFPLVERQANEVDWWDMVCNVKKLINEKKEDGKVFWQNLAGYKRQEALRPYLSSEEDRKKGKKFARYQLGDLLLHLEKKHGEDWGKVYDEAWERIDKKVEGLSKHIKLEEERRSEDAQSKAALTDWLRAKASFVIEGLKEADKDEFCRCELKLQKWYGDLRGKPFAIEAENSILDISGFSKQYNCAFIWQKDGVKKLNLYLIINYFKGGKLRFKKIKPEAFEANRFYTVINKKSGEIVPMEVNFNFDDPNLIILPLAFGKRQGREFIWNDLLSLETGSLKLANGRVIEKTLYNRRTRQDEPALFVALTFERREVLDSSNIKPMNLIGVDRGENIPAVIALTDPEGCPLSRFKDSLGNPTHILRIGESYKEKQRTIQAKKEVEQRRAGGYSRKYASKAKNLADDMVRNTARDLLYYAVTQDAMLIFENLSRGFGRQGKRTFMAERQYTRMEDWLTAKLAYEGLPSKVYLSKTLAQYTSKTCSNCGFTITSADYDRVLEKLKKTATGWMTTINGKELKVEGQITYYNRYKRQNVVKDLSVELDRLSEESVNNDISSWTKGRSGEALSLLKKRFSHRPVQEKFVCLNCGFETHADEQAALNIARSWLFLRSQEYKKYQTNKTTGNTDKRAFVETWQSFYRKKLKEVWKPAV

SEQ ID NO: 31760 - protein, 979 aa, synthetic construct
  REGION 1..979: note = engineered CasX variant
QEIGKRINKIRRRLVKDSNTKKAGKTGPMKTLLVRVMTPDLRERLENLRKKPENIPQPISNTSRANLNKLLTDYTEMKKAILHVYWEEFQKDPVGLMSRVAQPASKKIDQNKLKPEMDEKGNLTTAGFACSQCGQPLFVYKLEQVSEKGKAYTNYFGRCNVAEHEKLILLAQLKPEKDSDEAVTYSLGKFGQRALDFYSIHVTKESTHPVKPLAQIAGNRYASVPVGKALSDACMGTIASFLSKYQDIIIEHQKVVKGNQKRLESLRELAGKENLEYPSVTLPPQPHTKEGVDAYNEVIARVRMWVNLNLWQKLKLSRDDAKPLLRLKGFPSFPLVERQANEVDWWDMVCNVKKLINEKKEDGKVFWQNLAGYKRQEALRPYLSSEEDRKKGKKFARYQLGDLLLHLEKKHGEDWGKVYDEAWERIDKKVEGLSKHIKLEEERRSEDAQSKAALTDWLRAKASFVIEGLKEADKDEFCRCELKLQKWYGDLRGKPFAIEAENSILDISGFSKQYNCAFIWQKDGVKKLNLYLIINYFKGGKLRFKKIKPEAFEANRFYTVINKKSGEIVPMEVNFNFDDPNLIILPLAFGKRQGREFIWNDLLSLETGSLKLANGRVIEKTLYNRRTRQDEPALFVALTFERREVLDSSNIKPMNLIGVDRGENIPAVIALTDPEGCPLSRFKDSLGNPTHILRIGESYKEKQRTIQAKKEVEQRRAGGYSRKYASKAKNLADDMVRNTARDLLYYAVTQDAMLIFENLSRGFGRQGKRTFMAERQYTRMEDWLTAKLAYEGLPSKVYLSKTLAQYTSKTCSNCGFTITSADYDRVLEKLKKTATGWMTTINGKELKVEGQITYYNRYKRQNVVKDLSVELDRLSEESVNNDISSWTKGRSGEALSLLKKRFSHRPVQEKFVCLNCGFETHADEQAALNIARSWLFLRSQEYKKYQTNKTTGNTDKRAFVETWQSFYRKKLKEVWKPAV

SEQ ID NO: 31761 - protein, 979 aa, synthetic construct
  REGION 1..979: note = engineered CasX variant
QEIGKRINKIRRRLVKDSNTKKAGKTGPMKTLLVRVMTPDLRERLENLRKKPENIPQPISNTSRANLNKLLTDYTEMKKAILHVYWEEFQKDPVGLMSRVAQPASKKIDQNKLKPEMDEKGNLTTAGFACSQCGQPLFVYKLEQVSEKGKAYTNYFGRCNVAEHEKLIKLAQLKPEKDSDEAVTYSLGKFGQRALDFYSIHVTKESTHPVKPLAQIAGNRYASGPVGKALSDACMGTIASFLSKYQDIIIEHQKVVKGNQKRLESLRELAGKENLEYPSVTLPPQPHTKEGVDAYNEVIARVRMWVNLNLWQKLKLSRDDAKPLLRLKGFPSFPLVERQANEVDWWDMVCNVKKLINEKKEDGKVFWQNLAGYKRQEALRPYLSSEEDRKKGKKFARYQLGDLLLHLEKKHGEDWGKVYDEAWERIDKKVEGLSKHIKLEEERRSEDAQSKAALTDWLRAKASFVIEGLKEADKDEFCRCELKLQKWYGDLRGKPFAIEAENSILDISGFSKQYNCAFIWQKDGVKKLNLYLIINYFKGGKLRFKKIKPEAFEANRFYTVINKKSGEIVPMEVNFNFDDPNLIILPLAFGKRQGREFIWNDLLSLETGSLKLANGRVIEKTLYNRRTRQDEPALFVALTFERREVLDSSNIKPMNLIGVDRGENIPAVIALTDPEGCPLSRFKDSLGNPTHILRIGESYKEKQRTIQAKKEVEQRRAGGYSRKYASKAKNLADDMVRNTARDLLYYAVTQDAMLIFENLSRGFGRQGKRTFMAERQYTRMEDWLTAKLAYEGLPSKVYLSKTLAQYTSKTCSNCGFTITSADYDRVLEKLKKTATGWMTTINGKELKVEGQITYYNRYKRQNVVKDLSVELDRLSEESVNNDISSWTKGRSGEALSLLKKRFSHRPVQEKFVCLNCGFETHADEQAALNIARSWLFLRSQEYKKYQTNKTTGNTDKRAFVETWQSFYRKKLKEVWKPAV

SEQ ID NO: 31762 - protein, 978 aa, synthetic construct
  REGION 1..978: note = engineered CasX variant
QEIGKRINKIRRRLVKDSNTKKAGKTGPMKTLLVRVMTPDLRERLENLRKKPENIPQPISNTSRANLNKLLTDYTEMKKAILHVYWEEFQKDPVGLMSRVAQPASKKIDQNKLKPEMDEKGNLTTAGFACSQCGQPLFVYKLEQVSEKGKAYTNYFGRCNVAEHEKLILLAQLKPEKDSDEAVTYSLGKFGQRALDFYSIHVTKESTHPVKPLAQIAGNRYASPVGKALSDACMGTIASFLSKYQDIIIEHQKVVKGNQKRLESLRELAGKENLEYPSVTLPPQPHTKEGVDAYNEVIARVRMWVNLNLWQKLKLSRDDAKPLLRLKGFPSFPLVERQANEVDWWDMVCNVKKLINEKKEDGKVFWQNLAGYKRQEALRPYLSSEEDRKKGKKFARYQLGDLLLHLEKKHGEDWGKVYDEAWERIDKKVEGLSKHIKLEEERRSEDAQSKAALTDWLRAKASFVIEGLKEADKDEFCRCELKLQKWYGDLRGKPFAIEAENSILDISGFSKQYNCAFIWQKDGVKKLNLYLIINYFKGGKLRFKKIKPEAFEANRFYTVINKKSGEIVPMEVNFNFDDPNLIILPLAFGKRQGREFIWNDLLSLETGSLKLANGRVIEKTLYNRRTRQDEPALFVALTFERREVLDSSNIKPMNLIGVDRGENIPAVIALTDPEGCPLSRFKDSLGNPTHILRIGESYKEKQRTIQAKKEVEQRRAGGYSRKYASKAKNLADDMVRNTARDLLYYAVTQDAMLIFENLSRGFGRQGKRTFMAERQYTRMEDWLTAKLAYEGLPSKVYLSKTLAQYTSKTCSNCGFTITSADYDRVLEKLKKTATGWMTTINGKELKVEGQITYYNRYKRQNVVKDLSVELDRLSEESVNNDISSWTKGRSGEALSLLKKRFSHRPVQEKFVCLNCGFETHADEQAALNIARSWLFLRSQEYKKYQTNKTTGNTDKRAFVETWQSFYRKKLKEVWKPAV

SEQ ID NO: 31763 - protein, 980 aa, synthetic construct
  REGION 1..980: note = engineered CasX variant
QEIGKRINKIRRRLVKDSNTKKAGKTGPMKTLLVRVMTPDLRERLENLRKKPENIPQPISNTSRANLNKLLTDYTEMKKAILHVYWEEFQKDPVGLMSRVAQPASKKIDQNKLKPEMDEKGNLTTAGFACSQCGQPLFVYKLEQVSEKGKAYTNYFGRCNVAEHEKLILLAQLKPEKDSDEAVTYSLGKFGQRALDFYSIHVTKESTHPVKPLAQIAGNRYASYPVGKALSDACMGTIASFLSKYQDIIIEHQKVVKGNQKRLESLRELAGKENLEYPSVTLPPQPHTKEGVDAYNEVIARVRMWVNLNLWQKLKLSRDDAKPLLRLKGFPSFPLVERQANEVDWWDMVCNVKKLINEKKEDGKVFWQNLAGYKRQEALRPYLSSEEDRKKGKKFARYQLGDLLLHLEKKHGEDWGKVYDEAWERIDKKVEGLSKHIKLEEERRSEDAQSKAALTDWLRAKASFVIEGLKEADKDEFCRCELKLQKWYGDLRGKPFAIEAENSILDISGFSKQYNCAFIWQKDGVKKLNLYLIINYFKGGKLRFKKIKPEAFEANRFYTVINKKSGEIVPMEVNFNFDDPNLIILPLAFGKRQGREFIWNDLLSLETGSLKLANGRVIEKTLYNRRTRQDEPALFVALTFERREVLDSSNIKPMNLIGVDRGENIPAVIALTDPEGCPLSRFKDSLGNPTHILRIGESYKEKQRTIQAKKEVEQRRAGGYSRKYASKAKNLADDMVRNTARDLLYYAVTQDAMLIFENLSRGFGRQGKRTFMAERQYTRMEDWLTAKLAYEGPLPSKTYLSKTLAQYTSKTCSNCGFTITSADYDRVLEKLKKTATGWMTTINGKELKVEGQITYYNRYKRQNVVKDLSVELDRLSEESVNNDISSWTKGRSGEALSLLKKRFSHRPVQEKFVCLNCGFETHADEQAALNIARSWLFLRSQEYKKYQTNKTTGNTDKRAFVETWQSFYRKKLKEVWKPAV

SEQ ID NO: 31764 - protein, 980 aa, synthetic construct
  REGION 1..980: note = engineered CasX variant
QEIGKRINKIRRRLVKDSNTKKAGKTGPMKTLLVRVMTPDLRERLENLRKKPENIPQPISNTSRANLNKLLTDYTEMKKAILHVYWEEFQKDPVGLMSRVAQPASKKIDQNKLKPEMDEKGNLTTAGFACSQCGQPLFVYKLEQVSEKGKAYTNYFGRCNVAEHEKLILLAQLKPEKDSDEAVTYSLGKFGQRALDFYSIHVTKESTHPVKPLAQIAGNRYASHPVGKALSDACMGTIASFLSKYQDIIIEHQKVVKGNQKRLESLRELAGKENLEYPSVTLPPQPHTKEGVDAYNEVIARVRMWVNLNLWQKLKLSRDDAKPLLRLKGFPSFPLVERQANEVDWWDMVCNVKKLINEKKEDGKVFWQNLAGYKRQEALRPYLSSEEDRKKGKKFARYQLGDLLLHLEKKHGEDWGKVYDEAWERIDKKVEGLSKHIKLEEERRSEDAQSKAALTDWLRAKASFVIEGLKEADKDEFCRCELKLQKWYGDLRGKPFAIEAENSILDISGFSKQYNCAFIWQKDGVKKLNLYLIINYFKGGKLRFKKIKPEAFEANRFYTVINKKSGEIVPMEVNFNFDDPNLIILPLAFGKRQGREFIWNDLLSLETGSLKLANGRVIEKTLYNRRTRQDEPALFVALTFERREVLDSSNIKPMNLIGVDRGENIPAVIALTDPEGCPLSRFKDSLGNPTHILRIGESYKEKQRTIQAKKEVEQRRAGGYSRKYASKAKNLADDMVRNTARDLLYYAVTQDAMLIFENLSRGFGRQGKRTFMAERQYTRMEDWLTAKLAYEGPLPSKTYLSKTLAQYTSKTCSNCGFTITSADYDRVLEKLKKTATGWMTTINGKELKVEGQITYYNRYKRQNVVKDLSVELDRLSEESVNNDISSWTKGRSGEALSLLKKRFSHRPVQEKFVCLNCGFETHADEQAALNIARSWLFLRSQEYKKYQTNKTTGNTDKRAFVETWQSFYRKKLKEVWKPAV

SEQ ID NO: 31765 - protein, 980 aa, synthetic construct
  REGION 1..980: note = engineered CasX variant
QEIGKRINKIRRRLVKDSNTKKAGKTGPMKTLLVRVMTPDLRERLENLRKKPENIPQPISNTSRANLNKLLTDYTEMKKAILHVYWEEFQKDPVGLMSRVAQPASKKIDQNKLKPEMDEKGNLTTAGFACSQCGQPLFVYKLEQVSEKGKAYTNYFGRCNVAEHEKLILLAQLKPEKDSDEAVTYSLGKFGQRALDFYSIHVTKESTHPVKPLAQIAGNRYASSPVGKALSDACMGTIASFLSKYQDIIIEHQKVVKGNQKRLESLRELAGKENLEYPSVTLPPQPHTKEGVDAYNEVIARVRMWVNLNLWQKLKLSRDDAKPLLRLKGFPSFPLVERQANEVDWWDMVCNVKKLINEKKEDGKVFWQNLAGYKRQEALRPYLSSEEDRKKGKKFARYQLGDLLLHLEKKHGEDWGKVYDEAWERIDKKVEGLSKHIKLEEERRSEDAQSKAALTDWLRAKASFVIEGLKEADKDEFCRCELKLQKWYGDLRGKPFAIEAENSILDISGFSKQYNCAFIWQKDGVKKLNLYLIINYFKGGKLRFKKIKPEAFEANRFYTVINKKSGEIVPMEVNFNFDDPNLIILPLAFGKRQGREFIWNDLLSLETGSLKLANGRVIEKTLYNRRTRQDEPALFVALTFERREVLDSSNIKPMNLIGVDRGENIPAVIALTDPEGCPLSRFKDSLGNPTHILRIGESYKEKQRTIQAKKEVEQRRAGGYSRKYASKAKNLADDMVRNTARDLLYYAVTQDAMLIFENLSRGFGRQGKRTFMAERQYTRMEDWLTAKLAYEGPLPSKTYLSKTLAQYTSKTCSNCGFTITSADYDRVLEKLKKTATGWMTTINGKELKVEGQITYYNRYKRQNVVKDLSVELDRLSEESVNNDISSWTKGRSGEALSLLKKRFSHRPVQEKFVCLNCGFETHADEQAALNIARSWLFLRSQEYKKYQTNKTTGNTDKRAFVETWQSFYRKKLKEVWKPAV

SEQ ID NO: 31766 - protein, 980 aa, synthetic construct
  REGION 1..980: note = engineered CasX variant
QEIGKRINKIRRRLVKDSNTKKAGKTGPMKTLLVRVMTPDLRERLENLRKKPENIPQPISNTSRANLNKLLTDYTEMKKAILHVYWEEFQKDPVGLMSRVAQPASKKIDQNKLKPEMDEKGNLTTAGFACSQCGQPLFVYKLEQVSEKGKAYTNYFGRCNVAEHEKLILLAQLKPEKDSDEAVTYSLGKFGQRALDFYSIHVTKESTHPVKPLAQIAGNRYASTPVGKALSDACMGTIASFLSKYQDIIIEHQKVVKGNQKRLESLRELAGKENLEYPSVTLPPQPHTKEGVDAYNEVIARVRMWVNLNLWQKLKLSRDDAKPLLRLKGFPSFPLVERQANEVDWWDMVCNVKKLINEKKEDGKVFWQNLAGYKRQEALRPYLSSEEDRKKGKKFARYQLGDLLLHLEKKHGEDWGKVYDEAWERIDKKVEGLSKHIKLEEERRSEDAQSKAALTDWLRAKASFVIEGLKEADKDEFCRCELKLQKWYGDLRGKPFAIEAENSILDISGFSKQYNCAFIWQKDGVKKLNLYLIINYFKGGKLRFKKIKPEAFEANRFYTVINKKSGEIVPMEVNFNFDDPNLIILPLAFGKRQGREFIWNDLLSLETGSLKLANGRVIEKTLYNRRTRQDEPALFVALTFERREVLDSSNIKPMNLIGVDRGENIPAVIALTDPEGCPLSRFKDSLGNPTHILRIGESYKEKQRTIQAKKEVEQRRAGGYSRKYASKAKNLADDMVRNTARDLLYYAVTQDAMLIFENLSRGFGRQGKRTFMAERQYTRMEDWLTAKLAYEGPLPSKTYLSKTLAQYTSKTCSNCGFTITSADYDRVLEKLKKTATGWMTTINGKELKVEGQITYYNRYKRQNVVKDLSVELDRLSEESVNNDISSWTKGRSGEALSLLKKRFSHRPVQEKFVCLNCGFETHADEQAALNIARSWLFLRSQEYKKYQTNKTTGNTDKRAFVETWQSFYRKKLKEVWKPAV

SEQ ID NO: 31767 - protein, 980 aa, synthetic construct
  REGION 1..980: note = engineered CasX variant
QEIGKRINKIRRRLVKDSNTKKAGKTGPMKTLLVRVMTPDLRERLENLRKKPENIPQPISNTSRANLNKLLTDYTEMKKAILHVYWEEFQKDPVGLMSRVAQPASKKIDQNKLKPEMDEKGNLTTAGFACSQCGQPLFVYKLEQVSEKGKAYTNYFGRCNVAEHEKLILLAQLKPEKDSDEAVTYSLGKFGQRALDFYSIHVTKESTHPVKPLAQIAGNRYASAPVGKALSDACMGTIASFLSKYQDIIIEHQKVVKGNQKRLESLRELAGKENLEYPSVTLPPQPHTKEGVDAYNEVIARVRMWVNLNLWQKLKLSRDDAKPLLRLKGFPSFPLVERQANEVDWWDMVCNVKKLINEKKEDGKVFWQNLAGYKRQEALRPYLSSEEDRKKGKKFARYQLGDLLLHLEKKHGEDWGKVYDEAWERIDKKVEGLSKHIKLEEERRSEDAQSKAALTDWLRAKASFVIEGLKEADKDEFCRCELKLQKWYGDLRGKPFAIEAENSILDISGFSKQYNCAFIWQKDGVKKLNLYLIINYFKGGKLRFKKIKPEAFEANRFYTVINKKSGEIVPMEVNFNFDDPNLIILPLAFGKRQGREFIWNDLLSLETGSLKLANGRVIEKTLYNRRTRQDEPALFVALTFERREVLDSSNIKPMNLIGVDRGENIPAVIALTDPEGCPLSRFKDSLGNPTHILRIGESYKEKQRTIQAKKEVEQRRAGGYSRKYASKAKNLADDMVRNTARDLLYYAVTQDAMLIFENLSRGFGRQGKRTFMAERQYTRMEDWLTAKLAYEGPLPSKTYLSKTLAQYTSKTCSNCGFTITSADYDRVLEKLKKTATGWMTTINGKELKVEGQITYYNRYKRQNVVKDLSVELDRLSEESVNNDISSWTKGRSGEALSLLKKRFSHRPVQEKFVCLNCGFETHADEQAALNIARSWLFLRSQEYKKYQTNKTTGNTDKRAFVETWQSFYRKKLKEVWKPAV

SEQ ID NO: 31768 - protein, 980 aa, synthetic construct
  REGION 1..980: note = engineered CasX variant
QEIGKRINKIRRRLVKDSNTKKAGKTGPMKTLLVRVMTPDLRERLENLRKKPENIPQPISNTSRANLNKLLTDYTEMKKAILHVYWEEFQKDPVGLMSRVAQPASKKIDQNKLKPEMDEKGNLTTAGFACSQCGQPLFVYKLEQVSEKGKAYTNYFGRCNVAEHEKLILLAQLKPEKDSDEAVTYSLGKFGQRALDFYSIHVTKESTHPVKPLAQIAGNRYASVPVGKALSDACMGTIASFLSKYQDIIIEHQKVVKGNQKRLESLRELAGKENLEYPSVTLPPQPHTKEGVDAYNEVIARVRMWVNLNLWQKLKLSRDDAKPLLRLKGFPSFPLVERQANEVDWWDMVCNVKKLINEKKEDGKVFWQNLAGYKRQEALRPYLSSEEDRKKGKKFARYQLGDLLLHLEKKHGEDWGKVYDEAWERIDKKVEGLSKHIKLEEERRSEDAQSKAALTDWLRAKASFVIEGLKEADKDEFCRCELKLQKWYGDLRGKPFAIEAENSILDISGFSKQYNCAFIWQKDGVKKLNLYLIINYFKGGKLRFKKIKPEAFEANRFYTVINKKSGEIVPMEVNFNFDDPNLIILPLAFGKRQGREFIWNDLLSLETGSLKLANGRVIEKTLYNRRTRQDEPALFVALTFERREVLDSSNIKPMNLIGVDRGENIPAVIALTDPEGCPLSRFKDSLGNPTHILRIGESYKEKQRTIQAKKEVEQRRAGGYSRKYASKAKNLADDMVRNTARDLLYYAVTQDAMLIFENLSRGFGRQGKRTFMAERQYTRMEDWLTAKLAYEGPLPSKTYLSKTLAQYTSKTCSNCGFTITSADYDRVLEKLKKTATGWMTTINGKELKVEGQITYYNRYKRQNVVKDLSVELDRLSEESVNNDISSWTKGRSGEALSLLKKRFSHRPVQEKFVCLNCGFETHADEQAALNIARSWLFLRSQEYKKYQTNKTTGNTDKRAFVETWQSFYRKKLKEVWKPAV

SEQ ID NO: 31769 - protein, 980 aa, synthetic construct
  REGION 1..980: note = engineered CasX variant
QEIGKRINKIRRRLVKDSNTKKAGKTGPMKTLLVRVMTPDLRERLENLRKKPENIPQPISNTSRANLNKLLTDYTEMKKAILHVYWEEFQKDPVGLMSRVAQPASKKIDQNKLKPEMDEKGNLTTAGFACSQCGQPLFVYKLEQVSEKGKAYTNYFGRCNVAEHEKLIKLAQLKPEKDSDEAVTYSLGKFGQRALDFYSIHVTKESTHPVKPLAQIAGNRYASGPVGKALSDACMGTIASFLSKYQDIIIEHQKVVKGNQKRLESLRELAGKENLEYPSVTLPPQPHTKEGVDAYNEVIARVRMWVNLNLWQKLKLSRDDAKPLLRLKGFPSFPLVERQANEVDWWDMVCNVKKLINEKKEDGKVFWQNLAGYKRQEALRPYLSSEEDRKKGKKFARYQLGDLLLHLEKKHGEDWGKVYDEAWERIDKKVEGLSKHIKLEEERRSEDAQSKAALTDWLRAKASFVIEGLKEADKDEFCRCELKLQKWYGDLRGKPFAIEAENSILDISGFSKQYNCAFIWQKDGVKKLNLYLIINYFKGGKLRFKKIKPEAFEANRFYTVINKKSGEIVPMEVNFNFDDPNLIILPLAFGKRQGREFIWNDLLSLETGSLKLANGRVIEKTLYNRRTRQDEPALFVALTFERREVLDSSNIKPMNLIGVDRGENIPAVIALTDPEGCPLSRFKDSLGNPTHILRIGESYKEKQRTIQAKKEVEQRRAGGYSRKYASKAKNLADDMVRNTARDLLYYAVTQDAMLIFENLSRGFGRQGKRTFMAERQYTRMEDWLTAKLAYEGPLPSKTYLSKTLAQYTSKTCSNCGFTITSADYDRVLEKLKKTATGWMTTINGKELKVEGQITYYNRYKRQNVVKDLSVELDRLSEESVNNDISSWTKGRSGEALSLLKKRFSHRPVQEKFVCLNCGFETHADEQAALNIARSWLFLRSQEYKKYQTNKTTGNTDKRAFVETWQSFYRKKLKEVWKPAV

SEQ ID NO: 31770 - protein, 979 aa, synthetic construct
  REGION 1..979: note = engineered CasX variant
QEIGKRINKIRRRLVKDSNTKKAGKTGPMKTLLVRVMTPDLRERLENLRKKPENIPQPISNTSRANLNKLLTDYTEMKKAILHVYWEEFQKDPVGLMSRVAQPASKKIDQNKLKPEMDEKGNLTTAGFACSQCGQPLFVYKLEQVSEKGKAYTNYFGRCNVAEHEKLILLAQLKPEKDSDEAVTYSLGKFGQRALDFYSIHVTKESTHPVKPLAQIAGNRYASPVGKALSDACMGTIASFLSKYQDIIIEHQKVVKGNQKRLESLRELAGKENLEYPSVTLPPQPHTKEGVDAYNEVIARVRMWVNLNLWQKLKLSRDDAKPLLRLKGFPSFPLVERQANEVDWWDMVCNVKKLINEKKEDGKVFWQNLAGYKRQEALRPYLSSEEDRKKGKKFARYQLGDLLLHLEKKHGEDWGKVYDEAWERIDKKVEGLSKHIKLEEERRSEDAQSKAALTDWLRAKASFVIEGLKEADKDEFCRCELKLQKWYGDLRGKPFAIEAENSILDISGFSKQYNCAFIWQKDGVKKLNLYLIINYFKGGKLRFKKIKPEAFEANRFYTVINKKSGEIVPMEVNFNFDDPNLIILPLAFGKRQGREFIWNDLLSLETGSLKLANGRVIEKTLYNRRTRQDEPALFVALTFERREVLDSSNIKPMNLIGVDRGENIPAVIALTDPEGCPLSRFKDSLGNPTHILRIGESYKEKQRTIQAKKEVEQRRAGGYSRKYASKAKNLADDMVRNTARDLLYYAVTQDAMLIFENLSRGFGRQGKRTFMAERQYTRMEDWLTAKLAYEGPLPSKTYLSKTLAQYTSKTCSNCGFTITSADYDRVLEKLKKTATGWMTTINGKELKVEGQITYYNRYKRQNVVKDLSVELDRLSEESVNNDISSWTKGRSGEALSLLKKRFSHRPVQEKFVCLNCGFETHADEQAALNIARSWLFLRSQEYKKYQTNKTTGNTDKRAFVETWQSFYRKKLKEVWKPAV

SEQ ID NO: 31771 - protein, 980 aa, synthetic construct
  REGION 1..980: note = engineered CasX variant
QEIGKRINKIRRRLVKDSNTKKAGKTGPMKTLLVRVMTPDLRERLENLRKKPENIPQPISNTSRANLNKLLTDYTEMKKAILHVYWEEFQKDPVGLMSRVAQPASKKIDQNKLKPEMDEKGNLTTAGFACSQCGQPLFVYKLEQVSEKGKAYTNYFGRCNVAEHEKLILLAQLKPEKDSDEAVTYSLGKFGQRALDFYSIHVTKESTHPVKPLAQIAGNRYASYPVGKALSDACMGTIASFLSKYQDIIIEHQKVVKGNQKRLESLRELAGKENLEYPSVTLPPQPHTKEGVDAYNEVIARVRMWVNLNLWQKLKLSRDDAKPLLRLKGFPSFPLVERQANEVDWWDMVCNVKKLINEKKEDGKVFWQNLAGYKRQEALRPYLSSEEDVRKKGKKFARYQLGDLLLHLEKKHGEDWGKVYDEAWERIDKKVEGLSKHIKLEEERRSEDAQSKAALTDWLRAKASFVIEGLKEADKDEFCRCELKLQKWYGDLRGKPFAIEAENSILDISGFSKQYNCAFIWQKDGVKKLNLYLIINYFKGGKLRFKKIKPEAFEANRFYTVINKKSGEIVPMEVNFNFDDPNLIILPLAFGKRQGREFIWNDLLSLETGSLKLANGRVIEKTLYNRRTRQDEPALFVALTFERREVLDSSNIKPMNLIGVDRGENIPAVIALTDPEGCPLSRFKDSLGNPTHILRIGESYKEKQRTIQAKKEVEQRRAGGYSRKYASKAKNLADDMVRNTARDLLYYAVTQDAMLIFENLSRGFGRQGKRTFMAERQYTRMEDWLTAKLAYEGLPSKTYLSKTLAQYTSKTCSNCGFTITSADYDRVLEKLKKTATGWMTTINGKELKVEGQITYYNRYKRQNVVKDLSVELDRLSEESVNNDISSWTKGRSGEALSLLKKRFSHRPVQEKFVCLNCGFETHADEQAALNIARSWLFLRSQEYKKYQTNKTTGNTDKRAFVETWQSFYRKKLKEVWKPAV

SEQ ID NO: 31772 - protein, 980 aa, synthetic construct
  REGION 1..980: note = engineered CasX variant
QEIGKRINKIRRRLVKDSNTKKAGKTGPMKTLLVRVMTPDLRERLENLRKKPENIPQPISNTSRANLNKLLTDYTEMKKAILHVYWEEFQKDPVGLMSRVAQPASKKIDQNKLKPEMDEKGNLTTAGFACSQCGQPLFVYKLEQVSEKGKAYTNYFGRCNVAEHEKLILLAQLKPEKDSDEAVTYSLGKFGQRALDFYSIHVTKESTHPVKPLAQIAGNRYASHPVGKALSDACMGTIASFLSKYQDIIIEHQKVVKGNQKRLESLRELAGKENLEYPSVTLPPQPHTKEGVDAYNEVIARVRMWVNLNLWQKLKLSRDDAKPLLRLKGFPSFPLVERQANEVDWWDMVCNVKKLINEKKEDGKVFWQNLAGYKRQEALRPYLSSEEDVRKKGKKFARYQLGDLLLHLEKKHGEDWGKVYDEAWERIDKKVEGLSKHIKLEEERRSEDAQSKAALTDWLRAKASFVIEGLKEADKDEFCRCELKLQKWYGDLRGKPFAIEAENSILDISGFSKQYNCAFIWQKDGVKKLNLYLIINYFKGGKLRFKKIKPEAFEANRFYTVINKKSGEIVPMEVNFNFDDPNLIILPLAFGKRQGREFIWNDLLSLETGSLKLANGRVIEKTLYNRRTRQDEPALFVALTFERREVLDSSNIKPMNLIGVDRGENIPAVIALTDPEGCPLSRFKDSLGNPTHILRIGESYKEKQRTIQAKKEVEQRRAGGYSRKYASKAKNLADDMVRNTARDLLYYAVTQDAMLIFENLSRGFGRQGKRTFMAERQYTRMEDWLTAKLAYEGLPSKTYLSKTLAQYTSKTCSNCGFTITSADYDRVLEKLKKTATGWMTTINGKELKVEGQITYYNRYKRQNVVKDLSVELDRLSEESVNNDISSWTKGRSGEALSLLKKRFSHRPVQEKFVCLNCGFETHADEQAALNIARSWLFLRSQEYKKYQTNKTTGNTDKRAFVETWQSFYRKKLKEVWKPAV

SEQ ID NO: 31773 - protein, 980 aa, synthetic construct
  REGION 1..980: note = engineered CasX variant
QEIGKRINKIRRRLVKDSNTKKAGKTGPMKTLLVRVMTPDLRERLENLRKKPENIPQPISNTSRANLNKLLTDYTEMKKAILHVYWEEFQKDPVGLMSRVAQPASKKIDQNKLKPEMDEKGNLTTAGFACSQCGQPLFVYKLEQVSEKGKAYTNYFGRCNVAEHEKLILLAQLKPEKDSDEAVTYSLGKFGQRALDFYSIHVTKESTHPVKPLAQIAGNRYASSPVGKALSDACMGTIASFLSKYQDIIIEHQKVVKGNQKRLESLRELAGKENLEYPSVTLPPQPHTKEGVDAYNEVIARVRMWVNLNLWQKLKLSRDDAKPLLRLKGFPSFPLVERQANEVDWWDMVCNVKKLINEKKEDGKVFWQNLAGYKRQEALRPYLSSEEDVRKKGKKFARYQLGDLLLHLEKKHGEDWGKVYDEAWERIDKKVEGLSKHIKLEEERRSEDAQSKAALTDWLRAKASFVIEGLKEADKDEFCRCELKLQKWYGDLRGKPFAIEAENSILDISGFSKQYNCAFIWQKDGVKKLNLYLIINYFKGGKLRFKKIKPEAFEANRFYTVINKKSGEIVPMEVNFNFDDPNLIILPLAFGKRQGREFIWNDLLSLETGSLKLANGRVIEKTLYNRRTRQDEPALFVALTFERREVLDSSNIKPMNLIGVDRGENIPAVIALTDPEGCPLSRFKDSLGNPTHILRIGESYKEKQRTIQAKKEVEQRRAGGYSRKYASKAKNLADDMVRNTARDLLYYAVTQDAMLIFENLSRGFGRQGKRTFMAERQYTRMEDWLTAKLAYEGLPSKTYLSKTLAQYTSKTCSNCGFTITSADYDRVLEKLKKTATGWMTTINGKELKVEGQITYYNRYKRQNVVKDLSVELDRLSEESVNNDISSWTKGRSGEALSLLKKRFSHRPVQEKFVCLNCGFETHADEQAALNIARSWLFLRSQEYKKYQTNKTTGNTDKRAFVETWQSFYRKKLKEVWKPAV

SEQ ID NO: 31774 - protein, 980 aa, synthetic construct
  REGION 1..980: note = engineered CasX variant
QEIGKRINKIRRRLVKDSNTKKAGKTGPMKTLLVRVMTPDLRERLENLRKKPENIPQPISNTSRANLNKLLTDYTEMKKAILHVYWEEFQKDPVGLMSRVAQPASKKIDQNKLKPEMDEKGNLTTAGFACSQCGQPLFVYKLEQVSEKGKAYTNYFGRCNVAEHEKLILLAQLKPEKDSDEAVTYSLGKFGQRALDFYSIHVTKESTHPVKPLAQIAGNRYASTPVGKALSDACMGTIASFLSKYQDIIIEHQKVVKGNQKRLESLRELAGKENLEYPSVTLPPQPHTKEGVDAYNEVIARVRMWVNLNLWQKLKLSRDDAKPLLRLKGFPSFPLVERQANEVDWWDMVCNVKKLINEKKEDGKVFWQNLAGYKRQEALRPYLSSEEDVRKKGKKFARYQLGDLLLHLEKKHGEDWGKVYDEAWERIDKKVEGLSKHIKLEEERRSEDAQSKAALTDWLRAKASFVIEGLKEADKDEFCRCELKLQKWYGDLRGKPFAIEAENSILDISGFSKQYNCAFIWQKDGVKKLNLYLIINYFKGGKLRFKKIKPEAFEANRFYTVINKKSGEIVPMEVNFNFDDPNLIILPLAFGKRQGREFIWNDLLSLETGSLKLANGRVIEKTLYNRRTRQDEPALFVALTFERREVLDSSNIKPMNLIGVDRGENIPAVIALTDPEGCPLSRFKDSLGNPTHILRIGESYKEKQRTIQAKKEVEQRRAGGYSRKYASKAKNLADDMVRNTARDLLYYAVTQDAMLIFENLSRGFGRQGKRTFMAERQYTRMEDWLTAKLAYEGLPSKTYLSKTLAQYTSKTCSNCGFTITSADYDRVLEKLKKTATGWMTTINGKELKVEGQITYYNRYKRQNVVKDLSVELDRLSEESVNNDISSWTKGRSGEALSLLKKRFSHRPVQEKFVCLNCGFETHADEQAALNIARSWLFLRSQEYKKYQTNKTTGNTDKRAFVETWQSFYRKKLKEVWKPAV

SEQ ID NO: 31775 - protein, 980 aa, synthetic construct
  REGION 1..980: note = engineered CasX variant
QEIGKRINKIRRRLVKDSNTKKAGKTGPMKTLLVRVMTPDLRERLENLRKKPENIPQPISNTSRANLNKLLTDYTEMKKAILHVYWEEFQKDPVGLMSRVAQPASKKIDQNKLKPEMDEKGNLTTAGFACSQCGQPLFVYKLEQVSEKGKAYTNYFGRCNVAEHEKLILLAQLKPEKDSDEAVTYSLGKFGQRALDFYSIHVTKESTHPVKPLAQIAGNRYASAPVGKALSDACMGTIASFLSKYQDIIIEHQKVVKGNQKRLESLRELAGKENLEYPSVTLPPQPHTKEGVDAYNEVIARVRMWVNLNLWQKLKLSRDDAKPLLRLKGFPSFPLVERQANEVDWWDMVCNVKKLINEKKEDGKVFWQNLAGYKRQEALRPYLSSEEDVRKKGKKFARYQLGDLLLHLEKKHGEDWGKVYDEAWERIDKKVEGLSKHIKLEEERRSEDAQSKAALTDWLRAKASFVIEGLKEADKDEFCRCELKLQKWYGDLRGKPFAIEAENSILDISGFSKQYNCAFIWQKDGVKKLNLYLIINYFKGGKLRFKKIKPEAFEANRFYTVINKKSGEIVPMEVNFNFDDPNLIILPLAFGKRQGREFIWNDLLSLETGSLKLANGRVIEKTLYNRRTRQDEPALFVALTFERREVLDSSNIKPMNLIGVDRGENIPAVIALTDPEGCPLSRFKDSLGNPTHILRIGESYKEKQRTIQAKKEVEQRRAGGYSRKYASKAKNLADDMVRNTARDLLYYAVTQDAMLIFENLSRGFGRQGKRTFMAERQYTRMEDWLTAKLAYEGLPSKTYLSKTLAQYTSKTCSNCGFTITSADYDRVLEKLKKTATGWMTTINGKELKVEGQITYYNRYKRQNVVKDLSVELDRLSEESVNNDISSWTKGRSGEALSLLKKRFSHRPVQEKFVCLNCGFETHADEQAALNIARSWLFLRSQEYKKYQTNKTTGNTDKRAFVETWQSFYRKKLKEVWKPAV

SEQ ID NO: 31776 - protein, 980 aa, synthetic construct
  REGION 1..980: note = engineered CasX variant
QEIGKRINKIRRRLVKDSNTKKAGKTGPMKTLLVRVMTPDLRERLENLRKKPENIPQPISNTSRANLNKLLTDYTEMKKAILHVYWEEFQKDPVGLMSRVAQPASKKIDQNKLKPEMDEKGNLTTAGFACSQCGQPLFVYKLEQVSEKGKAYTNYFGRCNVAEHEKLILLAQLKPEKDSDEAVTYSLGKFGQRALDFYSIHVTKESTHPVKPLAQIAGNRYASVPVGKALSDACMGTIASFLSKYQDIIIEHQKVVKGNQKRLESLRELAGKENLEYPSVTLPPQPHTKEGVDAYNEVIARVRMWVNLNLWQKLKLSRDDAKPLLRLKGFPSFPLVERQANEVDWWDMVCNVKKLINEKKEDGKVFWQNLAGYKRQEALRPYLSSEEDVRKKGKKFARYQLGDLLLHLEKKHGEDWGKVYDEAWERIDKKVEGLSKHIKLEEERRSEDAQSKAALTDWLRAKASFVIEGLKEADKDEFCRCELKLQKWYGDLRGKPFAIEAENSILDISGFSKQYNCAFIWQKDGVKKLNLYLIINYFKGGKLRFKKIKPEAFEANRFYTVINKKSGEIVPMEVNFNFDDPNLIILPLAFGKRQGREFIWNDLLSLETGSLKLANGRVIEKTLYNRRTRQDEPALFVALTFERREVLDSSNIKPMNLIGVDRGENIPAVIALTDPEGCPLSRFKDSLGNPTHILRIGESYKEKQRTIQAKKEVEQRRAGGYSRKYASKAKNLADDMVRNTARDLLYYAVTQDAMLIFENLSRGFGRQGKRTFMAERQYTRMEDWLTAKLAYEGLPSKTYLSKTLAQYTSKTCSNCGFTITSADYDRVLEKLKKTATGWMTTINGKELKVEGQITYYNRYKRQNVVKDLSVELDRLSEESVNNDISSWTKGRSGEALSLLKKRFSHRPVQEKFVCLNCGFETHADEQAALNIARSWLFLRSQEYKKYQTNKTTGNTDKRAFVETWQSFYRKKLKEVWKPAV

SEQ ID NO: 31777 - protein, 980 aa, synthetic construct
  REGION 1..980: note = engineered CasX variant
QEIGKRINKIRRRLVKDSNTKKAGKTGPMKTLLVRVMTPDLRERLENLRKKPENIPQPISNTSRANLNKLLTDYTEMKKAILHVYWEEFQKDPVGLMSRVAQPASKKIDQNKLKPEMDEKGNLTTAGFACSQCGQPLFVYKLEQVSEKGKAYTNYFGRCNVAEHEKLIKLAQLKPEKDSDEAVTYSLGKFGQRALDFYSIHVTKESTHPVKPLAQIAGNRYASGPVGKALSDACMGTIASFLSKYQDIIIEHQKVVKGNQKRLESLRELAGKENLEYPSVTLPPQPHTKEGVDAYNEVIARVRMWVNLNLWQKLKLSRDDAKPLLRLKGFPSFPLVERQANEVDWWDMVCNVKKLINEKKEDGKVFWQNLAGYKRQEALRPYLSSEEDVRKKGKKFARYQLGDLLLHLEKKHGEDWGKVYDEAWERIDKKVEGLSKHIKLEEERRSEDAQSKAALTDWLRAKASFVIEGLKEADKDEFCRCELKLQKWYGDLRGKPFAIEAENSILDISGFSKQYNCAFIWQKDGVKKLNLYLIINYFKGGKLRFKKIKPEAFEANRFYTVINKKSGEIVPMEVNFNFDDPNLIILPLAFGKRQGREFIWNDLLSLETGSLKLANGRVIEKTLYNRRTRQDEPALFVALTFERREVLDSSNIKPMNLIGVDRGENIPAVIALTDPEGCPLSRFKDSLGNPTHILRIGESYKEKQRTIQAKKEVEQRRAGGYSRKYASKAKNLADDMVRNTARDLLYYAVTQDAMLIFENLSRGFGRQGKRTFMAERQYTRMEDWLTAKLAYEGLPSKTYLSKTLAQYTSKTCSNCGFTITSADYDRVLEKLKKTATGWMTTINGKELKVEGQITYYNRYKRQNVVKDLSVELDRLSEESVNNDISSWTKGRSGEALSLLKKRFSHRPVQEKFVCLNCGFETHADEQAALNIARSWLFLRSQEYKKYQTNKTTGNTDKRAFVETWQSFYRKKLKEVWKPAV

SEQ ID NO: 31778 - protein, 979 aa, synthetic construct
  REGION 1..979: note = engineered CasX variant
QEIGKRINKIRRRLVKDSNTKKAGKTGPMKTLLVRVMTPDLRERLENLRKKPENIPQPISNTSRANLNKLLTDYTEMKKAILHVYWEEFQKDPVGLMSRVAQPASKKIDQNKLKPEMDEKGNLTTAGFACSQCGQPLFVYKLEQVSEKGKAYTNYFGRCNVAEHEKLILLAQLKPEKDSDEAVTYSLGKFGQRALDFYSIHVTKESTHPVKPLAQIAGNRYASPVGKALSDACMGTIASFLSKYQDIIIEHQKVVKGNQKRLESLRELAGKENLEYPSVTLPPQPHTKEGVDAYNEVIARVRMWVNLNLWQKLKLSRDDAKPLLRLKGFPSFPLVERQANEVDWWDMVCNVKKLINEKKEDGKVFWQNLAGYKRQEALRPYLSSEEDVRKKGKKFARYQLGDLLLHLEKKHGEDWGKVYDEAWERIDKKVEGLSKHIKLEEERRSEDAQSKAALTDWLRAKASFVIEGLKEADKDEFCRCELKLQKWYGDLRGKPFAIEAENSILDISGFSKQYNCAFIWQKDGVKKLNLYLIINYFKGGKLRFKKIKPEAFEANRFYTVINKKSGEIVPMEVNFNFDDPNLIILPLAFGKRQGREFIWNDLLSLETGSLKLANGRVIEKTLYNRRTRQDEPALFVALTFERREVLDSSNIKPMNLIGVDRGENIPAVIALTDPEGCPLSRFKDSLGNPTHILRIGESYKEKQRTIQAKKEVEQRRAGGYSRKYASKAKNLADDMVRNTARDLLYYAVTQDAMLIFENLSRGFGRQGKRTFMAERQYTRMEDWLTAKLAYEGLPSKTYLSKTLAQYTSKTCSNCGFTITSADYDRVLEKLKKTATGWMTTINGKELKVEGQITYYNRYKRQNVVKDLSVELDRLSEESVNNDISSWTKGRSGEALSLLKKRFSHRPVQEKFVCLNCGFETHADEQAALNIARSWLFLRSQEYKKYQTNKTTGNTDKRAFVETWQSFYRKKLKEVWKPAV

SEQ ID NO: 31779 - protein, 979 aa, synthetic construct
  REGION 1..979: note = engineered CasX variant
QEIGKRINKIRRRLVKDSNTKKAGKTGPMKTLLVRVMTPDLRERLENLRKKPENIPQPISNTSRANLNKLLTDYTEMKKAILHVYWEEFQKDPVGLMSRVAQPASKKIDQNKLKPEMDEKGNLTTAGFACSQCGQPLFVYKLEQVSEKGKAYTNYFGRCNVAEHEKLILLAQLKPEKDSDEAVTYSLGKFGQRALDFYSIHVTKESTHPVKPLAQIAGNRYASYPVGKALSDACMGTIASFLSKYQDIIIEHQKVVKGNQKRLESLRELAGKENLEYPSVTLPPQPHTKEGVDAYNEVIARVRMWVNLNLWQKLKLSRDDAKPLLRLKGFPSFPLVERQANEVDWWDMVCNVKKLINEKKEDGKVFWQNLAGYKRQEALRPYLSSEEDRKKGKKFARYQLGDLLLHLEKKHGEDWGKVYDEAWERIDKKVEGLSKHIKLEEERRSEDAQSKAALTDWLRAKASFVIEGLKEADKDEFCRCELKLQKWYGDLRGKPFAIEAENSILDISGFSKQYNCAFIWQKDGVKKLNLYLIINYFKGGKLRFKKIKPEAFEANRFYTVINKKSGEIVPMEVNFNFDDPNLIILPLAFGKRQGREFIWNDLLSLETGSLKLANGRVIEKTLYNRRTRQDEPALFVALTFERREVLDSSNIKPMNLIGVDRGENIPAVIALTDPEGCPLSRFKDSLGNPTHILRIGESYKEKQRTIQAKKEVEQRRAGGYSRKYASKAKNLADDMVRNTARDLLYYAVTQDAMLIFENLSRGFGRQGKRTFMAERQYTRMEDWLTAKLAYEGLPSKTYLSKTLAQYTSKTCSNCGFTITSADYDRMLEKLKKTATGWMTTINGKELKVEGQITYYNRYKRQNVVKDLSVELDRLSEESVNNDISSWTKGRSGEALSLLKKRFSHRPVQEKFVCLNCGFETHADEQAALNIARSWLFLRSQEYKKYQTNKTTGNTDKRAFVETWQSFYRKKLKEVWKPAV

SEQ ID NO: 31780 - protein, 979 aa, synthetic construct
  REGION 1..979: note = engineered CasX variant
QEIGKRINKIRRRLVKDSNTKKAGKTGPMKTLLVRVMTPDLRERLENLRKKPENIPQPISNTSRANLNKLLTDYTEMKKAILHVYWEEFQKDPVGLMSRVAQPASKKIDQNKLKPEMDEKGNLTTAGFACSQCGQPLFVYKLEQVSEKGKAYTNYFGRCNVAEHEKLILLAQLKPEKDSDEAVTYSLGKFGQRALDFYSIHVTKESTHPVKPLAQIAGNRYASHPVGKALSDACMGTIASFLSKYQDIIIEHQKVVKGNQKRLESLRELAGKENLEYPSVTLPPQPHTKEGVDAYNEVIARVRMWVNLNLWQKLKLSRDDAKPLLRLKGFPSFPLVERQANEVDWWDMVCNVKKLINEKKEDGKVFWQNLAGYKRQEALRPYLSSEEDRKKGKKFARYQLGDLLLHLEKKHGEDWGKVYDEAWERIDKKVEGLSKHIKLEEERRSEDAQSKAALTDWLRAKASFVIEGLKEADKDEFCRCELKLQKWYGDLRGKPFAIEAENSILDISGFSKQYNCAFIWQKDGVKKLNLYLIINYFKGGKLRFKKIKPEAFEANRFYTVINKKSGEIVPMEVNFNFDDPNLIILPLAFGKRQGREFIWNDLLSLETGSLKLANGRVIEKTLYNRRTRQDEPALFVALTFERREVLDSSNIKPMNLIGVDRGENIPAVIALTDPEGCPLSRFKDSLGNPTHILRIGESYKEKQRTIQAKKEVEQRRAGGYSRKYASKAKNLADDMVRNTARDLLYYAVTQDAMLIFENLSRGFGRQGKRTFMAERQYTRMEDWLTAKLAYEGLPSKTYLSKTLAQYTSKTCSNCGFTITSADYDRMLEKLKKTATGWMTTINGKELKVEGQITYYNRYKRQNVVKDLSVELDRLSEESVNNDISSWTKGRSGEALSLLKKRFSHRPVQEKFVCLNCGFETHADEQAALNIARSWLFLRSQEYKKYQTNKTTGNTDKRAFVETWQSFYRKKLKEVWKPAV

SEQ ID NO: 31781 - protein, 979 aa, synthetic construct
  REGION 1..979: note = engineered CasX variant
QEIGKRINKIRRRLVKDSNTKKAGKTGPMKTLLVRVMTPDLRERLENLRKKPENIPQPISNTSRANLNKLLTDYTEMKKAILHVYWEEFQKDPVGLMSRVAQPASKKIDQNKLKPEMDEKGNLTTAGFACSQCGQPLFVYKLEQVSEKGKAYTNYFGRCNVAEHEKLILLAQLKPEKDSDEAVTYSLGKFGQRALDFYSIHVTKESTHPVKPLAQIAGNRYASSPVGKALSDACMGTIASFLSKYQDIIIEHQKVVKGNQKRLESLRELAGKENLEYPSVTLPPQPHTKEGVDAYNEVIARVRMWVNLNLWQKLKLSRDDAKPLLRLKGFPSFPLVERQANEVDWWDMVCNVKKLINEKKEDGKVFWQNLAGYKRQEALRPYLSSEEDRKKGKKFARYQLGDLLLHLEKKHGEDWGKVYDEAWERIDKKVEGLSKHIKLEEERRSEDAQSKAALTDWLRAKASFVIEGLKEADKDEFCRCELKLQKWYGDLRGKPFAIEAENSILDISGFSKQYNCAFIWQKDGVKKLNLYLIINYFKGGKLRFKKIKPEAFEANRFYTVINKKSGEIVPMEVNFNFDDPNLIILPLAFGKRQGREFIWNDLLSLETGSLKLANGRVIEKTLYNRRTRQDEPALFVALTFERREVLDSSNIKPMNLIGVDRGENIPAVIALTDPEGCPLSRFKDSLGNPTHILRIGESYKEKQRTIQAKKEVEQRRAGGYSRKYASKAKNLADDMVRNTARDLLYYAVTQDAMLIFENLSRGFGRQGKRTFMAERQYTRMEDWLTAKLAYEGLPSKTYLSKTLAQYTSKTCSNCGFTITSADYDRMLEKLKKTATGWMTTINGKELKVEGQITYYNRYKRQNVVKDLSVELDRLSEESVNNDISSWTKGRSGEALSLLKKRFSHRPVQEKFVCLNCGFETHADEQAALNIARSWLFLRSQEYKKYQTNKTTGNTDKRAFVETWQSFYRKKLKEVWKPAV

SEQ ID NO: 31782 - protein, 979 aa, synthetic construct
  REGION 1..979: note = engineered CasX variant
QEIGKRINKIRRRLVKDSNTKKAGKTGPMKTLLVRVMTPDLRERLENLRKKPENIPQPISNTSRANLNKLLTDYTEMKKAILHVYWEEFQKDPVGLMSRVAQPASKKIDQNKLKPEMDEKGNLTTAGFACSQCGQPLFVYKLEQVSEKGKAYTNYFGRCNVAEHEKLILLAQLKPEKDSDEAVTYSLGKFGQRALDFYSIHVTKESTHPVKPLAQIAGNRYASTPVGKALSDACMGTIASFLSKYQDIIIEHQKVVKGNQKRLESLRELAGKENLEYPSVTLPPQPHTKEGVDAYNEVIARVRMWVNLNLWQKLKLSRDDAKPLLRLKGFPSFPLVERQANEVDWWDMVCNVKKLINEKKEDGKVFWQNLAGYKRQEALRPYLSSEEDRKKGKKFARYQLGDLLLHLEKKHGEDWGKVYDEAWERIDKKVEGLSKHIKLEEERRSEDAQSKAALTDWLRAKASFVIEGLKEADKDEFCRCELKLQKWYGDLRGKPFAIEAENSILDISGFSKQYNCAFIWQKDGVKKLNLYLIINYFKGGKLRFKKIKPEAFEANRFYTVINKKSGEIVPMEVNFNFDDPNLIILPLAFGKRQGREFIWNDLLSLETGSLKLANGRVIEKTLYNRRTRQDEPALFVALTFERREVLDSSNIKPMNLIGVDRGENIPAVIALTDPEGCPLSRFKDSLGNPTHILRIGESYKEKQRTIQAKKEVEQRRAGGYSRKYASKAKNLADDMVRNTARDLLYYAVTQDAMLIFENLSRGFGRQGKRTFMAERQYTRMEDWLTAKLAYEGLPSKTYLSKTLAQYTSKTCSNCGFTITSADYDRMLEKLKKTATGWMTTINGKELKVEGQITYYNRYKRQNVVKDLSVELDRLSEESVNNDISSWTKGRSGEALSLLKKRFSHRPVQEKFVCLNCGFETHADEQAALNIARSWLFLRSQEYKKYQTNKTTGNTDKRAFVETWQSFYRKKLKEVWKPAV

SEQ ID NO: 31783 - protein, 979 aa, synthetic construct
  REGION 1..979: note = engineered CasX variant
QEIGKRINKIRRRLVKDSNTKKAGKTGPMKTLLVRVMTPDLRERLENLRKKPENIPQPISNTSRANLNKLLTDYTEMKKAILHVYWEEFQKDPVGLMSRVAQPASKKIDQNKLKPEMDEKGNLTTAGFACSQCGQPLFVYKLEQVSEKGKAYTNYFGRCNVAEHEKLILLAQLKPEKDSDEAVTYSLGKFGQRALDFYSIHVTKESTHPVKPLAQIAGNRYASAPVGKALSDACMGTIASFLSKYQDIIIEHQKVVKGNQKRLESLRELAGKENLEYPSVTLPPQPHTKEGVDAYNEVIARVRMWVNLNLWQKLKLSRDDAKPLLRLKGFPSFPLVERQANEVDWWDMVCNVKKLINEKKEDGKVFWQNLAGYKRQEALRPYLSSEEDRKKGKKFARYQLGDLLLHLEKKHGEDWGKVYDEAWERIDKKVEGLSKHIKLEEERRSEDAQSKAALTDWLRAKASFVIEGLKEADKDEFCRCELKLQKWYGDLRGKPFAIEAENSILDISGFSKQYNCAFIWQKDGVKKLNLYLIINYFKGGKLRFKKIKPEAFEANRFYTVINKKSGEIVPMEVNFNFDDPNLIILPLAFGKRQGREFIWNDLLSLETGSLKLANGRVIEKTLYNRRTRQDEPALFVALTFERREVLDSSNIKPMNLIGVDRGENIPAVIALTDPEGCPLSRFKDSLGNPTHILRIGESYKEKQRTIQAKKEVEQRRAGGYSRKYASKAKNLADDMVRNTARDLLYYAVTQDAMLIFENLSRGFGRQGKRTFMAERQYTRMEDWLTAKLAYEGLPSKTYLSKTLAQYTSKTCSNCGFTITSADYDRMLEKLKKTATGWMTTINGKELKVEGQITYYNRYKRQNVVKDLSVELDRLSEESVNNDISSWTKGRSGEALSLLKKRFSHRPVQEKFVCLNCGFETHADEQAALNIARSWLFLRSQEYKKYQTNKTTGNTDKRAFVETWQSFYRKKLKEVWKPAV

SEQ ID NO: 31784 - protein, 979 aa, synthetic construct
  REGION 1..979: note = engineered CasX variant
QEIGKRINKIRRRLVKDSNTKKAGKTGPMKTLLVRVMTPDLRERLENLRKKPENIPQPISNTSRANLNKLLTDYTEMKKAILHVYWEEFQKDPVGLMSRVAQPASKKIDQNKLKPEMDEKGNLTTAGFACSQCGQPLFVYKLEQVSEKGKAYTNYFGRCNVAEHEKLILLAQLKPEKDSDEAVTYSLGKFGQRALDFYSIHVTKESTHPVKPLAQIAGNRYASVPVGKALSDACMGTIASFLSKYQDIIIEHQKVVKGNQKRLESLRELAGKENLEYPSVTLPPQPHTKEGVDAYNEVIARVRMWVNLNLWQKLKLSRDDAKPLLRLKGFPSFPLVERQANEVDWWDMVCNVKKLINEKKEDGKVFWQNLAGYKRQEALRPYLSSEEDRKKGKKFARYQLGDLLLHLEKKHGEDWGKVYDEAWERIDKKVEGLSKHIKLEEERRSEDAQSKAALTDWLRAKASFVIEGLKEADKDEFCRCELKLQKWYGDLRGKPFAIEAENSILDISGFSKQYNCAFIWQKDGVKKLNLYLIINYFKGGKLRFKKIKPEAFEANRFYTVINKKSGEIVPMEVNFNFDDPNLIILPLAFGKRQGREFIWNDLLSLETGSLKLANGRVIEKTLYNRRTRQDEPALFVALTFERREVLDSSNIKPMNLIGVDRGENIPAVIALTDPEGCPLSRFKDSLGNPTHILRIGESYKEKQRTIQAKKEVEQRRAGGYSRKYASKAKNLADDMVRNTARDLLYYAVTQDAMLIFENLSRGFGRQGKRTFMAERQYTRMEDWLTAKLAYEGLPSKTYLSKTLAQYTSKTCSNCGFTITSADYDRMLEKLKKTATGWMTTINGKELKVEGQITYYNRYKRQNVVKDLSVELDRLSEESVNNDISSWTKGRSGEALSLLKKRFSHRPVQEKFVCLNCGFETHADEQAALNIARSWLFLRSQEYKKYQTNKTTGNTDKRAFVETWQSFYRKKLKEVWKPAV

SEQ ID NO: 31785 - protein, 979 aa, synthetic construct
  REGION 1..979: note = engineered CasX variant
QEIGKRINKIRRRLVKDSNTKKAGKTGPMKTLLVRVMTPDLRERLENLRKKPENIPQPISNTSRANLNKLLTDYTEMKKAILHVYWEEFQKDPVGLMSRVAQPASKKIDQNKLKPEMDEKGNLTTAGFACSQCGQPLFVYKLEQVSEKGKAYTNYFGRCNVAEHEKLIKLAQLKPEKDSDEAVTYSLGKFGQRALDFYSIHVTKESTHPVKPLAQIAGNRYASGPVGKALSDACMGTIASFLSKYQDIIIEHQKVVKGNQKRLESLRELAGKENLEYPSVTLPPQPHTKEGVDAYNEVIARVRMWVNLNLWQKLKLSRDDAKPLLRLKGFPSFPLVERQANEVDWWDMVCNVKKLINEKKEDGKVFWQNLAGYKRQEALRPYLSSEEDRKKGKKFARYQLGDLLLHLEKKHGEDWGKVYDEAWERIDKKVEGLSKHIKLEEERRSEDAQSKAALTDWLRAKASFVIEGLKEADKDEFCRCELKLQKWYGDLRGKPFAIEAENSILDISGFSKQYNCAFIWQKDGVKKLNLYLIINYFKGGKLRFKKIKPEAFEANRFYTVINKKSGEIVPMEVNFNFDDPNLIILPLAFGKRQGREFIWNDLLSLETGSLKLANGRVIEKTLYNRRTRQDEPALFVALTFERREVLDSSNIKPMNLIGVDRGENIPAVIALTDPEGCPLSRFKDSLGNPTHILRIGESYKEKQRTIQAKKEVEQRRAGGYSRKYASKAKNLADDMVRNTARDLLYYAVTQDAMLIFENLSRGFGRQGKRTFMAERQYTRMEDWLTAKLAYEGLPSKTYLSKTLAQYTSKTCSNCGFTITSADYDRMLEKLKKTATGWMTTINGKELKVEGQITYYNRYKRQNVVKDLSVELDRLSEESVNNDISSWTKGRSGEALSLLKKRFSHRPVQEKFVCLNCGFETHADEQAALNIARSWLFLRSQEYKKYQTNKTTGNTDKRAFVETWQSFYRKKLKEVWKPAV

SEQ ID NO: 31786 - protein, 978 aa, synthetic construct
  REGION 1..978: note = engineered CasX variant
QEIGKRINKIRRRLVKDSNTKKAGKTGPMKTLLVRVMTPDLRERLENLRKKPENIPQPISNTSRANLNKLLTDYTEMKKAILHVYWEEFQKDPVGLMSRVAQPASKKIDQNKLKPEMDEKGNLTTAGFACSQCGQPLFVYKLEQVSEKGKAYTNYFGRCNVAEHEKLILLAQLKPEKDSDEAVTYSLGKFGQRALDFYSIHVTKESTHPVKPLAQIAGNRYASPVGKALSDACMGTIASFLSKYQDIIIEHQKVVKGNQKRLESLRELAGKENLEYPSVTLPPQPHTKEGVDAYNEVIARVRMWVNLNLWQKLKLSRDDAKPLLRLKGFPSFPLVERQANEVDWWDMVCNVKKLINEKKEDGKVFWQNLAGYKRQEALRPYLSSEEDRKKGKKFARYQLGDLLLHLEKKHGEDWGKVYDEAWERIDKKVEGLSKHIKLEEERRSEDAQSKAALTDWLRAKASFVIEGLKEADKDEFCRCELKLQKWYGDLRGKPFAIEAENSILDISGFSKQYNCAFIWQKDGVKKLNLYLIINYFKGGKLRFKKIKPEAFEANRFYTVINKKSGEIVPMEVNFNFDDPNLIILPLAFGKRQGREFIWNDLLSLETGSLKLANGRVIEKTLYNRRTRQDEPALFVALTFERREVLDSSNIKPMNLIGVDRGENIPAVIALTDPEGCPLSRFKDSLGNPTHILRIGESYKEKQRTIQAKKEVEQRRAGGYSRKYASKAKNLADDMVRNTARDLLYYAVTQDAMLIFENLSRGFGRQGKRTFMAERQYTRMEDWLTAKLAYEGLPSKTYLSKTLAQYTSKTCSNCGFTITSADYDRMLEKLKKTATGWMTTINGKELKVEGQITYYNRYKRQNVVKDLSVELDRLSEESVNNDISSWTKGRSGEALSLLKKRFSHRPVQEKFVCLNCGFETHADEQAALNIARSWLFLRSQEYKKYQTNKTTGNTDKRAFVETWQSFYRKKLKEVWKPAV

SEQ ID NO: 31787 - protein, 979 aa, synthetic construct
  REGION 1..979: note = engineered CasX variant
QEIGKRINKIRRRLVKDSNTKKAGKTGPMKTLLVRVMTPDLRERLENLRKKPENIPQPISNTSRANLNKLLTDYTEMKKAILHVYWEEFQKDPVGLMSRVAQPASKKIDQNKLKPEMDEKGNLTTAGFACSQCGQPLFVYKLEQVSEKGKAYTNYFGRCNVAEHEKLILLAQLKPEKDSDEAVTYSLGKFGQRALDFYSIHVTKESTHPVKPLAQIAGNRYASYPVGKALSDACMGTIASFLSKYQDIIIEHQKVVKGNQKRLESLRELAGKENLEYPSVTLPPQPHTKEGVDAYNEVIARVRMWVNLNLWQKLKLSRDDAKPLLRLKGFPSFPLVERQANEVDWWDMVCNVKKLINEKKEDGKVFWQNLAGYKRQEALRPYLSSEEDRKKGKKFARYQLGDLLLHLEKKHGEDWGKVYDEAWERIDKKVEGLSKHIKLEEERRSEDAQSKAALTDWLRAKASFVIEGLKEADKDEFCRCELKLQKWYGDLRGKPFAIEAENSILDISGFSKQYNCAFIWQKDGVKKLNLYLIINYFKGGKLRFKKIKPEAFEANRFYTVINKKSGEIVPMEVNFNFDDPNLIILPLAFGKRQGREFIWNDLLSLETGSLKLANGRVIEKTLYNRRTRQDEPALFVALTFERREVLDSSNIKPMNLIGVDRGENIPAVIALTDPEGCPLSRFKDSLGNPTHILRIGESYKEKQRTIQAKKEVEQRRAGGYSRKYASKAKNLADDMVRNTARDLLYYAVTQDAMLIFENLSRGFGRQGKRTFMAERQYTRMEDWLTAKLAYEGLPSKTYLSKTLAQYTSKTCSNCGFTITSADYDRVLEKLKKTATGWMTTINGKELKVEGQITYYNRYKRQNVVKDLSVELDRLSEESVNNDISSWTKGRQGEALSLLKKRFSHRPVQEKFVCLNCGFETHADEQAALNIARSWLFLRSQEYKKYQTNKTTGNTDKRAFVETWQSFYRKKLKEVWKPAV

SEQ ID NO: 31788 - protein, 979 aa, synthetic construct
  REGION 1..979: note = engineered CasX variant
QEIGKRINKIRRRLVKDSNTKKAGKTGPMKTLLVRVMTPDLRERLENLRKKPENIPQPISNTSRANLNKLLTDYTEMKKAILHVYWEEFQKDPVGLMSRVAQPASKKIDQNKLKPEMDEKGNLTTAGFACSQCGQPLFVYKLEQVSEKGKAYTNYFGRCNVAEHEKLILLAQLKPEKDSDEAVTYSLGKFGQRALDFYSIHVTKESTHPVKPLAQIAGNRYASHPVGKALSDACMGTIASFLSKYQDIIIEHQKVVKGNQKRLESLRELAGKENLEYPSVTLPPQPHTKEGVDAYNEVIARVRMWVNLNLWQKLKLSRDDAKPLLRLKGFPSFPLVERQANEVDWWDMVCNVKKLINEKKEDGKVFWQNLAGYKRQEALRPYLSSEEDRKKGKKFARYQLGDLLLHLEKKHGEDWGKVYDEAWERIDKKVEGLSKHIKLEEERRSEDAQSKAALTDWLRAKASFVIEGLKEADKDEFCRCELKLQKWYGDLRGKPFAIEAENSILDISGFSKQYNCAFIWQKDGVKKLNLYLIINYFKGGKLRFKKIKPEAFEANRFYTVINKKSGEIVPMEVNFNFDDPNLIILPLAFGKRQGREFIWNDLLSLETGSLKLANGRVIEKTLYNRRTRQDEPALFVALTFERREVLDSSNIKPMNLIGVDRGENIPAVIALTDPEGCPLSRFKDSLGNPTHILRIGESYKEKQRTIQAKKEVEQRRAGGYSRKYASKAKNLADDMVRNTARDLLYYAVTQDAMLIFENLSRGFGRQGKRTFMAERQYTRMEDWLTAKLAYEGLPSKTYLSKTLAQYTSKTCSNCGFTITSADYDRVLEKLKKTATGWMTTINGKELKVEGQITYYNRYKRQNVVKDLSVELDRLSEESVNNDISSWTKGRQGEALSLLKKRFSHRPVQEKFVCLNCGFETHADEQAALNIARSWLFLRSQEYKKYQTNKTTGNTDKRAFVETWQSFYRKKLKEVWKPAV

SEQ ID NO: 31789 - protein, 979 aa, synthetic construct
  REGION 1..979: note = engineered CasX variant
QEIGKRINKIRRRLVKDSNTKKAGKTGPMKTLLVRVMTPDLRERLENLRKKPENIPQPISNTSRANLNKLLTDYTEMKKAILHVYWEEFQKDPVGLMSRVAQPASKKIDQNKLKPEMDEKGNLTTAGFACSQCGQPLFVYKLEQVSEKGKAYTNYFGRCNVAEHEKLILLAQLKPEKDSDEAVTYSLGKFGQRALDFYSIHVTKESTHPVKPLAQIAGNRYASSPVGKALSDACMGTIASFLSKYQDIIIEHQKVVKGNQKRLESLRELAGKENLEYPSVTLPPQPHTKEGVDAYNEVIARVRMWVNLNLWQKLKLSRDDAKPLLRLKGFPSFPLVERQANEVDWWDMVCNVKKLINEKKEDGKVFWQNLAGYKRQEALRPYLSSEEDRKKGKKFARYQLGDLLLHLEKKHGEDWGKVYDEAWERIDKKVEGLSKHIKLEEERRSEDAQSKAALTDWLRAKASFVIEGLKEADKDEFCRCELKLQKWYGDLRGKPFAIEAENSILDISGFSKQYNCAFIWQKDGVKKLNLYLIINYFKGGKLRFKKIKPEAFEANRFYTVINKKSGEIVPMEVNFNFDDPNLIILPLAFGKRQGREFIWNDLLSLETGSLKLANGRVIEKTLYNRRTRQDEPALFVALTFERREVLDSSNIKPMNLIGVDRGENIPAVIALTDPEGCPLSRFKDSLGNPTHILRIGESYKEKQRTIQAKKEVEQRRAGGYSRKYASKAKNLADDMVRNTARDLLYYAVTQDAMLIFENLSRGFGRQGKRTFMAERQYTRMEDWLTAKLAYEGLPSKTYLSKTLAQYTSKTCSNCGFTITSADYDRVLEKLKKTATGWMTTINGKELKVEGQITYYNRYKRQNVVKDLSVELDRLSEESVNNDISSWTKGRQGEALSLLKKRFSHRPVQEKFVCLNCGFETHADEQAALNIARSWLFLRSQEYKKYQTNKTTGNTDKRAFVETWQSFYRKKLKEVWKPAV

SEQ ID NO: 31790 - protein, 979 aa, synthetic construct
  REGION 1..979: note = engineered CasX variant
QEIGKRINKIRRRLVKDSNTKKAGKTGPMKTLLVRVMTPDLRERLENLRKKPENIPQPISNTSRANLNKLLTDYTEMKKAILHVYWEEFQKDPVGLMSRVAQPASKKIDQNKLKPEMDEKGNLTTAGFACSQCGQPLFVYKLEQVSEKGKAYTNYFGRCNVAEHEKLILLAQLKPEKDSDEAVTYSLGKFGQRALDFYSIHVTKESTHPVKPLAQIAGNRYASTPVGKALSDACMGTIASFLSKYQDIIIEHQKVVKGNQKRLESLRELAGKENLEYPSVTLPPQPHTKEGVDAYNEVIARVRMWVNLNLWQKLKLSRDDAKPLLRLKGFPSFPLVERQANEVDWWDMVCNVKKLINEKKEDGKVFWQNLAGYKRQEALRPYLSSEEDRKKGKKFARYQLGDLLLHLEKKHGEDWGKVYDEAWERIDKKVEGLSKHIKLEEERRSEDAQSKAALTDWLRAKASFVIEGLKEADKDEFCRCELKLQKWYGDLRGKPFAIEAENSILDISGFSKQYNCAFIWQKDGVKKLNLYLIINYFKGGKLRFKKIKPEAFEANRFYTVINKKSGEIVPMEVNFNFDDPNLIILPLAFGKRQGREFIWNDLLSLETGSLKLANGRVIEKTLYNRRTRQDEPALFVALTFERREVLDSSNIKPMNLIGVDRGENIPAVIALTDPEGCPLSRFKDSLGNPTHILRIGESYKEKQRTIQAKKEVEQRRAGGYSRKYASKAKNLADDMVRNTARDLLYYAVTQDAMLIFENLSRGFGRQGKRTFMAERQYTRMEDWLTAKLAYEGLPSKTYLSKTLAQYTSKTCSNCGFTITSADYDRVLEKLKKTATGWMTTINGKELKVEGQITYYNRYKRQNVVKDLSVELDRLSEESVNNDISSWTKGRQGEALSLLKKRFSHRPVQEKFVCLNCGFETHADEQAALNIARSWLFLRSQEYKKYQTNKTTGNTDKRAFVETWQSFYRKKLKEVWKPAV

SEQ ID NO: 31791 - protein, 979 aa, synthetic construct
  REGION 1..979: note = engineered CasX variant
QEIGKRINKIRRRLVKDSNTKKAGKTGPMKTLLVRVMTPDLRERLENLRKKPENIPQPISNTSRANLNKLLTDYTEMKKAILHVYWEEFQKDPVGLMSRVAQPASKKIDQNKLKPEMDEKGNLTTAGFACSQCGQPLFVYKLEQVSEKGKAYTNYFGRCNVAEHEKLILLAQLKPEKDSDEAVTYSLGKFGQRALDFYSIHVTKESTHPVKPLAQIAGNRYASAPVGKALSDACMGTIASFLSKYQDIIIEHQKVVKGNQKRLESLRELAGKENLEYPSVTLPPQPHTKEGVDAYNEVIARVRMWVNLNLWQKLKLSRDDAKPLLRLKGFPSFPLVERQANEVDWWDMVCNVKKLINEKKEDGKVFWQNLAGYKRQEALRPYLSSEEDRKKGKKFARYQLGDLLLHLEKKHGEDWGKVYDEAWERIDKKVEGLSKHIKLEEERRSEDAQSKAALTDWLRAKASFVIEGLKEADKDEFCRCELKLQKWYGDLRGKPFAIEAENSILDISGFSKQYNCAFIWQKDGVKKLNLYLIINYFKGGKLRFKKIKPEAFEANRFYTVINKKSGEIVPMEVNFNFDDPNLIILPLAFGKRQGREFIWNDLLSLETGSLKLANGRVIEKTLYNRRTRQDEPALFVALTFERREVLDSSNIKPMNLIGVDRGENIPAVIALTDPEGCPLSRFKDSLGNPTHILRIGESYKEKQRTIQAKKEVEQRRAGGYSRKYASKAKNLADDMVRNTARDLLYYAVTQDAMLIFENLSRGFGRQGKRTFMAERQYTRMEDWLTAKLAYEGLPSKTYLSKTLAQYTSKTCSNCGFTITSADYDRVLEKLKKTATGWMTTINGKELKVEGQITYYNRYKRQNVVKDLSVELDRLSEESVNNDISSWTKGRQGEALSLLKKRFSHRPVQEKFVCLNCGFETHADEQAALNIARSWLFLRSQEYKKYQTNKTTGNTDKRAFVETWQSFYRKKLKEVWKPAV

SEQ ID NO: 31792 - protein, 979 aa, synthetic construct
  REGION 1..979: note = engineered CasX variant
QEIGKRINKIRRRLVKDSNTKKAGKTGPMKTLLVRVMTPDLRERLENLRKKPENIPQPISNTSRANLNKLLTDYTEMKKAILHVYWEEFQKDPVGLMSRVAQPASKKIDQNKLKPEMDEKGNLTTAGFACSQCGQPLFVYKLEQVSEKGKAYTNYFGRCNVAEHEKLILLAQLKPEKDSDEAVTYSLGKFGQRALDFYSIHVTKESTHPVKPLAQIAGNRYASVPVGKALSDACMGTIASFLSKYQDIIIEHQKVVKGNQKRLESLRELAGKENLEYPSVTLPPQPHTKEGVDAYNEVIARVRMWVNLNLWQKLKLSRDDAKPLLRLKGFPSFPLVERQANEVDWWDMVCNVKKLINEKKEDGKVFWQNLAGYKRQEALRPYLSSEEDRKKGKKFARYQLGDLLLHLEKKHGEDWGKVYDEAWERIDKKVEGLSKHIKLEEERRSEDAQSKAALTDWLRAKASFVIEGLKEADKDEFCRCELKLQKWYGDLRGKPFAIEAENSILDISGFSKQYNCAFIWQKDGVKKLNLYLIINYFKGGKLRFKKIKPEAFEANRFYTVINKKSGEIVPMEVNFNFDDPNLIILPLAFGKRQGREFIWNDLLSLETGSLKLANGRVIEKTLYNRRTRQDEPALFVALTFERREVLDSSNIKPMNLIGVDRGENIPAVIALTDPEGCPLSRFKDSLGNPTHILRIGESYKEKQRTIQAKKEVEQRRAGGYSRKYASKAKNLADDMVRNTARDLLYYAVTQDAMLIFENLSRGFGRQGKRTFMAERQYTRMEDWLTAKLAYEGLPSKTYLSKTLAQYTSKTCSNCGFTITSADYDRVLEKLKKTATGWMTTINGKELKVEGQITYYNRYKRQNVVKDLSVELDRLSEESVNNDISSWTKGRQGEALSLLKKRFSHRPVQEKFVCLNCGFETHADEQAALNIARSWLFLRSQEYKKYQTNKTTGNTDKRAFVETWQSFYRKKLKEVWKPAV

SEQ ID NO: 31793 - protein, 979 aa, synthetic construct
  REGION 1..979: note = engineered CasX variant
QEIGKRINKIRRRLVKDSNTKKAGKTGPMKTLLVRVMTPDLRERLENLRKKPENIPQPISNTSRANLNKLLTDYTEMKKAILHVYWEEFQKDPVGLMSRVAQPASKKIDQNKLKPEMDEKGNLTTAGFACSQCGQPLFVYKLEQVSEKGKAYTNYFGRCNVAEHEKLIKLAQLKPEKDSDEAVTYSLGKFGQRALDFYSIHVTKESTHPVKPLAQIAGNRYASGPVGKALSDACMGTIASFLSKYQDIIIEHQKVVKGNQKRLESLRELAGKENLEYPSVTLPPQPHTKEGVDAYNEVIARVRMWVNLNLWQKLKLSRDDAKPLLRLKGFPSFPLVERQANEVDWWDMVCNVKKLINEKKEDGKVFWQNLAGYKRQEALRPYLSSEEDRKKGKKFARYQLGDLLLHLEKKHGEDWGKVYDEAWERIDKKVEGLSKHIKLEEERRSEDAQSKAALTDWLRAKASFVIEGLKEADKDEFCRCELKLQKWYGDLRGKPFAIEAENSILDISGFSKQYNCAFIWQKDGVKKLNLYLIINYFKGGKLRFKKIKPEAFEANRFYTVINKKSGEIVPMEVNFNFDDPNLIILPLAFGKRQGREFIWNDLLSLETGSLKLANGRVIEKTLYNRRTRQDEPALFVALTFERREVLDSSNIKPMNLIGVDRGENIPAVIALTDPEGCPLSRFKDSLGNPTHILRIGESYKEKQRTIQAKKEVEQRRAGGYSRKYASKAKNLADDMVRNTARDLLYYAVTQDAMLIFENLSRGFGRQGKRTFMAERQYTRMEDWLTAKLAYEGLPSKTYLSKTLAQYTSKTCSNCGFTITSADYDRVLEKLKKTATGWMTTINGKELKVEGQITYYNRYKRQNVVKDLSVELDRLSEESVNNDISSWTKGRQGEALSLLKKRFSHRPVQEKFVCLNCGFETHADEQAALNIARSWLFLRSQEYKKYQTNKTTGNTDKRAFVETWQSFYRKKLKEVWKPAV

SEQ ID NO: 31794 - protein, 978 aa, synthetic construct
  REGION 1..978: note = engineered CasX variant
QEIGKRINKIRRRLVKDSNTKKAGKTGPMKTLLVRVMTPDLRERLENLRKKPENIPQPISNTSRANLNKLLTDYTEMKKAILHVYWEEFQKDPVGLMSRVAQPASKKIDQNKLKPEMDEKGNLTTAGFACSQCGQPLFVYKLEQVSEKGKAYTNYFGRCNVAEHEKLILLAQLKPEKDSDEAVTYSLGKFGQRALDFYSIHVTKESTHPVKPLAQIAGNRYASPVGKALSDACMGTIASFLSKYQDIIIEHQKVVKGNQKRLESLRELAGKENLEYPSVTLPPQPHTKEGVDAYNEVIARVRMWVNLNLWQKLKLSRDDAKPLLRLKGFPSFPLVERQANEVDWWDMVCNVKKLINEKKEDGKVFWQNLAGYKRQEALRPYLSSEEDRKKGKKFARYQLGDLLLHLEKKHGEDWGKVYDEAWERIDKKVEGLSKHIKLEEERRSEDAQSKAALTDWLRAKASFVIEGLKEADKDEFCRCELKLQKWYGDLRGKPFAIEAENSILDISGFSKQYNCAFIWQKDGVKKLNLYLIINYFKGGKLRFKKIKPEAFEANRFYTVINKKSGEIVPMEVNFNFDDPNLIILPLAFGKRQGREFIWNDLLSLETGSLKLANGRVIEKTLYNRRTRQDEPALFVALTFERREVLDSSNIKPMNLIGVDRGENIPAVIALTDPEGCPLSRFKDSLGNPTHILRIGESYKEKQRTIQAKKEVEQRRAGGYSRKYASKAKNLADDMVRNTARDLLYYAVTQDAMLIFENLSRGFGRQGKRTFMAERQYTRMEDWLTAKLAYEGLPSKTYLSKTLAQYTSKTCSNCGFTITSADYDRVLEKLKKTATGWMTTINGKELKVEGQITYYNRYKRQNVVKDLSVELDRLSEESVNNDISSWTKGRQGEALSLLKKRFSHRPVQEKFVCLNCGFETHADEQAALNIARSWLFLRSQEYKKYQTNKTTGNTDKRAFVETWQSFYRKKLKEVWKPAV

SEQ ID NO: 31795 - protein, 979 aa, synthetic construct
  REGION 1..979: note = engineered CasX variant
QEIGKRINKIRRRLVKDSNTKKAGKTGPMKTLLVRVMTPDLRERLENLRKKPENIPQPISNTSRANLNKLLTDYTEMKKAILHVYWEEFQKDPVGLMSRVAQPASKKIDQNKLKPEMDEKGNLTTAGFACSQCGQPLFVYKLEQVSEKGKAYTNYFGRCNVAEHEKLILLAQLKPEKDSDEAVTYSLGKFGQRALDFYSIHVTKESTHPVKPLAQIAGNRYASYPVGKALSDACMGTIASFLSKYQDIIIEHQKVVKGNQKRLESLRELAGKENLEYPSVTLPPQPHTKEGVDAYNEVIARVRMWVNLNLWQKLKLSRDDAKPLLRLKGFPSFPLVERQANEVDWWDMVCNVKKLINEKKEDGKVFWQNLAGYKRQEALRPYLSSEEDRKKGKKFARYQLGDLLLHLEKKHGEDWGKVYDEAWERIDKKVEGLSKHIKLEEERRSEDAQSKAALTDWLRAKASFVIEGLKEADKDEFCRCELKLQKWYGDLRGKPFAIEAENSILDISGFSKQYNCAFIWQKDGVKKLNLYLIINYFKGGKLRFKKIKPEAFEANRFYTVINKKSGEIVPMEVNFNFDDPNLIILPLAFGKRQGREFIWNDLLSLETGSLKLANGRVIEKTLYNRRTRQDEPALFVALTFERREVLDSSNIKPMNLIGVDRGENIPAVIALTDPEGCPLSRFKDSLGNPTHILRIGESYKEKQRTIQAKKEVEQRRAGGYSRKYASKAKNLADDMVRNTARDLLYYAVTQDAMLIFENLSRGFGRQGKRTFMAERQYTRMEDWLTAKLAYEGLPSKTYLSKTLAQYTSKTCSNCGFTITSADYDRVLEKLKKTATGWMTTINGKELKVEGQITYYNRYKRQNVVKDLSVELDRLSEESVNNDISSWTKGRSGEALSLLKKRFSHRPVQEKFVCLNCEFETHADEQAALNIARSWLFLRSQEYKKYQTNKTTGNTDKRAFVETWQSFYRKKLKEVWKPAV

SEQ ID NO: 31796 - protein, 979 aa, synthetic construct
  REGION 1..979: note = engineered CasX variant
QEIGKRINKIRRRLVKDSNTKKAGKTGPMKTLLVRVMTPDLRERLENLRKKPENIPQPISNTSRANLNKLLTDYTEMKKAILHVYWEEFQKDPVGLMSRVAQPASKKIDQNKLKPEMDEKGNLTTAGFACSQCGQPLFVYKLEQVSEKGKAYTNYFGRCNVAEHEKLILLAQLKPEKDSDEAVTYSLGKFGQRALDFYSIHVTKESTHPVKPLAQIAGNRYASHPVGKALSDACMGTIASFLSKYQDIIIEHQKVVKGNQKRLESLRELAGKENLEYPSVTLPPQPHTKEGVDAYNEVIARVRMWVNLNLWQKLKLSRDDAKPLLRLKGFPSFPLVERQANEVDWWDMVCNVKKLINEKKEDGKVFWQNLAGYKRQEALRPYLSSEEDRKKGKKFARYQLGDLLLHLEKKHGEDWGKVYDEAWERIDKKVEGLSKHIKLEEERRSEDAQSKAALTDWLRAKASFVIEGLKEADKDEFCRCELKLQKWYGDLRGKPFAIEAENSILDISGFSKQYNCAFIWQKDGVKKLNLYLIINYFKGGKLRFKKIKPEAFEANRFYTVINKKSGEIVPMEVNFNFDDPNLIILPLAFGKRQGREFIWNDLLSLETGSLKLANGRVIEKTLYNRRTRQDEPALFVALTFERREVLDSSNIKPMNLIGVDRGENIPAVIALTDPEGCPLSRFKDSLGNPTHILRIGESYKEKQRTIQAKKEVEQRRAGGYSRKYASKAKNLADDMVRNTARDLLYYAVTQDAMLIFENLSRGFGRQGKRTFMAERQYTRMEDWLTAKLAYEGLPSKTYLSKTLAQYTSKTCSNCGFTITSADYDRVLEKLKKTATGWMTTINGKELKVEGQITYYNRYKRQNVVKDLSVELDRLSEESVNNDISSWTKGRSGEALSLLKKRFSHRPVQEKFVCLNCEFETHADEQAALNIARSWLFLRSQEYKKYQTNKTTGNTDKRAFVETWQSFYRKKLKEVWKPAV

SEQ ID NO: 31797 - protein, 979 aa, synthetic construct
  REGION 1..979: note = engineered CasX variant
QEIGKRINKIRRRLVKDSNTKKAGKTGPMKTLLVRVMTPDLRERLENLRKKPENIPQPISNTSRANLNKLLTDYTEMKKAILHVYWEEFQKDPVGLMSRVAQPASKKIDQNKLKPEMDEKGNLTTAGFACSQCGQPLFVYKLEQVSEKGKAYTNYFGRCNVAEHEKLILLAQLKPEKDSDEAVTYSLGKFGQRALDFYSIHVTKESTHPVKPLAQIAGNRYASSPVGKALSDACMGTIASFLSKYQDIIIEHQKVVKGNQKRLESLRELAGKENLEYPSVTLPPQPHTKEGVDAYNEVIARVRMWVNLNLWQKLKLSRDDAKPLLRLKGFPSFPLVERQANEVDWWDMVCNVKKLINEKKEDGKVFWQNLAGYKRQEALRPYLSSEEDRKKGKKFARYQLGDLLLHLEKKHGEDWGKVYDEAWERIDKKVEGLSKHIKLEEERRSEDAQSKAALTDWLRAKASFVIEGLKEADKDEFCRCELKLQKWYGDLRGKPFAIEAENSILDISGFSKQYNCAFIWQKDGVKKLNLYLIINYFKGGKLRFKKIKPEAFEANRFYTVINKKSGEIVPMEVNFNFDDPNLIILPLAFGKRQGREFIWNDLLSLETGSLKLANGRVIEKTLYNRRTRQDEPALFVALTFERREVLDSSNIKPMNLIGVDRGENIPAVIALTDPEGCPLSRFKDSLGNPTHILRIGESYKEKQRTIQAKKEVEQRRAGGYSRKYASKAKNLADDMVRNTARDLLYYAVTQDAMLIFENLSRGFGRQGKRTFMAERQYTRMEDWLTAKLAYEGLPSKTYLSKTLAQYTSKTCSNCGFTITSADYDRVLEKLKKTATGWMTTINGKELKVEGQITYYNRYKRQNVVKDLSVELDRLSEESVNNDISSWTKGRSGEALSLLKKRFSHRPVQEKFVCLNCEFETHADEQAALNIARSWLFLRSQEYKKYQTNKTTGNTDKRAFVETWQSFYRKKLKEVWKPAV

SEQ ID NO: 31798 - protein, 979 aa, synthetic construct
  REGION 1..979: note = engineered CasX variant
QEIGKRINKIRRRLVKDSNTKKAGKTGPMKTLLVRVMTPDLRERLENLRKKPENIPQPISNTSRANLNKLLTDYTEMKKAILHVYWEEFQKDPVGLMSRVAQPASKKIDQNKLKPEMDEKGNLTTAGFACSQCGQPLFVYKLEQVSEKGKAYTNYFGRCNVAEHEKLILLAQLKPEKDSDEAVTYSLGKFGQRALDFYSIHVTKESTHPVKPLAQIAGNRYASTPVGKALSDACMGTIASFLSKYQDIIIEHQKVVKGNQKRLESLRELAGKENLEYPSVTLPPQPHTKEGVDAYNEVIARVRMWVNLNLWQKLKLSRDDAKPLLRLKGFPSFPLVERQANEVDWWDMVCNVKKLINEKKEDGKVFWQNLAGYKRQEALRPYLSSEEDRKKGKKFARYQLGDLLLHLEKKHGEDWGKVYDEAWERIDKKVEGLSKHIKLEEERRSEDAQSKAALTDWLRAKASFVIEGLKEADKDEFCRCELKLQKWYGDLRGKPFAIEAENSILDISGFSKQYNCAFIWQKDGVKKLNLYLIINYFKGGKLRFKKIKPEAFEANRFYTVINKKSGEIVPMEVNFNFDDPNLIILPLAFGKRQGREFIWNDLLSLETGSLKLANGRVIEKTLYNRRTRQDEPALFVALTFERREVLDSSNIKPMNLIGVDRGENIPAVIALTDPEGCPLSRFKDSLGNPTHILRIGESYKEKQRTIQAKKEVEQRRAGGYSRKYASKAKNLADDMVRNTARDLLYYAVTQDAMLIFENLSRGFGRQGKRTFMAERQYTRMEDWLTAKLAYEGLPSKTYLSKTLAQYTSKTCSNCGFTITSADYDRVLEKLKKTATGWMTTINGKELKVEGQITYYNRYKRQNVVKDLSVELDRLSEESVNNDISSWTKGRSGEALSLLKKRFSHRPVQEKFVCLNCEFETHADEQAALNIARSWLFLRSQEYKKYQTNKTTGNTDKRAFVETWQSFYRKKLKEVWKPAV

SEQ ID NO: 31799 - protein, 979 aa, synthetic construct
  REGION 1..979: note = engineered CasX variant
QEIGKRINKIRRRLVKDSNTKKAGKTGPMKTLLVRVMTPDLRERLENLRKKPENIPQPISNTSRANLNKLLTDYTEMKKAILHVYWEEFQKDPVGLMSRVAQPASKKIDQNKLKPEMDEKGNLTTAGFACSQCGQPLFVYKLEQVSEKGKAYTNYFGRCNVAEHEKLILLAQLKPEKDSDEAVTYSLGKFGQRALDFYSIHVTKESTHPVKPLAQIAGNRYASAPVGKALSDACMGTIASFLSKYQDIIIEHQKVVKGNQKRLESLRELAGKENLEYPSVTLPPQPHTKEGVDAYNEVIARVRMWVNLNLWQKLKLSRDDAKPLLRLKGFPSFPLVERQANEVDWWDMVCNVKKLINEKKEDGKVFWQNLAGYKRQEALRPYLSSEEDRKKGKKFARYQLGDLLLHLEKKHGEDWGKVYDEAWERIDKKVEGLSKHIKLEEERRSEDAQSKAALTDWLRAKASFVIEGLKEADKDEFCRCELKLQKWYGDLRGKPFAIEAENSILDISGFSKQYNCAFIWQKDGVKKLNLYLIINYFKGGKLRFKKIKPEAFEANRFYTVINKKSGEIVPMEVNFNFDDPNLIILPLAFGKRQGREFIWNDLLSLETGSLKLANGRVIEKTLYNRRTRQDEPALFVALTFERREVLDSSNIKPMNLIGVDRGENIPAVIALTDPEGCPLSRFKDSLGNPTHILRIGESYKEKQRTIQAKKEVEQRRAGGYSRKYASKAKNLADDMVRNTARDLLYYAVTQDAMLIFENLSRGFGRQGKRTFMAERQYTRMEDWLTAKLAYEGLPSKTYLSKTLAQYTSKTCSNCGFTITSADYDRVLEKLKKTATGWMTTINGKELKVEGQITYYNRYKRQNVVKDLSVELDRLSEESVNNDISSWTKGRSGEALSLLKKRFSHRPVQEKFVCLNCEFETHADEQAALNIARSWLFLRSQEYKKYQTNKTTGNTDKRAFVETWQSFYRKKLKEVWKPAV

SEQ ID NO: 31800 - protein, 979 aa, synthetic construct
  REGION 1..979: note = engineered CasX variant
QEIGKRINKIRRRLVKDSNTKKAGKTGPMKTLLVRVMTPDLRERLENLRKKPENIPQPISNTSRANLNKLLTDYTEMKKAILHVYWEEFQKDPVGLMSRVAQPASKKIDQNKLKPEMDEKGNLTTAGFACSQCGQPLFVYKLEQVSEKGKAYTNYFGRCNVAEHEKLILLAQLKPEKDSDEAVTYSLGKFGQRALDFYSIHVTKESTHPVKPLAQIAGNRYASVPVGKALSDACMGTIASFLSKYQDIIIEHQKVVKGNQKRLESLRELAGKENLEYPSVTLPPQPHTKEGVDAYNEVIARVRMWVNLNLWQKLKLSRDDAKPLLRLKGFPSFPLVERQANEVDWWDMVCNVKKLINEKKEDGKVFWQNLAGYKRQEALRPYLSSEEDRKKGKKFARYQLGDLLLHLEKKHGEDWGKVYDEAWERIDKKVEGLSKHIKLEEERRSEDAQSKAALTDWLRAKASFVIEGLKEADKDEFCRCELKLQKWYGDLRGKPFAIEAENSILDISGFSKQYNCAFIWQKDGVKKLNLYLIINYFKGGKLRFKKIKPEAFEANRFYTVINKKSGEIVPMEVNFNFDDPNLIILPLAFGKRQGREFIWNDLLSLETGSLKLANGRVIEKTLYNRRTRQDEPALFVALTFERREVLDSSNIKPMNLIGVDRGENIPAVIALTDPEGCPLSRFKDSLGNPTHILRIGESYKEKQRTIQAKKEVEQRRAGGYSRKYASKAKNLADDMVRNTARDLLYYAVTQDAMLIFENLSRGFGRQGKRTFMAERQYTRMEDWLTAKLAYEGLPSKTYLSKTLAQYTSKTCSNCGFTITSADYDRVLEKLKKTATGWMTTINGKELKVEGQITYYNRYKRQNVVKDLSVELDRLSEESVNNDISSWTKGRSGEALSLLKKRFSHRPVQEKFVCLNCEFETHADEQAALNIARSWLFLRSQEYKKYQTNKTTGNTDKRAFVETWQSFYRKKLKEVWKPAV

SEQ ID NO: 31801 - protein, 979 aa, synthetic construct
  REGION 1..979: note = engineered CasX variant
QEIGKRINKIRRRLVKDSNTKKAGKTGPMKTLLVRVMTPDLRERLENLRKKPENIPQPISNTSRANLNKLLTDYTEMKKAILHVYWEEFQKDPVGLMSRVAQPASKKIDQNKLKPEMDEKGNLTTAGFACSQCGQPLFVYKLEQVSEKGKAYTNYFGRCNVAEHEKLIKLAQLKPEKDSDEAVTYSLGKFGQRALDFYSIHVTKESTHPVKPLAQIAGNRYASGPVGKALSDACMGTIASFLSKYQDIIIEHQKVVKGNQKRLESLRELAGKENLEYPSVTLPPQPHTKEGVDAYNEVIARVRMWVNLNLWQKLKLSRDDAKPLLRLKGFPSFPLVERQANEVDWWDMVCNVKKLINEKKEDGKVFWQNLAGYKRQEALRPYLSSEEDRKKGKKFARYQLGDLLLHLEKKHGEDWGKVYDEAWERIDKKVEGLSKHIKLEEERRSEDAQSKAALTDWLRAKASFVIEGLKEADKDEFCRCELKLQKWYGDLRGKPFAIEAENSILDISGFSKQYNCAFIWQKDGVKKLNLYLIINYFKGGKLRFKKIKPEAFEANRFYTVINKKSGEIVPMEVNFNFDDPNLIILPLAFGKRQGREFIWNDLLSLETGSLKLANGRVIEKTLYNRRTRQDEPALFVALTFERREVLDSSNIKPMNLIGVDRGENIPAVIALTDPEGCPLSRFKDSLGNPTHILRIGESYKEKQRTIQAKKEVEQRRAGGYSRKYASKAKNLADDMVRNTARDLLYYAVTQDAMLIFENLSRGFGRQGKRTFMAERQYTRMEDWLTAKLAYEGLPSKTYLSKTLAQYTSKTCSNCGFTITSADYDRVLEKLKKTATGWMTTINGKELKVEGQITYYNRYKRQNVVKDLSVELDRLSEESVNNDISSWTKGRSGEALSLLKKRFSHRPVQEKFVCLNCEFETHADEQAALNIARSWLFLRSQEYKKYQTNKTTGNTDKRAFVETWQSFYRKKLKEVWKPAV

SEQ ID NO: 31802 - protein, 978 aa, synthetic construct
  REGION 1..978: note = engineered CasX variant
QEIGKRINKIRRRLVKDSNTKKAGKTGPMKTLLVRVMTPDLRERLENLRKKPENIPQPISNTSRANLNKLLTDYTEMKKAILHVYWEEFQKDPVGLMSRVAQPASKKIDQNKLKPEMDEKGNLTTAGFACSQCGQPLFVYKLEQVSEKGKAYTNYFGRCNVAEHEKLILLAQLKPEKDSDEAVTYSLGKFGQRALDFYSIHVTKESTHPVKPLAQIAGNRYASPVGKALSDACMGTIASFLSKYQDIIIEHQKVVKGNQKRLESLRELAGKENLEYPSVTLPPQPHTKEGVDAYNEVIARVRMWVNLNLWQKLKLSRDDAKPLLRLKGFPSFPLVERQANEVDWWDMVCNVKKLINEKKEDGKVFWQNLAGYKRQEALRPYLSSEEDRKKGKKFARYQLGDLLLHLEKKHGEDWGKVYDEAWERIDKKVEGLSKHIKLEEERRSEDAQSKAALTDWLRAKASFVIEGLKEADKDEFCRCELKLQKWYGDLRGKPFAIEAENSILDISGFSKQYNCAFIWQKDGVKKLNLYLIINYFKGGKLRFKKIKPEAFEANRFYTVINKKSGEIVPMEVNFNFDDPNLIILPLAFGKRQGREFIWNDLLSLETGSLKLANGRVIEKTLYNRRTRQDEPALFVALTFERREVLDSSNIKPMNLIGVDRGENIPAVIALTDPEGCPLSRFKDSLGNPTHILRIGESYKEKQRTIQAKKEVEQRRAGGYSRKYASKAKNLADDMVRNTARDLLYYAVTQDAMLIFENLSRGFGRQGKRTFMAERQYTRMEDWLTAKLAYEGLPSKTYLSKTLAQYTSKTCSNCGFTITSADYDRVLEKLKKTATGWMTTINGKELKVEGQITYYNRYKRQNVVKDLSVELDRLSEESVNNDISSWTKGRSGEALSLLKKRFSHRPVQEKFVCLNCEFETHADEQAALNIARSWLFLRSQEYKKYQTNKTTGNTDKRAFVETWQSFYRKKLKEVWKPAV

SEQ ID NO: 31803 - protein, 980 aa, synthetic construct
  REGION 1..980: note = engineered CasX variant
QEIGKRINKIRRRLVKDSNTKKAGKTGPMKTLLVRVMTPDLRERLENLRKKPENIPQPISNTSRANLNKLLTDYTEMKKAILHVYWEEFQKDPVGLMSRVAQPASKKIDQNKLKPEMDEKGNLTTAGFACSQCGQPLFVYKLEQVSEKGKAYTNYFGRCNVAEHEKLILLAQLKPEKDSDEAVTYSLGKFGQRALDFYSIHVTKESTHPVKPLAQIAGNRYASYPVGKALSDACMGTIASFLSKYQDIIIEHQKVVKGNQKRLESLRELAGKENLEYPSVTLPPQPHTKEGVDAYNEVIARVRMWVNLNLWQKLKLSRDDAKPLLRLKGFPSFPLVERQANEVDWWDMVCNVKKLINEKKEDGKVFWQNLAGYKRQEALRPYLSSEEDRKKGKKFARYQLGDLLLHLEKKHGEDWGKVYDEAWERIDKKVEGLSKHIKLEEERRSEDAQSKAALTDWLRAKASFVIEGLKEADKDEFCRCELKLQKWYGDLRGKPFAIEAENSILDISGFSKQYNCAFIWQKDGVKKLNLYLIINYFKGGKLRFKKIKPEAFEANRFYTVINKKSGEIVPMEVNFNFDDPNLIILPLAFGKRQGREFIWNDLLSLETGSLKLANGRVIEKTLYNRRTRQDEPALFVALTFERREVLDSSNIKPMNLIGVDRGENIPAVIALTDPEGCPLSRFKDSLGNPTHILRIGESYKEKQRTIQAKKEVEQRRAGGYSRKYASKAKNLADDMVRNTARDLLYYAVTQDAMLIFENLSRGFGRQGKRTFMAERQYTRMEDWLTAKLAYEGLPSKTYLSKTLAQYTSKTCSNCGFTITSADYDRVLEKLKKTATGWMTTINGKELKVEGQITYYNRYKRQNVVKDLSVELDRLSEESVNNDISSWTKGRSGEALSLLKKRFSHRPVQEKFVCLNCGFETHADEQAALNIARSWLFLRSQEYKKYQTNKTSTGNTDKRAFVETWQSFYRKKLKEVWKPAV

SEQ ID NO: 31804 - protein, 980 aa, synthetic construct
  REGION 1..980: note = engineered CasX variant
QEIGKRINKIRRRLVKDSNTKKAGKTGPMKTLLVRVMTPDLRERLENLRKKPENIPQPISNTSRANLNKLLTDYTEMKKAILHVYWEEFQKDPVGLMSRVAQPASKKIDQNKLKPEMDEKGNLTTAGFACSQCGQPLFVYKLEQVSEKGKAYTNYFGRCNVAEHEKLILLAQLKPEKDSDEAVTYSLGKFGQRALDFYSIHVTKESTHPVKPLAQIAGNRYASHPVGKALSDACMGTIASFLSKYQDIIIEHQKVVKGNQKRLESLRELAGKENLEYPSVTLPPQPHTKEGVDAYNEVIARVRMWVNLNLWQKLKLSRDDAKPLLRLKGFPSFPLVERQANEVDWWDMVCNVKKLINEKKEDGKVFWQNLAGYKRQEALRPYLSSEEDRKKGKKFARYQLGDLLLHLEKKHGEDWGKVYDEAWERIDKKVEGLSKHIKLEEERRSEDAQSKAALTDWLRAKASFVIEGLKEADKDEFCRCELKLQKWYGDLRGKPFAIEAENSILDISGFSKQYNCAFIWQKDGVKKLNLYLIINYFKGGKLRFKKIKPEAFEANRFYTVINKKSGEIVPMEVNFNFDDPNLIILPLAFGKRQGREFIWNDLLSLETGSLKLANGRVIEKTLYNRRTRQDEPALFVALTFERREVLDSSNIKPMNLIGVDRGENIPAVIALTDPEGCPLSRFKDSLGNPTHILRIGESYKEKQRTIQAKKEVEQRRAGGYSRKYASKAKNLADDMVRNTARDLLYYAVTQDAMLIFENLSRGFGRQGKRTFMAERQYTRMEDWLTAKLAYEGLPSKTYLSKTLAQYTSKTCSNCGFTITSADYDRVLEKLKKTATGWMTTINGKELKVEGQITYYNRYKRQNVVKDLSVELDRLSEESVNNDISSWTKGRSGEALSLLKKRFSHRPVQEKFVCLNCGFETHADEQAALNIARSWLFLRSQEYKKYQTNKTSTGNTDKRAFVETWQSFYRKKLKEVWKPAV

SEQ ID NO: 31805 - protein, 980 aa, synthetic construct
  REGION 1..980: note = engineered CasX variant
QEIGKRINKIRRRLVKDSNTKKAGKTGPMKTLLVRVMTPDLRERLENLRKKPENIPQPISNTSRANLNKLLTDYTEMKKAILHVYWEEFQKDPVGLMSRVAQPASKKIDQNKLKPEMDEKGNLTTAGFACSQCGQPLFVYKLEQVSEKGKAYTNYFGRCNVAEHEKLILLAQLKPEKDSDEAVTYSLGKFGQRALDFYSIHVTKESTHPVKPLAQIAGNRYASSPVGKALSDACMGTIASFLSKYQDIIIEHQKVVKGNQKRLESLRELAGKENLEYPSVTLPPQPHTKEGVDAYNEVIARVRMWVNLNLWQKLKLSRDDAKPLLRLKGFPSFPLVERQANEVDWWDMVCNVKKLINEKKEDGKVFWQNLAGYKRQEALRPYLSSEEDRKKGKKFARYQLGDLLLHLEKKHGEDWGKVYDEAWERIDKKVEGLSKHIKLEEERRSEDAQSKAALTDWLRAKASFVIEGLKEADKDEFCRCELKLQKWYGDLRGKPFAIEAENSILDISGFSKQYNCAFIWQKDGVKKLNLYLIINYFKGGKLRFKKIKPEAFEANRFYTVINKKSGEIVPMEVNFNFDDPNLIILPLAFGKRQGREFIWNDLLSLETGSLKLANGRVIEKTLYNRRTRQDEPALFVALTFERREVLDSSNIKPMNLIGVDRGENIPAVIALTDPEGCPLSRFKDSLGNPTHILRIGESYKEKQRTIQAKKEVEQRRAGGYSRKYASKAKNLADDMVRNTARDLLYYAVTQDAMLIFENLSRGFGRQGKRTFMAERQYTRMEDWLTAKLAYEGLPSKTYLSKTLAQYTSKTCSNCGFTITSADYDRVLEKLKKTATGWMTTINGKELKVEGQITYYNRYKRQNVVKDLSVELDRLSEESVNNDISSWTKGRSGEALSLLKKRFSHRPVQEKFVCLNCGFETHADEQAALNIARSWLFLRSQEYKKYQTNKTSTGNTDKRAFVETWQSFYRKKLKEVWKPAV

SEQ ID NO: 31806 - protein, 980 aa, synthetic construct
  REGION 1..980: note = engineered CasX variant
QEIGKRINKIRRRLVKDSNTKKAGKTGPMKTLLVRVMTPDLRERLENLRKKPENIPQPISNTSRANLNKLLTDYTEMKKAILHVYWEEFQKDPVGLMSRVAQPASKKIDQNKLKPEMDEKGNLTTAGFACSQCGQPLFVYKLEQVSEKGKAYTNYFGRCNVAEHEKLILLAQLKPEKDSDEAVTYSLGKFGQRALDFYSIHVTKESTHPVKPLAQIAGNRYASTPVGKALSDACMGTIASFLSKYQDIIIEHQKVVKGNQKRLESLRELAGKENLEYPSVTLPPQPHTKEGVDAYNEVIARVRMWVNLNLWQKLKLSRDDAKPLLRLKGFPSFPLVERQANEVDWWDMVCNVKKLINEKKEDGKVFWQNLAGYKRQEALRPYLSSEEDRKKGKKFARYQLGDLLLHLEKKHGEDWGKVYDEAWERIDKKVEGLSKHIKLEEERRSEDAQSKAALTDWLRAKASFVIEGLKEADKDEFCRCELKLQKWYGDLRGKPFAIEAENSILDISGFSKQYNCAFIWQKDGVKKLNLYLIINYFKGGKLRFKKIKPEAFEANRFYTVINKKSGEIVPMEVNFNFDDPNLIILPLAFGKRQGREFIWNDLLSLETGSLKLANGRVIEKTLYNRRTRQDEPALFVALTFERREVLDSSNIKPMNLIGVDRGENIPAVIALTDPEGCPLSRFKDSLGNPTHILRIGESYKEKQRTIQAKKEVEQRRAGGYSRKYASKAKNLADDMVRNTARDLLYYAVTQDAMLIFENLSRGFGRQGKRTFMAERQYTRMEDWLTAKLAYEGLPSKTYLSKTLAQYTSKTCSNCGFTITSADYDRVLEKLKKTATGWMTTINGKELKVEGQITYYNRYKRQNVVKDLSVELDRLSEESVNNDISSWTKGRSGEALSLLKKRFSHRPVQEKFVCLNCGFETHADEQAALNIARSWLFLRSQEYKKYQTNKTSTGNTDKRAFVETWQSFYRKKLKEVWKPAV

SEQ ID NO: 31807 - protein, 980 aa, synthetic construct
  REGION 1..980: note = engineered CasX variant
QEIGKRINKIRRRLVKDSNTKKAGKTGPMKTLLVRVMTPDLRERLENLRKKPENIPQPISNTSRANLNKLLTDYTEMKKAILHVYWEEFQKDPVGLMSRVAQPASKKIDQNKLKPEMDEKGNLTTAGFACSQCGQPLFVYKLEQVSEKGKAYTNYFGRCNVAEHEKLILLAQLKPEKDSDEAVTYSLGKFGQRALDFYSIHVTKESTHPVKPLAQIAGNRYASAPVGKALSDACMGTIASFLSKYQDIIIEHQKVVKGNQKRLESLRELAGKENLEYPSVTLPPQPHTKEGVDAYNEVIARVRMWVNLNLWQKLKLSRDDAKPLLRLKGFPSFPLVERQANEVDWWDMVCNVKKLINEKKEDGKVFWQNLAGYKRQEALRPYLSSEEDRKKGKKFARYQLGDLLLHLEKKHGEDWGKVYDEAWERIDKKVEGLSKHIKLEEERRSEDAQSKAALTDWLRAKASFVIEGLKEADKDEFCRCELKLQKWYGDLRGKPFAIEAENSILDISGFSKQYNCAFIWQKDGVKKLNLYLIINYFKGGKLRFKKIKPEAFEANRFYTVINKKSGEIVPMEVNFNFDDPNLIILPLAFGKRQGREFIWNDLLSLETGSLKLANGRVIEKTLYNRRTRQDEPALFVALTFERREVLDSSNIKPMNLIGVDRGENIPAVIALTDPEGCPLSRFKDSLGNPTHILRIGESYKEKQRTIQAKKEVEQRRAGGYSRKYASKAKNLADDMVRNTARDLLYYAVTQDAMLIFENLSRGFGRQGKRTFMAERQYTRMEDWLTAKLAYEGLPSKTYLSKTLAQYTSKTCSNCGFTITSADYDRVLEKLKKTATGWMTTINGKELKVEGQITYYNRYKRQNVVKDLSVELDRLSEESVNNDISSWTKGRSGEALSLLKKRFSHRPVQEKFVCLNCGFETHADEQAALNIARSWLFLRSQEYKKYQTNKTSTGNTDKRAFVETWQSFYRKKLKEVWKPAV

SEQ ID NO: 31808 - protein, 980 aa, synthetic construct
  REGION 1..980: note = engineered CasX variant
QEIGKRINKIRRRLVKDSNTKKAGKTGPMKTLLVRVMTPDLRERLENLRKKPENIPQPISNTSRANLNKLLTDYTEMKKAILHVYWEEFQKDPVGLMSRVAQPASKKIDQNKLKPEMDEKGNLTTAGFACSQCGQPLFVYKLEQVSEKGKAYTNYFGRCNVAEHEKLILLAQLKPEKDSDEAVTYSLGKFGQRALDFYSIHVTKESTHPVKPLAQIAGNRYASVPVGKALSDACMGTIASFLSKYQDIIIEHQKVVKGNQKRLESLRELAGKENLEYPSVTLPPQPHTKEGVDAYNEVIARVRMWVNLNLWQKLKLSRDDAKPLLRLKGFPSFPLVERQANEVDWWDMVCNVKKLINEKKEDGKVFWQNLAGYKRQEALRPYLSSEEDRKKGKKFARYQLGDLLLHLEKKHGEDWGKVYDEAWERIDKKVEGLSKHIKLEEERRSEDAQSKAALTDWLRAKASFVIEGLKEADKDEFCRCELKLQKWYGDLRGKPFAIEAENSILDISGFSKQYNCAFIWQKDGVKKLNLYLIINYFKGGKLRFKKIKPEAFEANRFYTVINKKSGEIVPMEVNFNFDDPNLIILPLAFGKRQGREFIWNDLLSLETGSLKLANGRVIEKTLYNRRTRQDEPALFVALTFERREVLDSSNIKPMNLIGVDRGENIPAVIALTDPEGCPLSRFKDSLGNPTHILRIGESYKEKQRTIQAKKEVEQRRAGGYSRKYASKAKNLADDMVRNTARDLLYYAVTQDAMLIFENLSRGFGRQGKRTFMAERQYTRMEDWLTAKLAYEGLPSKTYLSKTLAQYTSKTCSNCGFTITSADYDRVLEKLKKTATGWMTTINGKELKVEGQITYYNRYKRQNVVKDLSVELDRLSEESVNNDISSWTKGRSGEALSLLKKRFSHRPVQEKFVCLNCGFETHADEQAALNIARSWLFLRSQEYKKYQTNKTSTGNTDKRAFVETWQSFYRKKLKEVWKPAV

SEQ ID NO: 31809 - protein, 980 aa, synthetic construct
  REGION 1..980: note = engineered CasX variant
QEIGKRINKIRRRLVKDSNTKKAGKTGPMKTLLVRVMTPDLRERLENLRKKPENIPQPISNTSRANLNKLLTDYTEMKKAILHVYWEEFQKDPVGLMSRVAQPASKKIDQNKLKPEMDEKGNLTTAGFACSQCGQPLFVYKLEQVSEKGKAYTNYFGRCNVAEHEKLIKLAQLKPEKDSDEAVTYSLGKFGQRALDFYSIHVTKESTHPVKPLAQIAGNRYASGPVGKALSDACMGTIASFLSKYQDIIIEHQKVVKGNQKRLESLRELAGKENLEYPSVTLPPQPHTKEGVDAYNEVIARVRMWVNLNLWQKLKLSRDDAKPLLRLKGFPSFPLVERQANEVDWWDMVCNVKKLINEKKEDGKVFWQNLAGYKRQEALRPYLSSEEDRKKGKKFARYQLGDLLLHLEKKHGEDWGKVYDEAWERIDKKVEGLSKHIKLEEERRSEDAQSKAALTDWLRAKASFVIEGLKEADKDEFCRCELKLQKWYGDLRGKPFAIEAENSILDISGFSKQYNCAFIWQKDGVKKLNLYLIINYFKGGKLRFKKIKPEAFEANRFYTVINKKSGEIVPMEVNFNFDDPNLIILPLAFGKRQGREFIWNDLLSLETGSLKLANGRVIEKTLYNRRTRQDEPALFVALTFERREVLDSSNIKPMNLIGVDRGENIPAVIALTDPEGCPLSRFKDSLGNPTHILRIGESYKEKQRTIQAKKEVEQRRAGGYSRKYASKAKNLADDMVRNTARDLLYYAVTQDAMLIFENLSRGFGRQGKRTFMAERQYTRMEDWLTAKLAYEGLPSKTYLSKTLAQYTSKTCSNCGFTITSADYDRVLEKLKKTATGWMTTINGKELKVEGQITYYNRYKRQNVVKDLSVELDRLSEESVNNDISSWTKGRSGEALSLLKKRFSHRPVQEKFVCLNCGFETHADEQAALNIARSWLFLRSQEYKKYQTNKTSTGNTDKRAFVETWQSFYRKKLKEVWKPAV

SEQ ID NO: 31810 - protein, 979 aa, synthetic construct
  REGION 1..979: note = engineered CasX variant
QEIGKRINKIRRRLVKDSNTKKAGKTGPMKTLLVRVMTPDLRERLENLRKKPENIPQPISNTSRANLNKLLTDYTEMKKAILHVYWEEFQKDPVGLMSRVAQPASKKIDQNKLKPEMDEKGNLTTAGFACSQCGQPLFVYKLEQVSEKGKAYTNYFGRCNVAEHEKLILLAQLKPEKDSDEAVTYSLGKFGQRALDFYSIHVTKESTHPVKPLAQIAGNRYASPVGKALSDACMGTIASFLSKYQDIIIEHQKVVKGNQKRLESLRELAGKENLEYPSVTLPPQPHTKEGVDAYNEVIARVRMWVNLNLWQKLKLSRDDAKPLLRLKGFPSFPLVERQANEVDWWDMVCNVKKLINEKKEDGKVFWQNLAGYKRQEALRPYLSSEEDRKKGKKFARYQLGDLLLHLEKKHGEDWGKVYDEAWERIDKKVEGLSKHIKLEEERRSEDAQSKAALTDWLRAKASFVIEGLKEADKDEFCRCELKLQKWYGDLRGKPFAIEAENSILDISGFSKQYNCAFIWQKDGVKKLNLYLIINYFKGGKLRFKKIKPEAFEANRFYTVINKKSGEIVPMEVNFNFDDPNLIILPLAFGKRQGREFIWNDLLSLETGSLKLANGRVIEKTLYNRRTRQDEPALFVALTFERREVLDSSNIKPMNLIGVDRGENIPAVIALTDPEGCPLSRFKDSLGNPTHILRIGESYKEKQRTIQAKKEVEQRRAGGYSRKYASKAKNLADDMVRNTARDLLYYAVTQDAMLIFENLSRGFGRQGKRTFMAERQYTRMEDWLTAKLAYEGLPSKTYLSKTLAQYTSKTCSNCGFTITSADYDRVLEKLKKTATGWMTTINGKELKVEGQITYYNRYKRQNVVKDLSVELDRLSEESVNNDISSWTKGRSGEALSLLKKRFSHRPVQEKFVCLNCGFETHADEQAALNIARSWLFLRSQEYKKYQTNKTSTGNTDKRAFVETWQSFYRKKLKEVWKPAV

SEQ ID NO: 31811 - protein, 980 aa, synthetic construct
  REGION 1..980: note = engineered CasX variant
QEIGKRINKIRRRLVKDSNTKKAGKTGPMKTLLVRVMTPDLRERLENLRKKPENIPQPISNTSRANLNKLLTDYTEMKKAILHVYWEEFQKDPVGLMSRVAQPASKKIDQNKLKPEMDEKGNLTTAGFACSQCGQPLFVYKLEQVSEKGKAYTNYFGRCNVAEHEKLILLAQLKPEKDSDEAVTYSLGKFGQRALDFYSIHVTKESTHPVKPLAQIAGNRYASYPVGKALSDACMGTIASFLSKYQDIIIEHQKVVKGNQKRLESLRELAGKENLEYPSVTLPPQPHTKEGVDAYNEVIARVRMWVNLNLWQKLKLSRDDAKPLLRLKGFPSFPLVERQANEVDWWDMVCNVKKLINEKKEDGKVFWQNLAGYKRQEALRPYLSSEEDRKKGKKFARYQLGDLLLHLEKKHGEDWGKVYDEAWERIDKKVEGLSKHIKLEEERRSEDAQSKAALTDWLRAKASFVIEGLKEADKDEFCRCELKLQKWYGDLRGKPFAIEAENSILDISGFSKQYNCAFIWQKDGVKKLNLYLIINYFKGGKLRFKKIKPEAFEANRFYTVINKKSGEIVPMEVNFNFDDPNLIILPLAFGKRQGREFIWNDLLSLETGSLKLANGRVIEKTLYNRRTRQDEPALFVALTFERREVLDSSNIKPMNLIGVDRGENIPAVIALTDPEGCPLSRFKDSLGNPTHILRIGESYKEKQRTIQAKKEVEQRRAGGYSRKYASKAKNLADDMVRNTARDLLYYAVTQDAMLIFENLSRGFGRQGKRTFMAERQYTRMEDWLTAKLAYEGLPSKTYLSKTLAQYTSKTCSNCGFTITSADYDRVLEKLKKTATGWMTTINGKELKVEGQITYYNRYKRQNVVKDLSVELDRLSEESVNNDISSWTKGRSGEALSLLKKRFSHRPVQEKFVCLNCGFETHADEQAALNIARSWLFLRSQEYKKYQTNKTTGKNTDKRAFVETWQSFYRKKLKEVWKPAV

SEQ ID NO: 31812 - protein, 980 aa, synthetic construct
  REGION 1..980: note = engineered CasX variant
QEIGKRINKIRRRLVKDSNTKKAGKTGPMKTLLVRVMTPDLRERLENLRKKPENIPQPISNTSRANLNKLLTDYTEMKKAILHVYWEEFQKDPVGLMSRVAQPASKKIDQNKLKPEMDEKGNLTTAGFACSQCGQPLFVYKLEQVSEKGKAYTNYFGRCNVAEHEKLILLAQLKPEKDSDEAVTYSLGKFGQRALDFYSIHVTKESTHPVKPLAQIAGNRYASHPVGKALSDACMGTIASFLSKYQDIIIEHQKVVKGNQKRLESLRELAGKENLEYPSVTLPPQPHTKEGVDAYNEVIARVRMWVNLNLWQKLKLSRDDAKPLLRLKGFPSFPLVERQANEVDWWDMVCNVKKLINEKKEDGKVFWQNLAGYKRQEALRPYLSSEEDRKKGKKFARYQLGDLLLHLEKKHGEDWGKVYDEAWERIDKKVEGLSKHIKLEEERRSEDAQSKAALTDWLRAKASFVIEGLKEADKDEFCRCELKLQKWYGDLRGKPFAIEAENSILDISGFSKQYNCAFIWQKDGVKKLNLYLIINYFKGGKLRFKKIKPEAFEANRFYTVINKKSGEIVPMEVNFNFDDPNLIILPLAFGKRQGREFIWNDLLSLETGSLKLANGRVIEKTLYNRRTRQDEPALFVALTFERREVLDSSNIKPMNLIGVDRGENIPAVIALTDPEGCPLSRFKDSLGNPTHILRIGESYKEKQRTIQAKKEVEQRRAGGYSRKYASKAKNLADDMVRNTARDLLYYAVTQDAMLIFENLSRGFGRQGKRTFMAERQYTRMEDWLTAKLAYEGLPSKTYLSKTLAQYTSKTCSNCGFTITSADYDRVLEKLKKTATGWMTTINGKELKVEGQITYYNRYKRQNVVKDLSVELDRLSEESVNNDISSWTKGRSGEALSLLKKRFSHRPVQEKFVCLNCGFETHADEQAALNIARSWLFLRSQEYKKYQTNKTTGKNTDKRAFVETWQSFYRKKLKEVWKPAV

SEQ ID NO: 31813 - protein, 980 aa, synthetic construct
  REGION 1..980: note = engineered CasX variant
QEIGKRINKIRRRLVKDSNTKKAGKTGPMKTLLVRVMTPDLRERLENLRKKPENIPQPISNTSRANLNKLLTDYTEMKKAILHVYWEEFQKDPVGLMSRVAQPASKKIDQNKLKPEMDEKGNLTTAGFACSQCGQPLFVYKLEQVSEKGKAYTNYFGRCNVAEHEKLILLAQLKPEKDSDEAVTYSLGKFGQRALDFYSIHVTKESTHPVKPLAQIAGNRYASSPVGKALSDACMGTIASFLSKYQDIIIEHQKVVKGNQKRLESLRELAGKENLEYPSVTLPPQPHTKEGVDAYNEVIARVRMWVNLNLWQKLKLSRDDAKPLLRLKGFPSFPLVERQANEVDWWDMVCNVKKLINEKKEDGKVFWQNLAGYKRQEALRPYLSSEEDRKKGKKFARYQLGDLLLHLEKKHGEDWGKVYDEAWERIDKKVEGLSKHIKLEEERRSEDAQSKAALTDWLRAKASFVIEGLKEADKDEFCRCELKLQKWYGDLRGKPFAIEAENSILDISGFSKQYNCAFIWQKDGVKKLNLYLIINYFKGGKLRFKKIKPEAFEANRFYTVINKKSGEIVPMEVNFNFDDPNLIILPLAFGKRQGREFIWNDLLSLETGSLKLANGRVIEKTLYNRRTRQDEPALFVALTFERREVLDSSNIKPMNLIGVDRGENIPAVIALTDPEGCPLSRFKDSLGNPTHILRIGESYKEKQRTIQAKKEVEQRRAGGYSRKYASKAKNLADDMVRNTARDLLYYAVTQDAMLIFENLSRGFGRQGKRTFMAERQYTRMEDWLTAKLAYEGLPSKTYLSKTLAQYTSKTCSNCGFTITSADYDRVLEKLKKTATGWMTTINGKELKVEGQITYYNRYKRQNVVKDLSVELDRLSEESVNNDISSWTKGRSGEALSLLKKRFSHRPVQEKFVCLNCGFETHADEQAALNIARSWLFLRSQEYKKYQTNKTTGKNTDKRAFVETWQSFYRKKLKEVWKPAV

SEQ ID NO: 31814 - protein, 980 aa, synthetic construct
  REGION 1..980: note = engineered CasX variant
QEIGKRINKIRRRLVKDSNTKKAGKTGPMKTLLVRVMTPDLRERLENLRKKPENIPQPISNTSRANLNKLLTDYTEMKKAILHVYWEEFQKDPVGLMSRVAQPASKKIDQNKLKPEMDEKGNLTTAGFACSQCGQPLFVYKLEQVSEKGKAYTNYFGRCNVAEHEKLILLAQLKPEKDSDEAVTYSLGKFGQRALDFYSIHVTKESTHPVKPLAQIAGNRYASTPVGKALSDACMGTIASFLSKYQDIIIEHQKVVKGNQKRLESLRELAGKENLEYPSVTLPPQPHTKEGVDAYNEVIARVRMWVNLNLWQKLKLSRDDAKPLLRLKGFPSFPLVERQANEVDWWDMVCNVKKLINEKKEDGKVFWQNLAGYKRQEALRPYLSSEEDRKKGKKFARYQLGDLLLHLEKKHGEDWGKVYDEAWERIDKKVEGLSKHIKLEEERRSEDAQSKAALTDWLRAKASFVIEGLKEADKDEFCRCELKLQKWYGDLRGKPFAIEAENSILDISGFSKQYNCAFIWQKDGVKKLNLYLIINYFKGGKLRFKKIKPEAFEANRFYTVINKKSGEIVPMEVNFNFDDPNLIILPLAFGKRQGREFIWNDLLSLETGSLKLANGRVIEKTLYNRRTRQDEPALFVALTFERREVLDSSNIKPMNLIGVDRGENIPAVIALTDPEGCPLSRFKDSLGNPTHILRIGESYKEKQRTIQAKKEVEQRRAGGYSRKYASKAKNLADDMVRNTARDLLYYAVTQDAMLIFENLSRGFGRQGKRTFMAERQYTRMEDWLTAKLAYEGLPSKTYLSKTLAQYTSKTCSNCGFTITSADYDRVLEKLKKTATGWMTTINGKELKVEGQITYYNRYKRQNVVKDLSVELDRLSEESVNNDISSWTKGRSGEALSLLKKRFSHRPVQEKFVCLNCGFETHADEQAALNIARSWLFLRSQEYKKYQTNKTTGKNTDKRAFVETWQSFYRKKLKEVWKPAV

SEQ ID NO: 31815 - protein, 980 aa, synthetic construct
  REGION 1..980: note = engineered CasX variant
QEIGKRINKIRRRLVKDSNTKKAGKTGPMKTLLVRVMTPDLRERLENLRKKPENIPQPISNTSRANLNKLLTDYTEMKKAILHVYWEEFQKDPVGLMSRVAQPASKKIDQNKLKPEMDEKGNLTTAGFACSQCGQPLFVYKLEQVSEKGKAYTNYFGRCNVAEHEKLILLAQLKPEKDSDEAVTYSLGKFGQRALDFYSIHVTKESTHPVKPLAQIAGNRYASAPVGKALSDACMGTIASFLSKYQDIIIEHQKVVKGNQKRLESLRELAGKENLEYPSVTLPPQPHTKEGVDAYNEVIARVRMWVNLNLWQKLKLSRDDAKPLLRLKGFPSFPLVERQANEVDWWDMVCNVKKLINEKKEDGKVFWQNLAGYKRQEALRPYLSSEEDRKKGKKFARYQLGDLLLHLEKKHGEDWGKVYDEAWERIDKKVEGLSKHIKLEEERRSEDAQSKAALTDWLRAKASFVIEGLKEADKDEFCRCELKLQKWYGDLRGKPFAIEAENSILDISGFSKQYNCAFIWQKDGVKKLNLYLIINYFKGGKLRFKKIKPEAFEANRFYTVINKKSGEIVPMEVNFNFDDPNLIILPLAFGKRQGREFIWNDLLSLETGSLKLANGRVIEKTLYNRRTRQDEPALFVALTFERREVLDSSNIKPMNLIGVDRGENIPAVIALTDPEGCPLSRFKDSLGNPTHILRIGESYKEKQRTIQAKKEVEQRRAGGYSRKYASKAKNLADDMVRNTARDLLYYAVTQDAMLIFENLSRGFGRQGKRTFMAERQYTRMEDWLTAKLAYEGLPSKTYLSKTLAQYTSKTCSNCGFTITSADYDRVLEKLKKTATGWMTTINGKELKVEGQITYYNRYKRQNVVKDLSVELDRLSEESVNNDISSWTKGRSGEALSLLKKRFSHRPVQEKFVCLNCGFETHADEQAALNIARSWLFLRSQEYKKYQTNKTTGKNTDKRAFVETWQSFYRKKLKEVWKPAV

SEQ ID NO: 31816 - protein, 980 aa, synthetic construct
  REGION 1..980: note = engineered CasX variant
QEIGKRINKIRRRLVKDSNTKKAGKTGPMKTLLVRVMTPDLRERLENLRKKPENIPQPISNTSRANLNKLLTDYTEMKKAILHVYWEEFQKDPVGLMSRVAQPASKKIDQNKLKPEMDEKGNLTTAGFACSQCGQPLFVYKLEQVSEKGKAYTNYFGRCNVAEHEKLILLAQLKPEKDSDEAVTYSLGKFGQRALDFYSIHVTKESTHPVKPLAQIAGNRYASVPVGKALSDACMGTIASFLSKYQDIIIEHQKVVKGNQKRLESLRELAGKENLEYPSVTLPPQPHTKEGVDAYNEVIARVRMWVNLNLWQKLKLSRDDAKPLLRLKGFPSFPLVERQANEVDWWDMVCNVKKLINEKKEDGKVFWQNLAGYKRQEALRPYLSSEEDRKKGKKFARYQLGDLLLHLEKKHGEDWGKVYDEAWERIDKKVEGLSKHIKLEEERRSEDAQSKAALTDWLRAKASFVIEGLKEADKDEFCRCELKLQKWYGDLRGKPFAIEAENSILDISGFSKQYNCAFIWQKDGVKKLNLYLIINYFKGGKLRFKKIKPEAFEANRFYTVINKKSGEIVPMEVNFNFDDPNLIILPLAFGKRQGREFIWNDLLSLETGSLKLANGRVIEKTLYNRRTRQDEPALFVALTFERREVLDSSNIKPMNLIGVDRGENIPAVIALTDPEGCPLSRFKDSLGNPTHILRIGESYKEKQRTIQAKKEVEQRRAGGYSRKYASKAKNLADDMVRNTARDLLYYAVTQDAMLIFENLSRGFGRQGKRTFMAERQYTRMEDWLTAKLAYEGLPSKTYLSKTLAQYTSKTCSNCGFTITSADYDRVLEKLKKTATGWMTTINGKELKVEGQITYYNRYKRQNVVKDLSVELDRLSEESVNNDISSWTKGRSGEALSLLKKRFSHRPVQEKFVCLNCGFETHADEQAALNIARSWLFLRSQEYKKYQTNKTTGKNTDKRAFVETWQSFYRKKLKEVWKPAV

SEQ ID NO: 31817 - protein, 980 aa, synthetic construct
  REGION 1..980: note = engineered CasX variant
QEIGKRINKIRRRLVKDSNTKKAGKTGPMKTLLVRVMTPDLRERLENLRKKPENIPQPISNTSRANLNKLLTDYTEMKKAILHVYWEEFQKDPVGLMSRVAQPASKKIDQNKLKPEMDEKGNLTTAGFACSQCGQPLFVYKLEQVSEKGKAYTNYFGRCNVAEHEKLIKLAQLKPEKDSDEAVTYSLGKFGQRALDFYSIHVTKESTHPVKPLAQIAGNRYASGPVGKALSDACMGTIASFLSKYQDIIIEHQKVVKGNQKRLESLRELAGKENLEYPSVTLPPQPHTKEGVDAYNEVIARVRMWVNLNLWQKLKLSRDDAKPLLRLKGFPSFPLVERQANEVDWWDMVCNVKKLINEKKEDGKVFWQNLAGYKRQEALRPYLSSEEDRKKGKKFARYQLGDLLLHLEKKHGEDWGKVYDEAWERIDKKVEGLSKHIKLEEERRSEDAQSKAALTDWLRAKASFVIEGLKEADKDEFCRCELKLQKWYGDLRGKPFAIEAENSILDISGFSKQYNCAFIWQKDGVKKLNLYLIINYFKGGKLRFKKIKPEAFEANRFYTVINKKSGEIVPMEVNFNFDDPNLIILPLAFGKRQGREFIWNDLLSLETGSLKLANGRVIEKTLYNRRTRQDEPALFVALTFERREVLDSSNIKPMNLIGVDRGENIPAVIALTDPEGCPLSRFKDSLGNPTHILRIGESYKEKQRTIQAKKEVEQRRAGGYSRKYASKAKNLADDMVRNTARDLLYYAVTQDAMLIFENLSRGFGRQGKRTFMAERQYTRMEDWLTAKLAYEGLPSKTYLSKTLAQYTSKTCSNCGFTITSADYDRVLEKLKKTATGWMTTINGKELKVEGQITYYNRYKRQNVVKDLSVELDRLSEESVNNDISSWTKGRSGEALSLLKKRFSHRPVQEKFVCLNCGFETHADEQAALNIARSWLFLRSQEYKKYQTNKTTGKNTDKRAFVETWQSFYRKKLKEVWKPAV

SEQ ID NO: 31818 - protein, 979 aa, synthetic construct
  REGION 1..979: note = engineered CasX variant
QEIGKRINKIRRRLVKDSNTKKAGKTGPMKTLLVRVMTPDLRERLENLRKKPENIPQPISNTSRANLNKLLTDYTEMKKAILHVYWEEFQKDPVGLMSRVAQPASKKIDQNKLKPEMDEKGNLTTAGFACSQCGQPLFVYKLEQVSEKGKAYTNYFGRCNVAEHEKLILLAQLKPEKDSDEAVTYSLGKFGQRALDFYSIHVTKESTHPVKPLAQIAGNRYASPVGKALSDACMGTIASFLSKYQDIIIEHQKVVKGNQKRLESLRELAGKENLEYPSVTLPPQPHTKEGVDAYNEVIARVRMWVNLNLWQKLKLSRDDAKPLLRLKGFPSFPLVERQANEVDWWDMVCNVKKLINEKKEDGKVFWQNLAGYKRQEALRPYLSSEEDRKKGKKFARYQLGDLLLHLEKKHGEDWGKVYDEAWERIDKKVEGLSKHIKLEEERRSEDAQSKAALTDWLRAKASFVIEGLKEADKDEFCRCELKLQKWYGDLRGKPFAIEAENSILDISGFSKQYNCAFIWQKDGVKKLNLYLIINYFKGGKLRFKKIKPEAFEANRFYTVINKKSGEIVPMEVNFNFDDPNLIILPLAFGKRQGREFIWNDLLSLETGSLKLANGRVIEKTLYNRRTRQDEPALFVALTFERREVLDSSNIKPMNLIGVDRGENIPAVIALTDPEGCPLSRFKDSLGNPTHILRIGESYKEKQRTIQAKKEVEQRRAGGYSRKYASKAKNLADDMVRNTARDLLYYAVTQDAMLIFENLSRGFGRQGKRTFMAERQYTRMEDWLTAKLAYEGLPSKTYLSKTLAQYTSKTCSNCGFTITSADYDRVLEKLKKTATGWMTTINGKELKVEGQITYYNRYKRQNVVKDLSVELDRLSEESVNNDISSWTKGRSGEALSLLKKRFSHRPVQEKFVCLNCGFETHADEQAALNIARSWLFLRSQEYKKYQTNKTTGKNTDKRAFVETWQSFYRKKLKEVWKPAV

SEQ ID NO: 31819 - protein, 979 aa, synthetic construct
  REGION 1..979: note = engineered CasX variant
QEIGKRINKIRRRLVKDSNTKKAGKTGPMKTLLVRVMTPDLRERLENLRKKPENIPQPISNTSRANLNKLLTDYTEMKKAILHVYWEEFQKDPVGLMSRVAQPASKKIDQNKLKPEMDEKGNLTTAGFACSQCGQPLFVYKLEQVSEKGKAYTNYFGRCNVAEHEKLILLAQLKPEKDSDEAVTYSLGKFGQRALDFYSIHVTKESTHPVKPLAQIAGNRYASYPVGKALSDACMGTIASFLSKYQDIIIEHQKVVKGNQKRLESLRELAGKENLEYPSVTLPPQPHTKEGVDAYNEVIARVRMWVNLNLWQKLKLSRDDAKPLLRLKKFPSFPLVERQANEVDWWDMVCNVKKLINEKKEDGKVFWQNLAGYKRQEALRPYLSSEEDRKKGKKFARYQLGDLLLHLEKKHGEDWGKVYDEAWERIDKKVEGLSKHIKLEEERRSEDAQSKAALTDWLRAKASFVIEGLKEADKDEFCRCELKLQKWYGDLRGKPFAIEAENSILDISGFSKQYNCAFIWQKDGVKKLNLYLIINYFKGGKLRFKKIKPEAFEANRFYTVINKKSGEIVPMEVNFNFDDPNLIILPLAFGKRQGREFIWNDLLSLETGSLKLANGRVIEKTLYNRRTRQDEPALFVALTFERREVLDSSNIKPMNLIGVDRGENIPAVIALTDPEGCPLSRFKDSLGNPTHILRIGESYKEKQRTIQAKKEVEQRRAGGYSRKYASKAKNLADDMVRNTARDLLYYAVTQDAMLIFENLSRGFGRQGKRTFMAERQYTRMEDWLTAKLAYEGLPSKTYLSKTLAQYTSKTCSNCGFTITSADYDRVLEKLKKTATGWMTTINGKELKVEGQITYYNRYKRQNVVKDLSVELDRLSEESVNNDISSWTKGRSGEALSLLKKRFSHRPVQEKFVCLNCGFETHADEQAALNIARSWLFLRSQEYKKYQTNKTTGNTDKRAFVETWQSFYRKKLKEVWKPAV

SEQ ID NO: 31820 - protein, 979 aa, synthetic construct
  REGION 1..979: note = engineered CasX variant
QEIGKRINKIRRRLVKDSNTKKAGKTGPMKTLLVRVMTPDLRERLENLRKKPENIPQPISNTSRANLNKLLTDYTEMKKAILHVYWEEFQKDPVGLMSRVAQPASKKIDQNKLKPEMDEKGNLTTAGFACSQCGQPLFVYKLEQVSEKGKAYTNYFGRCNVAEHEKLILLAQLKPEKDSDEAVTYSLGKFGQRALDFYSIHVTKESTHPVKPLAQIAGNRYASHPVGKALSDACMGTIASFLSKYQDIIIEHQKVVKGNQKRLESLRELAGKENLEYPSVTLPPQPHTKEGVDAYNEVIARVRMWVNLNLWQKLKLSRDDAKPLLRLKKFPSFPLVERQANEVDWWDMVCNVKKLINEKKEDGKVFWQNLAGYKRQEALRPYLSSEEDRKKGKKFARYQLGDLLLHLEKKHGEDWGKVYDEAWERIDKKVEGLSKHIKLEEERRSEDAQSKAALTDWLRAKASFVIEGLKEADKDEFCRCELKLQKWYGDLRGKPFAIEAENSILDISGFSKQYNCAFIWQKDGVKKLNLYLIINYFKGGKLRFKKIKPEAFEANRFYTVINKKSGEIVPMEVNFNFDDPNLIILPLAFGKRQGREFIWNDLLSLETGSLKLANGRVIEKTLYNRRTRQDEPALFVALTFERREVLDSSNIKPMNLIGVDRGENIPAVIALTDPEGCPLSRFKDSLGNPTHILRIGESYKEKQRTIQAKKEVEQRRAGGYSRKYASKAKNLADDMVRNTARDLLYYAVTQDAMLIFENLSRGFGRQGKRTFMAERQYTRMEDWLTAKLAYEGLPSKTYLSKTLAQYTSKTCSNCGFTITSADYDRVLEKLKKTATGWMTTINGKELKVEGQITYYNRYKRQNVVKDLSVELDRLSEESVNNDISSWTKGRSGEALSLLKKRFSHRPVQEKFVCLNCGFETHADEQAALNIARSWLFLRSQEYKKYQTNKTTGNTDKRAFVETWQSFYRKKLKEVWKPAV

SEQ ID NO: 31821 - protein, 979 aa, synthetic construct
  REGION 1..979: note = engineered CasX variant
QEIGKRINKIRRRLVKDSNTKKAGKTGPMKTLLVRVMTPDLRERLENLRKKPENIPQPISNTSRANLNKLLTDYTEMKKAILHVYWEEFQKDPVGLMSRVAQPASKKIDQNKLKPEMDEKGNLTTAGFACSQCGQPLFVYKLEQVSEKGKAYTNYFGRCNVAEHEKLILLAQLKPEKDSDEAVTYSLGKFGQRALDFYSIHVTKESTHPVKPLAQIAGNRYASSPVGKALSDACMGTIASFLSKYQDIIIEHQKVVKGNQKRLESLRELAGKENLEYPSVTLPPQPHTKEGVDAYNEVIARVRMWVNLNLWQKLKLSRDDAKPLLRLKKFPSFPLVERQANEVDWWDMVCNVKKLINEKKEDGKVFWQNLAGYKRQEALRPYLSSEEDRKKGKKFARYQLGDLLLHLEKKHGEDWGKVYDEAWERIDKKVEGLSKHIKLEEERRSEDAQSKAALTDWLRAKASFVIEGLKEADKDEFCRCELKLQKWYGDLRGKPFAIEAENSILDISGFSKQYNCAFIWQKDGVKKLNLYLIINYFKGGKLRFKKIKPEAFEANRFYTVINKKSGEIVPMEVNFNFDDPNLIILPLAFGKRQGREFIWNDLLSLETGSLKLANGRVIEKTLYNRRTRQDEPALFVALTFERREVLDSSNIKPMNLIGVDRGENIPAVIALTDPEGCPLSRFKDSLGNPTHILRIGESYKEKQRTIQAKKEVEQRRAGGYSRKYASKAKNLADDMVRNTARDLLYYAVTQDAMLIFENLSRGFGRQGKRTFMAERQYTRMEDWLTAKLAYEGLPSKTYLSKTLAQYTSKTCSNCGFTITSADYDRVLEKLKKTATGWMTTINGKELKVEGQITYYNRYKRQNVVKDLSVELDRLSEESVNNDISSWTKGRSGEALSLLKKRFSHRPVQEKFVCLNCGFETHADEQAALNIARSWLFLRSQEYKKYQTNKTTGNTDKRAFVETWQSFYRKKLKEVWKPAV

SEQ ID NO: 31822 - protein, 979 aa, synthetic construct
  REGION 1..979: note = engineered CasX variant
QEIGKRINKIRRRLVKDSNTKKAGKTGPMKTLLVRVMTPDLRERLENLRKKPENIPQPISNTSRANLNKLLTDYTEMKKAILHVYWEEFQKDPVGLMSRVAQPASKKIDQNKLKPEMDEKGNLTTAGFACSQCGQPLFVYKLEQVSEKGKAYTNYFGRCNVAEHEKLILLAQLKPEKDSDEAVTYSLGKFGQRALDFYSIHVTKESTHPVKPLAQIAGNRYASTPVGKALSDACMGTIASFLSKYQDIIIEHQKVVKGNQKRLESLRELAGKENLEYPSVTLPPQPHTKEGVDAYNEVIARVRMWVNLNLWQKLKLSRDDAKPLLRLKKFPSFPLVERQANEVDWWDMVCNVKKLINEKKEDGKVFWQNLAGYKRQEALRPYLSSEEDRKKGKKFARYQLGDLLLHLEKKHGEDWGKVYDEAWERIDKKVEGLSKHIKLEEERRSEDAQSKAALTDWLRAKASFVIEGLKEADKDEFCRCELKLQKWYGDLRGKPFAIEAENSILDISGFSKQYNCAFIWQKDGVKKLNLYLIINYFKGGKLRFKKIKPEAFEANRFYTVINKKSGEIVPMEVNFNFDDPNLIILPLAFGKRQGREFIWNDLLSLETGSLKLANGRVIEKTLYNRRTRQDEPALFVALTFERREVLDSSNIKPMNLIGVDRGENIPAVIALTDPEGCPLSRFKDSLGNPTHILRIGESYKEKQRTIQAKKEVEQRRAGGYSRKYASKAKNLADDMVRNTARDLLYYAVTQDAMLIFENLSRGFGRQGKRTFMAERQYTRMEDWLTAKLAYEGLPSKTYLSKTLAQYTSKTCSNCGFTITSADYDRVLEKLKKTATGWMTTINGKELKVEGQITYYNRYKRQNVVKDLSVELDRLSEESVNNDISSWTKGRSGEALSLLKKRFSHRPVQEKFVCLNCGFETHADEQAALNIARSWLFLRSQEYKKYQTNKTTGNTDKRAFVETWQSFYRKKLKEVWKPAV

SEQ ID NO: 31823 - protein, 979 aa, synthetic construct
  REGION 1..979: note = engineered CasX variant
QEIGKRINKIRRRLVKDSNTKKAGKTGPMKTLLVRVMTPDLRERLENLRKKPENIPQPISNTSRANLNKLLTDYTEMKKAILHVYWEEFQKDPVGLMSRVAQPASKKIDQNKLKPEMDEKGNLTTAGFACSQCGQPLFVYKLEQVSEKGKAYTNYFGRCNVAEHEKLILLAQLKPEKDSDEAVTYSLGKFGQRALDFYSIHVTKESTHPVKPLAQIAGNRYASAPVGKALSDACMGTIASFLSKYQDIIIEHQKVVKGNQKRLESLRELAGKENLEYPSVTLPPQPHTKEGVDAYNEVIARVRMWVNLNLWQKLKLSRDDAKPLLRLKKFPSFPLVERQANEVDWWDMVCNVKKLINEKKEDGKVFWQNLAGYKRQEALRPYLSSEEDRKKGKKFARYQLGDLLLHLEKKHGEDWGKVYDEAWERIDKKVEGLSKHIKLEEERRSEDAQSKAALTDWLRAKASFVIEGLKEADKDEFCRCELKLQKWYGDLRGKPFAIEAENSILDISGFSKQYNCAFIWQKDGVKKLNLYLIINYFKGGKLRFKKIKPEAFEANRFYTVINKKSGEIVPMEVNFNFDDPNLIILPLAFGKRQGREFIWNDLLSLETGSLKLANGRVIEKTLYNRRTRQDEPALFVALTFERREVLDSSNIKPMNLIGVDRGENIPAVIALTDPEGCPLSRFKDSLGNPTHILRIGESYKEKQRTIQAKKEVEQRRAGGYSRKYASKAKNLADDMVRNTARDLLYYAVTQDAMLIFENLSRGFGRQGKRTFMAERQYTRMEDWLTAKLAYEGLPSKTYLSKTLAQYTSKTCSNCGFTITSADYDRVLEKLKKTATGWMTTINGKELKVEGQITYYNRYKRQNVVKDLSVELDRLSEESVNNDISSWTKGRSGEALSLLKKRFSHRPVQEKFVCLNCGFETHADEQAALNIARSWLFLRSQEYKKYQTNKTTGNTDKRAFVETWQSFYRKKLKEVWKPAV

SEQ ID NO: 31824 - protein, 979 aa, synthetic construct
  REGION 1..979: note = engineered CasX variant
QEIGKRINKIRRRLVKDSNTKKAGKTGPMKTLLVRVMTPDLRERLENLRKKPENIPQPISNTSRANLNKLLTDYTEMKKAILHVYWEEFQKDPVGLMSRVAQPASKKIDQNKLKPEMDEKGNLTTAGFACSQCGQPLFVYKLEQVSEKGKAYTNYFGRCNVAEHEKLILLAQLKPEKDSDEAVTYSLGKFGQRALDFYSIHVTKESTHPVKPLAQIAGNRYASVPVGKALSDACMGTIASFLSKYQDIIIEHQKVVKGNQKRLESLRELAGKENLEYPSVTLPPQPHTKEGVDAYNEVIARVRMWVNLNLWQKLKLSRDDAKPLLRLKKFPSFPLVERQANEVDWWDMVCNVKKLINEKKEDGKVFWQNLAGYKRQEALRPYLSSEEDRKKGKKFARYQLGDLLLHLEKKHGEDWGKVYDEAWERIDKKVEGLSKHIKLEEERRSEDAQSKAALTDWLRAKASFVIEGLKEADKDEFCRCELKLQKWYGDLRGKPFAIEAENSILDISGFSKQYNCAFIWQKDGVKKLNLYLIINYFKGGKLRFKKIKPEAFEANRFYTVINKKSGEIVPMEVNFNFDDPNLIILPLAFGKRQGREFIWNDLLSLETGSLKLANGRVIEKTLYNRRTRQDEPALFVALTFERREVLDSSNIKPMNLIGVDRGENIPAVIALTDPEGCPLSRFKDSLGNPTHILRIGESYKEKQRTIQAKKEVEQRRAGGYSRKYASKAKNLADDMVRNTARDLLYYAVTQDAMLIFENLSRGFGRQGKRTFMAERQYTRMEDWLTAKLAYEGLPSKTYLSKTLAQYTSKTCSNCGFTITSADYDRVLEKLKKTATGWMTTINGKELKVEGQITYYNRYKRQNVVKDLSVELDRLSEESVNNDISSWTKGRSGEALSLLKKRFSHRPVQEKFVCLNCGFETHADEQAALNIARSWLFLRSQEYKKYQTNKTTGNTDKRAFVETWQSFYRKKLKEVWKPAV

SEQ ID NO: 31825 - protein, 979 aa, synthetic construct
  REGION 1..979: note = engineered CasX variant
QEIGKRINKIRRRLVKDSNTKKAGKTGPMKTLLVRVMTPDLRERLENLRKKPENIPQPISNTSRANLNKLLTDYTEMKKAILHVYWEEFQKDPVGLMSRVAQPASKKIDQNKLKPEMDEKGNLTTAGFACSQCGQPLFVYKLEQVSEKGKAYTNYFGRCNVAEHEKLIKLAQLKPEKDSDEAVTYSLGKFGQRALDFYSIHVTKESTHPVKPLAQIAGNRYASGPVGKALSDACMGTIASFLSKYQDIIIEHQKVVKGNQKRLESLRELAGKENLEYPSVTLPPQPHTKEGVDAYNEVIARVRMWVNLNLWQKLKLSRDDAKPLLRLKKFPSFPLVERQANEVDWWDMVCNVKKLINEKKEDGKVFWQNLAGYKRQEALRPYLSSEEDRKKGKKFARYQLGDLLLHLEKKHGEDWGKVYDEAWERIDKKVEGLSKHIKLEEERRSEDAQSKAALTDWLRAKASFVIEGLKEADKDEFCRCELKLQKWYGDLRGKPFAIEAENSILDISGFSKQYNCAFIWQKDGVKKLNLYLIINYFKGGKLRFKKIKPEAFEANRFYTVINKKSGEIVPMEVNFNFDDPNLIILPLAFGKRQGREFIWNDLLSLETGSLKLANGRVIEKTLYNRRTRQDEPALFVALTFERREVLDSSNIKPMNLIGVDRGENIPAVIALTDPEGCPLSRFKDSLGNPTHILRIGESYKEKQRTIQAKKEVEQRRAGGYSRKYASKAKNLADDMVRNTARDLLYYAVTQDAMLIFENLSRGFGRQGKRTFMAERQYTRMEDWLTAKLAYEGLPSKTYLSKTLAQYTSKTCSNCGFTITSADYDRVLEKLKKTATGWMTTINGKELKVEGQITYYNRYKRQNVVKDLSVELDRLSEESVNNDISSWTKGRSGEALSLLKKRFSHRPVQEKFVCLNCGFETHADEQAALNIARSWLFLRSQEYKKYQTNKTTGNTDKRAFVETWQSFYRKKLKEVWKPAV

SEQ ID NO: 31826 - protein, 978 aa, synthetic construct
  REGION 1..978: note = engineered CasX variant
QEIGKRINKIRRRLVKDSNTKKAGKTGPMKTLLVRVMTPDLRERLENLRKKPENIPQPISNTSRANLNKLLTDYTEMKKAILHVYWEEFQKDPVGLMSRVAQPASKKIDQNKLKPEMDEKGNLTTAGFACSQCGQPLFVYKLEQVSEKGKAYTNYFGRCNVAEHEKLILLAQLKPEKDSDEAVTYSLGKFGQRALDFYSIHVTKESTHPVKPLAQIAGNRYASPVGKALSDACMGTIASFLSKYQDIIIEHQKVVKGNQKRLESLRELAGKENLEYPSVTLPPQPHTKEGVDAYNEVIARVRMWVNLNLWQKLKLSRDDAKPLLRLKKFPSFPLVERQANEVDWWDMVCNVKKLINEKKEDGKVFWQNLAGYKRQEALRPYLSSEEDRKKGKKFARYQLGDLLLHLEKKHGEDWGKVYDEAWERIDKKVEGLSKHIKLEEERRSEDAQSKAALTDWLRAKASFVIEGLKEADKDEFCRCELKLQKWYGDLRGKPFAIEAENSILDISGFSKQYNCAFIWQKDGVKKLNLYLIINYFKGGKLRFKKIKPEAFEANRFYTVINKKSGEIVPMEVNFNFDDPNLIILPLAFGKRQGREFIWNDLLSLETGSLKLANGRVIEKTLYNRRTRQDEPALFVALTFERREVLDSSNIKPMNLIGVDRGENIPAVIALTDPEGCPLSRFKDSLGNPTHILRIGESYKEKQRTIQAKKEVEQRRAGGYSRKYASKAKNLADDMVRNTARDLLYYAVTQDAMLIFENLSRGFGRQGKRTFMAERQYTRMEDWLTAKLAYEGLPSKTYLSKTLAQYTSKTCSNCGFTITSADYDRVLEKLKKTATGWMTTINGKELKVEGQITYYNRYKRQNVVKDLSVELDRLSEESVNNDISSWTKGRSGEALSLLKKRFSHRPVQEKFVCLNCGFETHADEQAALNIARSWLFLRSQEYKKYQTNKTTGNTDKRAFVETWQSFYRKKLKEVWKPAV

SEQ ID NO: 31827 - protein, 979 aa, synthetic construct
  REGION 1..979: note = engineered CasX variant
QEIGKRINKIRRRLVKDSNTKKAGKTGPMKTLLVRVMTPDLRERLENLRKKPENIPQPISNTSRANLNKLLTDYTEMKKAILHVYWEEFQKDPVGLMSRVAQPASKKIDQNKLKPEMDEKGNLTTAGFACSQCGQPLFVYKLEQVSEKGKAYTNYFGRCNVAEHEKLILLAQLKPEKDSDEAVTYSLGKFGQRALDFYSIHVTKESTHPVKPLAQIAGNRYASYPVGKALSDACMGTIASFLSKYQDIIIEHQKVVKGNQKRLESLRELAGKENLEYPSVTLPPQPHTKEGVDAYNEVIARVRMWVNLNLWQKLKLSRDDAKPLLRLKGFPSFPLVERQANEVDWWDMVCNVKKLINEKKEDGKVFWQNLAGYKRQEALRPYLSSEEDRKKGKKFARYQLGDLLLHLEKKHGEDWGKVYDEAWERIDKKVEGLSKHIKLEEERRSEDAQSKAALTDWLRAKASFVIEGLKEADKDEFCRCELKLQKWYGDLRGKPFAIEAENSILDISGFSKQYNCAFIWQKDGVKKLNLYLIINYFKGGKLRFKKIKPEAFEANRFYTVINKKSGEIVPMEVNFNFDDPNLIILPLAFGKRQGREFIWNDLLSLETGSLKLANGRVIEKTLYNRRTRQDEPALFVALTFERREVLDSSNIKPMNLIGVDRGENIPAVIALTDPEGCPLSRFKDSLGNPTHILRIGERYKEKQRTIQAKKEVEQRRAGGYSRKYASKAKNLADDMVRNTARDLLYYAVTQDAMLIFENLSRGFGRQGKRTFMAERQYTRMEDWLTAKLAYEGLPSKTYLSKTLAQYTSKTCSNCGFTITSADYDRVLEKLKKTATGWMTTINGKELKVEGQITYYNRYKRQNVVKDLSVELDRLSEESVNNDISSWTKGRSGEALSLLKKRFSHRPVQEKFVCLNCGFETHADEQAALNIARSWLFLRSQEYKKYQTNKTTGNTDKRAFVETWQSFYRKKLKEVWKPAV

SEQ ID NO: 31828 - protein, 979 aa, synthetic construct
  REGION 1..979: note = engineered CasX variant
QEIGKRINKIRRRLVKDSNTKKAGKTGPMKTLLVRVMTPDLRERLENLRKKPENIPQPISNTSRANLNKLLTDYTEMKKAILHVYWEEFQKDPVGLMSRVAQPASKKIDQNKLKPEMDEKGNLTTAGFACSQCGQPLFVYKLEQVSEKGKAYTNYFGRCNVAEHEKLILLAQLKPEKDSDEAVTYSLGKFGQRALDFYSIHVTKESTHPVKPLAQIAGNRYASHPVGKALSDACMGTIASFLSKYQDIIIEHQKVVKGNQKRLESLRELAGKENLEYPSVTLPPQPHTKEGVDAYNEVIARVRMWVNLNLWQKLKLSRDDAKPLLRLKGFPSFPLVERQANEVDWWDMVCNVKKLINEKKEDGKVFWQNLAGYKRQEALRPYLSSEEDRKKGKKFARYQLGDLLLHLEKKHGEDWGKVYDEAWERIDKKVEGLSKHIKLEEERRSEDAQSKAALTDWLRAKASFVIEGLKEADKDEFCRCELKLQKWYGDLRGKPFAIEAENSILDISGFSKQYNCAFIWQKDGVKKLNLYLIINYFKGGKLRFKKIKPEAFEANRFYTVINKKSGEIVPMEVNFNFDDPNLIILPLAFGKRQGREFIWNDLLSLETGSLKLANGRVIEKTLYNRRTRQDEPALFVALTFERREVLDSSNIKPMNLIGVDRGENIPAVIALTDPEGCPLSRFKDSLGNPTHILRIGERYKEKQRTIQAKKEVEQRRAGGYSRKYASKAKNLADDMVRNTARDLLYYAVTQDAMLIFENLSRGFGRQGKRTFMAERQYTRMEDWLTAKLAYEGLPSKTYLSKTLAQYTSKTCSNCGFTITSADYDRVLEKLKKTATGWMTTINGKELKVEGQITYYNRYKRQNVVKDLSVELDRLSEESVNNDISSWTKGRSGEALSLLKKRFSHRPVQEKFVCLNCGFETHADEQAALNIARSWLFLRSQEYKKYQTNKTTGNTDKRAFVETWQSFYRKKLKEVWKPAV

SEQ ID NO: 31829 - protein, 979 aa, synthetic construct
  REGION 1..979: note = engineered CasX variant
QEIGKRINKIRRRLVKDSNTKKAGKTGPMKTLLVRVMTPDLRERLENLRKKPENIPQPISNTSRANLNKLLTDYTEMKKAILHVYWEEFQKDPVGLMSRVAQPASKKIDQNKLKPEMDEKGNLTTAGFACSQCGQPLFVYKLEQVSEKGKAYTNYFGRCNVAEHEKLILLAQLKPEKDSDEAVTYSLGKFGQRALDFYSIHVTKESTHPVKPLAQIAGNRYASSPVGKALSDACMGTIASFLSKYQDIIIEHQKVVKGNQKRLESLRELAGKENLEYPSVTLPPQPHTKEGVDAYNEVIARVRMWVNLNLWQKLKLSRDDAKPLLRLKGFPSFPLVERQANEVDWWDMVCNVKKLINEKKEDGKVFWQNLAGYKRQEALRPYLSSEEDRKKGKKFARYQLGDLLLHLEKKHGEDWGKVYDEAWERIDKKVEGLSKHIKLEEERRSEDAQSKAALTDWLRAKASFVIEGLKEADKDEFCRCELKLQKWYGDLRGKPFAIEAENSILDISGFSKQYNCAFIWQKDGVKKLNLYLIINYFKGGKLRFKKIKPEAFEANRFYTVINKKSGEIVPMEVNFNFDDPNLIILPLAFGKRQGREFIWNDLLSLETGSLKLANGRVIEKTLYNRRTRQDEPALFVALTFERREVLDSSNIKPMNLIGVDRGENIPAVIALTDPEGCPLSRFKDSLGNPTHILRIGERYKEKQRTIQAKKEVEQRRAGGYSRKYASKAKNLADDMVRNTARDLLYYAVTQDAMLIFENLSRGFGRQGKRTFMAERQYTRMEDWLTAKLAYEGLPSKTYLSKTLAQYTSKTCSNCGFTITSADYDRVLEKLKKTATGWMTTINGKELKVEGQITYYNRYKRQNVVKDLSVELDRLSEESVNNDISSWTKGRSGEALSLLKKRFSHRPVQEKFVCLNCGFETHADEQAALNIARSWLFLRSQEYKKYQTNKTTGNTDKRAFVETWQSFYRKKLKEVWKPAV

SEQ ID NO: 31830 - protein, 979 aa, synthetic construct
  REGION 1..979: note = engineered CasX variant
QEIGKRINKIRRRLVKDSNTKKAGKTGPMKTLLVRVMTPDLRERLENLRKKPENIPQPISNTSRANLNKLLTDYTEMKKAILHVYWEEFQKDPVGLMSRVAQPASKKIDQNKLKPEMDEKGNLTTAGFACSQCGQPLFVYKLEQVSEKGKAYTNYFGRCNVAEHEKLILLAQLKPEKDSDEAVTYSLGKFGQRALDFYSIHVTKESTHPVKPLAQIAGNRYASTPVGKALSDACMGTIASFLSKYQDIIIEHQKVVKGNQKRLESLRELAGKENLEYPSVTLPPQPHTKEGVDAYNEVIARVRMWVNLNLWQKLKLSRDDAKPLLRLKGFPSFPLVERQANEVDWWDMVCNVKKLINEKKEDGKVFWQNLAGYKRQEALRPYLSSEEDRKKGKKFARYQLGDLLLHLEKKHGEDWGKVYDEAWERIDKKVEGLSKHIKLEEERRSEDAQSKAALTDWLRAKASFVIEGLKEADKDEFCRCELKLQKWYGDLRGKPFAIEAENSILDISGFSKQYNCAFIWQKDGVKKLNLYLIINYFKGGKLRFKKIKPEAFEANRFYTVINKKSGEIVPMEVNFNFDDPNLIILPLAFGKRQGREFIWNDLLSLETGSLKLANGRVIEKTLYNRRTRQDEPALFVALTFERREVLDSSNIKPMNLIGVDRGENIPAVIALTDPEGCPLSRFKDSLGNPTHILRIGERYKEKQRTIQAKKEVEQRRAGGYSRKYASKAKNLADDMVRNTARDLLYYAVTQDAMLIFENLSRGFGRQGKRTFMAERQYTRMEDWLTAKLAYEGLPSKTYLSKTLAQYTSKTCSNCGFTITSADYDRVLEKLKKTATGWMTTINGKELKVEGQITYYNRYKRQNVVKDLSVELDRLSEESVNNDISSWTKGRSGEALSLLKKRFSHRPVQEKFVCLNCGFETHADEQAALNIARSWLFLRSQEYKKYQTNKTTGNTDKRAFVETWQSFYRKKLKEVWKPAV

SEQ ID NO: 31831 - protein, 979 aa, synthetic construct
  REGION 1..979: note = engineered CasX variant
QEIGKRINKIRRRLVKDSNTKKAGKTGPMKTLLVRVMTPDLRERLENLRKKPENIPQPISNTSRANLNKLLTDYTEMKKAILHVYWEEFQKDPVGLMSRVAQPASKKIDQNKLKPEMDEKGNLTTAGFACSQCGQPLFVYKLEQVSEKGKAYTNYFGRCNVAEHEKLILLAQLKPEKDSDEAVTYSLGKFGQRALDFYSIHVTKESTHPVKPLAQIAGNRYASAPVGKALSDACMGTIASFLSKYQDIIIEHQKVVKGNQKRLESLRELAGKENLEYPSVTLPPQPHTKEGVDAYNEVIARVRMWVNLNLWQKLKLSRDDAKPLLRLKGFPSFPLVERQANEVDWWDMVCNVKKLINEKKEDGKVFWQNLAGYKRQEALRPYLSSEEDRKKGKKFARYQLGDLLLHLEKKHGEDWGKVYDEAWERIDKKVEGLSKHIKLEEERRSEDAQSKAALTDWLRAKASFVIEGLKEADKDEFCRCELKLQKWYGDLRGKPFAIEAENSILDISGFSKQYNCAFIWQKDGVKKLNLYLIINYFKGGKLRFKKIKPEAFEANRFYTVINKKSGEIVPMEVNFNFDDPNLIILPLAFGKRQGREFIWNDLLSLETGSLKLANGRVIEKTLYNRRTRQDEPALFVALTFERREVLDSSNIKPMNLIGVDRGENIPAVIALTDPEGCPLSRFKDSLGNPTHILRIGERYKEKQRTIQAKKEVEQRRAGGYSRKYASKAKNLADDMVRNTARDLLYYAVTQDAMLIFENLSRGFGRQGKRTFMAERQYTRMEDWLTAKLAYEGLPSKTYLSKTLAQYTSKTCSNCGFTITSADYDRVLEKLKKTATGWMTTINGKELKVEGQITYYNRYKRQNVVKDLSVELDRLSEESVNNDISSWTKGRSGEALSLLKKRFSHRPVQEKFVCLNCGFETHADEQAALNIARSWLFLRSQEYKKYQTNKTTGNTDKRAFVETWQSFYRKKLKEVWKPAV

SEQ ID NO: 31832 - protein, 979 aa, synthetic construct
  REGION 1..979: note = engineered CasX variant
QEIGKRINKIRRRLVKDSNTKKAGKTGPMKTLLVRVMTPDLRERLENLRKKPENIPQPISNTSRANLNKLLTDYTEMKKAILHVYWEEFQKDPVGLMSRVAQPASKKIDQNKLKPEMDEKGNLTTAGFACSQCGQPLFVYKLEQVSEKGKAYTNYFGRCNVAEHEKLILLAQLKPEKDSDEAVTYSLGKFGQRALDFYSIHVTKESTHPVKPLAQIAGNRYASVPVGKALSDACMGTIASFLSKYQDIIIEHQKVVKGNQKRLESLRELAGKENLEYPSVTLPPQPHTKEGVDAYNEVIARVRMWVNLNLWQKLKLSRDDAKPLLRLKGFPSFPLVERQANEVDWWDMVCNVKKLINEKKEDGKVFWQNLAGYKRQEALRPYLSSEEDRKKGKKFARYQLGDLLLHLEKKHGEDWGKVYDEAWERIDKKVEGLSKHIKLEEERRSEDAQSKAALTDWLRAKASFVIEGLKEADKDEFCRCELKLQKWYGDLRGKPFAIEAENSILDISGFSKQYNCAFIWQKDGVKKLNLYLIINYFKGGKLRFKKIKPEAFEANRFYTVINKKSGEIVPMEVNFNFDDPNLIILPLAFGKRQGREFIWNDLLSLETGSLKLANGRVIEKTLYNRRTRQDEPALFVALTFERREVLDSSNIKPMNLIGVDRGENIPAVIALTDPEGCPLSRFKDSLGNPTHILRIGERYKEKQRTIQAKKEVEQRRAGGYSRKYASKAKNLADDMVRNTARDLLYYAVTQDAMLIFENLSRGFGRQGKRTFMAERQYTRMEDWLTAKLAYEGLPSKTYLSKTLAQYTSKTCSNCGFTITSADYDRVLEKLKKTATGWMTTINGKELKVEGQITYYNRYKRQNVVKDLSVELDRLSEESVNNDISSWTKGRSGEALSLLKKRFSHRPVQEKFVCLNCGFETHADEQAALNIARSWLFLRSQEYKKYQTNKTTGNTDKRAFVETWQSFYRKKLKEVWKPAV

SEQ ID NO: 31833 - protein, 979 aa, synthetic construct
  REGION 1..979: note = engineered CasX variant
QEIGKRINKIRRRLVKDSNTKKAGKTGPMKTLLVRVMTPDLRERLENLRKKPENIPQPISNTSRANLNKLLTDYTEMKKAILHVYWEEFQKDPVGLMSRVAQPASKKIDQNKLKPEMDEKGNLTTAGFACSQCGQPLFVYKLEQVSEKGKAYTNYFGRCNVAEHEKLIKLAQLKPEKDSDEAVTYSLGKFGQRALDFYSIHVTKESTHPVKPLAQIAGNRYASGPVGKALSDACMGTIASFLSKYQDIIIEHQKVVKGNQKRLESLRELAGKENLEYPSVTLPPQPHTKEGVDAYNEVIARVRMWVNLNLWQKLKLSRDDAKPLLRLKGFPSFPLVERQANEVDWWDMVCNVKKLINEKKEDGKVFWQNLAGYKRQEALRPYLSSEEDRKKGKKFARYQLGDLLLHLEKKHGEDWGKVYDEAWERIDKKVEGLSKHIKLEEERRSEDAQSKAALTDWLRAKASFVIEGLKEADKDEFCRCELKLQKWYGDLRGKPFAIEAENSILDISGFSKQYNCAFIWQKDGVKKLNLYLIINYFKGGKLRFKKIKPEAFEANRFYTVINKKSGEIVPMEVNFNFDDPNLIILPLAFGKRQGREFIWNDLLSLETGSLKLANGRVIEKTLYNRRTRQDEPALFVALTFERREVLDSSNIKPMNLIGVDRGENIPAVIALTDPEGCPLSRFKDSLGNPTHILRIGERYKEKQRTIQAKKEVEQRRAGGYSRKYASKAKNLADDMVRNTARDLLYYAVTQDAMLIFENLSRGFGRQGKRTFMAERQYTRMEDWLTAKLAYEGLPSKTYLSKTLAQYTSKTCSNCGFTITSADYDRVLEKLKKTATGWMTTINGKELKVEGQITYYNRYKRQNVVKDLSVELDRLSEESVNNDISSWTKGRSGEALSLLKKRFSHRPVQEKFVCLNCGFETHADEQAALNIARSWLFLRSQEYKKYQTNKTTGNTDKRAFVETWQSFYRKKLKEVWKPAV

SEQ ID NO: 31834 - protein, 978 aa, synthetic construct
  REGION 1..978: note = engineered CasX variant
QEIGKRINKIRRRLVKDSNTKKAGKTGPMKTLLVRVMTPDLRERLENLRKKPENIPQPISNTSRANLNKLLTDYTEMKKAILHVYWEEFQKDPVGLMSRVAQPASKKIDQNKLKPEMDEKGNLTTAGFACSQCGQPLFVYKLEQVSEKGKAYTNYFGRCNVAEHEKLILLAQLKPEKDSDEAVTYSLGKFGQRALDFYSIHVTKESTHPVKPLAQIAGNRYASPVGKALSDACMGTIASFLSKYQDIIIEHQKVVKGNQKRLESLRELAGKENLEYPSVTLPPQPHTKEGVDAYNEVIARVRMWVNLNLWQKLKLSRDDAKPLLRLKGFPSFPLVERQANEVDWWDMVCNVKKLINEKKEDGKVFWQNLAGYKRQEALRPYLSSEEDRKKGKKFARYQLGDLLLHLEKKHGEDWGKVYDEAWERIDKKVEGLSKHIKLEEERRSEDAQSKAALTDWLRAKASFVIEGLKEADKDEFCRCELKLQKWYGDLRGKPFAIEAENSILDISGFSKQYNCAFIWQKDGVKKLNLYLIINYFKGGKLRFKKIKPEAFEANRFYTVINKKSGEIVPMEVNFNFDDPNLIILPLAFGKRQGREFIWNDLLSLETGSLKLANGRVIEKTLYNRRTRQDEPALFVALTFERREVLDSSNIKPMNLIGVDRGENIPAVIALTDPEGCPLSRFKDSLGNPTHILRIGERYKEKQRTIQAKKEVEQRRAGGYSRKYASKAKNLADDMVRNTARDLLYYAVTQDAMLIFENLSRGFGRQGKRTFMAERQYTRMEDWLTAKLAYEGLPSKTYLSKTLAQYTSKTCSNCGFTITSADYDRVLEKLKKTATGWMTTINGKELKVEGQITYYNRYKRQNVVKDLSVELDRLSEESVNNDISSWTKGRSGEALSLLKKRFSHRPVQEKFVCLNCGFETHADEQAALNIARSWLFLRSQEYKKYQTNKTTGNTDKRAFVETWQSFYRKKLKEVWKPAV

SEQ ID NO: 31835 - protein, 979 aa, synthetic construct
  REGION 1..979: note = engineered CasX variant
QEIGKRINKIRRRLVKDSNTKKAGKTGPMKTLLVRVMTPDLRERLENLRKKPENIPQPISNTSRANLNKLLTDYTEMKKAILHVYWEEFQKDPVGLMSRVAQPASKKIDQNKLKPEMDEKGNLTTAGFACSQCGQPLFVYKLEQVSEKGKAYTNYFGRCNVAEHEKLILLAQLKPEKDSDEAVTYSLGKFGQRALDFYSIHVTKESTHPVKPLAQIAGNRYASYPVGKALSDACMGTIASFLSKYQDIIIEHQKVVKGNQKRLESLRELAGKENLEYPSVTLPPQPHTKEGVDAYNEVIARVRMWVNLNLWQKLKLSRDDAKPLLRLKGFPSFPLVERQANEVDWWDMVCNVKKLINEKKEDGKVFWQNLAGYKRQEALRPYLSSEEDRKKGKKFARYQLGDLLLHLEKKHGEDWGKVYDEAWERIDKKVEGLSKHIKLEEERRSEDAQSKAALTDWLRAKASFVIEGLKEADKDEFCRCELKLQKWYGDLRGKPFAIEAENSILDISGFSKQYNCAFIWQKDGVKKLNLYLIINYFKGGKLRFKKIKPEAFEANRFYTVINKKSGEIVPMEVNFNFDDPNLIILPLAFGKRQGREFIWNDLLSLETGSLQLANGRVIEKTLYNRRTRQDEPALFVALTFERREVLDSSNIKPMNLIGVDRGENIPAVIALTDPEGCPLSRFKDSLGNPTHILRIGESYKEKQRTIQAKKEVEQRRAGGYSRKYASKAKNLADDMVRNTARDLLYYAVTQDAMLIFENLSRGFGRQGKRTFMAERQYTRMEDWLTAKLAYEGLPSKTYLSKTLAQYTSKTCSNCGFTITSADYDRVLEKLKKTATGWMTTINGKELKVEGQITYYNRYKRQNVVKDLSVELDRLSEESVNNDISSWTKGRSGEALSLLKKRFSHRPVQEKFVCLNCGFETHADEQAALNIARSWLFLRSQEYKKYQTNKTTGNTDKRAFVETWQSFYRKKLKEVWKPAV

SEQ ID NO: 31836 - protein, 979 aa, synthetic construct
  REGION 1..979: note = engineered CasX variant
QEIGKRINKIRRRLVKDSNTKKAGKTGPMKTLLVRVMTPDLRERLENLRKKPENIPQPISNTSRANLNKLLTDYTEMKKAILHVYWEEFQKDPVGLMSRVAQPASKKIDQNKLKPEMDEKGNLTTAGFACSQCGQPLFVYKLEQVSEKGKAYTNYFGRCNVAEHEKLILLAQLKPEKDSDEAVTYSLGKFGQRALDFYSIHVTKESTHPVKPLAQIAGNRYASHPVGKALSDACMGTIASFLSKYQDIIIEHQKVVKGNQKRLESLRELAGKENLEYPSVTLPPQPHTKEGVDAYNEVIARVRMWVNLNLWQKLKLSRDDAKPLLRLKGFPSFPLVERQANEVDWWDMVCNVKKLINEKKEDGKVFWQNLAGYKRQEALRPYLSSEEDRKKGKKFARYQLGDLLLHLEKKHGEDWGKVYDEAWERIDKKVEGLSKHIKLEEERRSEDAQSKAALTDWLRAKASFVIEGLKEADKDEFCRCELKLQKWYGDLRGKPFAIEAENSILDISGFSKQYNCAFIWQKDGVKKLNLYLIINYFKGGKLRFKKIKPEAFEANRFYTVINKKSGEIVPMEVNFNFDDPNLIILPLAFGKRQGREFIWNDLLSLETGSLQLANGRVIEKTLYNRRTRQDEPALFVALTFERREVLDSSNIKPMNLIGVDRGENIPAVIALTDPEGCPLSRFKDSLGNPTHILRIGESYKEKQRTIQAKKEVEQRRAGGYSRKYASKAKNLADDMVRNTARDLLYYAVTQDAMLIFENLSRGFGRQGKRTFMAERQYTRMEDWLTAKLAYEGLPSKTYLSKTLAQYTSKTCSNCGFTITSADYDRVLEKLKKTATGWMTTINGKELKVEGQITYYNRYKRQNVVKDLSVELDRLSEESVNNDISSWTKGRSGEALSLLKKRFSHRPVQEKFVCLNCGFETHADEQAALNIARSWLFLRSQEYKKYQTNKTTGNTDKRAFVETWQSFYRKKLKEVWKPAV

SEQ ID NO: 31837 - protein, 979 aa, synthetic construct
  REGION 1..979: note = engineered CasX variant
QEIGKRINKIRRRLVKDSNTKKAGKTGPMKTLLVRVMTPDLRERLENLRKKPENIPQPISNTSRANLNKLLTDYTEMKKAILHVYWEEFQKDPVGLMSRVAQPASKKIDQNKLKPEMDEKGNLTTAGFACSQCGQPLFVYKLEQVSEKGKAYTNYFGRCNVAEHEKLILLAQLKPEKDSDEAVTYSLGKFGQRALDFYSIHVTKESTHPVKPLAQIAGNRYASSPVGKALSDACMGTIASFLSKYQDIIIEHQKVVKGNQKRLESLRELAGKENLEYPSVTLPPQPHTKEGVDAYNEVIARVRMWVNLNLWQKLKLSRDDAKPLLRLKGFPSFPLVERQANEVDWWDMVCNVKKLINEKKEDGKVFWQNLAGYKRQEALRPYLSSEEDRKKGKKFARYQLGDLLLHLEKKHGEDWGKVYDEAWERIDKKVEGLSKHIKLEEERRSEDAQSKAALTDWLRAKASFVIEGLKEADKDEFCRCELKLQKWYGDLRGKPFAIEAENSILDISGFSKQYNCAFIWQKDGVKKLNLYLIINYFKGGKLRFKKIKPEAFEANRFYTVINKKSGEIVPMEVNFNFDDPNLIILPLAFGKRQGREFIWNDLLSLETGSLQLANGRVIEKTLYNRRTRQDEPALFVALTFERREVLDSSNIKPMNLIGVDRGENIPAVIALTDPEGCPLSRFKDSLGNPTHILRIGESYKEKQRTIQAKKEVEQRRAGGYSRKYASKAKNLADDMVRNTARDLLYYAVTQDAMLIFENLSRGFGRQGKRTFMAERQYTRMEDWLTAKLAYEGLPSKTYLSKTLAQYTSKTCSNCGFTITSADYDRVLEKLKKTATGWMTTINGKELKVEGQITYYNRYKRQNVVKDLSVELDRLSEESVNNDISSWTKGRSGEALSLLKKRFSHRPVQEKFVCLNCGFETHADEQAALNIARSWLFLRSQEYKKYQTNKTTGNTDKRAFVETWQSFYRKKLKEVWKPAV

SEQ ID NO: 31838 - protein, 979 aa, synthetic construct
  REGION 1..979: note = engineered CasX variant
QEIGKRINKIRRRLVKDSNTKKAGKTGPMKTLLVRVMTPDLRERLENLRKKPENIPQPISNTSRANLNKLLTDYTEMKKAILHVYWEEFQKDPVGLMSRVAQPASKKIDQNKLKPEMDEKGNLTTAGFACSQCGQPLFVYKLEQVSEKGKAYTNYFGRCNVAEHEKLILLAQLKPEKDSDEAVTYSLGKFGQRALDFYSIHVTKESTHPVKPLAQIAGNRYASTPVGKALSDACMGTIASFLSKYQDIIIEHQKVVKGNQKRLESLRELAGKENLEYPSVTLPPQPHTKEGVDAYNEVIARVRMWVNLNLWQKLKLSRDDAKPLLRLKGFPSFPLVERQANEVDWWDMVCNVKKLINEKKEDGKVFWQNLAGYKRQEALRPYLSSEEDRKKGKKFARYQLGDLLLHLEKKHGEDWGKVYDEAWERIDKKVEGLSKHIKLEEERRSEDAQSKAALTDWLRAKASFVIEGLKEADKDEFCRCELKLQKWYGDLRGKPFAIEAENSILDISGFSKQYNCAFIWQKDGVKKLNLYLIINYFKGGKLRFKKIKPEAFEANRFYTVINKKSGEIVPMEVNFNFDDPNLIILPLAFGKRQGREFIWNDLLSLETGSLQLANGRVIEKTLYNRRTRQDEPALFVALTFERREVLDSSNIKPMNLIGVDRGENIPAVIALTDPEGCPLSRFKDSLGNPTHILRIGESYKEKQRTIQAKKEVEQRRAGGYSRKYASKAKNLADDMVRNTARDLLYYAVTQDAMLIFENLSRGFGRQGKRTFMAERQYTRMEDWLTAKLAYEGLPSKTYLSKTLAQYTSKTCSNCGFTITSADYDRVLEKLKKTATGWMTTINGKELKVEGQITYYNRYKRQNVVKDLSVELDRLSEESVNNDISSWTKGRSGEALSLLKKRFSHRPVQEKFVCLNCGFETHADEQAALNIARSWLFLRSQEYKKYQTNKTTGNTDKRAFVETWQSFYRKKLKEVWKPAV

SEQ ID NO: 31839 - protein, 979 aa, synthetic construct
  REGION 1..979: note = engineered CasX variant
QEIGKRINKIRRRLVKDSNTKKAGKTGPMKTLLVRVMTPDLRERLENLRKKPENIPQPISNTSRANLNKLLTDYTEMKKAILHVYWEEFQKDPVGLMSRVAQPASKKIDQNKLKPEMDEKGNLTTAGFACSQCGQPLFVYKLEQVSEKGKAYTNYFGRCNVAEHEKLILLAQLKPEKDSDEAVTYSLGKFGQRALDFYSIHVTKESTHPVKPLAQIAGNRYASAPVGKALSDACMGTIASFLSKYQDIIIEHQKVVKGNQKRLESLRELAGKENLEYPSVTLPPQPHTKEGVDAYNEVIARVRMWVNLNLWQKLKLSRDDAKPLLRLKGFPSFPLVERQANEVDWWDMVCNVKKLINEKKEDGKVFWQNLAGYKRQEALRPYLSSEEDRKKGKKFARYQLGDLLLHLEKKHGEDWGKVYDEAWERIDKKVEGLSKHIKLEEERRSEDAQSKAALTDWLRAKASFVIEGLKEADKDEFCRCELKLQKWYGDLRGKPFAIEAENSILDISGFSKQYNCAFIWQKDGVKKLNLYLIINYFKGGKLRFKKIKPEAFEANRFYTVINKKSGEIVPMEVNFNFDDPNLIILPLAFGKRQGREFIWNDLLSLETGSLQLANGRVIEKTLYNRRTRQDEPALFVALTFERREVLDSSNIKPMNLIGVDRGENIPAVIALTDPEGCPLSRFKDSLGNPTHILRIGESYKEKQRTIQAKKEVEQRRAGGYSRKYASKAKNLADDMVRNTARDLLYYAVTQDAMLIFENLSRGFGRQGKRTFMAERQYTRMEDWLTAKLAYEGLPSKTYLSKTLAQYTSKTCSNCGFTITSADYDRVLEKLKKTATGWMTTINGKELKVEGQITYYNRYKRQNVVKDLSVELDRLSEESVNNDISSWTKGRSGEALSLLKKRFSHRPVQEKFVCLNCGFETHADEQAALNIARSWLFLRSQEYKKYQTNKTTGNTDKRAFVETWQSFYRKKLKEVWKPAV

SEQ ID NO: 31840 - protein, 979 aa, synthetic construct
  REGION 1..979: note = engineered CasX variant
QEIGKRINKIRRRLVKDSNTKKAGKTGPMKTLLVRVMTPDLRERLENLRKKPENIPQPISNTSRANLNKLLTDYTEMKKAILHVYWEEFQKDPVGLMSRVAQPASKKIDQNKLKPEMDEKGNLTTAGFACSQCGQPLFVYKLEQVSEKGKAYTNYFGRCNVAEHEKLILLAQLKPEKDSDEAVTYSLGKFGQRALDFYSIHVTKESTHPVKPLAQIAGNRYASVPVGKALSDACMGTIASFLSKYQDIIIEHQKVVKGNQKRLESLRELAGKENLEYPSVTLPPQPHTKEGVDAYNEVIARVRMWVNLNLWQKLKLSRDDAKPLLRLKGFPSFPLVERQANEVDWWDMVCNVKKLINEKKEDGKVFWQNLAGYKRQEALRPYLSSEEDRKKGKKFARYQLGDLLLHLEKKHGEDWGKVYDEAWERIDKKVEGLSKHIKLEEERRSEDAQSKAALTDWLRAKASFVIEGLKEADKDEFCRCELKLQKWYGDLRGKPFAIEAENSILDISGFSKQYNCAFIWQKDGVKKLNLYLIINYFKGGKLRFKKIKPEAFEANRFYTVINKKSGEIVPMEVNFNFDDPNLIILPLAFGKRQGREFIWNDLLSLETGSLQLANGRVIEKTLYNRRTRQDEPALFVALTFERREVLDSSNIKPMNLIGVDRGENIPAVIALTDPEGCPLSRFKDSLGNPTHILRIGESYKEKQRTIQAKKEVEQRRAGGYSRKYASKAKNLADDMVRNTARDLLYYAVTQDAMLIFENLSRGFGRQGKRTFMAERQYTRMEDWLTAKLAYEGLPSKTYLSKTLAQYTSKTCSNCGFTITSADYDRVLEKLKKTATGWMTTINGKELKVEGQITYYNRYKRQNVVKDLSVELDRLSEESVNNDISSWTKGRSGEALSLLKKRFSHRPVQEKFVCLNCGFETHADEQAALNIARSWLFLRSQEYKKYQTNKTTGNTDKRAFVETWQSFYRKKLKEVWKPAV

SEQ ID NO: 31841 - protein, 979 aa, synthetic construct
  REGION 1..979: note = engineered CasX variant
QEIGKRINKIRRRLVKDSNTKKAGKTGPMKTLLVRVMTPDLRERLENLRKKPENIPQPISNTSRANLNKLLTDYTEMKKAILHVYWEEFQKDPVGLMSRVAQPASKKIDQNKLKPEMDEKGNLTTAGFACSQCGQPLFVYKLEQVSEKGKAYTNYFGRCNVAEHEKLIKLAQLKPEKDSDEAVTYSLGKFGQRALDFYSIHVTKESTHPVKPLAQIAGNRYASGPVGKALSDACMGTIASFLSKYQDIIIEHQKVVKGNQKRLESLRELAGKENLEYPSVTLPPQPHTKEGVDAYNEVIARVRMWVNLNLWQKLKLSRDDAKPLLRLKGFPSFPLVERQANEVDWWDMVCNVKKLINEKKEDGKVFWQNLAGYKRQEALRPYLSSEEDRKKGKKFARYQLGDLLLHLEKKHGEDWGKVYDEAWERIDKKVEGLSKHIKLEEERRSEDAQSKAALTDWLRAKASFVIEGLKEADKDEFCRCELKLQKWYGDLRGKPFAIEAENSILDISGFSKQYNCAFIWQKDGVKKLNLYLIINYFKGGKLRFKKIKPEAFEANRFYTVINKKSGEIVPMEVNFNFDDPNLIILPLAFGKRQGREFIWNDLLSLETGSLQLANGRVIEKTLYNRRTRQDEPALFVALTFERREVLDSSNIKPMNLIGVDRGENIPAVIALTDPEGCPLSRFKDSLGNPTHILRIGESYKEKQRTIQAKKEVEQRRAGGYSRKYASKAKNLADDMVRNTARDLLYYAVTQDAMLIFENLSRGFGRQGKRTFMAERQYTRMEDWLTAKLAYEGLPSKTYLSKTLAQYTSKTCSNCGFTITSADYDRVLEKLKKTATGWMTTINGKELKVEGQITYYNRYKRQNVVKDLSVELDRLSEESVNNDISSWTKGRSGEALSLLKKRFSHRPVQEKFVCLNCGFETHADEQAALNIARSWLFLRSQEYKKYQTNKTTGNTDKRAFVETWQSFYRKKLKEVWKPAV

SEQ ID NO: 31842 - protein, 978 aa, synthetic construct
  REGION 1..978: note = engineered CasX variant
QEIGKRINKIRRRLVKDSNTKKAGKTGPMKTLLVRVMTPDLRERLENLRKKPENIPQPISNTSRANLNKLLTDYTEMKKAILHVYWEEFQKDPVGLMSRVAQPASKKIDQNKLKPEMDEKGNLTTAGFACSQCGQPLFVYKLEQVSEKGKAYTNYFGRCNVAEHEKLILLAQLKPEKDSDEAVTYSLGKFGQRALDFYSIHVTKESTHPVKPLAQIAGNRYASPVGKALSDACMGTIASFLSKYQDIIIEHQKVVKGNQKRLESLRELAGKENLEYPSVTLPPQPHTKEGVDAYNEVIARVRMWVNLNLWQKLKLSRDDAKPLLRLKGFPSFPLVERQANEVDWWDMVCNVKKLINEKKEDGKVFWQNLAGYKRQEALRPYLSSEEDRKKGKKFARYQLGDLLLHLEKKHGEDWGKVYDEAWERIDKKVEGLSKHIKLEEERRSEDAQSKAALTDWLRAKASFVIEGLKEADKDEFCRCELKLQKWYGDLRGKPFAIEAENSILDISGFSKQYNCAFIWQKDGVKKLNLYLIINYFKGGKLRFKKIKPEAFEANRFYTVINKKSGEIVPMEVNFNFDDPNLIILPLAFGKRQGREFIWNDLLSLETGSLQLANGRVIEKTLYNRRTRQDEPALFVALTFERREVLDSSNIKPMNLIGVDRGENIPAVIALTDPEGCPLSRFKDSLGNPTHILRIGESYKEKQRTIQAKKEVEQRRAGGYSRKYASKAKNLADDMVRNTARDLLYYAVTQDAMLIFENLSRGFGRQGKRTFMAERQYTRMEDWLTAKLAYEGLPSKTYLSKTLAQYTSKTCSNCGFTITSADYDRVLEKLKKTATGWMTTINGKELKVEGQITYYNRYKRQNVVKDLSVELDRLSEESVNNDISSWTKGRSGEALSLLKKRFSHRPVQEKFVCLNCGFETHADEQAALNIARSWLFLRSQEYKKYQTNKTTGNTDKRAFVETWQSFYRKKLKEVWKPAV

SEQ ID NO: 31843 - protein, 980 aa, synthetic construct
  REGION 1..980: note = engineered CasX variant
QEIGGKRINKIRRRLVKDSNTKKAGKTGPMKTLLVRVMTPDLRERLENLRKKPENIPQPISNTSRANLNKLLTDYTEMKKAILHVYWEEFQKDPVGLMSRVAQPASKKIDQNKLKPEMDEKGNLTTAGFACSQCGQPLFVYKLEQVSEKGKAYTNYFGRCNVAEHEKLILLAQLKPEKDSDEAVTYSLGKFGQRALDFYSIHVTKESTHPVKPLAQIAGNRYASYPVGKALSDACMGTIASFLSKYQDIIIEHQKVVKGNQKRLESLRELAGKENLEYPSVTLPPQPHTKEGVDAYNEVIARVRMWVNLNLWQKLKLSRDDAKPLLRLKGFPSFPLVERQANEVDWWDMVCNVKKLINEKKEDGKVFWQNLAGYKRQEALRPYLSSEEDRKKGKKFARYQLGDLLLHLEKKHGEDWGKVYDEAWERIDKKVEGLSKHIKLEEERRSEDAQSKAALTDWLRAKASFVIEGLKEADKDEFCRCELKLQKWYGDLRGKPFAIEAENSILDISGFSKQYNCAFIWQKDGVKKLNLYLIINYFKGGKLRFKKIKPEAFEANRFYTVINKKSGEIVPMEVNFNFDDPNLIILPLAFGKRQGREFIWNDLLSLETGSLKLANGRVIEKTLYNRRTRQDEPALFVALTFERREVLDSSNIKPMNLIGVDRGENIPAVIALTDPEGCPLSRFKDSLGNPTHILRIGESYKEKQRTIQAKKEVEQRRAGGYSRKYASKAKNLADDMVRNTARDLLYYAVTQDAMLIFENLSRGFGRQGKRTFMAERQYTRMEDWLTAKLAYEGLPSKTYLSKTLAQYTSKTCSNCGFTITSADYDRVLEKLKKTATGWMTTINGKELKVEGQITYYNRYKRQNVVKDLSVELDRLSEESVNNDISSWTKGRSGEALSLLKKRFSHRPVQEKFVCLNCGFETHADEQAALNIARSWLFLRSQEYKKYQTNKTTGNTDKRAFVETWQSFYRKKLKEVWKPAV

SEQ ID NO: 31844 - protein, 980 aa, synthetic construct
  REGION 1..980: note = engineered CasX variant
QEIGGKRINKIRRRLVKDSNTKKAGKTGPMKTLLVRVMTPDLRERLENLRKKPENIPQPISNTSRANLNKLLTDYTEMKKAILHVYWEEFQKDPVGLMSRVAQPASKKIDQNKLKPEMDEKGNLTTAGFACSQCGQPLFVYKLEQVSEKGKAYTNYFGRCNVAEHEKLILLAQLKPEKDSDEAVTYSLGKFGQRALDFYSIHVTKESTHPVKPLAQIAGNRYASHPVGKALSDACMGTIASFLSKYQDIIIEHQKVVKGNQKRLESLRELAGKENLEYPSVTLPPQPHTKEGVDAYNEVIARVRMWVNLNLWQKLKLSRDDAKPLLRLKGFPSFPLVERQANEVDWWDMVCNVKKLINEKKEDGKVFWQNLAGYKRQEALRPYLSSEEDRKKGKKFARYQLGDLLLHLEKKHGEDWGKVYDEAWERIDKKVEGLSKHIKLEEERRSEDAQSKAALTDWLRAKASFVIEGLKEADKDEFCRCELKLQKWYGDLRGKPFAIEAENSILDISGFSKQYNCAFIWQKDGVKKLNLYLIINYFKGGKLRFKKIKPEAFEANRFYTVINKKSGEIVPMEVNFNFDDPNLIILPLAFGKRQGREFIWNDLLSLETGSLKLANGRVIEKTLYNRRTRQDEPALFVALTFERREVLDSSNIKPMNLIGVDRGENIPAVIALTDPEGCPLSRFKDSLGNPTHILRIGESYKEKQRTIQAKKEVEQRRAGGYSRKYASKAKNLADDMVRNTARDLLYYAVTQDAMLIFENLSRGFGRQGKRTFMAERQYTRMEDWLTAKLAYEGLPSKTYLSKTLAQYTSKTCSNCGFTITSADYDRVLEKLKKTATGWMTTINGKELKVEGQITYYNRYKRQNVVKDLSVELDRLSEESVNNDISSWTKGRSGEALSLLKKRFSHRPVQEKFVCLNCGFETHADEQAALNIARSWLFLRSQEYKKYQTNKTTGNTDKRAFVETWQSFYRKKLKEVWKPAV

SEQ ID NO: 31845 - protein, 980 aa, synthetic construct
  REGION 1..980: note = engineered CasX variant
QEIGGKRINKIRRRLVKDSNTKKAGKTGPMKTLLVRVMTPDLRERLENLRKKPENIPQPISNTSRANLNKLLTDYTEMKKAILHVYWEEFQKDPVGLMSRVAQPASKKIDQNKLKPEMDEKGNLTTAGFACSQCGQPLFVYKLEQVSEKGKAYTNYFGRCNVAEHEKLILLAQLKPEKDSDEAVTYSLGKFGQRALDFYSIHVTKESTHPVKPLAQIAGNRYASSPVGKALSDACMGTIASFLSKYQDIIIEHQKVVKGNQKRLESLRELAGKENLEYPSVTLPPQPHTKEGVDAYNEVIARVRMWVNLNLWQKLKLSRDDAKPLLRLKGFPSFPLVERQANEVDWWDMVCNVKKLINEKKEDGKVFWQNLAGYKRQEALRPYLSSEEDRKKGKKFARYQLGDLLLHLEKKHGEDWGKVYDEAWERIDKKVEGLSKHIKLEEERRSEDAQSKAALTDWLRAKASFVIEGLKEADKDEFCRCELKLQKWYGDLRGKPFAIEAENSILDISGFSKQYNCAFIWQKDGVKKLNLYLIINYFKGGKLRFKKIKPEAFEANRFYTVINKKSGEIVPMEVNFNFDDPNLIILPLAFGKRQGREFIWNDLLSLETGSLKLANGRVIEKTLYNRRTRQDEPALFVALTFERREVLDSSNIKPMNLIGVDRGENIPAVIALTDPEGCPLSRFKDSLGNPTHILRIGESYKEKQRTIQAKKEVEQRRAGGYSRKYASKAKNLADDMVRNTARDLLYYAVTQDAMLIFENLSRGFGRQGKRTFMAERQYTRMEDWLTAKLAYEGLPSKTYLSKTLAQYTSKTCSNCGFTITSADYDRVLEKLKKTATGWMTTINGKELKVEGQITYYNRYKRQNVVKDLSVELDRLSEESVNNDISSWTKGRSGEALSLLKKRFSHRPVQEKFVCLNCGFETHADEQAALNIARSWLFLRSQEYKKYQTNKTTGNTDKRAFVETWQSFYRKKLKEVWKPAV

SEQ ID NO: 31846 - protein, 980 aa, synthetic construct
  REGION 1..980: note = engineered CasX variant
QEIGGKRINKIRRRLVKDSNTKKAGKTGPMKTLLVRVMTPDLRERLENLRKKPENIPQPISNTSRANLNKLLTDYTEMKKAILHVYWEEFQKDPVGLMSRVAQPASKKIDQNKLKPEMDEKGNLTTAGFACSQCGQPLFVYKLEQVSEKGKAYTNYFGRCNVAEHEKLILLAQLKPEKDSDEAVTYSLGKFGQRALDFYSIHVTKESTHPVKPLAQIAGNRYASTPVGKALSDACMGTIASFLSKYQDIIIEHQKVVKGNQKRLESLRELAGKENLEYPSVTLPPQPHTKEGVDAYNEVIARVRMWVNLNLWQKLKLSRDDAKPLLRLKGFPSFPLVERQANEVDWWDMVCNVKKLINEKKEDGKVFWQNLAGYKRQEALRPYLSSEEDRKKGKKFARYQLGDLLLHLEKKHGEDWGKVYDEAWERIDKKVEGLSKHIKLEEERRSEDAQSKAALTDWLRAKASFVIEGLKEADKDEFCRCELKLQKWYGDLRGKPFAIEAENSILDISGFSKQYNCAFIWQKDGVKKLNLYLIINYFKGGKLRFKKIKPEAFEANRFYTVINKKSGEIVPMEVNFNFDDPNLIILPLAFGKRQGREFIWNDLLSLETGSLKLANGRVIEKTLYNRRTRQDEPALFVALTFERREVLDSSNIKPMNLIGVDRGENIPAVIALTDPEGCPLSRFKDSLGNPTHILRIGESYKEKQRTIQAKKEVEQRRAGGYSRKYASKAKNLADDMVRNTARDLLYYAVTQDAMLIFENLSRGFGRQGKRTFMAERQYTRMEDWLTAKLAYEGLPSKTYLSKTLAQYTSKTCSNCGFTITSADYDRVLEKLKKTATGWMTTINGKELKVEGQITYYNRYKRQNVVKDLSVELDRLSEESVNNDISSWTKGRSGEALSLLKKRFSHRPVQEKFVCLNCGFETHADEQAALNIARSWLFLRSQEYKKYQTNKTTGNTDKRAFVETWQSFYRKKLKEVWKPAV

SEQ ID NO: 31847 - protein, 980 aa, synthetic construct
  REGION 1..980: note = engineered CasX variant
QEIGGKRINKIRRRLVKDSNTKKAGKTGPMKTLLVRVMTPDLRERLENLRKKPENIPQPISNTSRANLNKLLTDYTEMKKAILHVYWEEFQKDPVGLMSRVAQPASKKIDQNKLKPEMDEKGNLTTAGFACSQCGQPLFVYKLEQVSEKGKAYTNYFGRCNVAEHEKLILLAQLKPEKDSDEAVTYSLGKFGQRALDFYSIHVTKESTHPVKPLAQIAGNRYASAPVGKALSDACMGTIASFLSKYQDIIIEHQKVVKGNQKRLESLRELAGKENLEYPSVTLPPQPHTKEGVDAYNEVIARVRMWVNLNLWQKLKLSRDDAKPLLRLKGFPSFPLVERQANEVDWWDMVCNVKKLINEKKEDGKVFWQNLAGYKRQEALRPYLSSEEDRKKGKKFARYQLGDLLLHLEKKHGEDWGKVYDEAWERIDKKVEGLSKHIKLEEERRSEDAQSKAALTDWLRAKASFVIEGLKEADKDEFCRCELKLQKWYGDLRGKPFAIEAENSILDISGFSKQYNCAFIWQKDGVKKLNLYLIINYFKGGKLRFKKIKPEAFEANRFYTVINKKSGEIVPMEVNFNFDDPNLIILPLAFGKRQGREFIWNDLLSLETGSLKLANGRVIEKTLYNRRTRQDEPALFVALTFERREVLDSSNIKPMNLIGVDRGENIPAVIALTDPEGCPLSRFKDSLGNPTHILRIGESYKEKQRTIQAKKEVEQRRAGGYSRKYASKAKNLADDMVRNTARDLLYYAVTQDAMLIFENLSRGFGRQGKRTFMAERQYTRMEDWLTAKLAYEGLPSKTYLSKTLAQYTSKTCSNCGFTITSADYDRVLEKLKKTATGWMTTINGKELKVEGQITYYNRYKRQNVVKDLSVELDRLSEESVNNDISSWTKGRSGEALSLLKKRFSHRPVQEKFVCLNCGFETHADEQAALNIARSWLFLRSQEYKKYQTNKTTGNTDKRAFVETWQSFYRKKLKEVWKPAV

SEQ ID NO: 31848 - protein, 980 aa, synthetic construct
  REGION 1..980: note = engineered CasX variant
QEIGGKRINKIRRRLVKDSNTKKAGKTGPMKTLLVRVMTPDLRERLENLRKKPENIPQPISNTSRANLNKLLTDYTEMKKAILHVYWEEFQKDPVGLMSRVAQPASKKIDQNKLKPEMDEKGNLTTAGFACSQCGQPLFVYKLEQVSEKGKAYTNYFGRCNVAEHEKLILLAQLKPEKDSDEAVTYSLGKFGQRALDFYSIHVTKESTHPVKPLAQIAGNRYASVPVGKALSDACMGTIASFLSKYQDIIIEHQKVVKGNQKRLESLRELAGKENLEYPSVTLPPQPHTKEGVDAYNEVIARVRMWVNLNLWQKLKLSRDDAKPLLRLKGFPSFPLVERQANEVDWWDMVCNVKKLINEKKEDGKVFWQNLAGYKRQEALRPYLSSEEDRKKGKKFARYQLGDLLLHLEKKHGEDWGKVYDEAWERIDKKVEGLSKHIKLEEERRSEDAQSKAALTDWLRAKASFVIEGLKEADKDEFCRCELKLQKWYGDLRGKPFAIEAENSILDISGFSKQYNCAFIWQKDGVKKLNLYLIINYFKGGKLRFKKIKPEAFEANRFYTVINKKSGEIVPMEVNFNFDDPNLIILPLAFGKRQGREFIWNDLLSLETGSLKLANGRVIEKTLYNRRTRQDEPALFVALTFERREVLDSSNIKPMNLIGVDRGENIPAVIALTDPEGCPLSRFKDSLGNPTHILRIGESYKEKQRTIQAKKEVEQRRAGGYSRKYASKAKNLADDMVRNTARDLLYYAVTQDAMLIFENLSRGFGRQGKRTFMAERQYTRMEDWLTAKLAYEGLPSKTYLSKTLAQYTSKTCSNCGFTITSADYDRVLEKLKKTATGWMTTINGKELKVEGQITYYNRYKRQNVVKDLSVELDRLSEESVNNDISSWTKGRSGEALSLLKKRFSHRPVQEKFVCLNCGFETHADEQAALNIARSWLFLRSQEYKKYQTNKTTGNTDKRAFVETWQSFYRKKLKEVWKPAV

SEQ ID NO: 31849 - protein, 980 aa, synthetic construct
  REGION 1..980: note = engineered CasX variant
QEIGGKRINKIRRRLVKDSNTKKAGKTGPMKTLLVRVMTPDLRERLENLRKKPENIPQPISNTSRANLNKLLTDYTEMKKAILHVYWEEFQKDPVGLMSRVAQPASKKIDQNKLKPEMDEKGNLTTAGFACSQCGQPLFVYKLEQVSEKGKAYTNYFGRCNVAEHEKLIKLAQLKPEKDSDEAVTYSLGKFGQRALDFYSIHVTKESTHPVKPLAQIAGNRYASGPVGKALSDACMGTIASFLSKYQDIIIEHQKVVKGNQKRLESLRELAGKENLEYPSVTLPPQPHTKEGVDAYNEVIARVRMWVNLNLWQKLKLSRDDAKPLLRLKGFPSFPLVERQANEVDWWDMVCNVKKLINEKKEDGKVFWQNLAGYKRQEALRPYLSSEEDRKKGKKFARYQLGDLLLHLEKKHGEDWGKVYDEAWERIDKKVEGLSKHIKLEEERRSEDAQSKAALTDWLRAKASFVIEGLKEADKDEFCRCELKLQKWYGDLRGKPFAIEAENSILDISGFSKQYNCAFIWQKDGVKKLNLYLIINYFKGGKLRFKKIKPEAFEANRFYTVINKKSGEIVPMEVNFNFDDPNLIILPLAFGKRQGREFIWNDLLSLETGSLKLANGRVIEKTLYNRRTRQDEPALFVALTFERREVLDSSNIKPMNLIGVDRGENIPAVIALTDPEGCPLSRFKDSLGNPTHILRIGESYKEKQRTIQAKKEVEQRRAGGYSRKYASKAKNLADDMVRNTARDLLYYAVTQDAMLIFENLSRGFGRQGKRTFMAERQYTRMEDWLTAKLAYEGLPSKTYLSKTLAQYTSKTCSNCGFTITSADYDRVLEKLKKTATGWMTTINGKELKVEGQITYYNRYKRQNVVKDLSVELDRLSEESVNNDISSWTKGRSGEALSLLKKRFSHRPVQEKFVCLNCGFETHADEQAALNIARSWLFLRSQEYKKYQTNKTTGNTDKRAFVETWQSFYRKKLKEVWKPAV

SEQ ID NO: 31850 - protein, 979 aa, synthetic construct
  REGION 1..979: note = engineered CasX variant
QEIGGKRINKIRRRLVKDSNTKKAGKTGPMKTLLVRVMTPDLRERLENLRKKPENIPQPISNTSRANLNKLLTDYTEMKKAILHVYWEEFQKDPVGLMSRVAQPASKKIDQNKLKPEMDEKGNLTTAGFACSQCGQPLFVYKLEQVSEKGKAYTNYFGRCNVAEHEKLILLAQLKPEKDSDEAVTYSLGKFGQRALDFYSIHVTKESTHPVKPLAQIAGNRYASPVGKALSDACMGTIASFLSKYQDIIIEHQKVVKGNQKRLESLRELAGKENLEYPSVTLPPQPHTKEGVDAYNEVIARVRMWVNLNLWQKLKLSRDDAKPLLRLKGFPSFPLVERQANEVDWWDMVCNVKKLINEKKEDGKVFWQNLAGYKRQEALRPYLSSEEDRKKGKKFARYQLGDLLLHLEKKHGEDWGKVYDEAWERIDKKVEGLSKHIKLEEERRSEDAQSKAALTDWLRAKASFVIEGLKEADKDEFCRCELKLQKWYGDLRGKPFAIEAENSILDISGFSKQYNCAFIWQKDGVKKLNLYLIINYFKGGKLRFKKIKPEAFEANRFYTVINKKSGEIVPMEVNFNFDDPNLIILPLAFGKRQGREFIWNDLLSLETGSLKLANGRVIEKTLYNRRTRQDEPALFVALTFERREVLDSSNIKPMNLIGVDRGENIPAVIALTDPEGCPLSRFKDSLGNPTHILRIGESYKEKQRTIQAKKEVEQRRAGGYSRKYASKAKNLADDMVRNTARDLLYYAVTQDAMLIFENLSRGFGRQGKRTFMAERQYTRMEDWLTAKLAYEGLPSKTYLSKTLAQYTSKTCSNCGFTITSADYDRVLEKLKKTATGWMTTINGKELKVEGQITYYNRYKRQNVVKDLSVELDRLSEESVNNDISSWTKGRSGEALSLLKKRFSHRPVQEKFVCLNCGFETHADEQAALNIARSWLFLRSQEYKKYQTNKTTGNTDKRAFVETWQSFYRKKLKEVWKPAV

SEQ ID NO: 31851 - protein, 978 aa, synthetic construct
  REGION 1..978: note = engineered CasX variant
QEIGRANKIRRRLVKDSNTKKAGKTGPMKTLLVRVMTPDLRERLENLRKKPENIPQPISNTSRANLNKLLTDYTEMKKAILHVYWEEFQKDPVGLMSRVAQPASKKIDQNKLKPEMDEKGNLTTAGFACSQCGQPLFVYKLEQVSEKGKAYTNYFGRCNVAEHEKLILLAQLKPEKDSDEAVTYSLGKFGQRALDFYSIHVTKESTHPVKPLAQIAGNRYASYPVGKALSDACMGTIASFLSKYQDIIIEHQKVVKGNQKRLESLRELAGKENLEYPSVTLPPQPHTKEGVDAYNEVIARVRMWVNLNLWQKLKLSRDDAKPLLRLKGFPSFPLVERQANEVDWWDMVCNVKKLINEKKEDGKVFWQNLAGYKRQEALRPYLSSEEDRKKGKKFARYQLGDLLLHLEKKHGEDWGKVYDEAWERIDKKVEGLSKHIKLEEERRSEDAQSKAALTDWLRAKASFVIEGLKEADKDEFCRCELKLQKWYGDLRGKPFAIEAENSILDISGFSKQYNCAFIWQKDGVKKLNLYLIINYFKGGKLRFKKIKPEAFEANRFYTVINKKSGEIVPMEVNFNFDDPNLIILPLAFGKRQGREFIWNDLLSLETGSLKLANGRVIEKTLYNRRTRQDEPALFVALTFERREVLDSSNIKPMNLIGVDRGENIPAVIALTDPEGCPLSRFKDSLGNPTHILRIGESYKEKQRTIQAKKEVEQRRAGGYSRKYASKAKNLADDMVRNTARDLLYYAVTQDAMLIFENLSRGFGRQGKRTFMAERQYTRMEDWLTAKLAYEGLPSKTYLSKTLAQYTSKTCSNCGFTITSADYDRVLEKLKKTATGWMTTINGKELKVEGQITYYNRYKRQNVVKDLSVELDRLSEESVNNDISSWTKGRSGEALSLLKKRFSHRPVQEKFVCLNCGFETHADEQAALNIARSWLFLRSQEYKKYQTNKTTGNTDKRAFVETWQSFYRKKLKEVWKPAV

SEQ ID NO: 31852 - protein, 978 aa, synthetic construct
  REGION 1..978: note = engineered CasX variant
QEIGRANKIRRRLVKDSNTKKAGKTGPMKTLLVRVMTPDLRERLENLRKKPENIPQPISNTSRANLNKLLTDYTEMKKAILHVYWEEFQKDPVGLMSRVAQPASKKIDQNKLKPEMDEKGNLTTAGFACSQCGQPLFVYKLEQVSEKGKAYTNYFGRCNVAEHEKLILLAQLKPEKDSDEAVTYSLGKFGQRALDFYSIHVTKESTHPVKPLAQIAGNRYASHPVGKALSDACMGTIASFLSKYQDIIIEHQKVVKGNQKRLESLRELAGKENLEYPSVTLPPQPHTKEGVDAYNEVIARVRMWVNLNLWQKLKLSRDDAKPLLRLKGFPSFPLVERQANEVDWWDMVCNVKKLINEKKEDGKVFWQNLAGYKRQEALRPYLSSEEDRKKGKKFARYQLGDLLLHLEKKHGEDWGKVYDEAWERIDKKVEGLSKHIKLEEERRSEDAQSKAALTDWLRAKASFVIEGLKEADKDEFCRCELKLQKWYGDLRGKPFAIEAENSILDISGFSKQYNCAFIWQKDGVKKLNLYLIINYFKGGKLRFKKIKPEAFEANRFYTVINKKSGEIVPMEVNFNFDDPNLIILPLAFGKRQGREFIWNDLLSLETGSLKLANGRVIEKTLYNRRTRQDEPALFVALTFERREVLDSSNIKPMNLIGVDRGENIPAVIALTDPEGCPLSRFKDSLGNPTHILRIGESYKEKQRTIQAKKEVEQRRAGGYSRKYASKAKNLADDMVRNTARDLLYYAVTQDAMLIFENLSRGFGRQGKRTFMAERQYTRMEDWLTAKLAYEGLPSKTYLSKTLAQYTSKTCSNCGFTITSADYDRVLEKLKKTATGWMTTINGKELKVEGQITYYNRYKRQNVVKDLSVELDRLSEESVNNDISSWTKGRSGEALSLLKKRFSHRPVQEKFVCLNCGFETHADEQAALNIARSWLFLRSQEYKKYQTNKTTGNTDKRAFVETWQSFYRKKLKEVWKPAV

SEQ ID NO: 31853 - protein, 978 aa, synthetic construct
  REGION 1..978: note = engineered CasX variant
QEIGRANKIRRRLVKDSNTKKAGKTGPMKTLLVRVMTPDLRERLENLRKKPENIPQPISNTSRANLNKLLTDYTEMKKAILHVYWEEFQKDPVGLMSRVAQPASKKIDQNKLKPEMDEKGNLTTAGFACSQCGQPLFVYKLEQVSEKGKAYTNYFGRCNVAEHEKLILLAQLKPEKDSDEAVTYSLGKFGQRALDFYSIHVTKESTHPVKPLAQIAGNRYASSPVGKALSDACMGTIASFLSKYQDIIIEHQKVVKGNQKRLESLRELAGKENLEYPSVTLPPQPHTKEGVDAYNEVIARVRMWVNLNLWQKLKLSRDDAKPLLRLKGFPSFPLVERQANEVDWWDMVCNVKKLINEKKEDGKVFWQNLAGYKRQEALRPYLSSEEDRKKGKKFARYQLGDLLLHLEKKHGEDWGKVYDEAWERIDKKVEGLSKHIKLEEERRSEDAQSKAALTDWLRAKASFVIEGLKEADKDEFCRCELKLQKWYGDLRGKPFAIEAENSILDISGFSKQYNCAFIWQKDGVKKLNLYLIINYFKGGKLRFKKIKPEAFEANRFYTVINKKSGEIVPMEVNFNFDDPNLIILPLAFGKRQGREFIWNDLLSLETGSLKLANGRVIEKTLYNRRTRQDEPALFVALTFERREVLDSSNIKPMNLIGVDRGENIPAVIALTDPEGCPLSRFKDSLGNPTHILRIGESYKEKQRTIQAKKEVEQRRAGGYSRKYASKAKNLADDMVRNTARDLLYYAVTQDAMLIFENLSRGFGRQGKRTFMAERQYTRMEDWLTAKLAYEGLPSKTYLSKTLAQYTSKTCSNCGFTITSADYDRVLEKLKKTATGWMTTINGKELKVEGQITYYNRYKRQNVVKDLSVELDRLSEESVNNDISSWTKGRSGEALSLLKKRFSHRPVQEKFVCLNCGFETHADEQAALNIARSWLFLRSQEYKKYQTNKTTGNTDKRAFVETWQSFYRKKLKEVWKPAV

SEQ ID NO: 31854 - protein, 978 aa, synthetic construct
  REGION 1..978: note = engineered CasX variant
QEIGRANKIRRRLVKDSNTKKAGKTGPMKTLLVRVMTPDLRERLENLRKKPENIPQPISNTSRANLNKLLTDYTEMKKAILHVYWEEFQKDPVGLMSRVAQPASKKIDQNKLKPEMDEKGNLTTAGFACSQCGQPLFVYKLEQVSEKGKAYTNYFGRCNVAEHEKLILLAQLKPEKDSDEAVTYSLGKFGQRALDFYSIHVTKESTHPVKPLAQIAGNRYASTPVGKALSDACMGTIASFLSKYQDIIIEHQKVVKGNQKRLESLRELAGKENLEYPSVTLPPQPHTKEGVDAYNEVIARVRMWVNLNLWQKLKLSRDDAKPLLRLKGFPSFPLVERQANEVDWWDMVCNVKKLINEKKEDGKVFWQNLAGYKRQEALRPYLSSEEDRKKGKKFARYQLGDLLLHLEKKHGEDWGKVYDEAWERIDKKVEGLSKHIKLEEERRSEDAQSKAALTDWLRAKASFVIEGLKEADKDEFCRCELKLQKWYGDLRGKPFAIEAENSILDISGFSKQYNCAFIWQKDGVKKLNLYLIINYFKGGKLRFKKIKPEAFEANRFYTVINKKSGEIVPMEVNFNFDDPNLIILPLAFGKRQGREFIWNDLLSLETGSLKLANGRVIEKTLYNRRTRQDEPALFVALTFERREVLDSSNIKPMNLIGVDRGENIPAVIALTDPEGCPLSRFKDSLGNPTHILRIGESYKEKQRTIQAKKEVEQRRAGGYSRKYASKAKNLADDMVRNTARDLLYYAVTQDAMLIFENLSRGFGRQGKRTFMAERQYTRMEDWLTAKLAYEGLPSKTYLSKTLAQYTSKTCSNCGFTITSADYDRVLEKLKKTATGWMTTINGKELKVEGQITYYNRYKRQNVVKDLSVELDRLSEESVNNDISSWTKGRSGEALSLLKKRFSHRPVQEKFVCLNCGFETHADEQAALNIARSWLFLRSQEYKKYQTNKTTGNTDKRAFVETWQSFYRKKLKEVWKPAV

SEQ ID NO: 31855 - protein, 978 aa, synthetic construct
  REGION 1..978: note = engineered CasX variant
QEIGRANKIRRRLVKDSNTKKAGKTGPMKTLLVRVMTPDLRERLENLRKKPENIPQPISNTSRANLNKLLTDYTEMKKAILHVYWEEFQKDPVGLMSRVAQPASKKIDQNKLKPEMDEKGNLTTAGFACSQCGQPLFVYKLEQVSEKGKAYTNYFGRCNVAEHEKLILLAQLKPEKDSDEAVTYSLGKFGQRALDFYSIHVTKESTHPVKPLAQIAGNRYASAPVGKALSDACMGTIASFLSKYQDIIIEHQKVVKGNQKRLESLRELAGKENLEYPSVTLPPQPHTKEGVDAYNEVIARVRMWVNLNLWQKLKLSRDDAKPLLRLKGFPSFPLVERQANEVDWWDMVCNVKKLINEKKEDGKVFWQNLAGYKRQEALRPYLSSEEDRKKGKKFARYQLGDLLLHLEKKHGEDWGKVYDEAWERIDKKVEGLSKHIKLEEERRSEDAQSKAALTDWLRAKASFVIEGLKEADKDEFCRCELKLQKWYGDLRGKPFAIEAENSILDISGFSKQYNCAFIWQKDGVKKLNLYLIINYFKGGKLRFKKIKPEAFEANRFYTVINKKSGEIVPMEVNFNFDDPNLIILPLAFGKRQGREFIWNDLLSLETGSLKLANGRVIEKTLYNRRTRQDEPALFVALTFERREVLDSSNIKPMNLIGVDRGENIPAVIALTDPEGCPLSRFKDSLGNPTHILRIGESYKEKQRTIQAKKEVEQRRAGGYSRKYASKAKNLADDMVRNTARDLLYYAVTQDAMLIFENLSRGFGRQGKRTFMAERQYTRMEDWLTAKLAYEGLPSKTYLSKTLAQYTSKTCSNCGFTITSADYDRVLEKLKKTATGWMTTINGKELKVEGQITYYNRYKRQNVVKDLSVELDRLSEESVNNDISSWTKGRSGEALSLLKKRFSHRPVQEKFVCLNCGFETHADEQAALNIARSWLFLRSQEYKKYQTNKTTGNTDKRAFVETWQSFYRKKLKEVWKPAV

SEQ ID NO: 31856 - protein, 978 aa, synthetic construct
  REGION 1..978: note = engineered CasX variant
QEIGRANKIRRRLVKDSNTKKAGKTGPMKTLLVRVMTPDLRERLENLRKKPENIPQPISNTSRANLNKLLTDYTEMKKAILHVYWEEFQKDPVGLMSRVAQPASKKIDQNKLKPEMDEKGNLTTAGFACSQCGQPLFVYKLEQVSEKGKAYTNYFGRCNVAEHEKLILLAQLKPEKDSDEAVTYSLGKFGQRALDFYSIHVTKESTHPVKPLAQIAGNRYASVPVGKALSDACMGTIASFLSKYQDIIIEHQKVVKGNQKRLESLRELAGKENLEYPSVTLPPQPHTKEGVDAYNEVIARVRMWVNLNLWQKLKLSRDDAKPLLRLKGFPSFPLVERQANEVDWWDMVCNVKKLINEKKEDGKVFWQNLAGYKRQEALRPYLSSEEDRKKGKKFARYQLGDLLLHLEKKHGEDWGKVYDEAWERIDKKVEGLSKHIKLEEERRSEDAQSKAALTDWLRAKASFVIEGLKEADKDEFCRCELKLQKWYGDLRGKPFAIEAENSILDISGFSKQYNCAFIWQKDGVKKLNLYLIINYFKGGKLRFKKIKPEAFEANRFYTVINKKSGEIVPMEVNFNFDDPNLIILPLAFGKRQGREFIWNDLLSLETGSLKLANGRVIEKTLYNRRTRQDEPALFVALTFERREVLDSSNIKPMNLIGVDRGENIPAVIALTDPEGCPLSRFKDSLGNPTHILRIGESYKEKQRTIQAKKEVEQRRAGGYSRKYASKAKNLADDMVRNTARDLLYYAVTQDAMLIFENLSRGFGRQGKRTFMAERQYTRMEDWLTAKLAYEGLPSKTYLSKTLAQYTSKTCSNCGFTITSADYDRVLEKLKKTATGWMTTINGKELKVEGQITYYNRYKRQNVVKDLSVELDRLSEESVNNDISSWTKGRSGEALSLLKKRFSHRPVQEKFVCLNCGFETHADEQAALNIARSWLFLRSQEYKKYQTNKTTGNTDKRAFVETWQSFYRKKLKEVWKPAV

SEQ ID NO: 31857 - protein, 978 aa, synthetic construct
  REGION 1..978: note = engineered CasX variant
QEIGRANKIRRRLVKDSNTKKAGKTGPMKTLLVRVMTPDLRERLENLRKKPENIPQPISNTSRANLNKLLTDYTEMKKAILHVYWEEFQKDPVGLMSRVAQPASKKIDQNKLKPEMDEKGNLTTAGFACSQCGQPLFVYKLEQVSEKGKAYTNYFGRCNVAEHEKLIKLAQLKPEKDSDEAVTYSLGKFGQRALDFYSIHVTKESTHPVKPLAQIAGNRYASGPVGKALSDACMGTIASFLSKYQDIIIEHQKVVKGNQKRLESLRELAGKENLEYPSVTLPPQPHTKEGVDAYNEVIARVRMWVNLNLWQKLKLSRDDAKPLLRLKGFPSFPLVERQANEVDWWDMVCNVKKLINEKKEDGKVFWQNLAGYKRQEALRPYLSSEEDRKKGKKFARYQLGDLLLHLEKKHGEDWGKVYDEAWERIDKKVEGLSKHIKLEEERRSEDAQSKAALTDWLRAKASFVIEGLKEADKDEFCRCELKLQKWYGDLRGKPFAIEAENSILDISGFSKQYNCAFIWQKDGVKKLNLYLIINYFKGGKLRFKKIKPEAFEANRFYTVINKKSGEIVPMEVNFNFDDPNLIILPLAFGKRQGREFIWNDLLSLETGSLKLANGRVIEKTLYNRRTRQDEPALFVALTFERREVLDSSNIKPMNLIGVDRGENIPAVIALTDPEGCPLSRFKDSLGNPTHILRIGESYKEKQRTIQAKKEVEQRRAGGYSRKYASKAKNLADDMVRNTARDLLYYAVTQDAMLIFENLSRGFGRQGKRTFMAERQYTRMEDWLTAKLAYEGLPSKTYLSKTLAQYTSKTCSNCGFTITSADYDRVLEKLKKTATGWMTTINGKELKVEGQITYYNRYKRQNVVKDLSVELDRLSEESVNNDISSWTKGRSGEALSLLKKRFSHRPVQEKFVCLNCGFETHADEQAALNIARSWLFLRSQEYKKYQTNKTTGNTDKRAFVETWQSFYRKKLKEVWKPAV

SEQ ID NO: 31858 - protein, 977 aa, synthetic construct
  REGION 1..977: note = engineered CasX variant
QEIGRANKIRRRLVKDSNTKKAGKTGPMKTLLVRVMTPDLRERLENLRKKPENIPQPISNTSRANLNKLLTDYTEMKKAILHVYWEEFQKDPVGLMSRVAQPASKKIDQNKLKPEMDEKGNLTTAGFACSQCGQPLFVYKLEQVSEKGKAYTNYFGRCNVAEHEKLILLAQLKPEKDSDEAVTYSLGKFGQRALDFYSIHVTKESTHPVKPLAQIAGNRYASPVGKALSDACMGTIASFLSKYQDIIIEHQKVVKGNQKRLESLRELAGKENLEYPSVTLPPQPHTKEGVDAYNEVIARVRMWVNLNLWQKLKLSRDDAKPLLRLKGFPSFPLVERQANEVDWWDMVCNVKKLINEKKEDGKVFWQNLAGYKRQEALRPYLSSEEDRKKGKKFARYQLGDLLLHLEKKHGEDWGKVYDEAWERIDKKVEGLSKHIKLEEERRSEDAQSKAALTDWLRAKASFVIEGLKEADKDEFCRCELKLQKWYGDLRGKPFAIEAENSILDISGFSKQYNCAFIWQKDGVKKLNLYLIINYFKGGKLRFKKIKPEAFEANRFYTVINKKSGEIVPMEVNFNFDDPNLIILPLAFGKRQGREFIWNDLLSLETGSLKLANGRVIEKTLYNRRTRQDEPALFVALTFERREVLDSSNIKPMNLIGVDRGENIPAVIALTDPEGCPLSRFKDSLGNPTHILRIGESYKEKQRTIQAKKEVEQRRAGGYSRKYASKAKNLADDMVRNTARDLLYYAVTQDAMLIFENLSRGFGRQGKRTFMAERQYTRMEDWLTAKLAYEGLPSKTYLSKTLAQYTSKTCSNCGFTITSADYDRVLEKLKKTATGWMTTINGKELKVEGQITYYNRYKRQNVVKDLSVELDRLSEESVNNDISSWTKGRSGEALSLLKKRFSHRPVQEKFVCLNCGFETHADEQAALNIARSWLFLRSQEYKKYQTNKTTGNTDKRAFVETWQSFYRKKLKEVWKPAV

SEQ ID NO: 31859 - protein, 978 aa, synthetic construct
  REGION 1..978: note = engineered CasX variant
QEIGRISKIRRRLVKDSNTKKAGKTGPMKTLLVRVMTPDLRERLENLRKKPENIPQPISNTSRANLNKLLTDYTEMKKAILHVYWEEFQKDPVGLMSRVAQPASKKIDQNKLKPEMDEKGNLTTAGFACSQCGQPLFVYKLEQVSEKGKAYTNYFGRCNVAEHEKLILLAQLKPEKDSDEAVTYSLGKFGQRALDFYSIHVTKESTHPVKPLAQIAGNRYASYPVGKALSDACMGTIASFLSKYQDIIIEHQKVVKGNQKRLESLRELAGKENLEYPSVTLPPQPHTKEGVDAYNEVIARVRMWVNLNLWQKLKLSRDDAKPLLRLKGFPSFPLVERQANEVDWWDMVCNVKKLINEKKEDGKVFWQNLAGYKRQEALRPYLSSEEDRKKGKKFARYQLGDLLLHLEKKHGEDWGKVYDEAWERIDKKVEGLSKHIKLEEERRSEDAQSKAALTDWLRAKASFVIEGLKEADKDEFCRCELKLQKWYGDLRGKPFAIEAENSILDISGFSKQYNCAFIWQKDGVKKLNLYLIINYFKGGKLRFKKIKPEAFEANRFYTVINKKSGEIVPMEVNFNFDDPNLIILPLAFGKRQGREFIWNDLLSLETGSLKLANGRVIEKTLYNRRTRQDEPALFVALTFERREVLDSSNIKPMNLIGVDRGENIPAVIALTDPEGCPLSRFKDSLGNPTHILRIGESYKEKQRTIQAKKEVEQRRAGGYSRKYASKAKNLADDMVRNTARDLLYYAVTQDAMLIFENLSRGFGRQGKRTFMAERQYTRMEDWLTAKLAYEGLPSKTYLSKTLAQYTSKTCSNCGFTITSADYDRVLEKLKKTATGWMTTINGKELKVEGQITYYNRYKRQNVVKDLSVELDRLSEESVNNDISSWTKGRSGEALSLLKKRFSHRPVQEKFVCLNCGFETHADEQAALNIARSWLFLRSQEYKKYQTNKTTGNTDKRAFVETWQSFYRKKLKEVWKPAV

SEQ ID NO: 31860 - protein, 978 aa, synthetic construct
  REGION 1..978: note = engineered CasX variant
QEIGRISKIRRRLVKDSNTKKAGKTGPMKTLLVRVMTPDLRERLENLRKKPENIPQPISNTSRANLNKLLTDYTEMKKAILHVYWEEFQKDPVGLMSRVAQPASKKIDQNKLKPEMDEKGNLTTAGFACSQCGQPLFVYKLEQVSEKGKAYTNYFGRCNVAEHEKLILLAQLKPEKDSDEAVTYSLGKFGQRALDFYSIHVTKESTHPVKPLAQIAGNRYASHPVGKALSDACMGTIASFLSKYQDIIIEHQKVVKGNQKRLESLRELAGKENLEYPSVTLPPQPHTKEGVDAYNEVIARVRMWVNLNLWQKLKLSRDDAKPLLRLKGFPSFPLVERQANEVDWWDMVCNVKKLINEKKEDGKVFWQNLAGYKRQEALRPYLSSEEDRKKGKKFARYQLGDLLLHLEKKHGEDWGKVYDEAWERIDKKVEGLSKHIKLEEERRSEDAQSKAALTDWLRAKASFVIEGLKEADKDEFCRCELKLQKWYGDLRGKPFAIEAENSILDISGFSKQYNCAFIWQKDGVKKLNLYLIINYFKGGKLRFKKIKPEAFEANRFYTVINKKSGEIVPMEVNFNFDDPNLIILPLAFGKRQGREFIWNDLLSLETGSLKLANGRVIEKTLYNRRTRQDEPALFVALTFERREVLDSSNIKPMNLIGVDRGENIPAVIALTDPEGCPLSRFKDSLGNPTHILRIGESYKEKQRTIQAKKEVEQRRAGGYSRKYASKAKNLADDMVRNTARDLLYYAVTQDAMLIFENLSRGFGRQGKRTFMAERQYTRMEDWLTAKLAYEGLPSKTYLSKTLAQYTSKTCSNCGFTITSADYDRVLEKLKKTATGWMTTINGKELKVEGQITYYNRYKRQNVVKDLSVELDRLSEESVNNDISSWTKGRSGEALSLLKKRFSHRPVQEKFVCLNCGFETHADEQAALNIARSWLFLRSQEYKKYQTNKTTGNTDKRAFVETWQSFYRKKLKEVWKPAV

SEQ ID NO: 31861 - protein, 978 aa, synthetic construct
  REGION 1..978: note = engineered CasX variant
QEIGRISKIRRRLVKDSNTKKAGKTGPMKTLLVRVMTPDLRERLENLRKKPENIPQPISNTSRANLNKLLTDYTEMKKAILHVYWEEFQKDPVGLMSRVAQPASKKIDQNKLKPEMDEKGNLTTAGFACSQCGQPLFVYKLEQVSEKGKAYTNYFGRCNVAEHEKLILLAQLKPEKDSDEAVTYSLGKFGQRALDFYSIHVTKESTHPVKPLAQIAGNRYASSPVGKALSDACMGTIASFLSKYQDIIIEHQKVVKGNQKRLESLRELAGKENLEYPSVTLPPQPHTKEGVDAYNEVIARVRMWVNLNLWQKLKLSRDDAKPLLRLKGFPSFPLVERQANEVDWWDMVCNVKKLINEKKEDGKVFWQNLAGYKRQEALRPYLSSEEDRKKGKKFARYQLGDLLLHLEKKHGEDWGKVYDEAWERIDKKVEGLSKHIKLEEERRSEDAQSKAALTDWLRAKASFVIEGLKEADKDEFCRCELKLQKWYGDLRGKPFAIEAENSILDISGFSKQYNCAFIWQKDGVKKLNLYLIINYFKGGKLRFKKIKPEAFEANRFYTVINKKSGEIVPMEVNFNFDDPNLIILPLAFGKRQGREFIWNDLLSLETGSLKLANGRVIEKTLYNRRTRQDEPALFVALTFERREVLDSSNIKPMNLIGVDRGENIPAVIALTDPEGCPLSRFKDSLGNPTHILRIGESYKEKQRTIQAKKEVEQRRAGGYSRKYASKAKNLADDMVRNTARDLLYYAVTQDAMLIFENLSRGFGRQGKRTFMAERQYTRMEDWLTAKLAYEGLPSKTYLSKTLAQYTSKTCSNCGFTITSADYDRVLEKLKKTATGWMTTINGKELKVEGQITYYNRYKRQNVVKDLSVELDRLSEESVNNDISSWTKGRSGEALSLLKKRFSHRPVQEKFVCLNCGFETHADEQAALNIARSWLFLRSQEYKKYQTNKTTGNTDKRAFVETWQSFYRKKLKEVWKPAV

SEQ ID NO: 31862 - protein, 978 aa, synthetic construct
  REGION 1..978: note = engineered CasX variant
QEIGRISKIRRRLVKDSNTKKAGKTGPMKTLLVRVMTPDLRERLENLRKKPENIPQPISNTSRANLNKLLTDYTEMKKAILHVYWEEFQKDPVGLMSRVAQPASKKIDQNKLKPEMDEKGNLTTAGFACSQCGQPLFVYKLEQVSEKGKAYTNYFGRCNVAEHEKLILLAQLKPEKDSDEAVTYSLGKFGQRALDFYSIHVTKESTHPVKPLAQIAGNRYASTPVGKALSDACMGTIASFLSKYQDIIIEHQKVVKGNQKRLESLRELAGKENLEYPSVTLPPQPHTKEGVDAYNEVIARVRMWVNLNLWQKLKLSRDDAKPLLRLKGFPSFPLVERQANEVDWWDMVCNVKKLINEKKEDGKVFWQNLAGYKRQEALRPYLSSEEDRKKGKKFARYQLGDLLLHLEKKHGEDWGKVYDEAWERIDKKVEGLSKHIKLEEERRSEDAQSKAALTDWLRAKASFVIEGLKEADKDEFCRCELKLQKWYGDLRGKPFAIEAENSILDISGFSKQYNCAFIWQKDGVKKLNLYLIINYFKGGKLRFKKIKPEAFEANRFYTVINKKSGEIVPMEVNFNFDDPNLIILPLAFGKRQGREFIWNDLLSLETGSLKLANGRVIEKTLYNRRTRQDEPALFVALTFERREVLDSSNIKPMNLIGVDRGENIPAVIALTDPEGCPLSRFKDSLGNPTHILRIGESYKEKQRTIQAKKEVEQRRAGGYSRKYASKAKNLADDMVRNTARDLLYYAVTQDAMLIFENLSRGFGRQGKRTFMAERQYTRMEDWLTAKLAYEGLPSKTYLSKTLAQYTSKTCSNCGFTITSADYDRVLEKLKKTATGWMTTINGKELKVEGQITYYNRYKRQNVVKDLSVELDRLSEESVNNDISSWTKGRSGEALSLLKKRFSHRPVQEKFVCLNCGFETHADEQAALNIARSWLFLRSQEYKKYQTNKTTGNTDKRAFVETWQSFYRKKLKEVWKPAV

SEQ ID NO: 31863 - protein, 978 aa, synthetic construct
  REGION 1..978: note = engineered CasX variant
QEIGRISKIRRRLVKDSNTKKAGKTGPMKTLLVRVMTPDLRERLENLRKKPENIPQPISNTSRANLNKLLTDYTEMKKAILHVYWEEFQKDPVGLMSRVAQPASKKIDQNKLKPEMDEKGNLTTAGFACSQCGQPLFVYKLEQVSEKGKAYTNYFGRCNVAEHEKLILLAQLKPEKDSDEAVTYSLGKFGQRALDFYSIHVTKESTHPVKPLAQIAGNRYASAPVGKALSDACMGTIASFLSKYQDIIIEHQKVVKGNQKRLESLRELAGKENLEYPSVTLPPQPHTKEGVDAYNEVIARVRMWVNLNLWQKLKLSRDDAKPLLRLKGFPSFPLVERQANEVDWWDMVCNVKKLINEKKEDGKVFWQNLAGYKRQEALRPYLSSEEDRKKGKKFARYQLGDLLLHLEKKHGEDWGKVYDEAWERIDKKVEGLSKHIKLEEERRSEDAQSKAALTDWLRAKASFVIEGLKEADKDEFCRCELKLQKWYGDLRGKPFAIEAENSILDISGFSKQYNCAFIWQKDGVKKLNLYLIINYFKGGKLRFKKIKPEAFEANRFYTVINKKSGEIVPMEVNFNFDDPNLIILPLAFGKRQGREFIWNDLLSLETGSLKLANGRVIEKTLYNRRTRQDEPALFVALTFERREVLDSSNIKPMNLIGVDRGENIPAVIALTDPEGCPLSRFKDSLGNPTHILRIGESYKEKQRTIQAKKEVEQRRAGGYSRKYASKAKNLADDMVRNTARDLLYYAVTQDAMLIFENLSRGFGRQGKRTFMAERQYTRMEDWLTAKLAYEGLPSKTYLSKTLAQYTSKTCSNCGFTITSADYDRVLEKLKKTATGWMTTINGKELKVEGQITYYNRYKRQNVVKDLSVELDRLSEESVNNDISSWTKGRSGEALSLLKKRFSHRPVQEKFVCLNCGFETHADEQAALNIARSWLFLRSQEYKKYQTNKTTGNTDKRAFVETWQSFYRKKLKEVWKPAV

SEQ ID NO: 31864 - protein, 978 aa, synthetic construct
  REGION 1..978: note = engineered CasX variant
QEIGRISKIRRRLVKDSNTKKAGKTGPMKTLLVRVMTPDLRERLENLRKKPENIPQPISNTSRANLNKLLTDYTEMKKAILHVYWEEFQKDPVGLMSRVAQPASKKIDQNKLKPEMDEKGNLTTAGFACSQCGQPLFVYKLEQVSEKGKAYTNYFGRCNVAEHEKLILLAQLKPEKDSDEAVTYSLGKFGQRALDFYSIHVTKESTHPVKPLAQIAGNRYASVPVGKALSDACMGTIASFLSKYQDIIIEHQKVVKGNQKRLESLRELAGKENLEYPSVTLPPQPHTKEGVDAYNEVIARVRMWVNLNLWQKLKLSRDDAKPLLRLKGFPSFPLVERQANEVDWWDMVCNVKKLINEKKEDGKVFWQNLAGYKRQEALRPYLSSEEDRKKGKKFARYQLGDLLLHLEKKHGEDWGKVYDEAWERIDKKVEGLSKHIKLEEERRSEDAQSKAALTDWLRAKASFVIEGLKEADKDEFCRCELKLQKWYGDLRGKPFAIEAENSILDISGFSKQYNCAFIWQKDGVKKLNLYLIINYFKGGKLRFKKIKPEAFEANRFYTVINKKSGEIVPMEVNFNFDDPNLIILPLAFGKRQGREFIWNDLLSLETGSLKLANGRVIEKTLYNRRTRQDEPALFVALTFERREVLDSSNIKPMNLIGVDRGENIPAVIALTDPEGCPLSRFKDSLGNPTHILRIGESYKEKQRTIQAKKEVEQRRAGGYSRKYASKAKNLADDMVRNTARDLLYYAVTQDAMLIFENLSRGFGRQGKRTFMAERQYTRMEDWLTAKLAYEGLPSKTYLSKTLAQYTSKTCSNCGFTITSADYDRVLEKLKKTATGWMTTINGKELKVEGQITYYNRYKRQNVVKDLSVELDRLSEESVNNDISSWTKGRSGEALSLLKKRFSHRPVQEKFVCLNCGFETHADEQAALNIARSWLFLRSQEYKKYQTNKTTGNTDKRAFVETWQSFYRKKLKEVWKPAV

SEQ ID NO: 31865 - protein, 978 aa, synthetic construct
  REGION 1..978: note = engineered CasX variant
QEIGRISKIRRRLVKDSNTKKAGKTGPMKTLLVRVMTPDLRERLENLRKKPENIPQPISNTSRANLNKLLTDYTEMKKAILHVYWEEFQKDPVGLMSRVAQPASKKIDQNKLKPEMDEKGNLTTAGFACSQCGQPLFVYKLEQVSEKGKAYTNYFGRCNVAEHEKLIKLAQLKPEKDSDEAVTYSLGKFGQRALDFYSIHVTKESTHPVKPLAQIAGNRYASGPVGKALSDACMGTIASFLSKYQDIIIEHQKVVKGNQKRLESLRELAGKENLEYPSVTLPPQPHTKEGVDAYNEVIARVRMWVNLNLWQKLKLSRDDAKPLLRLKGFPSFPLVERQANEVDWWDMVCNVKKLINEKKEDGKVFWQNLAGYKRQEALRPYLSSEEDRKKGKKFARYQLGDLLLHLEKKHGEDWGKVYDEAWERIDKKVEGLSKHIKLEEERRSEDAQSKAALTDWLRAKASFVIEGLKEADKDEFCRCELKLQKWYGDLRGKPFAIEAENSILDISGFSKQYNCAFIWQKDGVKKLNLYLIINYFKGGKLRFKKIKPEAFEANRFYTVINKKSGEIVPMEVNFNFDDPNLIILPLAFGKRQGREFIWNDLLSLETGSLKLANGRVIEKTLYNRRTRQDEPALFVALTFERREVLDSSNIKPMNLIGVDRGENIPAVIALTDPEGCPLSRFKDSLGNPTHILRIGESYKEKQRTIQAKKEVEQRRAGGYSRKYASKAKNLADDMVRNTARDLLYYAVTQDAMLIFENLSRGFGRQGKRTFMAERQYTRMEDWLTAKLAYEGLPSKTYLSKTLAQYTSKTCSNCGFTITSADYDRVLEKLKKTATGWMTTINGKELKVEGQITYYNRYKRQNVVKDLSVELDRLSEESVNNDISSWTKGRSGEALSLLKKRFSHRPVQEKFVCLNCGFETHADEQAALNIARSWLFLRSQEYKKYQTNKTTGNTDKRAFVETWQSFYRKKLKEVWKPAV

SEQ ID NO: 31866 - protein, 977 aa, synthetic construct
  REGION 1..977: note = engineered CasX variant
QEIGRISKIRRRLVKDSNTKKAGKTGPMKTLLVRVMTPDLRERLENLRKKPENIPQPISNTSRANLNKLLTDYTEMKKAILHVYWEEFQKDPVGLMSRVAQPASKKIDQNKLKPEMDEKGNLTTAGFACSQCGQPLFVYKLEQVSEKGKAYTNYFGRCNVAEHEKLILLAQLKPEKDSDEAVTYSLGKFGQRALDFYSIHVTKESTHPVKPLAQIAGNRYASPVGKALSDACMGTIASFLSKYQDIIIEHQKVVKGNQKRLESLRELAGKENLEYPSVTLPPQPHTKEGVDAYNEVIARVRMWVNLNLWQKLKLSRDDAKPLLRLKGFPSFPLVERQANEVDWWDMVCNVKKLINEKKEDGKVFWQNLAGYKRQEALRPYLSSEEDRKKGKKFARYQLGDLLLHLEKKHGEDWGKVYDEAWERIDKKVEGLSKHIKLEEERRSEDAQSKAALTDWLRAKASFVIEGLKEADKDEFCRCELKLQKWYGDLRGKPFAIEAENSILDISGFSKQYNCAFIWQKDGVKKLNLYLIINYFKGGKLRFKKIKPEAFEANRFYTVINKKSGEIVPMEVNFNFDDPNLIILPLAFGKRQGREFIWNDLLSLETGSLKLANGRVIEKTLYNRRTRQDEPALFVALTFERREVLDSSNIKPMNLIGVDRGENIPAVIALTDPEGCPLSRFKDSLGNPTHILRIGESYKEKQRTIQAKKEVEQRRAGGYSRKYASKAKNLADDMVRNTARDLLYYAVTQDAMLIFENLSRGFGRQGKRTFMAERQYTRMEDWLTAKLAYEGLPSKTYLSKTLAQYTSKTCSNCGFTITSADYDRVLEKLKKTATGWMTTINGKELKVEGQITYYNRYKRQNVVKDLSVELDRLSEESVNNDISSWTKGRSGEALSLLKKRFSHRPVQEKFVCLNCGFETHADEQAALNIARSWLFLRSQEYKKYQTNKTTGNTDKRAFVETWQSFYRKKLKEVWKPAV

SEQ ID NO: 31867 - protein, 978 aa, synthetic construct
  REGION 1..978: note = engineered CasX variant
QEIGRINGIRRRLVKDSNTKKAGKTGPMKTLLVRVMTPDLRERLENLRKKPENIPQPISNTSRANLNKLLTDYTEMKKAILHVYWEEFQKDPVGLMSRVAQPASKKIDQNKLKPEMDEKGNLTTAGFACSQCGQPLFVYKLEQVSEKGKAYTNYFGRCNVAEHEKLILLAQLKPEKDSDEAVTYSLGKFGQRALDFYSIHVTKESTHPVKPLAQIAGNRYASYPVGKALSDACMGTIASFLSKYQDIIIEHQKVVKGNQKRLESLRELAGKENLEYPSVTLPPQPHTKEGVDAYNEVIARVRMWVNLNLWQKLKLSRDDAKPLLRLKGFPSFPLVERQANEVDWWDMVCNVKKLINEKKEDGKVFWQNLAGYKRQEALRPYLSSEEDRKKGKKFARYQLGDLLLHLEKKHGEDWGKVYDEAWERIDKKVEGLSKHIKLEEERRSEDAQSKAALTDWLRAKASFVIEGLKEADKDEFCRCELKLQKWYGDLRGKPFAIEAENSILDISGFSKQYNCAFIWQKDGVKKLNLYLIINYFKGGKLRFKKIKPEAFEANRFYTVINKKSGEIVPMEVNFNFDDPNLIILPLAFGKRQGREFIWNDLLSLETGSLKLANGRVIEKTLYNRRTRQDEPALFVALTFERREVLDSSNIKPMNLIGVDRGENIPAVIALTDPEGCPLSRFKDSLGNPTHILRIGESYKEKQRTIQAKKEVEQRRAGGYSRKYASKAKNLADDMVRNTARDLLYYAVTQDAMLIFENLSRGFGRQGKRTFMAERQYTRMEDWLTAKLAYEGLPSKTYLSKTLAQYTSKTCSNCGFTITSADYDRVLEKLKKTATGWMTTINGKELKVEGQITYYNRYKRQNVVKDLSVELDRLSEESVNNDISSWTKGRSGEALSLLKKRFSHRPVQEKFVCLNCGFETHADEQAALNIARSWLFLRSQEYKKYQTNKTTGNTDKRAFVETWQSFYRKKLKEVWKPAV

SEQ ID NO: 31868 - protein, 978 aa, synthetic construct
  REGION 1..978: note = engineered CasX variant
QEIGRINGIRRRLVKDSNTKKAGKTGPMKTLLVRVMTPDLRERLENLRKKPENIPQPISNTSRANLNKLLTDYTEMKKAILHVYWEEFQKDPVGLMSRVAQPASKKIDQNKLKPEMDEKGNLTTAGFACSQCGQPLFVYKLEQVSEKGKAYTNYFGRCNVAEHEKLILLAQLKPEKDSDEAVTYSLGKFGQRALDFYSIHVTKESTHPVKPLAQIAGNRYASHPVGKALSDACMGTIASFLSKYQDIIIEHQKVVKGNQKRLESLRELAGKENLEYPSVTLPPQPHTKEGVDAYNEVIARVRMWVNLNLWQKLKLSRDDAKPLLRLKGFPSFPLVERQANEVDWWDMVCNVKKLINEKKEDGKVFWQNLAGYKRQEALRPYLSSEEDRKKGKKFARYQLGDLLLHLEKKHGEDWGKVYDEAWERIDKKVEGLSKHIKLEEERRSEDAQSKAALTDWLRAKASFVIEGLKEADKDEFCRCELKLQKWYGDLRGKPFAIEAENSILDISGFSKQYNCAFIWQKDGVKKLNLYLIINYFKGGKLRFKKIKPEAFEANRFYTVINKKSGEIVPMEVNFNFDDPNLIILPLAFGKRQGREFIWNDLLSLETGSLKLANGRVIEKTLYNRRTRQDEPALFVALTFERREVLDSSNIKPMNLIGVDRGENIPAVIALTDPEGCPLSRFKDSLGNPTHILRIGESYKEKQRTIQAKKEVEQRRAGGYSRKYASKAKNLADDMVRNTARDLLYYAVTQDAMLIFENLSRGFGRQGKRTFMAERQYTRMEDWLTAKLAYEGLPSKTYLSKTLAQYTSKTCSNCGFTITSADYDRVLEKLKKTATGWMTTINGKELKVEGQITYYNRYKRQNVVKDLSVELDRLSEESVNNDISSWTKGRSGEALSLLKKRFSHRPVQEKFVCLNCGFETHADEQAALNIARSWLFLRSQEYKKYQTNKTTGNTDKRAFVETWQSFYRKKLKEVWKPAV

SEQ ID NO: 31869 - protein, 978 aa, synthetic construct
  REGION 1..978: note = engineered CasX variant
QEIGRINGIRRRLVKDSNTKKAGKTGPMKTLLVRVMTPDLRERLENLRKKPENIPQPISNTSRANLNKLLTDYTEMKKAILHVYWEEFQKDPVGLMSRVAQPASKKIDQNKLKPEMDEKGNLTTAGFACSQCGQPLFVYKLEQVSEKGKAYTNYFGRCNVAEHEKLILLAQLKPEKDSDEAVTYSLGKFGQRALDFYSIHVTKESTHPVKPLAQIAGNRYASSPVGKALSDACMGTIASFLSKYQDIIIEHQKVVKGNQKRLESLRELAGKENLEYPSVTLPPQPHTKEGVDAYNEVIARVRMWVNLNLWQKLKLSRDDAKPLLRLKGFPSFPLVERQANEVDWWDMVCNVKKLINEKKEDGKVFWQNLAGYKRQEALRPYLSSEEDRKKGKKFARYQLGDLLLHLEKKHGEDWGKVYDEAWERIDKKVEGLSKHIKLEEERRSEDAQSKAALTDWLRAKASFVIEGLKEADKDEFCRCELKLQKWYGDLRGKPFAIEAENSILDISGFSKQYNCAFIWQKDGVKKLNLYLIINYFKGGKLRFKKIKPEAFEANRFYTVINKKSGEIVPMEVNFNFDDPNLIILPLAFGKRQGREFIWNDLLSLETGSLKLANGRVIEKTLYNRRTRQDEPALFVALTFERREVLDSSNIKPMNLIGVDRGENIPAVIALTDPEGCPLSRFKDSLGNPTHILRIGESYKEKQRTIQAKKEVEQRRAGGYSRKYASKAKNLADDMVRNTARDLLYYAVTQDAMLIFENLSRGFGRQGKRTFMAERQYTRMEDWLTAKLAYEGLPSKTYLSKTLAQYTSKTCSNCGFTITSADYDRVLEKLKKTATGWMTTINGKELKVEGQITYYNRYKRQNVVKDLSVELDRLSEESVNNDISSWTKGRSGEALSLLKKRFSHRPVQEKFVCLNCGFETHADEQAALNIARSWLFLRSQEYKKYQTNKTTGNTDKRAFVETWQSFYRKKLKEVWKPAV

SEQ ID NO: 31870 - protein, 978 aa, synthetic construct
  REGION 1..978: note = engineered CasX variant
QEIGRINGIRRRLVKDSNTKKAGKTGPMKTLLVRVMTPDLRERLENLRKKPENIPQPISNTSRANLNKLLTDYTEMKKAILHVYWEEFQKDPVGLMSRVAQPASKKIDQNKLKPEMDEKGNLTTAGFACSQCGQPLFVYKLEQVSEKGKAYTNYFGRCNVAEHEKLILLAQLKPEKDSDEAVTYSLGKFGQRALDFYSIHVTKESTHPVKPLAQIAGNRYASTPVGKALSDACMGTIASFLSKYQDIIIEHQKVVKGNQKRLESLRELAGKENLEYPSVTLPPQPHTKEGVDAYNEVIARVRMWVNLNLWQKLKLSRDDAKPLLRLKGFPSFPLVERQANEVDWWDMVCNVKKLINEKKEDGKVFWQNLAGYKRQEALRPYLSSEEDRKKGKKFARYQLGDLLLHLEKKHGEDWGKVYDEAWERIDKKVEGLSKHIKLEEERRSEDAQSKAALTDWLRAKASFVIEGLKEADKDEFCRCELKLQKWYGDLRGKPFAIEAENSILDISGFSKQYNCAFIWQKDGVKKLNLYLIINYFKGGKLRFKKIKPEAFEANRFYTVINKKSGEIVPMEVNFNFDDPNLIILPLAFGKRQGREFIWNDLLSLETGSLKLANGRVIEKTLYNRRTRQDEPALFVALTFERREVLDSSNIKPMNLIGVDRGENIPAVIALTDPEGCPLSRFKDSLGNPTHILRIGESYKEKQRTIQAKKEVEQRRAGGYSRKYASKAKNLADDMVRNTARDLLYYAVTQDAMLIFENLSRGFGRQGKRTFMAERQYTRMEDWLTAKLAYEGLPSKTYLSKTLAQYTSKTCSNCGFTITSADYDRVLEKLKKTATGWMTTINGKELKVEGQITYYNRYKRQNVVKDLSVELDRLSEESVNNDISSWTKGRSGEALSLLKKRFSHRPVQEKFVCLNCGFETHADEQAALNIARSWLFLRSQEYKKYQTNKTTGNTDKRAFVETWQSFYRKKLKEVWKPAV

SEQ ID NO: 31871 - protein, 978 aa, synthetic construct
  REGION 1..978: note = engineered CasX variant
QEIGRINGIRRRLVKDSNTKKAGKTGPMKTLLVRVMTPDLRERLENLRKKPENIPQPISNTSRANLNKLLTDYTEMKKAILHVYWEEFQKDPVGLMSRVAQPASKKIDQNKLKPEMDEKGNLTTAGFACSQCGQPLFVYKLEQVSEKGKAYTNYFGRCNVAEHEKLILLAQLKPEKDSDEAVTYSLGKFGQRALDFYSIHVTKESTHPVKPLAQIAGNRYASAPVGKALSDACMGTIASFLSKYQDIIIEHQKVVKGNQKRLESLRELAGKENLEYPSVTLPPQPHTKEGVDAYNEVIARVRMWVNLNLWQKLKLSRDDAKPLLRLKGFPSFPLVERQANEVDWWDMVCNVKKLINEKKEDGKVFWQNLAGYKRQEALRPYLSSEEDRKKGKKFARYQLGDLLLHLEKKHGEDWGKVYDEAWERIDKKVEGLSKHIKLEEERRSEDAQSKAALTDWLRAKASFVIEGLKEADKDEFCRCELKLQKWYGDLRGKPFAIEAENSILDISGFSKQYNCAFIWQKDGVKKLNLYLIINYFKGGKLRFKKIKPEAFEANRFYTVINKKSGEIVPMEVNFNFDDPNLIILPLAFGKRQGREFIWNDLLSLETGSLKLANGRVIEKTLYNRRTRQDEPALFVALTFERREVLDSSNIKPMNLIGVDRGENIPAVIALTDPEGCPLSRFKDSLGNPTHILRIGESYKEKQRTIQAKKEVEQRRAGGYSRKYASKAKNLADDMVRNTARDLLYYAVTQDAMLIFENLSRGFGRQGKRTFMAERQYTRMEDWLTAKLAYEGLPSKTYLSKTLAQYTSKTCSNCGFTITSADYDRVLEKLKKTATGWMTTINGKELKVEGQITYYNRYKRQNVVKDLSVELDRLSEESVNNDISSWTKGRSGEALSLLKKRFSHRPVQEKFVCLNCGFETHADEQAALNIARSWLFLRSQEYKKYQTNKTTGNTDKRAFVETWQSFYRKKLKEVWKPAV

SEQ ID NO: 31872 - protein, 978 aa, synthetic construct
  REGION 1..978: note = engineered CasX variant
QEIGRINGIRRRLVKDSNTKKAGKTGPMKTLLVRVMTPDLRERLENLRKKPENIPQPISNTSRANLNKLLTDYTEMKKAILHVYWEEFQKDPVGLMSRVAQPASKKIDQNKLKPEMDEKGNLTTAGFACSQCGQPLFVYKLEQVSEKGKAYTNYFGRCNVAEHEKLILLAQLKPEKDSDEAVTYSLGKFGQRALDFYSIHVTKESTHPVKPLAQIAGNRYASVPVGKALSDACMGTIASFLSKYQDIIIEHQKVVKGNQKRLESLRELAGKENLEYPSVTLPPQPHTKEGVDAYNEVIARVRMWVNLNLWQKLKLSRDDAKPLLRLKGFPSFPLVERQANEVDWWDMVCNVKKLINEKKEDGKVFWQNLAGYKRQEALRPYLSSEEDRKKGKKFARYQLGDLLLHLEKKHGEDWGKVYDEAWERIDKKVEGLSKHIKLEEERRSEDAQSKAALTDWLRAKASFVIEGLKEADKDEFCRCELKLQKWYGDLRGKPFAIEAENSILDISGFSKQYNCAFIWQKDGVKKLNLYLIINYFKGGKLRFKKIKPEAFEANRFYTVINKKSGEIVPMEVNFNFDDPNLIILPLAFGKRQGREFIWNDLLSLETGSLKLANGRVIEKTLYNRRTRQDEPALFVALTFERREVLDSSNIKPMNLIGVDRGENIPAVIALTDPEGCPLSRFKDSLGNPTHILRIGESYKEKQRTIQAKKEVEQRRAGGYSRKYASKAKNLADDMVRNTARDLLYYAVTQDAMLIFENLSRGFGRQGKRTFMAERQYTRMEDWLTAKLAYEGLPSKTYLSKTLAQYTSKTCSNCGFTITSADYDRVLEKLKKTATGWMTTINGKELKVEGQITYYNRYKRQNVVKDLSVELDRLSEESVNNDISSWTKGRSGEALSLLKKRFSHRPVQEKFVCLNCGFETHADEQAALNIARSWLFLRSQEYKKYQTNKTTGNTDKRAFVETWQSFYRKKLKEVWKPAV

SEQ ID NO: 31873 - protein, 978 aa, synthetic construct
  REGION 1..978: note = engineered CasX variant
QEIGRINGIRRRLVKDSNTKKAGKTGPMKTLLVRVMTPDLRERLENLRKKPENIPQPISNTSRANLNKLLTDYTEMKKAILHVYWEEFQKDPVGLMSRVAQPASKKIDQNKLKPEMDEKGNLTTAGFACSQCGQPLFVYKLEQVSEKGKAYTNYFGRCNVAEHEKLIKLAQLKPEKDSDEAVTYSLGKFGQRALDFYSIHVTKESTHPVKPLAQIAGNRYASGPVGKALSDACMGTIASFLSKYQDIIIEHQKVVKGNQKRLESLRELAGKENLEYPSVTLPPQPHTKEGVDAYNEVIARVRMWVNLNLWQKLKLSRDDAKPLLRLKGFPSFPLVERQANEVDWWDMVCNVKKLINEKKEDGKVFWQNLAGYKRQEALRPYLSSEEDRKKGKKFARYQLGDLLLHLEKKHGEDWGKVYDEAWERIDKKVEGLSKHIKLEEERRSEDAQSKAALTDWLRAKASFVIEGLKEADKDEFCRCELKLQKWYGDLRGKPFAIEAENSILDISGFSKQYNCAFIWQKDGVKKLNLYLIINYFKGGKLRFKKIKPEAFEANRFYTVINKKSGEIVPMEVNFNFDDPNLIILPLAFGKRQGREFIWNDLLSLETGSLKLANGRVIEKTLYNRRTRQDEPALFVALTFERREVLDSSNIKPMNLIGVDRGENIPAVIALTDPEGCPLSRFKDSLGNPTHILRIGESYKEKQRTIQAKKEVEQRRAGGYSRKYASKAKNLADDMVRNTARDLLYYAVTQDAMLIFENLSRGFGRQGKRTFMAERQYTRMEDWLTAKLAYEGLPSKTYLSKTLAQYTSKTCSNCGFTITSADYDRVLEKLKKTATGWMTTINGKELKVEGQITYYNRYKRQNVVKDLSVELDRLSEESVNNDISSWTKGRSGEALSLLKKRFSHRPVQEKFVCLNCGFETHADEQAALNIARSWLFLRSQEYKKYQTNKTTGNTDKRAFVETWQSFYRKKLKEVWKPAV

SEQ ID NO: 31874 - protein, 977 aa, synthetic construct
  REGION 1..977: note = engineered CasX variant
QEIGRINGIRRRLVKDSNTKKAGKTGPMKTLLVRVMTPDLRERLENLRKKPENIPQPISNTSRANLNKLLTDYTEMKKAILHVYWEEFQKDPVGLMSRVAQPASKKIDQNKLKPEMDEKGNLTTAGFACSQCGQPLFVYKLEQVSEKGKAYTNYFGRCNVAEHEKLILLAQLKPEKDSDEAVTYSLGKFGQRALDFYSIHVTKESTHPVKPLAQIAGNRYASPVGKALSDACMGTIASFLSKYQDIIIEHQKVVKGNQKRLESLRELAGKENLEYPSVTLPPQPHTKEGVDAYNEVIARVRMWVNLNLWQKLKLSRDDAKPLLRLKGFPSFPLVERQANEVDWWDMVCNVKKLINEKKEDGKVFWQNLAGYKRQEALRPYLSSEEDRKKGKKFARYQLGDLLLHLEKKHGEDWGKVYDEAWERIDKKVEGLSKHIKLEEERRSEDAQSKAALTDWLRAKASFVIEGLKEADKDEFCRCELKLQKWYGDLRGKPFAIEAENSILDISGFSKQYNCAFIWQKDGVKKLNLYLIINYFKGGKLRFKKIKPEAFEANRFYTVINKKSGEIVPMEVNFNFDDPNLIILPLAFGKRQGREFIWNDLLSLETGSLKLANGRVIEKTLYNRRTRQDEPALFVALTFERREVLDSSNIKPMNLIGVDRGENIPAVIALTDPEGCPLSRFKDSLGNPTHILRIGESYKEKQRTIQAKKEVEQRRAGGYSRKYASKAKNLADDMVRNTARDLLYYAVTQDAMLIFENLSRGFGRQGKRTFMAERQYTRMEDWLTAKLAYEGLPSKTYLSKTLAQYTSKTCSNCGFTITSADYDRVLEKLKKTATGWMTTINGKELKVEGQITYYNRYKRQNVVKDLSVELDRLSEESVNNDISSWTKGRSGEALSLLKKRFSHRPVQEKFVCLNCGFETHADEQAALNIARSWLFLRSQEYKKYQTNKTTGNTDKRAFVETWQSFYRKKLKEVWKPAV

SEQ ID NO: 31875 - protein, 978 aa, synthetic construct
  REGION 1..978: note = engineered CasX variant
QEIGRINKIRRRLVKDSNTKKAGKTGPMKTLLVPVMTPDLRERLENLRKKPENIPQPISNTSRANLNKLLTDYTEMKKAILHVYWEEFQKDPVGLMSRVAQPASKKIDQNKLKPEMDEKGNLTTAGFACSQCGQPLFVYKLEQVSEKGKAYTNYFGRCNVAEHEKLILLAQLKPEKDSDEAVTYSLGKFGQRALDFYSIHVTKESTHPVKPLAQIAGNRYASYPVGKALSDACMGTIASFLSKYQDIIIEHQKVVKGNQKRLESLRELAGKENLEYPSVTLPPQPHTKEGVDAYNEVIARVRMWVNLNLWQKLKLSRDDAKPLLRLKGFPSFPLVERQANEVDWWDMVCNVKKLINEKKEDGKVFWQNLAGYKRQEALRPYLSSEEDRKKGKKFARYQLGDLLLHLEKKHGEDWGKVYDEAWERIDKKVEGLSKHIKLEEERRSEDAQSKAALTDWLRAKASFVIEGLKEADKDEFCRCELKLQKWYGDLRGKPFAIEAENSILDISGFSKQYNCAFIWQKDGVKKLNLYLIINYFKGGKLRFKKIKPEAFEANRFYTVINKKSGEIVPMEVNFNFDDPNLIILPLAFGKRQGREFIWNDLLSLETGSLKLANGRVIEKTLYNRRTRQDEPALFVALTFERREVLDSSNIKPMNLIGVDRGENIPAVIALTDPEGCPLSRFKDSLGNPTHILRIGESYKEKQRTIQAKKEVEQRRAGGYSRKYASKAKNLADDMVRNTARDLLYYAVTQDAMLIFENLSRGFGRQGKRTFMAERQYTRMEDWLTAKLAYEGLPSKTYLSKTLAQYTSKTCSNCGFTITSADYDRVLEKLKKTATGWMTTINGKELKVEGQITYYNRYKRQNVVKDLSVELDRLSEESVNNDISSWTKGRSGEALSLLKKRFSHRPVQEKFVCLNCGFETHADEQAALNIARSWLFLRSQEYKKYQTNKTTGNTDKRAFVETWQSFYRKKLKEVWKPAV

SEQ ID NO: 31876 - protein, 978 aa, synthetic construct
  REGION 1..978: note = engineered CasX variant
QEIGRINKIRRRLVKDSNTKKAGKTGPMKTLLVPVMTPDLRERLENLRKKPENIPQPISNTSRANLNKLLTDYTEMKKAILHVYWEEFQKDPVGLMSRVAQPASKKIDQNKLKPEMDEKGNLTTAGFACSQCGQPLFVYKLEQVSEKGKAYTNYFGRCNVAEHEKLILLAQLKPEKDSDEAVTYSLGKFGQRALDFYSIHVTKESTHPVKPLAQIAGNRYASHPVGKALSDACMGTIASFLSKYQDIIIEHQKVVKGNQKRLESLRELAGKENLEYPSVTLPPQPHTKEGVDAYNEVIARVRMWVNLNLWQKLKLSRDDAKPLLRLKGFPSFPLVERQANEVDWWDMVCNVKKLINEKKEDGKVFWQNLAGYKRQEALRPYLSSEEDRKKGKKFARYQLGDLLLHLEKKHGEDWGKVYDEAWERIDKKVEGLSKHIKLEEERRSEDAQSKAALTDWLRAKASFVIEGLKEADKDEFCRCELKLQKWYGDLRGKPFAIEAENSILDISGFSKQYNCAFIWQKDGVKKLNLYLIINYFKGGKLRFKKIKPEAFEANRFYTVINKKSGEIVPMEVNFNFDDPNLIILPLAFGKRQGREFIWNDLLSLETGSLKLANGRVIEKTLYNRRTRQDEPALFVALTFERREVLDSSNIKPMNLIGVDRGENIPAVIALTDPEGCPLSRFKDSLGNPTHILRIGESYKEKQRTIQAKKEVEQRRAGGYSRKYASKAKNLADDMVRNTARDLLYYAVTQDAMLIFENLSRGFGRQGKRTFMAERQYTRMEDWLTAKLAYEGLPSKTYLSKTLAQYTSKTCSNCGFTITSADYDRVLEKLKKTATGWMTTINGKELKVEGQITYYNRYKRQNVVKDLSVELDRLSEESVNNDISSWTKGRSGEALSLLKKRFSHRPVQEKFVCLNCGFETHADEQAALNIARSWLFLRSQEYKKYQTNKTTGNTDKRAFVETWQSFYRKKLKEVWKPAV

SEQ ID NO: 31877 - protein, 978 aa, synthetic construct
  REGION 1..978: note = engineered CasX variant
QEIGRINKIRRRLVKDSNTKKAGKTGPMKTLLVPVMTPDLRERLENLRKKPENIPQPISNTSRANLNKLLTDYTEMKKAILHVYWEEFQKDPVGLMSRVAQPASKKIDQNKLKPEMDEKGNLTTAGFACSQCGQPLFVYKLEQVSEKGKAYTNYFGRCNVAEHEKLILLAQLKPEKDSDEAVTYSLGKFGQRALDFYSIHVTKESTHPVKPLAQIAGNRYASSPVGKALSDACMGTIASFLSKYQDIIIEHQKVVKGNQKRLESLRELAGKENLEYPSVTLPPQPHTKEGVDAYNEVIARVRMWVNLNLWQKLKLSRDDAKPLLRLKGFPSFPLVERQANEVDWWDMVCNVKKLINEKKEDGKVFWQNLAGYKRQEALRPYLSSEEDRKKGKKFARYQLGDLLLHLEKKHGEDWGKVYDEAWERIDKKVEGLSKHIKLEEERRSEDAQSKAALTDWLRAKASFVIEGLKEADKDEFCRCELKLQKWYGDLRGKPFAIEAENSILDISGFSKQYNCAFIWQKDGVKKLNLYLIINYFKGGKLRFKKIKPEAFEANRFYTVINKKSGEIVPMEVNFNFDDPNLIILPLAFGKRQGREFIWNDLLSLETGSLKLANGRVIEKTLYNRRTRQDEPALFVALTFERREVLDSSNIKPMNLIGVDRGENIPAVIALTDPEGCPLSRFKDSLGNPTHILRIGESYKEKQRTIQAKKEVEQRRAGGYSRKYASKAKNLADDMVRNTARDLLYYAVTQDAMLIFENLSRGFGRQGKRTFMAERQYTRMEDWLTAKLAYEGLPSKTYLSKTLAQYTSKTCSNCGFTITSADYDRVLEKLKKTATGWMTTINGKELKVEGQITYYNRYKRQNVVKDLSVELDRLSEESVNNDISSWTKGRSGEALSLLKKRFSHRPVQEKFVCLNCGFETHADEQAALNIARSWLFLRSQEYKKYQTNKTTGNTDKRAFVETWQSFYRKKLKEVWKPAV

SEQ ID NO: 31878 - protein, 978 aa, synthetic construct
  REGION 1..978: note = engineered CasX variant
QEIGRINKIRRRLVKDSNTKKAGKTGPMKTLLVPVMTPDLRERLENLRKKPENIPQPISNTSRANLNKLLTDYTEMKKAILHVYWEEFQKDPVGLMSRVAQPASKKIDQNKLKPEMDEKGNLTTAGFACSQCGQPLFVYKLEQVSEKGKAYTNYFGRCNVAEHEKLILLAQLKPEKDSDEAVTYSLGKFGQRALDFYSIHVTKESTHPVKPLAQIAGNRYASTPVGKALSDACMGTIASFLSKYQDIIIEHQKVVKGNQKRLESLRELAGKENLEYPSVTLPPQPHTKEGVDAYNEVIARVRMWVNLNLWQKLKLSRDDAKPLLRLKGFPSFPLVERQANEVDWWDMVCNVKKLINEKKEDGKVFWQNLAGYKRQEALRPYLSSEEDRKKGKKFARYQLGDLLLHLEKKHGEDWGKVYDEAWERIDKKVEGLSKHIKLEEERRSEDAQSKAALTDWLRAKASFVIEGLKEADKDEFCRCELKLQKWYGDLRGKPFAIEAENSILDISGFSKQYNCAFIWQKDGVKKLNLYLIINYFKGGKLRFKKIKPEAFEANRFYTVINKKSGEIVPMEVNFNFDDPNLIILPLAFGKRQGREFIWNDLLSLETGSLKLANGRVIEKTLYNRRTRQDEPALFVALTFERREVLDSSNIKPMNLIGVDRGENIPAVIALTDPEGCPLSRFKDSLGNPTHILRIGESYKEKQRTIQAKKEVEQRRAGGYSRKYASKAKNLADDMVRNTARDLLYYAVTQDAMLIFENLSRGFGRQGKRTFMAERQYTRMEDWLTAKLAYEGLPSKTYLSKTLAQYTSKTCSNCGFTITSADYDRVLEKLKKTATGWMTTINGKELKVEGQITYYNRYKRQNVVKDLSVELDRLSEESVNNDISSWTKGRSGEALSLLKKRFSHRPVQEKFVCLNCGFETHADEQAALNIARSWLFLRSQEYKKYQTNKTTGNTDKRAFVETWQSFYRKKLKEVWKPAV

SEQ ID NO: 31879 - protein, 978 aa, synthetic construct
  REGION 1..978: note = engineered CasX variant
QEIGRINKIRRRLVKDSNTKKAGKTGPMKTLLVPVMTPDLRERLENLRKKPENIPQPISNTSRANLNKLLTDYTEMKKAILHVYWEEFQKDPVGLMSRVAQPASKKIDQNKLKPEMDEKGNLTTAGFACSQCGQPLFVYKLEQVSEKGKAYTNYFGRCNVAEHEKLILLAQLKPEKDSDEAVTYSLGKFGQRALDFYSIHVTKESTHPVKPLAQIAGNRYASAPVGKALSDACMGTIASFLSKYQDIIIEHQKVVKGNQKRLESLRELAGKENLEYPSVTLPPQPHTKEGVDAYNEVIARVRMWVNLNLWQKLKLSRDDAKPLLRLKGFPSFPLVERQANEVDWWDMVCNVKKLINEKKEDGKVFWQNLAGYKRQEALRPYLSSEEDRKKGKKFARYQLGDLLLHLEKKHGEDWGKVYDEAWERIDKKVEGLSKHIKLEEERRSEDAQSKAALTDWLRAKASFVIEGLKEADKDEFCRCELKLQKWYGDLRGKPFAIEAENSILDISGFSKQYNCAFIWQKDGVKKLNLYLIINYFKGGKLRFKKIKPEAFEANRFYTVINKKSGEIVPMEVNFNFDDPNLIILPLAFGKRQGREFIWNDLLSLETGSLKLANGRVIEKTLYNRRTRQDEPALFVALTFERREVLDSSNIKPMNLIGVDRGENIPAVIALTDPEGCPLSRFKDSLGNPTHILRIGESYKEKQRTIQAKKEVEQRRAGGYSRKYASKAKNLADDMVRNTARDLLYYAVTQDAMLIFENLSRGFGRQGKRTFMAERQYTRMEDWLTAKLAYEGLPSKTYLSKTLAQYTSKTCSNCGFTITSADYDRVLEKLKKTATGWMTTINGKELKVEGQITYYNRYKRQNVVKDLSVELDRLSEESVNNDISSWTKGRSGEALSLLKKRFSHRPVQEKFVCLNCGFETHADEQAALNIARSWLFLRSQEYKKYQTNKTTGNTDKRAFVETWQSFYRKKLKEVWKPAV

SEQ ID NO: 31880 - protein, 978 aa, synthetic construct
  REGION 1..978: note = engineered CasX variant
QEIGRINKIRRRLVKDSNTKKAGKTGPMKTLLVPVMTPDLRERLENLRKKPENIPQPISNTSRANLNKLLTDYTEMKKAILHVYWEEFQKDPVGLMSRVAQPASKKIDQNKLKPEMDEKGNLTTAGFACSQCGQPLFVYKLEQVSEKGKAYTNYFGRCNVAEHEKLILLAQLKPEKDSDEAVTYSLGKFGQRALDFYSIHVTKESTHPVKPLAQIAGNRYASVPVGKALSDACMGTIASFLSKYQDIIIEHQKVVKGNQKRLESLRELAGKENLEYPSVTLPPQPHTKEGVDAYNEVIARVRMWVNLNLWQKLKLSRDDAKPLLRLKGFPSFPLVERQANEVDWWDMVCNVKKLINEKKEDGKVFWQNLAGYKRQEALRPYLSSEEDRKKGKKFARYQLGDLLLHLEKKHGEDWGKVYDEAWERIDKKVEGLSKHIKLEEERRSEDAQSKAALTDWLRAKASFVIEGLKEADKDEFCRCELKLQKWYGDLRGKPFAIEAENSILDISGFSKQYNCAFIWQKDGVKKLNLYLIINYFKGGKLRFKKIKPEAFEANRFYTVINKKSGEIVPMEVNFNFDDPNLIILPLAFGKRQGREFIWNDLLSLETGSLKLANGRVIEKTLYNRRTRQDEPALFVALTFERREVLDSSNIKPMNLIGVDRGENIPAVIALTDPEGCPLSRFKDSLGNPTHILRIGESYKEKQRTIQAKKEVEQRRAGGYSRKYASKAKNLADDMVRNTARDLLYYAVTQDAMLIFENLSRGFGRQGKRTFMAERQYTRMEDWLTAKLAYEGLPSKTYLSKTLAQYTSKTCSNCGFTITSADYDRVLEKLKKTATGWMTTINGKELKVEGQITYYNRYKRQNVVKDLSVELDRLSEESVNNDISSWTKGRSGEALSLLKKRFSHRPVQEKFVCLNCGFETHADEQAALNIARSWLFLRSQEYKKYQTNKTTGNTDKRAFVETWQSFYRKKLKEVWKPAV

SEQ ID NO: 31881 - protein, 978 aa, synthetic construct
  REGION 1..978: note = engineered CasX variant
QEIGRINKIRRRLVKDSNTKKAGKTGPMKTLLVPVMTPDLRERLENLRKKPENIPQPISNTSRANLNKLLTDYTEMKKAILHVYWEEFQKDPVGLMSRVAQPASKKIDQNKLKPEMDEKGNLTTAGFACSQCGQPLFVYKLEQVSEKGKAYTNYFGRCNVAEHEKLIKLAQLKPEKDSDEAVTYSLGKFGQRALDFYSIHVTKESTHPVKPLAQIAGNRYASGPVGKALSDACMGTIASFLSKYQDIIIEHQKVVKGNQKRLESLRELAGKENLEYPSVTLPPQPHTKEGVDAYNEVIARVRMWVNLNLWQKLKLSRDDAKPLLRLKGFPSFPLVERQANEVDWWDMVCNVKKLINEKKEDGKVFWQNLAGYKRQEALRPYLSSEEDRKKGKKFARYQLGDLLLHLEKKHGEDWGKVYDEAWERIDKKVEGLSKHIKLEEERRSEDAQSKAALTDWLRAKASFVIEGLKEADKDEFCRCELKLQKWYGDLRGKPFAIEAENSILDISGFSKQYNCAFIWQKDGVKKLNLYLIINYFKGGKLRFKKIKPEAFEANRFYTVINKKSGEIVPMEVNFNFDDPNLIILPLAFGKRQGREFIWNDLLSLETGSLKLANGRVIEKTLYNRRTRQDEPALFVALTFERREVLDSSNIKPMNLIGVDRGENIPAVIALTDPEGCPLSRFKDSLGNPTHILRIGESYKEKQRTIQAKKEVEQRRAGGYSRKYASKAKNLADDMVRNTARDLLYYAVTQDAMLIFENLSRGFGRQGKRTFMAERQYTRMEDWLTAKLAYEGLPSKTYLSKTLAQYTSKTCSNCGFTITSADYDRVLEKLKKTATGWMTTINGKELKVEGQITYYNRYKRQNVVKDLSVELDRLSEESVNNDISSWTKGRSGEALSLLKKRFSHRPVQEKFVCLNCGFETHADEQAALNIARSWLFLRSQEYKKYQTNKTTGNTDKRAFVETWQSFYRKKLKEVWKPAV

SEQ ID NO: 31882 - protein, 977 aa, synthetic construct
  REGION 1..977: note = engineered CasX variant
QEIGRINKIRRRLVKDSNTKKAGKTGPMKTLLVPVMTPDLRERLENLRKKPENIPQPISNTSRANLNKLLTDYTEMKKAILHVYWEEFQKDPVGLMSRVAQPASKKIDQNKLKPEMDEKGNLTTAGFACSQCGQPLFVYKLEQVSEKGKAYTNYFGRCNVAEHEKLILLAQLKPEKDSDEAVTYSLGKFGQRALDFYSIHVTKESTHPVKPLAQIAGNRYASPVGKALSDACMGTIASFLSKYQDIIIEHQKVVKGNQKRLESLRELAGKENLEYPSVTLPPQPHTKEGVDAYNEVIARVRMWVNLNLWQKLKLSRDDAKPLLRLKGFPSFPLVERQANEVDWWDMVCNVKKLINEKKEDGKVFWQNLAGYKRQEALRPYLSSEEDRKKGKKFARYQLGDLLLHLEKKHGEDWGKVYDEAWERIDKKVEGLSKHIKLEEERRSEDAQSKAALTDWLRAKASFVIEGLKEADKDEFCRCELKLQKWYGDLRGKPFAIEAENSILDISGFSKQYNCAFIWQKDGVKKLNLYLIINYFKGGKLRFKKIKPEAFEANRFYTVINKKSGEIVPMEVNFNFDDPNLIILPLAFGKRQGREFIWNDLLSLETGSLKLANGRVIEKTLYNRRTRQDEPALFVALTFERREVLDSSNIKPMNLIGVDRGENIPAVIALTDPEGCPLSRFKDSLGNPTHILRIGESYKEKQRTIQAKKEVEQRRAGGYSRKYASKAKNLADDMVRNTARDLLYYAVTQDAMLIFENLSRGFGRQGKRTFMAERQYTRMEDWLTAKLAYEGLPSKTYLSKTLAQYTSKTCSNCGFTITSADYDRVLEKLKKTATGWMTTINGKELKVEGQITYYNRYKRQNVVKDLSVELDRLSEESVNNDISSWTKGRSGEALSLLKKRFSHRPVQEKFVCLNCGFETHADEQAALNIARSWLFLRSQEYKKYQTNKTTGNTDKRAFVETWQSFYRKKLKEVWKPAV

SEQ ID NO: 31883 - protein, 978 aa, synthetic construct
  REGION 1..978: note = engineered CasX variant
QEIGRINKIRRRLVKDSNTKKAGKTGPMKTLLVRVMTPDLRERLENLRKKPPNIPQPISNTSRANLNKLLTDYTEMKKAILHVYWEEFQKDPVGLMSRVAQPASKKIDQNKLKPEMDEKGNLTTAGFACSQCGQPLFVYKLEQVSEKGKAYTNYFGRCNVAEHEKLILLAQLKPEKDSDEAVTYSLGKFGQRALDFYSIHVTKESTHPVKPLAQIAGNRYASYPVGKALSDACMGTIASFLSKYQDIIIEHQKVVKGNQKRLESLRELAGKENLEYPSVTLPPQPHTKEGVDAYNEVIARVRMWVNLNLWQKLKLSRDDAKPLLRLKGFPSFPLVERQANEVDWWDMVCNVKKLINEKKEDGKVFWQNLAGYKRQEALRPYLSSEEDRKKGKKFARYQLGDLLLHLEKKHGEDWGKVYDEAWERIDKKVEGLSKHIKLEEERRSEDAQSKAALTDWLRAKASFVIEGLKEADKDEFCRCELKLQKWYGDLRGKPFAIEAENSILDISGFSKQYNCAFIWQKDGVKKLNLYLIINYFKGGKLRFKKIKPEAFEANRFYTVINKKSGEIVPMEVNFNFDDPNLIILPLAFGKRQGREFIWNDLLSLETGSLKLANGRVIEKTLYNRRTRQDEPALFVALTFERREVLDSSNIKPMNLIGVDRGENIPAVIALTDPEGCPLSRFKDSLGNPTHILRIGESYKEKQRTIQAKKEVEQRRAGGYSRKYASKAKNLADDMVRNTARDLLYYAVTQDAMLIFENLSRGFGRQGKRTFMAERQYTRMEDWLTAKLAYEGLPSKTYLSKTLAQYTSKTCSNCGFTITSADYDRVLEKLKKTATGWMTTINGKELKVEGQITYYNRYKRQNVVKDLSVELDRLSEESVNNDISSWTKGRSGEALSLLKKRFSHRPVQEKFVCLNCGFETHADEQAALNIARSWLFLRSQEYKKYQTNKTTGNTDKRAFVETWQSFYRKKLKEVWKPAV

SEQ ID NO: 31884 - protein, 978 aa, synthetic construct
  REGION 1..978: note = engineered CasX variant
QEIGRINKIRRRLVKDSNTKKAGKTGPMKTLLVRVMTPDLRERLENLRKKPPNIPQPISNTSRANLNKLLTDYTEMKKAILHVYWEEFQKDPVGLMSRVAQPASKKIDQNKLKPEMDEKGNLTTAGFACSQCGQPLFVYKLEQVSEKGKAYTNYFGRCNVAEHEKLILLAQLKPEKDSDEAVTYSLGKFGQRALDFYSIHVTKESTHPVKPLAQIAGNRYASHPVGKALSDACMGTIASFLSKYQDIIIEHQKVVKGNQKRLESLRELAGKENLEYPSVTLPPQPHTKEGVDAYNEVIARVRMWVNLNLWQKLKLSRDDAKPLLRLKGFPSFPLVERQANEVDWWDMVCNVKKLINEKKEDGKVFWQNLAGYKRQEALRPYLSSEEDRKKGKKFARYQLGDLLLHLEKKHGEDWGKVYDEAWERIDKKVEGLSKHIKLEEERRSEDAQSKAALTDWLRAKASFVIEGLKEADKDEFCRCELKLQKWYGDLRGKPFAIEAENSILDISGFSKQYNCAFIWQKDGVKKLNLYLIINYFKGGKLRFKKIKPEAFEANRFYTVINKKSGEIVPMEVNFNFDDPNLIILPLAFGKRQGREFIWNDLLSLETGSLKLANGRVIEKTLYNRRTRQDEPALFVALTFERREVLDSSNIKPMNLIGVDRGENIPAVIALTDPEGCPLSRFKDSLGNPTHILRIGESYKEKQRTIQAKKEVEQRRAGGYSRKYASKAKNLADDMVRNTARDLLYYAVTQDAMLIFENLSRGFGRQGKRTFMAERQYTRMEDWLTAKLAYEGLPSKTYLSKTLAQYTSKTCSNCGFTITSADYDRVLEKLKKTATGWMTTINGKELKVEGQITYYNRYKRQNVVKDLSVELDRLSEESVNNDISSWTKGRSGEALSLLKKRFSHRPVQEKFVCLNCGFETHADEQAALNIARSWLFLRSQEYKKYQTNKTTGNTDKRAFVETWQSFYRKKLKEVWKPAV

SEQ ID NO: 31885 - protein, 978 aa, synthetic construct
  REGION 1..978: note = engineered CasX variant
QEIGRINKIRRRLVKDSNTKKAGKTGPMKTLLVRVMTPDLRERLENLRKKPPNIPQPISNTSRANLNKLLTDYTEMKKAILHVYWEEFQKDPVGLMSRVAQPASKKIDQNKLKPEMDEKGNLTTAGFACSQCGQPLFVYKLEQVSEKGKAYTNYFGRCNVAEHEKLILLAQLKPEKDSDEAVTYSLGKFGQRALDFYSIHVTKESTHPVKPLAQIAGNRYASSPVGKALSDACMGTIASFLSKYQDIIIEHQKVVKGNQKRLESLRELAGKENLEYPSVTLPPQPHTKEGVDAYNEVIARVRMWVNLNLWQKLKLSRDDAKPLLRLKGFPSFPLVERQANEVDWWDMVCNVKKLINEKKEDGKVFWQNLAGYKRQEALRPYLSSEEDRKKGKKFARYQLGDLLLHLEKKHGEDWGKVYDEAWERIDKKVEGLSKHIKLEEERRSEDAQSKAALTDWLRAKASFVIEGLKEADKDEFCRCELKLQKWYGDLRGKPFAIEAENSILDISGFSKQYNCAFIWQKDGVKKLNLYLIINYFKGGKLRFKKIKPEAFEANRFYTVINKKSGEIVPMEVNFNFDDPNLIILPLAFGKRQGREFIWNDLLSLETGSLKLANGRVIEKTLYNRRTRQDEPALFVALTFERREVLDSSNIKPMNLIGVDRGENIPAVIALTDPEGCPLSRFKDSLGNPTHILRIGESYKEKQRTIQAKKEVEQRRAGGYSRKYASKAKNLADDMVRNTARDLLYYAVTQDAMLIFENLSRGFGRQGKRTFMAERQYTRMEDWLTAKLAYEGLPSKTYLSKTLAQYTSKTCSNCGFTITSADYDRVLEKLKKTATGWMTTINGKELKVEGQITYYNRYKRQNVVKDLSVELDRLSEESVNNDISSWTKGRSGEALSLLKKRFSHRPVQEKFVCLNCGFETHADEQAALNIARSWLFLRSQEYKKYQTNKTTGNTDKRAFVETWQSFYRKKLKEVWKPAV

SEQ ID NO: 31886 - protein, 978 aa, synthetic construct
  REGION 1..978: note = engineered CasX variant
QEIGRINKIRRRLVKDSNTKKAGKTGPMKTLLVRVMTPDLRERLENLRKKPPNIPQPISNTSRANLNKLLTDYTEMKKAILHVYWEEFQKDPVGLMSRVAQPASKKIDQNKLKPEMDEKGNLTTAGFACSQCGQPLFVYKLEQVSEKGKAYTNYFGRCNVAEHEKLILLAQLKPEKDSDEAVTYSLGKFGQRALDFYSIHVTKESTHPVKPLAQIAGNRYASTPVGKALSDACMGTIASFLSKYQDIIIEHQKVVKGNQKRLESLRELAGKENLEYPSVTLPPQPHTKEGVDAYNEVIARVRMWVNLNLWQKLKLSRDDAKPLLRLKGFPSFPLVERQANEVDWWDMVCNVKKLINEKKEDGKVFWQNLAGYKRQEALRPYLSSEEDRKKGKKFARYQLGDLLLHLEKKHGEDWGKVYDEAWERIDKKVEGLSKHIKLEEERRSEDAQSKAALTDWLRAKASFVIEGLKEADKDEFCRCELKLQKWYGDLRGKPFAIEAENSILDISGFSKQYNCAFIWQKDGVKKLNLYLIINYFKGGKLRFKKIKPEAFEANRFYTVINKKSGEIVPMEVNFNFDDPNLIILPLAFGKRQGREFIWNDLLSLETGSLKLANGRVIEKTLYNRRTRQDEPALFVALTFERREVLDSSNIKPMNLIGVDRGENIPAVIALTDPEGCPLSRFKDSLGNPTHILRIGESYKEKQRTIQAKKEVEQRRAGGYSRKYASKAKNLADDMVRNTARDLLYYAVTQDAMLIFENLSRGFGRQGKRTFMAERQYTRMEDWLTAKLAYEGLPSKTYLSKTLAQYTSKTCSNCGFTITSADYDRVLEKLKKTATGWMTTINGKELKVEGQITYYNRYKRQNVVKDLSVELDRLSEESVNNDISSWTKGRSGEALSLLKKRFSHRPVQEKFVCLNCGFETHADEQAALNIARSWLFLRSQEYKKYQTNKTTGNTDKRAFVETWQSFYRKKLKEVWKPAV

SEQ ID NO: 31887 - protein, 978 aa, synthetic construct
  REGION 1..978: note = engineered CasX variant
QEIGRINKIRRRLVKDSNTKKAGKTGPMKTLLVRVMTPDLRERLENLRKKPPNIPQPISNTSRANLNKLLTDYTEMKKAILHVYWEEFQKDPVGLMSRVAQPASKKIDQNKLKPEMDEKGNLTTAGFACSQCGQPLFVYKLEQVSEKGKAYTNYFGRCNVAEHEKLILLAQLKPEKDSDEAVTYSLGKFGQRALDFYSIHVTKESTHPVKPLAQIAGNRYASAPVGKALSDACMGTIASFLSKYQDIIIEHQKVVKGNQKRLESLRELAGKENLEYPSVTLPPQPHTKEGVDAYNEVIARVRMWVNLNLWQKLKLSRDDAKPLLRLKGFPSFPLVERQANEVDWWDMVCNVKKLINEKKEDGKVFWQNLAGYKRQEALRPYLSSEEDRKKGKKFARYQLGDLLLHLEKKHGEDWGKVYDEAWERIDKKVEGLSKHIKLEEERRSEDAQSKAALTDWLRAKASFVIEGLKEADKDEFCRCELKLQKWYGDLRGKPFAIEAENSILDISGFSKQYNCAFIWQKDGVKKLNLYLIINYFKGGKLRFKKIKPEAFEANRFYTVINKKSGEIVPMEVNFNFDDPNLIILPLAFGKRQGREFIWNDLLSLETGSLKLANGRVIEKTLYNRRTRQDEPALFVALTFERREVLDSSNIKPMNLIGVDRGENIPAVIALTDPEGCPLSRFKDSLGNPTHILRIGESYKEKQRTIQAKKEVEQRRAGGYSRKYASKAKNLADDMVRNTARDLLYYAVTQDAMLIFENLSRGFGRQGKRTFMAERQYTRMEDWLTAKLAYEGLPSKTYLSKTLAQYTSKTCSNCGFTITSADYDRVLEKLKKTATGWMTTINGKELKVEGQITYYNRYKRQNVVKDLSVELDRLSEESVNNDISSWTKGRSGEALSLLKKRFSHRPVQEKFVCLNCGFETHADEQAALNIARSWLFLRSQEYKKYQTNKTTGNTDKRAFVETWQSFYRKKLKEVWKPAV

SEQ ID NO: 31888 - protein, 978 aa, synthetic construct
  REGION 1..978: note = engineered CasX variant
QEIGRINKIRRRLVKDSNTKKAGKTGPMKTLLVRVMTPDLRERLENLRKKPPNIPQPISNTSRANLNKLLTDYTEMKKAILHVYWEEFQKDPVGLMSRVAQPASKKIDQNKLKPEMDEKGNLTTAGFACSQCGQPLFVYKLEQVSEKGKAYTNYFGRCNVAEHEKLILLAQLKPEKDSDEAVTYSLGKFGQRALDFYSIHVTKESTHPVKPLAQIAGNRYASVPVGKALSDACMGTIASFLSKYQDIIIEHQKVVKGNQKRLESLRELAGKENLEYPSVTLPPQPHTKEGVDAYNEVIARVRMWVNLNLWQKLKLSRDDAKPLLRLKGFPSFPLVERQANEVDWWDMVCNVKKLINEKKEDGKVFWQNLAGYKRQEALRPYLSSEEDRKKGKKFARYQLGDLLLHLEKKHGEDWGKVYDEAWERIDKKVEGLSKHIKLEEERRSEDAQSKAALTDWLRAKASFVIEGLKEADKDEFCRCELKLQKWYGDLRGKPFAIEAENSILDISGFSKQYNCAFIWQKDGVKKLNLYLIINYFKGGKLRFKKIKPEAFEANRFYTVINKKSGEIVPMEVNFNFDDPNLIILPLAFGKRQGREFIWNDLLSLETGSLKLANGRVIEKTLYNRRTRQDEPALFVALTFERREVLDSSNIKPMNLIGVDRGENIPAVIALTDPEGCPLSRFKDSLGNPTHILRIGESYKEKQRTIQAKKEVEQRRAGGYSRKYASKAKNLADDMVRNTARDLLYYAVTQDAMLIFENLSRGFGRQGKRTFMAERQYTRMEDWLTAKLAYEGLPSKTYLSKTLAQYTSKTCSNCGFTITSADYDRVLEKLKKTATGWMTTINGKELKVEGQITYYNRYKRQNVVKDLSVELDRLSEESVNNDISSWTKGRSGEALSLLKKRFSHRPVQEKFVCLNCGFETHADEQAALNIARSWLFLRSQEYKKYQTNKTTGNTDKRAFVETWQSFYRKKLKEVWKPAV

SEQ ID NO: 31889 - protein, 978 aa, synthetic construct
  REGION 1..978: note = engineered CasX variant
QEIGRINKIRRRLVKDSNTKKAGKTGPMKTLLVRVMTPDLRERLENLRKKPPNIPQPISNTSRANLNKLLTDYTEMKKAILHVYWEEFQKDPVGLMSRVAQPASKKIDQNKLKPEMDEKGNLTTAGFACSQCGQPLFVYKLEQVSEKGKAYTNYFGRCNVAEHEKLIKLAQLKPEKDSDEAVTYSLGKFGQRALDFYSIHVTKESTHPVKPLAQIAGNRYASGPVGKALSDACMGTIASFLSKYQDIIIEHQKVVKGNQKRLESLRELAGKENLEYPSVTLPPQPHTKEGVDAYNEVIARVRMWVNLNLWQKLKLSRDDAKPLLRLKGFPSFPLVERQANEVDWWDMVCNVKKLINEKKEDGKVFWQNLAGYKRQEALRPYLSSEEDRKKGKKFARYQLGDLLLHLEKKHGEDWGKVYDEAWERIDKKVEGLSKHIKLEEERRSEDAQSKAALTDWLRAKASFVIEGLKEADKDEFCRCELKLQKWYGDLRGKPFAIEAENSILDISGFSKQYNCAFIWQKDGVKKLNLYLIINYFKGGKLRFKKIKPEAFEANRFYTVINKKSGEIVPMEVNFNFDDPNLIILPLAFGKRQGREFIWNDLLSLETGSLKLANGRVIEKTLYNRRTRQDEPALFVALTFERREVLDSSNIKPMNLIGVDRGENIPAVIALTDPEGCPLSRFKDSLGNPTHILRIGESYKEKQRTIQAKKEVEQRRAGGYSRKYASKAKNLADDMVRNTARDLLYYAVTQDAMLIFENLSRGFGRQGKRTFMAERQYTRMEDWLTAKLAYEGLPSKTYLSKTLAQYTSKTCSNCGFTITSADYDRVLEKLKKTATGWMTTINGKELKVEGQITYYNRYKRQNVVKDLSVELDRLSEESVNNDISSWTKGRSGEALSLLKKRFSHRPVQEKFVCLNCGFETHADEQAALNIARSWLFLRSQEYKKYQTNKTTGNTDKRAFVETWQSFYRKKLKEVWKPAV

SEQ ID NO: 31890 - protein, 977 aa, synthetic construct
  REGION 1..977: note = engineered CasX variant
QEIGRINKIRRRLVKDSNTKKAGKTGPMKTLLVRVMTPDLRERLENLRKKPPNIPQPISNTSRANLNKLLTDYTEMKKAILHVYWEEFQKDPVGLMSRVAQPASKKIDQNKLKPEMDEKGNLTTAGFACSQCGQPLFVYKLEQVSEKGKAYTNYFGRCNVAEHEKLILLAQLKPEKDSDEAVTYSLGKFGQRALDFYSIHVTKESTHPVKPLAQIAGNRYASPVGKALSDACMGTIASFLSKYQDIIIEHQKVVKGNQKRLESLRELAGKENLEYPSVTLPPQPHTKEGVDAYNEVIARVRMWVNLNLWQKLKLSRDDAKPLLRLKGFPSFPLVERQANEVDWWDMVCNVKKLINEKKEDGKVFWQNLAGYKRQEALRPYLSSEEDRKKGKKFARYQLGDLLLHLEKKHGEDWGKVYDEAWERIDKKVEGLSKHIKLEEERRSEDAQSKAALTDWLRAKASFVIEGLKEADKDEFCRCELKLQKWYGDLRGKPFAIEAENSILDISGFSKQYNCAFIWQKDGVKKLNLYLIINYFKGGKLRFKKIKPEAFEANRFYTVINKKSGEIVPMEVNFNFDDPNLIILPLAFGKRQGREFIWNDLLSLETGSLKLANGRVIEKTLYNRRTRQDEPALFVALTFERREVLDSSNIKPMNLIGVDRGENIPAVIALTDPEGCPLSRFKDSLGNPTHILRIGESYKEKQRTIQAKKEVEQRRAGGYSRKYASKAKNLADDMVRNTARDLLYYAVTQDAMLIFENLSRGFGRQGKRTFMAERQYTRMEDWLTAKLAYEGLPSKTYLSKTLAQYTSKTCSNCGFTITSADYDRVLEKLKKTATGWMTTINGKELKVEGQITYYNRYKRQNVVKDLSVELDRLSEESVNNDISSWTKGRSGEALSLLKKRFSHRPVQEKFVCLNCGFETHADEQAALNIARSWLFLRSQEYKKYQTNKTTGNTDKRAFVETWQSFYRKKLKEVWKPAV

SEQ ID NO: 31891 - protein, 978 aa, synthetic construct
  REGION 1..978: note = engineered CasX variant
QEIGRINKIRRRLVKDSNTKKAGKTGPMKTLLVRVMTPDLRERLENLRKKPENIPQPISNTSQANLNKLLTDYTEMKKAILHVYWEEFQKDPVGLMSRVAQPASKKIDQNKLKPEMDEKGNLTTAGFACSQCGQPLFVYKLEQVSEKGKAYTNYFGRCNVAEHEKLILLAQLKPEKDSDEAVTYSLGKFGQRALDFYSIHVTKESTHPVKPLAQIAGNRYASYPVGKALSDACMGTIASFLSKYQDIIIEHQKVVKGNQKRLESLRELAGKENLEYPSVTLPPQPHTKEGVDAYNEVIARVRMWVNLNLWQKLKLSRDDAKPLLRLKGFPSFPLVERQANEVDWWDMVCNVKKLINEKKEDGKVFWQNLAGYKRQEALRPYLSSEEDRKKGKKFARYQLGDLLLHLEKKHGEDWGKVYDEAWERIDKKVEGLSKHIKLEEERRSEDAQSKAALTDWLRAKASFVIEGLKEADKDEFCRCELKLQKWYGDLRGKPFAIEAENSILDISGFSKQYNCAFIWQKDGVKKLNLYLIINYFKGGKLRFKKIKPEAFEANRFYTVINKKSGEIVPMEVNFNFDDPNLIILPLAFGKRQGREFIWNDLLSLETGSLKLANGRVIEKTLYNRRTRQDEPALFVALTFERREVLDSSNIKPMNLIGVDRGENIPAVIALTDPEGCPLSRFKDSLGNPTHILRIGESYKEKQRTIQAKKEVEQRRAGGYSRKYASKAKNLADDMVRNTARDLLYYAVTQDAMLIFENLSRGFGRQGKRTFMAERQYTRMEDWLTAKLAYEGLPSKTYLSKTLAQYTSKTCSNCGFTITSADYDRVLEKLKKTATGWMTTINGKELKVEGQITYYNRYKRQNVVKDLSVELDRLSEESVNNDISSWTKGRSGEALSLLKKRFSHRPVQEKFVCLNCGFETHADEQAALNIARSWLFLRSQEYKKYQTNKTTGNTDKRAFVETWQSFYRKKLKEVWKPAV

SEQ ID NO: 31892 - protein, 978 aa, synthetic construct
  REGION 1..978: note = engineered CasX variant
QEIGRINKIRRRLVKDSNTKKAGKTGPMKTLLVRVMTPDLRERLENLRKKPENIPQPISNTSQANLNKLLTDYTEMKKAILHVYWEEFQKDPVGLMSRVAQPASKKIDQNKLKPEMDEKGNLTTAGFACSQCGQPLFVYKLEQVSEKGKAYTNYFGRCNVAEHEKLILLAQLKPEKDSDEAVTYSLGKFGQRALDFYSIHVTKESTHPVKPLAQIAGNRYASHPVGKALSDACMGTIASFLSKYQDIIIEHQKVVKGNQKRLESLRELAGKENLEYPSVTLPPQPHTKEGVDAYNEVIARVRMWVNLNLWQKLKLSRDDAKPLLRLKGFPSFPLVERQANEVDWWDMVCNVKKLINEKKEDGKVFWQNLAGYKRQEALRPYLSSEEDRKKGKKFARYQLGDLLLHLEKKHGEDWGKVYDEAWERIDKKVEGLSKHIKLEEERRSEDAQSKAALTDWLRAKASFVIEGLKEADKDEFCRCELKLQKWYGDLRGKPFAIEAENSILDISGFSKQYNCAFIWQKDGVKKLNLYLIINYFKGGKLRFKKIKPEAFEANRFYTVINKKSGEIVPMEVNFNFDDPNLIILPLAFGKRQGREFIWNDLLSLETGSLKLANGRVIEKTLYNRRTRQDEPALFVALTFERREVLDSSNIKPMNLIGVDRGENIPAVIALTDPEGCPLSRFKDSLGNPTHILRIGESYKEKQRTIQAKKEVEQRRAGGYSRKYASKAKNLADDMVRNTARDLLYYAVTQDAMLIFENLSRGFGRQGKRTFMAERQYTRMEDWLTAKLAYEGLPSKTYLSKTLAQYTSKTCSNCGFTITSADYDRVLEKLKKTATGWMTTINGKELKVEGQITYYNRYKRQNVVKDLSVELDRLSEESVNNDISSWTKGRSGEALSLLKKRFSHRPVQEKFVCLNCGFETHADEQAALNIARSWLFLRSQEYKKYQTNKTTGNTDKRAFVETWQSFYRKKLKEVWKPAV

SEQ ID NO: 31893 - protein, 978 aa, synthetic construct
  REGION 1..978: note = engineered CasX variant
QEIGRINKIRRRLVKDSNTKKAGKTGPMKTLLVRVMTPDLRERLENLRKKPENIPQPISNTSQANLNKLLTDYTEMKKAILHVYWEEFQKDPVGLMSRVAQPASKKIDQNKLKPEMDEKGNLTTAGFACSQCGQPLFVYKLEQVSEKGKAYTNYFGRCNVAEHEKLILLAQLKPEKDSDEAVTYSLGKFGQRALDFYSIHVTKESTHPVKPLAQIAGNRYASSPVGKALSDACMGTIASFLSKYQDIIIEHQKVVKGNQKRLESLRELAGKENLEYPSVTLPPQPHTKEGVDAYNEVIARVRMWVNLNLWQKLKLSRDDAKPLLRLKGFPSFPLVERQANEVDWWDMVCNVKKLINEKKEDGKVFWQNLAGYKRQEALRPYLSSEEDRKKGKKFARYQLGDLLLHLEKKHGEDWGKVYDEAWERIDKKVEGLSKHIKLEEERRSEDAQSKAALTDWLRAKASFVIEGLKEADKDEFCRCELKLQKWYGDLRGKPFAIEAENSILDISGFSKQYNCAFIWQKDGVKKLNLYLIINYFKGGKLRFKKIKPEAFEANRFYTVINKKSGEIVPMEVNFNFDDPNLIILPLAFGKRQGREFIWNDLLSLETGSLKLANGRVIEKTLYNRRTRQDEPALFVALTFERREVLDSSNIKPMNLIGVDRGENIPAVIALTDPEGCPLSRFKDSLGNPTHILRIGESYKEKQRTIQAKKEVEQRRAGGYSRKYASKAKNLADDMVRNTARDLLYYAVTQDAMLIFENLSRGFGRQGKRTFMAERQYTRMEDWLTAKLAYEGLPSKTYLSKTLAQYTSKTCSNCGFTITSADYDRVLEKLKKTATGWMTTINGKELKVEGQITYYNRYKRQNVVKDLSVELDRLSEESVNNDISSWTKGRSGEALSLLKKRFSHRPVQEKFVCLNCGFETHADEQAALNIARSWLFLRSQEYKKYQTNKTTGNTDKRAFVETWQSFYRKKLKEVWKPAV

SEQ ID NO: 31894 - protein, 978 aa, synthetic construct
  REGION 1..978: note = engineered CasX variant
QEIGRINKIRRRLVKDSNTKKAGKTGPMKTLLVRVMTPDLRERLENLRKKPENIPQPISNTSQANLNKLLTDYTEMKKAILHVYWEEFQKDPVGLMSRVAQPASKKIDQNKLKPEMDEKGNLTTAGFACSQCGQPLFVYKLEQVSEKGKAYTNYFGRCNVAEHEKLILLAQLKPEKDSDEAVTYSLGKFGQRALDFYSIHVTKESTHPVKPLAQIAGNRYASTPVGKALSDACMGTIASFLSKYQDIIIEHQKVVKGNQKRLESLRELAGKENLEYPSVTLPPQPHTKEGVDAYNEVIARVRMWVNLNLWQKLKLSRDDAKPLLRLKGFPSFPLVERQANEVDWWDMVCNVKKLINEKKEDGKVFWQNLAGYKRQEALRPYLSSEEDRKKGKKFARYQLGDLLLHLEKKHGEDWGKVYDEAWERIDKKVEGLSKHIKLEEERRSEDAQSKAALTDWLRAKASFVIEGLKEADKDEFCRCELKLQKWYGDLRGKPFAIEAENSILDISGFSKQYNCAFIWQKDGVKKLNLYLIINYFKGGKLRFKKIKPEAFEANRFYTVINKKSGEIVPMEVNFNFDDPNLIILPLAFGKRQGREFIWNDLLSLETGSLKLANGRVIEKTLYNRRTRQDEPALFVALTFERREVLDSSNIKPMNLIGVDRGENIPAVIALTDPEGCPLSRFKDSLGNPTHILRIGESYKEKQRTIQAKKEVEQRRAGGYSRKYASKAKNLADDMVRNTARDLLYYAVTQDAMLIFENLSRGFGRQGKRTFMAERQYTRMEDWLTAKLAYEGLPSKTYLSKTLAQYTSKTCSNCGFTITSADYDRVLEKLKKTATGWMTTINGKELKVEGQITYYNRYKRQNVVKDLSVELDRLSEESVNNDISSWTKGRSGEALSLLKKRFSHRPVQEKFVCLNCGFETHADEQAALNIARSWLFLRSQEYKKYQTNKTTGNTDKRAFVETWQSFYRKKLKEVWKPAV

SEQ ID NO: 31895 - protein, 978 aa, synthetic construct
  REGION 1..978: note = engineered CasX variant
QEIGRINKIRRRLVKDSNTKKAGKTGPMKTLLVRVMTPDLRERLENLRKKPENIPQPISNTSQANLNKLLTDYTEMKKAILHVYWEEFQKDPVGLMSRVAQPASKKIDQNKLKPEMDEKGNLTTAGFACSQCGQPLFVYKLEQVSEKGKAYTNYFGRCNVAEHEKLILLAQLKPEKDSDEAVTYSLGKFGQRALDFYSIHVTKESTHPVKPLAQIAGNRYASAPVGKALSDACMGTIASFLSKYQDIIIEHQKVVKGNQKRLESLRELAGKENLEYPSVTLPPQPHTKEGVDAYNEVIARVRMWVNLNLWQKLKLSRDDAKPLLRLKGFPSFPLVERQANEVDWWDMVCNVKKLINEKKEDGKVFWQNLAGYKRQEALRPYLSSEEDRKKGKKFARYQLGDLLLHLEKKHGEDWGKVYDEAWERIDKKVEGLSKHIKLEEERRSEDAQSKAALTDWLRAKASFVIEGLKEADKDEFCRCELKLQKWYGDLRGKPFAIEAENSILDISGFSKQYNCAFIWQKDGVKKLNLYLIINYFKGGKLRFKKIKPEAFEANRFYTVINKKSGEIVPMEVNFNFDDPNLIILPLAFGKRQGREFIWNDLLSLETGSLKLANGRVIEKTLYNRRTRQDEPALFVALTFERREVLDSSNIKPMNLIGVDRGENIPAVIALTDPEGCPLSRFKDSLGNPTHILRIGESYKEKQRTIQAKKEVEQRRAGGYSRKYASKAKNLADDMVRNTARDLLYYAVTQDAMLIFENLSRGFGRQGKRTFMAERQYTRMEDWLTAKLAYEGLPSKTYLSKTLAQYTSKTCSNCGFTITSADYDRVLEKLKKTATGWMTTINGKELKVEGQITYYNRYKRQNVVKDLSVELDRLSEESVNNDISSWTKGRSGEALSLLKKRFSHRPVQEKFVCLNCGFETHADEQAALNIARSWLFLRSQEYKKYQTNKTTGNTDKRAFVETWQSFYRKKLKEVWKPAV

SEQ ID NO: 31896 - protein, 978 aa, synthetic construct
  REGION 1..978: note = engineered CasX variant
QEIGRINKIRRRLVKDSNTKKAGKTGPMKTLLVRVMTPDLRERLENLRKKPENIPQPISNTSQANLNKLLTDYTEMKKAILHVYWEEFQKDPVGLMSRVAQPASKKIDQNKLKPEMDEKGNLTTAGFACSQCGQPLFVYKLEQVSEKGKAYTNYFGRCNVAEHEKLILLAQLKPEKDSDEAVTYSLGKFGQRALDFYSIHVTKESTHPVKPLAQIAGNRYASVPVGKALSDACMGTIASFLSKYQDIIIEHQKVVKGNQKRLESLRELAGKENLEYPSVTLPPQPHTKEGVDAYNEVIARVRMWVNLNLWQKLKLSRDDAKPLLRLKGFPSFPLVERQANEVDWWDMVCNVKKLINEKKEDGKVFWQNLAGYKRQEALRPYLSSEEDRKKGKKFARYQLGDLLLHLEKKHGEDWGKVYDEAWERIDKKVEGLSKHIKLEEERRSEDAQSKAALTDWLRAKASFVIEGLKEADKDEFCRCELKLQKWYGDLRGKPFAIEAENSILDISGFSKQYNCAFIWQKDGVKKLNLYLIINYFKGGKLRFKKIKPEAFEANRFYTVINKKSGEIVPMEVNFNFDDPNLIILPLAFGKRQGREFIWNDLLSLETGSLKLANGRVIEKTLYNRRTRQDEPALFVALTFERREVLDSSNIKPMNLIGVDRGENIPAVIALTDPEGCPLSRFKDSLGNPTHILRIGESYKEKQRTIQAKKEVEQRRAGGYSRKYASKAKNLADDMVRNTARDLLYYAVTQDAMLIFENLSRGFGRQGKRTFMAERQYTRMEDWLTAKLAYEGLPSKTYLSKTLAQYTSKTCSNCGFTITSADYDRVLEKLKKTATGWMTTINGKELKVEGQITYYNRYKRQNVVKDLSVELDRLSEESVNNDISSWTKGRSGEALSLLKKRFSHRPVQEKFVCLNCGFETHADEQAALNIARSWLFLRSQEYKKYQTNKTTGNTDKRAFVETWQSFYRKKLKEVWKPAV

SEQ ID NO: 31897 - protein, 978 aa, synthetic construct
  REGION 1..978: note = engineered CasX variant
QEIGRINKIRRRLVKDSNTKKAGKTGPMKTLLVRVMTPDLRERLENLRKKPENIPQPISNTSQANLNKLLTDYTEMKKAILHVYWEEFQKDPVGLMSRVAQPASKKIDQNKLKPEMDEKGNLTTAGFACSQCGQPLFVYKLEQVSEKGKAYTNYFGRCNVAEHEKLIKLAQLKPEKDSDEAVTYSLGKFGQRALDFYSIHVTKESTHPVKPLAQIAGNRYASGPVGKALSDACMGTIASFLSKYQDIIIEHQKVVKGNQKRLESLRELAGKENLEYPSVTLPPQPHTKEGVDAYNEVIARVRMWVNLNLWQKLKLSRDDAKPLLRLKGFPSFPLVERQANEVDWWDMVCNVKKLINEKKEDGKVFWQNLAGYKRQEALRPYLSSEEDRKKGKKFARYQLGDLLLHLEKKHGEDWGKVYDEAWERIDKKVEGLSKHIKLEEERRSEDAQSKAALTDWLRAKASFVIEGLKEADKDEFCRCELKLQKWYGDLRGKPFAIEAENSILDISGFSKQYNCAFIWQKDGVKKLNLYLIINYFKGGKLRFKKIKPEAFEANRFYTVINKKSGEIVPMEVNFNFDDPNLIILPLAFGKRQGREFIWNDLLSLETGSLKLANGRVIEKTLYNRRTRQDEPALFVALTFERREVLDSSNIKPMNLIGVDRGENIPAVIALTDPEGCPLSRFKDSLGNPTHILRIGESYKEKQRTIQAKKEVEQRRAGGYSRKYASKAKNLADDMVRNTARDLLYYAVTQDAMLIFENLSRGFGRQGKRTFMAERQYTRMEDWLTAKLAYEGLPSKTYLSKTLAQYTSKTCSNCGFTITSADYDRVLEKLKKTATGWMTTINGKELKVEGQITYYNRYKRQNVVKDLSVELDRLSEESVNNDISSWTKGRSGEALSLLKKRFSHRPVQEKFVCLNCGFETHADEQAALNIARSWLFLRSQEYKKYQTNKTTGNTDKRAFVETWQSFYRKKLKEVWKPAV

SEQ ID NO: 31898 - protein, 977 aa, synthetic construct
  REGION 1..977: note = engineered CasX variant
QEIGRINKIRRRLVKDSNTKKAGKTGPMKTLLVRVMTPDLRERLENLRKKPENIPQPISNTSQANLNKLLTDYTEMKKAILHVYWEEFQKDPVGLMSRVAQPASKKIDQNKLKPEMDEKGNLTTAGFACSQCGQPLFVYKLEQVSEKGKAYTNYFGRCNVAEHEKLILLAQLKPEKDSDEAVTYSLGKFGQRALDFYSIHVTKESTHPVKPLAQIAGNRYASPVGKALSDACMGTIASFLSKYQDIIIEHQKVVKGNQKRLESLRELAGKENLEYPSVTLPPQPHTKEGVDAYNEVIARVRMWVNLNLWQKLKLSRDDAKPLLRLKGFPSFPLVERQANEVDWWDMVCNVKKLINEKKEDGKVFWQNLAGYKRQEALRPYLSSEEDRKKGKKFARYQLGDLLLHLEKKHGEDWGKVYDEAWERIDKKVEGLSKHIKLEEERRSEDAQSKAALTDWLRAKASFVIEGLKEADKDEFCRCELKLQKWYGDLRGKPFAIEAENSILDISGFSKQYNCAFIWQKDGVKKLNLYLIINYFKGGKLRFKKIKPEAFEANRFYTVINKKSGEIVPMEVNFNFDDPNLIILPLAFGKRQGREFIWNDLLSLETGSLKLANGRVIEKTLYNRRTRQDEPALFVALTFERREVLDSSNIKPMNLIGVDRGENIPAVIALTDPEGCPLSRFKDSLGNPTHILRIGESYKEKQRTIQAKKEVEQRRAGGYSRKYASKAKNLADDMVRNTARDLLYYAVTQDAMLIFENLSRGFGRQGKRTFMAERQYTRMEDWLTAKLAYEGLPSKTYLSKTLAQYTSKTCSNCGFTITSADYDRVLEKLKKTATGWMTTINGKELKVEGQITYYNRYKRQNVVKDLSVELDRLSEESVNNDISSWTKGRSGEALSLLKKRFSHRPVQEKFVCLNCGFETHADEQAALNIARSWLFLRSQEYKKYQTNKTTGNTDKRAFVETWQSFYRKKLKEVWKPAV

SEQ ID NO: 31899 - protein, 978 aa, synthetic construct
  REGION 1..978: note = engineered CasX variant
QEIGRINKIRRRLVKDSNTKKAGKTGPMKTLLVRVMTPDLRERLENLRKKPENIPQPISNTSRANLNKLLTDYTEMKKAILHVYDEEFQKDPVGLMSRVAQPASKKIDQNKLKPEMDEKGNLTTAGFACSQCGQPLFVYKLEQVSEKGKAYTNYFGRCNVAEHEKLILLAQLKPEKDSDEAVTYSLGKFGQRALDFYSIHVTKESTHPVKPLAQIAGNRYASYPVGKALSDACMGTIASFLSKYQDIIIEHQKVVKGNQKRLESLRELAGKENLEYPSVTLPPQPHTKEGVDAYNEVIARVRMWVNLNLWQKLKLSRDDAKPLLRLKGFPSFPLVERQANEVDWWDMVCNVKKLINEKKEDGKVFWQNLAGYKRQEALRPYLSSEEDRKKGKKFARYQLGDLLLHLEKKHGEDWGKVYDEAWERIDKKVEGLSKHIKLEEERRSEDAQSKAALTDWLRAKASFVIEGLKEADKDEFCRCELKLQKWYGDLRGKPFAIEAENSILDISGFSKQYNCAFIWQKDGVKKLNLYLIINYFKGGKLRFKKIKPEAFEANRFYTVINKKSGEIVPMEVNFNFDDPNLIILPLAFGKRQGREFIWNDLLSLETGSLKLANGRVIEKTLYNRRTRQDEPALFVALTFERREVLDSSNIKPMNLIGVDRGENIPAVIALTDPEGCPLSRFKDSLGNPTHILRIGESYKEKQRTIQAKKEVEQRRAGGYSRKYASKAKNLADDMVRNTARDLLYYAVTQDAMLIFENLSRGFGRQGKRTFMAERQYTRMEDWLTAKLAYEGLPSKTYLSKTLAQYTSKTCSNCGFTITSADYDRVLEKLKKTATGWMTTINGKELKVEGQITYYNRYKRQNVVKDLSVELDRLSEESVNNDISSWTKGRSGEALSLLKKRFSHRPVQEKFVCLNCGFETHADEQAALNIARSWLFLRSQEYKKYQTNKTTGNTDKRAFVETWQSFYRKKLKEVWKPAV

SEQ ID NO: 31900 - protein, 978 aa, synthetic construct
  REGION 1..978: note = engineered CasX variant
QEIGRINKIRRRLVKDSNTKKAGKTGPMKTLLVRVMTPDLRERLENLRKKPENIPQPISNTSRANLNKLLTDYTEMKKAILHVYDEEFQKDPVGLMSRVAQPASKKIDQNKLKPEMDEKGNLTTAGFACSQCGQPLFVYKLEQVSEKGKAYTNYFGRCNVAEHEKLILLAQLKPEKDSDEAVTYSLGKFGQRALDFYSIHVTKESTHPVKPLAQIAGNRYASHPVGKALSDACMGTIASFLSKYQDIIIEHQKVVKGNQKRLESLRELAGKENLEYPSVTLPPQPHTKEGVDAYNEVIARVRMWVNLNLWQKLKLSRDDAKPLLRLKGFPSFPLVERQANEVDWWDMVCNVKKLINEKKEDGKVFWQNLAGYKRQEALRPYLSSEEDRKKGKKFARYQLGDLLLHLEKKHGEDWGKVYDEAWERIDKKVEGLSKHIKLEEERRSEDAQSKAALTDWLRAKASFVIEGLKEADKDEFCRCELKLQKWYGDLRGKPFAIEAENSILDISGFSKQYNCAFIWQKDGVKKLNLYLIINYFKGGKLRFKKIKPEAFEANRFYTVINKKSGEIVPMEVNFNFDDPNLIILPLAFGKRQGREFIWNDLLSLETGSLKLANGRVIEKTLYNRRTRQDEPALFVALTFERREVLDSSNIKPMNLIGVDRGENIPAVIALTDPEGCPLSRFKDSLGNPTHILRIGESYKEKQRTIQAKKEVEQRRAGGYSRKYASKAKNLADDMVRNTARDLLYYAVTQDAMLIFENLSRGFGRQGKRTFMAERQYTRMEDWLTAKLAYEGLPSKTYLSKTLAQYTSKTCSNCGFTITSADYDRVLEKLKKTATGWMTTINGKELKVEGQITYYNRYKRQNVVKDLSVELDRLSEESVNNDISSWTKGRSGEALSLLKKRFSHRPVQEKFVCLNCGFETHADEQAALNIARSWLFLRSQEYKKYQTNKTTGNTDKRAFVETWQSFYRKKLKEVWKPAV

SEQ ID NO: 31901 - protein, 978 aa, synthetic construct
  REGION 1..978: note = engineered CasX variant
QEIGRINKIRRRLVKDSNTKKAGKTGPMKTLLVRVMTPDLRERLENLRKKPENIPQPISNTSRANLNKLLTDYTEMKKAILHVYDEEFQKDPVGLMSRVAQPASKKIDQNKLKPEMDEKGNLTTAGFACSQCGQPLFVYKLEQVSEKGKAYTNYFGRCNVAEHEKLILLAQLKPEKDSDEAVTYSLGKFGQRALDFYSIHVTKESTHPVKPLAQIAGNRYASSPVGKALSDACMGTIASFLSKYQDIIIEHQKVVKGNQKRLESLRELAGKENLEYPSVTLPPQPHTKEGVDAYNEVIARVRMWVNLNLWQKLKLSRDDAKPLLRLKGFPSFPLVERQANEVDWWDMVCNVKKLINEKKEDGKVFWQNLAGYKRQEALRPYLSSEEDRKKGKKFARYQLGDLLLHLEKKHGEDWGKVYDEAWERIDKKVEGLSKHIKLEEERRSEDAQSKAALTDWLRAKASFVIEGLKEADKDEFCRCELKLQKWYGDLRGKPFAIEAENSILDISGFSKQYNCAFIWQKDGVKKLNLYLIINYFKGGKLRFKKIKPEAFEANRFYTVINKKSGEIVPMEVNFNFDDPNLIILPLAFGKRQGREFIWNDLLSLETGSLKLANGRVIEKTLYNRRTRQDEPALFVALTFERREVLDSSNIKPMNLIGVDRGENIPAVIALTDPEGCPLSRFKDSLGNPTHILRIGESYKEKQRTIQAKKEVEQRRAGGYSRKYASKAKNLADDMVRNTARDLLYYAVTQDAMLIFENLSRGFGRQGKRTFMAERQYTRMEDWLTAKLAYEGLPSKTYLSKTLAQYTSKTCSNCGFTITSADYDRVLEKLKKTATGWMTTINGKELKVEGQITYYNRYKRQNVVKDLSVELDRLSEESVNNDISSWTKGRSGEALSLLKKRFSHRPVQEKFVCLNCGFETHADEQAALNIARSWLFLRSQEYKKYQTNKTTGNTDKRAFVETWQSFYRKKLKEVWKPAV

SEQ ID NO: 31902 - protein, 978 aa, synthetic construct
  REGION 1..978: note = engineered CasX variant
QEIGRINKIRRRLVKDSNTKKAGKTGPMKTLLVRVMTPDLRERLENLRKKPENIPQPISNTSRANLNKLLTDYTEMKKAILHVYDEEFQKDPVGLMSRVAQPASKKIDQNKLKPEMDEKGNLTTAGFACSQCGQPLFVYKLEQVSEKGKAYTNYFGRCNVAEHEKLILLAQLKPEKDSDEAVTYSLGKFGQRALDFYSIHVTKESTHPVKPLAQIAGNRYASTPVGKALSDACMGTIASFLSKYQDIIIEHQKVVKGNQKRLESLRELAGKENLEYPSVTLPPQPHTKEGVDAYNEVIARVRMWVNLNLWQKLKLSRDDAKPLLRLKGFPSFPLVERQANEVDWWDMVCNVKKLINEKKEDGKVFWQNLAGYKRQEALRPYLSSEEDRKKGKKFARYQLGDLLLHLEKKHGEDWGKVYDEAWERIDKKVEGLSKHIKLEEERRSEDAQSKAALTDWLRAKASFVIEGLKEADKDEFCRCELKLQKWYGDLRGKPFAIEAENSILDISGFSKQYNCAFIWQKDGVKKLNLYLIINYFKGGKLRFKKIKPEAFEANRFYTVINKKSGEIVPMEVNFNFDDPNLIILPLAFGKRQGREFIWNDLLSLETGSLKLANGRVIEKTLYNRRTRQDEPALFVALTFERREVLDSSNIKPMNLIGVDRGENIPAVIALTDPEGCPLSRFKDSLGNPTHILRIGESYKEKQRTIQAKKEVEQRRAGGYSRKYASKAKNLADDMVRNTARDLLYYAVTQDAMLIFENLSRGFGRQGKRTFMAERQYTRMEDWLTAKLAYEGLPSKTYLSKTLAQYTSKTCSNCGFTITSADYDRVLEKLKKTATGWMTTINGKELKVEGQITYYNRYKRQNVVKDLSVELDRLSEESVNNDISSWTKGRSGEALSLLKKRFSHRPVQEKFVCLNCGFETHADEQAALNIARSWLFLRSQEYKKYQTNKTTGNTDKRAFVETWQSFYRKKLKEVWKPAV

SEQ ID NO: 31903 - protein, 978 aa, synthetic construct
  REGION 1..978: note = engineered CasX variant
QEIGRINKIRRRLVKDSNTKKAGKTGPMKTLLVRVMTPDLRERLENLRKKPENIPQPISNTSRANLNKLLTDYTEMKKAILHVYDEEFQKDPVGLMSRVAQPASKKIDQNKLKPEMDEKGNLTTAGFACSQCGQPLFVYKLEQVSEKGKAYTNYFGRCNVAEHEKLILLAQLKPEKDSDEAVTYSLGKFGQRALDFYSIHVTKESTHPVKPLAQIAGNRYASAPVGKALSDACMGTIASFLSKYQDIIIEHQKVVKGNQKRLESLRELAGKENLEYPSVTLPPQPHTKEGVDAYNEVIARVRMWVNLNLWQKLKLSRDDAKPLLRLKGFPSFPLVERQANEVDWWDMVCNVKKLINEKKEDGKVFWQNLAGYKRQEALRPYLSSEEDRKKGKKFARYQLGDLLLHLEKKHGEDWGKVYDEAWERIDKKVEGLSKHIKLEEERRSEDAQSKAALTDWLRAKASFVIEGLKEADKDEFCRCELKLQKWYGDLRGKPFAIEAENSILDISGFSKQYNCAFIWQKDGVKKLNLYLIINYFKGGKLRFKKIKPEAFEANRFYTVINKKSGEIVPMEVNFNFDDPNLIILPLAFGKRQGREFIWNDLLSLETGSLKLANGRVIEKTLYNRRTRQDEPALFVALTFERREVLDSSNIKPMNLIGVDRGENIPAVIALTDPEGCPLSRFKDSLGNPTHILRIGESYKEKQRTIQAKKEVEQRRAGGYSRKYASKAKNLADDMVRNTARDLLYYAVTQDAMLIFENLSRGFGRQGKRTFMAERQYTRMEDWLTAKLAYEGLPSKTYLSKTLAQYTSKTCSNCGFTITSADYDRVLEKLKKTATGWMTTINGKELKVEGQITYYNRYKRQNVVKDLSVELDRLSEESVNNDISSWTKGRSGEALSLLKKRFSHRPVQEKFVCLNCGFETHADEQAALNIARSWLFLRSQEYKKYQTNKTTGNTDKRAFVETWQSFYRKKLKEVWKPAV

SEQ ID NO: 31904 - protein, 978 aa, synthetic construct
  REGION 1..978: note = engineered CasX variant
QEIGRINKIRRRLVKDSNTKKAGKTGPMKTLLVRVMTPDLRERLENLRKKPENIPQPISNTSRANLNKLLTDYTEMKKAILHVYDEEFQKDPVGLMSRVAQPASKKIDQNKLKPEMDEKGNLTTAGFACSQCGQPLFVYKLEQVSEKGKAYTNYFGRCNVAEHEKLILLAQLKPEKDSDEAVTYSLGKFGQRALDFYSIHVTKESTHPVKPLAQIAGNRYASVPVGKALSDACMGTIASFLSKYQDIIIEHQKVVKGNQKRLESLRELAGKENLEYPSVTLPPQPHTKEGVDAYNEVIARVRMWVNLNLWQKLKLSRDDAKPLLRLKGFPSFPLVERQANEVDWWDMVCNVKKLINEKKEDGKVFWQNLAGYKRQEALRPYLSSEEDRKKGKKFARYQLGDLLLHLEKKHGEDWGKVYDEAWERIDKKVEGLSKHIKLEEERRSEDAQSKAALTDWLRAKASFVIEGLKEADKDEFCRCELKLQKWYGDLRGKPFAIEAENSILDISGFSKQYNCAFIWQKDGVKKLNLYLIINYFKGGKLRFKKIKPEAFEANRFYTVINKKSGEIVPMEVNFNFDDPNLIILPLAFGKRQGREFIWNDLLSLETGSLKLANGRVIEKTLYNRRTRQDEPALFVALTFERREVLDSSNIKPMNLIGVDRGENIPAVIALTDPEGCPLSRFKDSLGNPTHILRIGESYKEKQRTIQAKKEVEQRRAGGYSRKYASKAKNLADDMVRNTARDLLYYAVTQDAMLIFENLSRGFGRQGKRTFMAERQYTRMEDWLTAKLAYEGLPSKTYLSKTLAQYTSKTCSNCGFTITSADYDRVLEKLKKTATGWMTTINGKELKVEGQITYYNRYKRQNVVKDLSVELDRLSEESVNNDISSWTKGRSGEALSLLKKRFSHRPVQEKFVCLNCGFETHADEQAALNIARSWLFLRSQEYKKYQTNKTTGNTDKRAFVETWQSFYRKKLKEVWKPAV

SEQ ID NO: 31905 - protein, 978 aa, synthetic construct
  REGION 1..978: note = engineered CasX variant
QEIGRINKIRRRLVKDSNTKKAGKTGPMKTLLVRVMTPDLRERLENLRKKPENIPQPISNTSRANLNKLLTDYTEMKKAILHVYDEEFQKDPVGLMSRVAQPASKKIDQNKLKPEMDEKGNLTTAGFACSQCGQPLFVYKLEQVSEKGKAYTNYFGRCNVAEHEKLIKLAQLKPEKDSDEAVTYSLGKFGQRALDFYSIHVTKESTHPVKPLAQIAGNRYASGPVGKALSDACMGTIASFLSKYQDIIIEHQKVVKGNQKRLESLRELAGKENLEYPSVTLPPQPHTKEGVDAYNEVIARVRMWVNLNLWQKLKLSRDDAKPLLRLKGFPSFPLVERQANEVDWWDMVCNVKKLINEKKEDGKVFWQNLAGYKRQEALRPYLSSEEDRKKGKKFARYQLGDLLLHLEKKHGEDWGKVYDEAWERIDKKVEGLSKHIKLEEERRSEDAQSKAALTDWLRAKASFVIEGLKEADKDEFCRCELKLQKWYGDLRGKPFAIEAENSILDISGFSKQYNCAFIWQKDGVKKLNLYLIINYFKGGKLRFKKIKPEAFEANRFYTVINKKSGEIVPMEVNFNFDDPNLIILPLAFGKRQGREFIWNDLLSLETGSLKLANGRVIEKTLYNRRTRQDEPALFVALTFERREVLDSSNIKPMNLIGVDRGENIPAVIALTDPEGCPLSRFKDSLGNPTHILRIGESYKEKQRTIQAKKEVEQRRAGGYSRKYASKAKNLADDMVRNTARDLLYYAVTQDAMLIFENLSRGFGRQGKRTFMAERQYTRMEDWLTAKLAYEGLPSKTYLSKTLAQYTSKTCSNCGFTITSADYDRVLEKLKKTATGWMTTINGKELKVEGQITYYNRYKRQNVVKDLSVELDRLSEESVNNDISSWTKGRSGEALSLLKKRFSHRPVQEKFVCLNCGFETHADEQAALNIARSWLFLRSQEYKKYQTNKTTGNTDKRAFVETWQSFYRKKLKEVWKPAV

SEQ ID NO: 31906 - protein, 977 aa, synthetic construct
  REGION 1..977: note = engineered CasX variant
QEIGRINKIRRRLVKDSNTKKAGKTGPMKTLLVRVMTPDLRERLENLRKKPENIPQPISNTSRANLNKLLTDYTEMKKAILHVYDEEFQKDPVGLMSRVAQPASKKIDQNKLKPEMDEKGNLTTAGFACSQCGQPLFVYKLEQVSEKGKAYTNYFGRCNVAEHEKLILLAQLKPEKDSDEAVTYSLGKFGQRALDFYSIHVTKESTHPVKPLAQIAGNRYASPVGKALSDACMGTIASFLSKYQDIIIEHQKVVKGNQKRLESLRELAGKENLEYPSVTLPPQPHTKEGVDAYNEVIARVRMWVNLNLWQKLKLSRDDAKPLLRLKGFPSFPLVERQANEVDWWDMVCNVKKLINEKKEDGKVFWQNLAGYKRQEALRPYLSSEEDRKKGKKFARYQLGDLLLHLEKKHGEDWGKVYDEAWERIDKKVEGLSKHIKLEEERRSEDAQSKAALTDWLRAKASFVIEGLKEADKDEFCRCELKLQKWYGDLRGKPFAIEAENSILDISGFSKQYNCAFIWQKDGVKKLNLYLIINYFKGGKLRFKKIKPEAFEANRFYTVINKKSGEIVPMEVNFNFDDPNLIILPLAFGKRQGREFIWNDLLSLETGSLKLANGRVIEKTLYNRRTRQDEPALFVALTFERREVLDSSNIKPMNLIGVDRGENIPAVIALTDPEGCPLSRFKDSLGNPTHILRIGESYKEKQRTIQAKKEVEQRRAGGYSRKYASKAKNLADDMVRNTARDLLYYAVTQDAMLIFENLSRGFGRQGKRTFMAERQYTRMEDWLTAKLAYEGLPSKTYLSKTLAQYTSKTCSNCGFTITSADYDRVLEKLKKTATGWMTTINGKELKVEGQITYYNRYKRQNVVKDLSVELDRLSEESVNNDISSWTKGRSGEALSLLKKRFSHRPVQEKFVCLNCGFETHADEQAALNIARSWLFLRSQEYKKYQTNKTTGNTDKRAFVETWQSFYRKKLKEVWKPAV

SEQ ID NO: 31907 - protein, 978 aa, synthetic construct
  REGION 1..978: note = engineered CasX variant
QEIGRINKIRRRLVKDSNTKKAGKTGPMKTLLVRVMTPDLRERLENLRKKPENIPQPISNTSRANLNKLLTDYTEMKKAILHVYWEEFQKDPVGLMSRVAQPASKKIDQNKLKPEMDEKGNLTTAGFACSQCGQPLFVYKLEQVSEKGKAYTNYFGRCNVAEHEKLIKLAQLKPEKDSDEAVTYSLGKFGQRALDFYSIHVTKESTHPVKPLAQIAGNRYASYPVGKALSDACMGTIASFLSKYQDIIIEHQKVVKGNQKRLESLRELAGKENLEYPSVTLPPQPHTKEGVDAYNEVIARVRMWVNLNLWQKLKLSRDDAKPLLRLKGFPSFPLVERQANEVDWWDMVCNVKKLINEKKEDGKVFWQNLAGYKRQEALRPYLSSEEDRKKGKKFARYQLGDLLLHLEKKHGEDWGKVYDEAWERIDKKVEGLSKHIKLEEERRSEDAQSKAALTDWLRAKASFVIEGLKEADKDEFCRCELKLQKWYGDLRGKPFAIEAENSILDISGFSKQYNCAFIWQKDGVKKLNLYLIINYFKGGKLRFKKIKPEAFEANRFYTVINKKSGEIVPMEVNFNFDDPNLIILPLAFGKRQGREFIWNDLLSLETGSLKLANGRVIEKTLYNRRTRQDEPALFVALTFERREVLDSSNIKPMNLIGVDRGENIPAVIALTDPEGCPLSRFKDSLGNPTHILRIGESYKEKQRTIQAKKEVEQRRAGGYSRKYASKAKNLADDMVRNTARDLLYYAVTQDAMLIFENLSRGFGRQGKRTFMAERQYTRMEDWLTAKLAYEGLPSKTYLSKTLAQYTSKTCSNCGFTITSADYDRVLEKLKKTATGWMTTINGKELKVEGQITYYNRYKRQNVVKDLSVELDRLSEESVNNDISSWTKGRSGEALSLLKKRFSHRPVQEKFVCLNCGFETHADEQAALNIARSWLFLRSQEYKKYQTNKTTGNTDKRAFVETWQSFYRKKLKEVWKPAV

SEQ ID NO: 31908 - protein, 978 aa, synthetic construct
  REGION 1..978: note = engineered CasX variant
QEIGRINKIRRRLVKDSNTKKAGKTGPMKTLLVRVMTPDLRERLENLRKKPENIPQPISNTSRANLNKLLTDYTEMKKAILHVYWEEFQKDPVGLMSRVAQPASKKIDQNKLKPEMDEKGNLTTAGFACSQCGQPLFVYKLEQVSEKGKAYTNYFGRCNVAEHEKLIKLAQLKPEKDSDEAVTYSLGKFGQRALDFYSIHVTKESTHPVKPLAQIAGNRYASHPVGKALSDACMGTIASFLSKYQDIIIEHQKVVKGNQKRLESLRELAGKENLEYPSVTLPPQPHTKEGVDAYNEVIARVRMWVNLNLWQKLKLSRDDAKPLLRLKGFPSFPLVERQANEVDWWDMVCNVKKLINEKKEDGKVFWQNLAGYKRQEALRPYLSSEEDRKKGKKFARYQLGDLLLHLEKKHGEDWGKVYDEAWERIDKKVEGLSKHIKLEEERRSEDAQSKAALTDWLRAKASFVIEGLKEADKDEFCRCELKLQKWYGDLRGKPFAIEAENSILDISGFSKQYNCAFIWQKDGVKKLNLYLIINYFKGGKLRFKKIKPEAFEANRFYTVINKKSGEIVPMEVNFNFDDPNLIILPLAFGKRQGREFIWNDLLSLETGSLKLANGRVIEKTLYNRRTRQDEPALFVALTFERREVLDSSNIKPMNLIGVDRGENIPAVIALTDPEGCPLSRFKDSLGNPTHILRIGESYKEKQRTIQAKKEVEQRRAGGYSRKYASKAKNLADDMVRNTARDLLYYAVTQDAMLIFENLSRGFGRQGKRTFMAERQYTRMEDWLTAKLAYEGLPSKTYLSKTLAQYTSKTCSNCGFTITSADYDRVLEKLKKTATGWMTTINGKELKVEGQITYYNRYKRQNVVKDLSVELDRLSEESVNNDISSWTKGRSGEALSLLKKRFSHRPVQEKFVCLNCGFETHADEQAALNIARSWLFLRSQEYKKYQTNKTTGNTDKRAFVETWQSFYRKKLKEVWKPAV

SEQ ID NO: 31909 - protein, 978 aa, synthetic construct
  REGION 1..978: note = engineered CasX variant
QEIGRINKIRRRLVKDSNTKKAGKTGPMKTLLVRVMTPDLRERLENLRKKPENIPQPISNTSRANLNKLLTDYTEMKKAILHVYWEEFQKDPVGLMSRVAQPASKKIDQNKLKPEMDEKGNLTTAGFACSQCGQPLFVYKLEQVSEKGKAYTNYFGRCNVAEHEKLIKLAQLKPEKDSDEAVTYSLGKFGQRALDFYSIHVTKESTHPVKPLAQIAGNRYASTPVGKALSDACMGTIASFLSKYQDIIIEHQKVVKGNQKRLESLRELAGKENLEYPSVTLPPQPHTKEGVDAYNEVIARVRMWVNLNLWQKLKLSRDDAKPLLRLKGFPSFPLVERQANEVDWWDMVCNVKKLINEKKEDGKVFWQNLAGYKRQEALRPYLSSEEDRKKGKKFARYQLGDLLLHLEKKHGEDWGKVYDEAWERIDKKVEGLSKHIKLEEERRSEDAQSKAALTDWLRAKASFVIEGLKEADKDEFCRCELKLQKWYGDLRGKPFAIEAENSILDISGFSKQYNCAFIWQKDGVKKLNLYLIINYFKGGKLRFKKIKPEAFEANRFYTVINKKSGEIVPMEVNFNFDDPNLIILPLAFGKRQGREFIWNDLLSLETGSLKLANGRVIEKTLYNRRTRQDEPALFVALTFERREVLDSSNIKPMNLIGVDRGENIPAVIALTDPEGCPLSRFKDSLGNPTHILRIGESYKEKQRTIQAKKEVEQRRAGGYSRKYASKAKNLADDMVRNTARDLLYYAVTQDAMLIFENLSRGFGRQGKRTFMAERQYTRMEDWLTAKLAYEGLPSKTYLSKTLAQYTSKTCSNCGFTITSADYDRVLEKLKKTATGWMTTINGKELKVEGQITYYNRYKRQNVVKDLSVELDRLSEESVNNDISSWTKGRSGEALSLLKKRFSHRPVQEKFVCLNCGFETHADEQAALNIARSWLFLRSQEYKKYQTNKTTGNTDKRAFVETWQSFYRKKLKEVWKPAV

SEQ ID NO: 31910 - protein, 978 aa, synthetic construct
  REGION 1..978: note = engineered CasX variant
QEIGRINKIRRRLVKDSNTKKAGKTGPMKTLLVRVMTPDLRERLENLRKKPENIPQPISNTSRANLNKLLTDYTEMKKAILHVYWEEFQKDPVGLMSRVAQPASKKIDQNKLKPEMDEKGNLTTAGFACSQCGQPLFVYKLEQVSEKGKAYTNYFGRCNVAEHEKLIKLAQLKPEKDSDEAVTYSLGKFGQRALDFYSIHVTKESTHPVKPLAQIAGNRYASAPVGKALSDACMGTIASFLSKYQDIIIEHQKVVKGNQKRLESLRELAGKENLEYPSVTLPPQPHTKEGVDAYNEVIARVRMWVNLNLWQKLKLSRDDAKPLLRLKGFPSFPLVERQANEVDWWDMVCNVKKLINEKKEDGKVFWQNLAGYKRQEALRPYLSSEEDRKKGKKFARYQLGDLLLHLEKKHGEDWGKVYDEAWERIDKKVEGLSKHIKLEEERRSEDAQSKAALTDWLRAKASFVIEGLKEADKDEFCRCELKLQKWYGDLRGKPFAIEAENSILDISGFSKQYNCAFIWQKDGVKKLNLYLIINYFKGGKLRFKKIKPEAFEANRFYTVINKKSGEIVPMEVNFNFDDPNLIILPLAFGKRQGREFIWNDLLSLETGSLKLANGRVIEKTLYNRRTRQDEPALFVALTFERREVLDSSNIKPMNLIGVDRGENIPAVIALTDPEGCPLSRFKDSLGNPTHILRIGESYKEKQRTIQAKKEVEQRRAGGYSRKYASKAKNLADDMVRNTARDLLYYAVTQDAMLIFENLSRGFGRQGKRTFMAERQYTRMEDWLTAKLAYEGLPSKTYLSKTLAQYTSKTCSNCGFTITSADYDRVLEKLKKTATGWMTTINGKELKVEGQITYYNRYKRQNVVKDLSVELDRLSEESVNNDISSWTKGRSGEALSLLKKRFSHRPVQEKFVCLNCGFETHADEQAALNIARSWLFLRSQEYKKYQTNKTTGNTDKRAFVETWQSFYRKKLKEVWKPAV

SEQ ID NO: 31911 - protein, 978 aa, synthetic construct
  REGION 1..978: note = engineered CasX variant
QEIGRINKIRRRLVKDSNTKKAGKTGPMKTLLVRVMTPDLRERLENLRKKPENIPQPISNTSRANLNKLLTDYTEMKKAILHVYWEEFQKDPVGLMSRVAQPASKKIDQNKLKPEMDEKGNLTTAGFACSQCGQPLFVYKLEQVSEKGKAYTNYFGRCNVAEHEKLIKLAQLKPEKDSDEAVTYSLGKFGQRALDFYSIHVTKESTHPVKPLAQIAGNRYASVPVGKALSDACMGTIASFLSKYQDIIIEHQKVVKGNQKRLESLRELAGKENLEYPSVTLPPQPHTKEGVDAYNEVIARVRMWVNLNLWQKLKLSRDDAKPLLRLKGFPSFPLVERQANEVDWWDMVCNVKKLINEKKEDGKVFWQNLAGYKRQEALRPYLSSEEDRKKGKKFARYQLGDLLLHLEKKHGEDWGKVYDEAWERIDKKVEGLSKHIKLEEERRSEDAQSKAALTDWLRAKASFVIEGLKEADKDEFCRCELKLQKWYGDLRGKPFAIEAENSILDISGFSKQYNCAFIWQKDGVKKLNLYLIINYFKGGKLRFKKIKPEAFEANRFYTVINKKSGEIVPMEVNFNFDDPNLIILPLAFGKRQGREFIWNDLLSLETGSLKLANGRVIEKTLYNRRTRQDEPALFVALTFERREVLDSSNIKPMNLIGVDRGENIPAVIALTDPEGCPLSRFKDSLGNPTHILRIGESYKEKQRTIQAKKEVEQRRAGGYSRKYASKAKNLADDMVRNTARDLLYYAVTQDAMLIFENLSRGFGRQGKRTFMAERQYTRMEDWLTAKLAYEGLPSKTYLSKTLAQYTSKTCSNCGFTITSADYDRVLEKLKKTATGWMTTINGKELKVEGQITYYNRYKRQNVVKDLSVELDRLSEESVNNDISSWTKGRSGEALSLLKKRFSHRPVQEKFVCLNCGFETHADEQAALNIARSWLFLRSQEYKKYQTNKTTGNTDKRAFVETWQSFYRKKLKEVWKPAV

SEQ ID NO: 31912 - protein, 979 aa, synthetic construct
  REGION 1..979: note = engineered CasX variant
QEIGRINKIRRRLVKDSNTKKAGKTGPMKTLLVRVMTPDLRERLENLRKKPENIPQPISNTSRANLNKLLTDYTEMKKAILHVYWEEFQKDPVGLMSRVAQPASKKIDQNKLKPEMDEKGNLTTAGFACSQCGQPLFVYKLEQVSEKGKAYTNYFGRCNVAEHEKLIKKLAQLKPEKDSDEAVTYSLGKFGQRALDFYSIHVTKESTHPVKPLAQIAGNRYASGPVGKALSDACMGTIASFLSKYQDIIIEHQKVVKGNQKRLESLRELAGKENLEYPSVTLPPQPHTKEGVDAYNEVIARVRMWVNLNLWQKLKLSRDDAKPLLRLKGFPSFPLVERQANEVDWWDMVCNVKKLINEKKEDGKVFWQNLAGYKRQEALRPYLSSEEDRKKGKKFARYQLGDLLLHLEKKHGEDWGKVYDEAWERIDKKVEGLSKHIKLEEERRSEDAQSKAALTDWLRAKASFVIEGLKEADKDEFCRCELKLQKWYGDLRGKPFAIEAENSILDISGFSKQYNCAFIWQKDGVKKLNLYLIINYFKGGKLRFKKIKPEAFEANRFYTVINKKSGEIVPMEVNFNFDDPNLIILPLAFGKRQGREFIWNDLLSLETGSLKLANGRVIEKTLYNRRTRQDEPALFVALTFERREVLDSSNIKPMNLIGVDRGENIPAVIALTDPEGCPLSRFKDSLGNPTHILRIGESYKEKQRTIQAKKEVEQRRAGGYSRKYASKAKNLADDMVRNTARDLLYYAVTQDAMLIFENLSRGFGRQGKRTFMAERQYTRMEDWLTAKLAYEGLPSKTYLSKTLAQYTSKTCSNCGFTITSADYDRVLEKLKKTATGWMTTINGKELKVEGQITYYNRYKRQNVVKDLSVELDRLSEESVNNDISSWTKGRSGEALSLLKKRFSHRPVQEKFVCLNCGFETHADEQAALNIARSWLFLRSQEYKKYQTNKTTGNTDKRAFVETWQSFYRKKLKEVWKPAV

SEQ ID NO: 31913 - protein, 977 aa, synthetic construct
  REGION 1..977: note = engineered CasX variant
QEIGRINKIRRRLVKDSNTKKAGKTGPMKTLLVRVMTPDLRERLENLRKKPENIPQPISNTSRANLNKLLTDYTEMKKAILHVYWEEFQKDPVGLMSRVAQPASKKIDQNKLKPEMDEKGNLTTAGFACSQCGQPLFVYKLEQVSEKGKAYTNYFGRCNVAEHEKLIKLAQLKPEKDSDEAVTYSLGKFGQRALDFYSIHVTKESTHPVKPLAQIAGNRYASPVGKALSDACMGTIASFLSKYQDIIIEHQKVVKGNQKRLESLRELAGKENLEYPSVTLPPQPHTKEGVDAYNEVIARVRMWVNLNLWQKLKLSRDDAKPLLRLKGFPSFPLVERQANEVDWWDMVCNVKKLINEKKEDGKVFWQNLAGYKRQEALRPYLSSEEDRKKGKKFARYQLGDLLLHLEKKHGEDWGKVYDEAWERIDKKVEGLSKHIKLEEERRSEDAQSKAALTDWLRAKASFVIEGLKEADKDEFCRCELKLQKWYGDLRGKPFAIEAENSILDISGFSKQYNCAFIWQKDGVKKLNLYLIINYFKGGKLRFKKIKPEAFEANRFYTVINKKSGEIVPMEVNFNFDDPNLIILPLAFGKRQGREFIWNDLLSLETGSLKLANGRVIEKTLYNRRTRQDEPALFVALTFERREVLDSSNIKPMNLIGVDRGENIPAVIALTDPEGCPLSRFKDSLGNPTHILRIGESYKEKQRTIQAKKEVEQRRAGGYSRKYASKAKNLADDMVRNTARDLLYYAVTQDAMLIFENLSRGFGRQGKRTFMAERQYTRMEDWLTAKLAYEGLPSKTYLSKTLAQYTSKTCSNCGFTITSADYDRVLEKLKKTATGWMTTINGKELKVEGQITYYNRYKRQNVVKDLSVELDRLSEESVNNDISSWTKGRSGEALSLLKKRFSHRPVQEKFVCLNCGFETHADEQAALNIARSWLFLRSQEYKKYQTNKTTGNTDKRAFVETWQSFYRKKLKEVWKPAV

SEQ ID NO: 31914 - protein, 978 aa, synthetic construct
  REGION 1..978: note = engineered CasX variant
QEIGRINKIRRRLVKDSNTKKAGKTGPMKTLLVRVMTPDLRERLENLRKKPENIPQPISNTSRANLNKLLTDYTEMKKAILHVYWEEFQKDPVGLMSRVAQPASKKIDQNKLKPEMDEKGNLTTAGFACSQCGQPLFVYKLEQVSEKGKAYTNYFGRCNVAEHEKLILLYQLKPEKDSDEAVTYSLGKFGQRALDFYSIHVTKESTHPVKPLAQIAGNRYASYPVGKALSDACMGTIASFLSKYQDIIIEHQKVVKGNQKRLESLRELAGKENLEYPSVTLPPQPHTKEGVDAYNEVIARVRMWVNLNLWQKLKLSRDDAKPLLRLKGFPSFPLVERQANEVDWWDMVCNVKKLINEKKEDGKVFWQNLAGYKRQEALRPYLSSEEDRKKGKKFARYQLGDLLLHLEKKHGEDWGKVYDEAWERIDKKVEGLSKHIKLEEERRSEDAQSKAALTDWLRAKASFVIEGLKEADKDEFCRCELKLQKWYGDLRGKPFAIEAENSILDISGFSKQYNCAFIWQKDGVKKLNLYLIINYFKGGKLRFKKIKPEAFEANRFYTVINKKSGEIVPMEVNFNFDDPNLIILPLAFGKRQGREFIWNDLLSLETGSLKLANGRVIEKTLYNRRTRQDEPALFVALTFERREVLDSSNIKPMNLIGVDRGENIPAVIALTDPEGCPLSRFKDSLGNPTHILRIGESYKEKQRTIQAKKEVEQRRAGGYSRKYASKAKNLADDMVRNTARDLLYYAVTQDAMLIFENLSRGFGRQGKRTFMAERQYTRMEDWLTAKLAYEGLPSKTYLSKTLAQYTSKTCSNCGFTITSADYDRVLEKLKKTATGWMTTINGKELKVEGQITYYNRYKRQNVVKDLSVELDRLSEESVNNDISSWTKGRSGEALSLLKKRFSHRPVQEKFVCLNCGFETHADEQAALNIARSWLFLRSQEYKKYQTNKTTGNTDKRAFVETWQSFYRKKLKEVWKPAV

SEQ ID NO: 31915 - protein, 978 aa, synthetic construct
  REGION 1..978: note = engineered CasX variant
QEIGRINKIRRRLVKDSNTKKAGKTGPMKTLLVRVMTPDLRERLENLRKKPENIPQPISNTSRANLNKLLTDYTEMKKAILHVYWEEFQKDPVGLMSRVAQPASKKIDQNKLKPEMDEKGNLTTAGFACSQCGQPLFVYKLEQVSEKGKAYTNYFGRCNVAEHEKLILLYQLKPEKDSDEAVTYSLGKFGQRALDFYSIHVTKESTHPVKPLAQIAGNRYASHPVGKALSDACMGTIASFLSKYQDIIIEHQKVVKGNQKRLESLRELAGKENLEYPSVTLPPQPHTKEGVDAYNEVIARVRMWVNLNLWQKLKLSRDDAKPLLRLKGFPSFPLVERQANEVDWWDMVCNVKKLINEKKEDGKVFWQNLAGYKRQEALRPYLSSEEDRKKGKKFARYQLGDLLLHLEKKHGEDWGKVYDEAWERIDKKVEGLSKHIKLEEERRSEDAQSKAALTDWLRAKASFVIEGLKEADKDEFCRCELKLQKWYGDLRGKPFAIEAENSILDISGFSKQYNCAFIWQKDGVKKLNLYLIINYFKGGKLRFKKIKPEAFEANRFYTVINKKSGEIVPMEVNFNFDDPNLIILPLAFGKRQGREFIWNDLLSLETGSLKLANGRVIEKTLYNRRTRQDEPALFVALTFERREVLDSSNIKPMNLIGVDRGENIPAVIALTDPEGCPLSRFKDSLGNPTHILRIGESYKEKQRTIQAKKEVEQRRAGGYSRKYASKAKNLADDMVRNTARDLLYYAVTQDAMLIFENLSRGFGRQGKRTFMAERQYTRMEDWLTAKLAYEGLPSKTYLSKTLAQYTSKTCSNCGFTITSADYDRVLEKLKKTATGWMTTINGKELKVEGQITYYNRYKRQNVVKDLSVELDRLSEESVNNDISSWTKGRSGEALSLLKKRFSHRPVQEKFVCLNCGFETHADEQAALNIARSWLFLRSQEYKKYQTNKTTGNTDKRAFVETWQSFYRKKLKEVWKPAV

SEQ ID NO: 31916 - protein, 978 aa, synthetic construct
  REGION 1..978: note = engineered CasX variant
QEIGRINKIRRRLVKDSNTKKAGKTGPMKTLLVRVMTPDLRERLENLRKKPENIPQPISNTSRANLNKLLTDYTEMKKAILHVYWEEFQKDPVGLMSRVAQPASKKIDQNKLKPEMDEKGNLTTAGFACSQCGQPLFVYKLEQVSEKGKAYTNYFGRCNVAEHEKLILLYQLKPEKDSDEAVTYSLGKFGQRALDFYSIHVTKESTHPVKPLAQIAGNRYASSPVGKALSDACMGTIASFLSKYQDIIIEHQKVVKGNQKRLESLRELAGKENLEYPSVTLPPQPHTKEGVDAYNEVIARVRMWVNLNLWQKLKLSRDDAKPLLRLKGFPSFPLVERQANEVDWWDMVCNVKKLINEKKEDGKVFWQNLAGYKRQEALRPYLSSEEDRKKGKKFARYQLGDLLLHLEKKHGEDWGKVYDEAWERIDKKVEGLSKHIKLEEERRSEDAQSKAALTDWLRAKASFVIEGLKEADKDEFCRCELKLQKWYGDLRGKPFAIEAENSILDISGFSKQYNCAFIWQKDGVKKLNLYLIINYFKGGKLRFKKIKPEAFEANRFYTVINKKSGEIVPMEVNFNFDDPNLIILPLAFGKRQGREFIWNDLLSLETGSLKLANGRVIEKTLYNRRTRQDEPALFVALTFERREVLDSSNIKPMNLIGVDRGENIPAVIALTDPEGCPLSRFKDSLGNPTHILRIGESYKEKQRTIQAKKEVEQRRAGGYSRKYASKAKNLADDMVRNTARDLLYYAVTQDAMLIFENLSRGFGRQGKRTFMAERQYTRMEDWLTAKLAYEGLPSKTYLSKTLAQYTSKTCSNCGFTITSADYDRVLEKLKKTATGWMTTINGKELKVEGQITYYNRYKRQNVVKDLSVELDRLSEESVNNDISSWTKGRSGEALSLLKKRFSHRPVQEKFVCLNCGFETHADEQAALNIARSWLFLRSQEYKKYQTNKTTGNTDKRAFVETWQSFYRKKLKEVWKPAV

SEQ ID NO: 31917 - protein, 978 aa, synthetic construct
  REGION 1..978: note = engineered CasX variant
QEIGRINKIRRRLVKDSNTKKAGKTGPMKTLLVRVMTPDLRERLENLRKKPENIPQPISNTSRANLNKLLTDYTEMKKAILHVYWEEFQKDPVGLMSRVAQPASKKIDQNKLKPEMDEKGNLTTAGFACSQCGQPLFVYKLEQVSEKGKAYTNYFGRCNVAEHEKLILLYQLKPEKDSDEAVTYSLGKFGQRALDFYSIHVTKESTHPVKPLAQIAGNRYASTPVGKALSDACMGTIASFLSKYQDIIIEHQKVVKGNQKRLESLRELAGKENLEYPSVTLPPQPHTKEGVDAYNEVIARVRMWVNLNLWQKLKLSRDDAKPLLRLKGFPSFPLVERQANEVDWWDMVCNVKKLINEKKEDGKVFWQNLAGYKRQEALRPYLSSEEDRKKGKKFARYQLGDLLLHLEKKHGEDWGKVYDEAWERIDKKVEGLSKHIKLEEERRSEDAQSKAALTDWLRAKASFVIEGLKEADKDEFCRCELKLQKWYGDLRGKPFAIEAENSILDISGFSKQYNCAFIWQKDGVKKLNLYLIINYFKGGKLRFKKIKPEAFEANRFYTVINKKSGEIVPMEVNFNFDDPNLIILPLAFGKRQGREFIWNDLLSLETGSLKLANGRVIEKTLYNRRTRQDEPALFVALTFERREVLDSSNIKPMNLIGVDRGENIPAVIALTDPEGCPLSRFKDSLGNPTHILRIGESYKEKQRTIQAKKEVEQRRAGGYSRKYASKAKNLADDMVRNTARDLLYYAVTQDAMLIFENLSRGFGRQGKRTFMAERQYTRMEDWLTAKLAYEGLPSKTYLSKTLAQYTSKTCSNCGFTITSADYDRVLEKLKKTATGWMTTINGKELKVEGQITYYNRYKRQNVVKDLSVELDRLSEESVNNDISSWTKGRSGEALSLLKKRFSHRPVQEKFVCLNCGFETHADEQAALNIARSWLFLRSQEYKKYQTNKTTGNTDKRAFVETWQSFYRKKLKEVWKPAV

SEQ ID NO: 31918 - protein, 978 aa, synthetic construct
  REGION 1..978: note = engineered CasX variant
QEIGRINKIRRRLVKDSNTKKAGKTGPMKTLLVRVMTPDLRERLENLRKKPENIPQPISNTSRANLNKLLTDYTEMKKAILHVYWEEFQKDPVGLMSRVAQPASKKIDQNKLKPEMDEKGNLTTAGFACSQCGQPLFVYKLEQVSEKGKAYTNYFGRCNVAEHEKLILLYQLKPEKDSDEAVTYSLGKFGQRALDFYSIHVTKESTHPVKPLAQIAGNRYASAPVGKALSDACMGTIASFLSKYQDIIIEHQKVVKGNQKRLESLRELAGKENLEYPSVTLPPQPHTKEGVDAYNEVIARVRMWVNLNLWQKLKLSRDDAKPLLRLKGFPSFPLVERQANEVDWWDMVCNVKKLINEKKEDGKVFWQNLAGYKRQEALRPYLSSEEDRKKGKKFARYQLGDLLLHLEKKHGEDWGKVYDEAWERIDKKVEGLSKHIKLEEERRSEDAQSKAALTDWLRAKASFVIEGLKEADKDEFCRCELKLQKWYGDLRGKPFAIEAENSILDISGFSKQYNCAFIWQKDGVKKLNLYLIINYFKGGKLRFKKIKPEAFEANRFYTVINKKSGEIVPMEVNFNFDDPNLIILPLAFGKRQGREFIWNDLLSLETGSLKLANGRVIEKTLYNRRTRQDEPALFVALTFERREVLDSSNIKPMNLIGVDRGENIPAVIALTDPEGCPLSRFKDSLGNPTHILRIGESYKEKQRTIQAKKEVEQRRAGGYSRKYASKAKNLADDMVRNTARDLLYYAVTQDAMLIFENLSRGFGRQGKRTFMAERQYTRMEDWLTAKLAYEGLPSKTYLSKTLAQYTSKTCSNCGFTITSADYDRVLEKLKKTATGWMTTINGKELKVEGQITYYNRYKRQNVVKDLSVELDRLSEESVNNDISSWTKGRSGEALSLLKKRFSHRPVQEKFVCLNCGFETHADEQAALNIARSWLFLRSQEYKKYQTNKTTGNTDKRAFVETWQSFYRKKLKEVWKPAV

SEQ ID NO: 31919 - protein, 978 aa, synthetic construct
  REGION 1..978: note = engineered CasX variant
QEIGRINKIRRRLVKDSNTKKAGKTGPMKTLLVRVMTPDLRERLENLRKKPENIPQPISNTSRANLNKLLTDYTEMKKAILHVYWEEFQKDPVGLMSRVAQPASKKIDQNKLKPEMDEKGNLTTAGFACSQCGQPLFVYKLEQVSEKGKAYTNYFGRCNVAEHEKLILLYQLKPEKDSDEAVTYSLGKFGQRALDFYSIHVTKESTHPVKPLAQIAGNRYASVPVGKALSDACMGTIASFLSKYQDIIIEHQKVVKGNQKRLESLRELAGKENLEYPSVTLPPQPHTKEGVDAYNEVIARVRMWVNLNLWQKLKLSRDDAKPLLRLKGFPSFPLVERQANEVDWWDMVCNVKKLINEKKEDGKVFWQNLAGYKRQEALRPYLSSEEDRKKGKKFARYQLGDLLLHLEKKHGEDWGKVYDEAWERIDKKVEGLSKHIKLEEERRSEDAQSKAALTDWLRAKASFVIEGLKEADKDEFCRCELKLQKWYGDLRGKPFAIEAENSILDISGFSKQYNCAFIWQKDGVKKLNLYLIINYFKGGKLRFKKIKPEAFEANRFYTVINKKSGEIVPMEVNFNFDDPNLIILPLAFGKRQGREFIWNDLLSLETGSLKLANGRVIEKTLYNRRTRQDEPALFVALTFERREVLDSSNIKPMNLIGVDRGENIPAVIALTDPEGCPLSRFKDSLGNPTHILRIGESYKEKQRTIQAKKEVEQRRAGGYSRKYASKAKNLADDMVRNTARDLLYYAVTQDAMLIFENLSRGFGRQGKRTFMAERQYTRMEDWLTAKLAYEGLPSKTYLSKTLAQYTSKTCSNCGFTITSADYDRVLEKLKKTATGWMTTINGKELKVEGQITYYNRYKRQNVVKDLSVELDRLSEESVNNDISSWTKGRSGEALSLLKKRFSHRPVQEKFVCLNCGFETHADEQAALNIARSWLFLRSQEYKKYQTNKTTGNTDKRAFVETWQSFYRKKLKEVWKPAV

SEQ ID NO: 31920 - protein, 978 aa, synthetic construct
  REGION 1..978: note = engineered CasX variant
QEIGRINKIRRRLVKDSNTKKAGKTGPMKTLLVRVMTPDLRERLENLRKKPENIPQPISNTSRANLNKLLTDYTEMKKAILHVYWEEFQKDPVGLMSRVAQPASKKIDQNKLKPEMDEKGNLTTAGFACSQCGQPLFVYKLEQVSEKGKAYTNYFGRCNVAEHEKLIKLYQLKPEKDSDEAVTYSLGKFGQRALDFYSIHVTKESTHPVKPLAQIAGNRYASGPVGKALSDACMGTIASFLSKYQDIIIEHQKVVKGNQKRLESLRELAGKENLEYPSVTLPPQPHTKEGVDAYNEVIARVRMWVNLNLWQKLKLSRDDAKPLLRLKGFPSFPLVERQANEVDWWDMVCNVKKLINEKKEDGKVFWQNLAGYKRQEALRPYLSSEEDRKKGKKFARYQLGDLLLHLEKKHGEDWGKVYDEAWERIDKKVEGLSKHIKLEEERRSEDAQSKAALTDWLRAKASFVIEGLKEADKDEFCRCELKLQKWYGDLRGKPFAIEAENSILDISGFSKQYNCAFIWQKDGVKKLNLYLIINYFKGGKLRFKKIKPEAFEANRFYTVINKKSGEIVPMEVNFNFDDPNLIILPLAFGKRQGREFIWNDLLSLETGSLKLANGRVIEKTLYNRRTRQDEPALFVALTFERREVLDSSNIKPMNLIGVDRGENIPAVIALTDPEGCPLSRFKDSLGNPTHILRIGESYKEKQRTIQAKKEVEQRRAGGYSRKYASKAKNLADDMVRNTARDLLYYAVTQDAMLIFENLSRGFGRQGKRTFMAERQYTRMEDWLTAKLAYEGLPSKTYLSKTLAQYTSKTCSNCGFTITSADYDRVLEKLKKTATGWMTTINGKELKVEGQITYYNRYKRQNVVKDLSVELDRLSEESVNNDISSWTKGRSGEALSLLKKRFSHRPVQEKFVCLNCGFETHADEQAALNIARSWLFLRSQEYKKYQTNKTTGNTDKRAFVETWQSFYRKKLKEVWKPAV

SEQ ID NO: 31921 - protein, 977 aa, synthetic construct
  REGION 1..977: note = engineered CasX variant
QEIGRINKIRRRLVKDSNTKKAGKTGPMKTLLVRVMTPDLRERLENLRKKPENIPQPISNTSRANLNKLLTDYTEMKKAILHVYWEEFQKDPVGLMSRVAQPASKKIDQNKLKPEMDEKGNLTTAGFACSQCGQPLFVYKLEQVSEKGKAYTNYFGRCNVAEHEKLILLYQLKPEKDSDEAVTYSLGKFGQRALDFYSIHVTKESTHPVKPLAQIAGNRYASPVGKALSDACMGTIASFLSKYQDIIIEHQKVVKGNQKRLESLRELAGKENLEYPSVTLPPQPHTKEGVDAYNEVIARVRMWVNLNLWQKLKLSRDDAKPLLRLKGFPSFPLVERQANEVDWWDMVCNVKKLINEKKEDGKVFWQNLAGYKRQEALRPYLSSEEDRKKGKKFARYQLGDLLLHLEKKHGEDWGKVYDEAWERIDKKVEGLSKHIKLEEERRSEDAQSKAALTDWLRAKASFVIEGLKEADKDEFCRCELKLQKWYGDLRGKPFAIEAENSILDISGFSKQYNCAFIWQKDGVKKLNLYLIINYFKGGKLRFKKIKPEAFEANRFYTVINKKSGEIVPMEVNFNFDDPNLIILPLAFGKRQGREFIWNDLLSLETGSLKLANGRVIEKTLYNRRTRQDEPALFVALTFERREVLDSSNIKPMNLIGVDRGENIPAVIALTDPEGCPLSRFKDSLGNPTHILRIGESYKEKQRTIQAKKEVEQRRAGGYSRKYASKAKNLADDMVRNTARDLLYYAVTQDAMLIFENLSRGFGRQGKRTFMAERQYTRMEDWLTAKLAYEGLPSKTYLSKTLAQYTSKTCSNCGFTITSADYDRVLEKLKKTATGWMTTINGKELKVEGQITYYNRYKRQNVVKDLSVELDRLSEESVNNDISSWTKGRSGEALSLLKKRFSHRPVQEKFVCLNCGFETHADEQAALNIARSWLFLRSQEYKKYQTNKTTGNTDKRAFVETWQSFYRKKLKEVWKPAV

SEQ ID NO: 31922 - protein, 978 aa, synthetic construct
  REGION 1..978: note = engineered CasX variant
QEIGRINKIRRRLVKDSNTKKAGKTGPMKTLLVRVMTPDLRERLENLRKKPENIPQPISNTSRANLNKLLTDYTEMKKAILHVYWEEFQKDPVGLMSRVAQPASKKIDQNKLKPEMDEKGNLTTAGFACSQCGQPLFVYKLEQVSEKGKAYTNYFGRCNVAEHEKLILLSQLKPEKDSDEAVTYSLGKFGQRALDFYSIHVTKESTHPVKPLAQIAGNRYASYPVGKALSDACMGTIASFLSKYQDIIIEHQKVVKGNQKRLESLRELAGKENLEYPSVTLPPQPHTKEGVDAYNEVIARVRMWVNLNLWQKLKLSRDDAKPLLRLKGFPSFPLVERQANEVDWWDMVCNVKKLINEKKEDGKVFWQNLAGYKRQEALRPYLSSEEDRKKGKKFARYQLGDLLLHLEKKHGEDWGKVYDEAWERIDKKVEGLSKHIKLEEERRSEDAQSKAALTDWLRAKASFVIEGLKEADKDEFCRCELKLQKWYGDLRGKPFAIEAENSILDISGFSKQYNCAFIWQKDGVKKLNLYLIINYFKGGKLRFKKIKPEAFEANRFYTVINKKSGEIVPMEVNFNFDDPNLIILPLAFGKRQGREFIWNDLLSLETGSLKLANGRVIEKTLYNRRTRQDEPALFVALTFERREVLDSSNIKPMNLIGVDRGENIPAVIALTDPEGCPLSRFKDSLGNPTHILRIGESYKEKQRTIQAKKEVEQRRAGGYSRKYASKAKNLADDMVRNTARDLLYYAVTQDAMLIFENLSRGFGRQGKRTFMAERQYTRMEDWLTAKLAYEGLPSKTYLSKTLAQYTSKTCSNCGFTITSADYDRVLEKLKKTATGWMTTINGKELKVEGQITYYNRYKRQNVVKDLSVELDRLSEESVNNDISSWTKGRSGEALSLLKKRFSHRPVQEKFVCLNCGFETHADEQAALNIARSWLFLRSQEYKKYQTNKTTGNTDKRAFVETWQSFYRKKLKEVWKPAV

SEQ ID NO: 31923 - protein, 978 aa, synthetic construct
  REGION 1..978: note = engineered CasX variant
QEIGRINKIRRRLVKDSNTKKAGKTGPMKTLLVRVMTPDLRERLENLRKKPENIPQPISNTSRANLNKLLTDYTEMKKAILHVYWEEFQKDPVGLMSRVAQPASKKIDQNKLKPEMDEKGNLTTAGFACSQCGQPLFVYKLEQVSEKGKAYTNYFGRCNVAEHEKLILLSQLKPEKDSDEAVTYSLGKFGQRALDFYSIHVTKESTHPVKPLAQIAGNRYASHPVGKALSDACMGTIASFLSKYQDIIIEHQKVVKGNQKRLESLRELAGKENLEYPSVTLPPQPHTKEGVDAYNEVIARVRMWVNLNLWQKLKLSRDDAKPLLRLKGFPSFPLVERQANEVDWWDMVCNVKKLINEKKEDGKVFWQNLAGYKRQEALRPYLSSEEDRKKGKKFARYQLGDLLLHLEKKHGEDWGKVYDEAWERIDKKVEGLSKHIKLEEERRSEDAQSKAALTDWLRAKASFVIEGLKEADKDEFCRCELKLQKWYGDLRGKPFAIEAENSILDISGFSKQYNCAFIWQKDGVKKLNLYLIINYFKGGKLRFKKIKPEAFEANRFYTVINKKSGEIVPMEVNFNFDDPNLIILPLAFGKRQGREFIWNDLLSLETGSLKLANGRVIEKTLYNRRTRQDEPALFVALTFERREVLDSSNIKPMNLIGVDRGENIPAVIALTDPEGCPLSRFKDSLGNPTHILRIGESYKEKQRTIQAKKEVEQRRAGGYSRKYASKAKNLADDMVRNTARDLLYYAVTQDAMLIFENLSRGFGRQGKRTFMAERQYTRMEDWLTAKLAYEGLPSKTYLSKTLAQYTSKTCSNCGFTITSADYDRVLEKLKKTATGWMTTINGKELKVEGQITYYNRYKRQNVVKDLSVELDRLSEESVNNDISSWTKGRSGEALSLLKKRFSHRPVQEKFVCLNCGFETHADEQAALNIARSWLFLRSQEYKKYQTNKTTGNTDKRAFVETWQSFYRKKLKEVWKPAV

SEQ ID NO: 31924 - protein, 978 aa, synthetic construct
  REGION 1..978: note = engineered CasX variant
QEIGRINKIRRRLVKDSNTKKAGKTGPMKTLLVRVMTPDLRERLENLRKKPENIPQPISNTSRANLNKLLTDYTEMKKAILHVYWEEFQKDPVGLMSRVAQPASKKIDQNKLKPEMDEKGNLTTAGFACSQCGQPLFVYKLEQVSEKGKAYTNYFGRCNVAEHEKLILLSQLKPEKDSDEAVTYSLGKFGQRALDFYSIHVTKESTHPVKPLAQIAGNRYASSPVGKALSDACMGTIASFLSKYQDIIIEHQKVVKGNQKRLESLRELAGKENLEYPSVTLPPQPHTKEGVDAYNEVIARVRMWVNLNLWQKLKLSRDDAKPLLRLKGFPSFPLVERQANEVDWWDMVCNVKKLINEKKEDGKVFWQNLAGYKRQEALRPYLSSEEDRKKGKKFARYQLGDLLLHLEKKHGEDWGKVYDEAWERIDKKVEGLSKHIKLEEERRSEDAQSKAALTDWLRAKASFVIEGLKEADKDEFCRCELKLQKWYGDLRGKPFAIEAENSILDISGFSKQYNCAFIWQKDGVKKLNLYLIINYFKGGKLRFKKIKPEAFEANRFYTVINKKSGEIVPMEVNFNFDDPNLIILPLAFGKRQGREFIWNDLLSLETGSLKLANGRVIEKTLYNRRTRQDEPALFVALTFERREVLDSSNIKPMNLIGVDRGENIPAVIALTDPEGCPLSRFKDSLGNPTHILRIGESYKEKQRTIQAKKEVEQRRAGGYSRKYASKAKNLADDMVRNTARDLLYYAVTQDAMLIFENLSRGFGRQGKRTFMAERQYTRMEDWLTAKLAYEGLPSKTYLSKTLAQYTSKTCSNCGFTITSADYDRVLEKLKKTATGWMTTINGKELKVEGQITYYNRYKRQNVVKDLSVELDRLSEESVNNDISSWTKGRSGEALSLLKKRFSHRPVQEKFVCLNCGFETHADEQAALNIARSWLFLRSQEYKKYQTNKTTGNTDKRAFVETWQSFYRKKLKEVWKPAV

SEQ ID NO: 31925 - protein, 978 aa, synthetic construct
  REGION 1..978: note = engineered CasX variant
QEIGRINKIRRRLVKDSNTKKAGKTGPMKTLLVRVMTPDLRERLENLRKKPENIPQPISNTSRANLNKLLTDYTEMKKAILHVYWEEFQKDPVGLMSRVAQPASKKIDQNKLKPEMDEKGNLTTAGFACSQCGQPLFVYKLEQVSEKGKAYTNYFGRCNVAEHEKLILLSQLKPEKDSDEAVTYSLGKFGQRALDFYSIHVTKESTHPVKPLAQIAGNRYASTPVGKALSDACMGTIASFLSKYQDIIIEHQKVVKGNQKRLESLRELAGKENLEYPSVTLPPQPHTKEGVDAYNEVIARVRMWVNLNLWQKLKLSRDDAKPLLRLKGFPSFPLVERQANEVDWWDMVCNVKKLINEKKEDGKVFWQNLAGYKRQEALRPYLSSEEDRKKGKKFARYQLGDLLLHLEKKHGEDWGKVYDEAWERIDKKVEGLSKHIKLEEERRSEDAQSKAALTDWLRAKASFVIEGLKEADKDEFCRCELKLQKWYGDLRGKPFAIEAENSILDISGFSKQYNCAFIWQKDGVKKLNLYLIINYFKGGKLRFKKIKPEAFEANRFYTVINKKSGEIVPMEVNFNFDDPNLIILPLAFGKRQGREFIWNDLLSLETGSLKLANGRVIEKTLYNRRTRQDEPALFVALTFERREVLDSSNIKPMNLIGVDRGENIPAVIALTDPEGCPLSRFKDSLGNPTHILRIGESYKEKQRTIQAKKEVEQRRAGGYSRKYASKAKNLADDMVRNTARDLLYYAVTQDAMLIFENLSRGFGRQGKRTFMAERQYTRMEDWLTAKLAYEGLPSKTYLSKTLAQYTSKTCSNCGFTITSADYDRVLEKLKKTATGWMTTINGKELKVEGQITYYNRYKRQNVVKDLSVELDRLSEESVNNDISSWTKGRSGEALSLLKKRFSHRPVQEKFVCLNCGFETHADEQAALNIARSWLFLRSQEYKKYQTNKTTGNTDKRAFVETWQSFYRKKLKEVWKPAV

SEQ ID NO: 31926 - protein, 978 aa, synthetic construct
  REGION 1..978: note = engineered CasX variant
QEIGRINKIRRRLVKDSNTKKAGKTGPMKTLLVRVMTPDLRERLENLRKKPENIPQPISNTSRANLNKLLTDYTEMKKAILHVYWEEFQKDPVGLMSRVAQPASKKIDQNKLKPEMDEKGNLTTAGFACSQCGQPLFVYKLEQVSEKGKAYTNYFGRCNVAEHEKLILLSQLKPEKDSDEAVTYSLGKFGQRALDFYSIHVTKESTHPVKPLAQIAGNRYASAPVGKALSDACMGTIASFLSKYQDIIIEHQKVVKGNQKRLESLRELAGKENLEYPSVTLPPQPHTKEGVDAYNEVIARVRMWVNLNLWQKLKLSRDDAKPLLRLKGFPSFPLVERQANEVDWWDMVCNVKKLINEKKEDGKVFWQNLAGYKRQEALRPYLSSEEDRKKGKKFARYQLGDLLLHLEKKHGEDWGKVYDEAWERIDKKVEGLSKHIKLEEERRSEDAQSKAALTDWLRAKASFVIEGLKEADKDEFCRCELKLQKWYGDLRGKPFAIEAENSILDISGFSKQYNCAFIWQKDGVKKLNLYLIINYFKGGKLRFKKIKPEAFEANRFYTVINKKSGEIVPMEVNFNFDDPNLIILPLAFGKRQGREFIWNDLLSLETGSLKLANGRVIEKTLYNRRTRQDEPALFVALTFERREVLDSSNIKPMNLIGVDRGENIPAVIALTDPEGCPLSRFKDSLGNPTHILRIGESYKEKQRTIQAKKEVEQRRAGGYSRKYASKAKNLADDMVRNTARDLLYYAVTQDAMLIFENLSRGFGRQGKRTFMAERQYTRMEDWLTAKLAYEGLPSKTYLSKTLAQYTSKTCSNCGFTITSADYDRVLEKLKKTATGWMTTINGKELKVEGQITYYNRYKRQNVVKDLSVELDRLSEESVNNDISSWTKGRSGEALSLLKKRFSHRPVQEKFVCLNCGFETHADEQAALNIARSWLFLRSQEYKKYQTNKTTGNTDKRAFVETWQSFYRKKLKEVWKPAV

SEQ ID NO: 31927 - protein, 978 aa, synthetic construct
  REGION 1..978: note = engineered CasX variant
QEIGRINKIRRRLVKDSNTKKAGKTGPMKTLLVRVMTPDLRERLENLRKKPENIPQPISNTSRANLNKLLTDYTEMKKAILHVYWEEFQKDPVGLMSRVAQPASKKIDQNKLKPEMDEKGNLTTAGFACSQCGQPLFVYKLEQVSEKGKAYTNYFGRCNVAEHEKLILLSQLKPEKDSDEAVTYSLGKFGQRALDFYSIHVTKESTHPVKPLAQIAGNRYASVPVGKALSDACMGTIASFLSKYQDIIIEHQKVVKGNQKRLESLRELAGKENLEYPSVTLPPQPHTKEGVDAYNEVIARVRMWVNLNLWQKLKLSRDDAKPLLRLKGFPSFPLVERQANEVDWWDMVCNVKKLINEKKEDGKVFWQNLAGYKRQEALRPYLSSEEDRKKGKKFARYQLGDLLLHLEKKHGEDWGKVYDEAWERIDKKVEGLSKHIKLEEERRSEDAQSKAALTDWLRAKASFVIEGLKEADKDEFCRCELKLQKWYGDLRGKPFAIEAENSILDISGFSKQYNCAFIWQKDGVKKLNLYLIINYFKGGKLRFKKIKPEAFEANRFYTVINKKSGEIVPMEVNFNFDDPNLIILPLAFGKRQGREFIWNDLLSLETGSLKLANGRVIEKTLYNRRTRQDEPALFVALTFERREVLDSSNIKPMNLIGVDRGENIPAVIALTDPEGCPLSRFKDSLGNPTHILRIGESYKEKQRTIQAKKEVEQRRAGGYSRKYASKAKNLADDMVRNTARDLLYYAVTQDAMLIFENLSRGFGRQGKRTFMAERQYTRMEDWLTAKLAYEGLPSKTYLSKTLAQYTSKTCSNCGFTITSADYDRVLEKLKKTATGWMTTINGKELKVEGQITYYNRYKRQNVVKDLSVELDRLSEESVNNDISSWTKGRSGEALSLLKKRFSHRPVQEKFVCLNCGFETHADEQAALNIARSWLFLRSQEYKKYQTNKTTGNTDKRAFVETWQSFYRKKLKEVWKPAV

SEQ ID NO: 31928 - protein, 978 aa, synthetic construct
  REGION 1..978: note = engineered CasX variant
QEIGRINKIRRRLVKDSNTKKAGKTGPMKTLLVRVMTPDLRERLENLRKKPENIPQPISNTSRANLNKLLTDYTEMKKAILHVYWEEFQKDPVGLMSRVAQPASKKIDQNKLKPEMDEKGNLTTAGFACSQCGQPLFVYKLEQVSEKGKAYTNYFGRCNVAEHEKLIKLSQLKPEKDSDEAVTYSLGKFGQRALDFYSIHVTKESTHPVKPLAQIAGNRYASGPVGKALSDACMGTIASFLSKYQDIIIEHQKVVKGNQKRLESLRELAGKENLEYPSVTLPPQPHTKEGVDAYNEVIARVRMWVNLNLWQKLKLSRDDAKPLLRLKGFPSFPLVERQANEVDWWDMVCNVKKLINEKKEDGKVFWQNLAGYKRQEALRPYLSSEEDRKKGKKFARYQLGDLLLHLEKKHGEDWGKVYDEAWERIDKKVEGLSKHIKLEEERRSEDAQSKAALTDWLRAKASFVIEGLKEADKDEFCRCELKLQKWYGDLRGKPFAIEAENSILDISGFSKQYNCAFIWQKDGVKKLNLYLIINYFKGGKLRFKKIKPEAFEANRFYTVINKKSGEIVPMEVNFNFDDPNLIILPLAFGKRQGREFIWNDLLSLETGSLKLANGRVIEKTLYNRRTRQDEPALFVALTFERREVLDSSNIKPMNLIGVDRGENIPAVIALTDPEGCPLSRFKDSLGNPTHILRIGESYKEKQRTIQAKKEVEQRRAGGYSRKYASKAKNLADDMVRNTARDLLYYAVTQDAMLIFENLSRGFGRQGKRTFMAERQYTRMEDWLTAKLAYEGLPSKTYLSKTLAQYTSKTCSNCGFTITSADYDRVLEKLKKTATGWMTTINGKELKVEGQITYYNRYKRQNVVKDLSVELDRLSEESVNNDISSWTKGRSGEALSLLKKRFSHRPVQEKFVCLNCGFETHADEQAALNIARSWLFLRSQEYKKYQTNKTTGNTDKRAFVETWQSFYRKKLKEVWKPAV

SEQ ID NO: 31929 - protein, 977 aa, synthetic construct
  REGION 1..977: note = engineered CasX variant
QEIGRINKIRRRLVKDSNTKKAGKTGPMKTLLVRVMTPDLRERLENLRKKPENIPQPISNTSRANLNKLLTDYTEMKKAILHVYWEEFQKDPVGLMSRVAQPASKKIDQNKLKPEMDEKGNLTTAGFACSQCGQPLFVYKLEQVSEKGKAYTNYFGRCNVAEHEKLILLSQLKPEKDSDEAVTYSLGKFGQRALDFYSIHVTKESTHPVKPLAQIAGNRYASPVGKALSDACMGTIASFLSKYQDIIIEHQKVVKGNQKRLESLRELAGKENLEYPSVTLPPQPHTKEGVDAYNEVIARVRMWVNLNLWQKLKLSRDDAKPLLRLKGFPSFPLVERQANEVDWWDMVCNVKKLINEKKEDGKVFWQNLAGYKRQEALRPYLSSEEDRKKGKKFARYQLGDLLLHLEKKHGEDWGKVYDEAWERIDKKVEGLSKHIKLEEERRSEDAQSKAALTDWLRAKASFVIEGLKEADKDEFCRCELKLQKWYGDLRGKPFAIEAENSILDISGFSKQYNCAFIWQKDGVKKLNLYLIINYFKGGKLRFKKIKPEAFEANRFYTVINKKSGEIVPMEVNFNFDDPNLIILPLAFGKRQGREFIWNDLLSLETGSLKLANGRVIEKTLYNRRTRQDEPALFVALTFERREVLDSSNIKPMNLIGVDRGENIPAVIALTDPEGCPLSRFKDSLGNPTHILRIGESYKEKQRTIQAKKEVEQRRAGGYSRKYASKAKNLADDMVRNTARDLLYYAVTQDAMLIFENLSRGFGRQGKRTFMAERQYTRMEDWLTAKLAYEGLPSKTYLSKTLAQYTSKTCSNCGFTITSADYDRVLEKLKKTATGWMTTINGKELKVEGQITYYNRYKRQNVVKDLSVELDRLSEESVNNDISSWTKGRSGEALSLLKKRFSHRPVQEKFVCLNCGFETHADEQAALNIARSWLFLRSQEYKKYQTNKTTGNTDKRAFVETWQSFYRKKLKEVWKPAV

SEQ ID NO: 31930 - protein, 978 aa, synthetic construct
  REGION 1..978: note = engineered CasX variant
QEIGRINKIRRRLVKDSNTKKAGKTGPMKTLLVRVMTPDLRERLENLRKKPENIPQPISNTSRANLNKLLTDYTEMKKAILHVYWEEFQKDPVGLMSRVAQPASKKIDQNKLKPEMDEKGNLTTAGFACSQCGQPLFVYKLEQVSEKGKAYTNYFGRCNVAEHEKLILLAQLKPEKDSDEAVTYSLGKFGQRALDFYSIHVTKESTHPVKPLAQIAGNRYASYPVGKALSDACMGTIASFLSKYQDIIIEHQKVVKGNQKRLESLRELAGKENLEYPSVTLPPQPHTKEGVDAYNEVIARVRMWVNLNLWQKLKLSRDDAKPLLRLKGFPSFPLVERQANEVDWWDMVCNVKKLINEKKEDGKVFWQNLAGYKRQEALRPYLSSEEDRKKGKKFARYQLGDLLLHLEKKHGEDWGKVYDEAWERIDKKVEGLSKHIKLEEERRSEDAQSKAALTDWLRAKASFVIEGLKEADKDEFCRCELKLQKWYGDLRGKPFAIEAENSILDISGFSKQYNCAFIWQKDGVKKLNLYLIINYFKGGKLRFKKIKPEAFEANRFYTVINKKSGEIVPMEVNFNFDDPNLIILPLAFGKRQGREFIWNDLLSLETGSLKLANGRVIEKTLYNRRTRQDEPALFVALTFERREVLDSSNIKPMNLIGVDRGENIPAVIALTDPEGCPLSRFKDSLGNPTHILRIGESYKEKQRTIQAKKEVEQRRAGGYSRKYASKAKNLADDMVRNTARDLLYYAVTQDAMLIFENLSRGFGRQGKRTFMAERQYTRMEDWLTAKLAYEGLPSKTYLSKTLAQYTSKTCSNCGFTITSADYDRVLEKLKKTATGWMTTINGKELKVEGQITYYNRYKRQNVVKDLSVELDRLSEESVNNDISSWTKGRSGEALSLLKKRFSHRPVQEKFVCLNCGFETHADEQAALNIARSWLFLRSQEYKKYQTNKTTGNTDKRAFVETWQSFYRKKLKEVWKPAV

SEQ ID NO: 31931 - protein, 978 aa, synthetic construct
  REGION 1..978: note = engineered CasX variant
QEIGRINKIRRRLVKDSNTKKAGKTGPMKTLLVRVMTPDLRERLENLRKKPENIPQPISNTSRANLNKLLTDYTEMKKAILHVYWEEFQKDPVGLMSRVAQPASKKIDQNKLKPEMDEKGNLTTAGFACSQCGQPLFVYKLEQVSEKGKAYTNYFGRCNVAEHEKLILLAQLKPEKDSDEAVTYSLGKFGQRALDFYSIHVTKESTHPVKPLAQIAGNRYASHPVGKALSDACMGTIASFLSKYQDIIIEHQKVVKGNQKRLESLRELAGKENLEYPSVTLPPQPHTKEGVDAYNEVIARVRMWVNLNLWQKLKLSRDDAKPLLRLKGFPSFPLVERQANEVDWWDMVCNVKKLINEKKEDGKVFWQNLAGYKRQEALRPYLSSEEDRKKGKKFARYQLGDLLLHLEKKHGEDWGKVYDEAWERIDKKVEGLSKHIKLEEERRSEDAQSKAALTDWLRAKASFVIEGLKEADKDEFCRCELKLQKWYGDLRGKPFAIEAENSILDISGFSKQYNCAFIWQKDGVKKLNLYLIINYFKGGKLRFKKIKPEAFEANRFYTVINKKSGEIVPMEVNFNFDDPNLIILPLAFGKRQGREFIWNDLLSLETGSLKLANGRVIEKTLYNRRTRQDEPALFVALTFERREVLDSSNIKPMNLIGVDRGENIPAVIALTDPEGCPLSRFKDSLGNPTHILRIGESYKEKQRTIQAKKEVEQRRAGGYSRKYASKAKNLADDMVRNTARDLLYYAVTQDAMLIFENLSRGFGRQGKRTFMAERQYTRMEDWLTAKLAYEGLPSKTYLSKTLAQYTSKTCSNCGFTITSADYDRVLEKLKKTATGWMTTINGKELKVEGQITYYNRYKRQNVVKDLSVELDRLSEESVNNDISSWTKGRSGEALSLLKKRFSHRPVQEKFVCLNCGFETHADEQAALNIARSWLFLRSQEYKKYQTNKTTGNTDKRAFVETWQSFYRKKLKEVWKPAV

SEQ ID NO: 31932 - protein, 978 aa, synthetic construct
  REGION 1..978: note = engineered CasX variant
QEIGRINKIRRRLVKDSNTKKAGKTGPMKTLLVRVMTPDLRERLENLRKKPENIPQPISNTSRANLNKLLTDYTEMKKAILHVYWEEFQKDPVGLMSRVAQPASKKIDQNKLKPEMDEKGNLTTAGFACSQCGQPLFVYKLEQVSEKGKAYTNYFGRCNVAEHEKLILLAQLKPEKDSDEAVTYSLGKFGQRALDFYSIHVTKESTHPVKPLAQIAGNRYASTPVGKALSDACMGTIASFLSKYQDIIIEHQKVVKGNQKRLESLRELAGKENLEYPSVTLPPQPHTKEGVDAYNEVIARVRMWVNLNLWQKLKLSRDDAKPLLRLKGFPSFPLVERQANEVDWWDMVCNVKKLINEKKEDGKVFWQNLAGYKRQEALRPYLSSEEDRKKGKKFARYQLGDLLLHLEKKHGEDWGKVYDEAWERIDKKVEGLSKHIKLEEERRSEDAQSKAALTDWLRAKASFVIEGLKEADKDEFCRCELKLQKWYGDLRGKPFAIEAENSILDISGFSKQYNCAFIWQKDGVKKLNLYLIINYFKGGKLRFKKIKPEAFEANRFYTVINKKSGEIVPMEVNFNFDDPNLIILPLAFGKRQGREFIWNDLLSLETGSLKLANGRVIEKTLYNRRTRQDEPALFVALTFERREVLDSSNIKPMNLIGVDRGENIPAVIALTDPEGCPLSRFKDSLGNPTHILRIGESYKEKQRTIQAKKEVEQRRAGGYSRKYASKAKNLADDMVRNTARDLLYYAVTQDAMLIFENLSRGFGRQGKRTFMAERQYTRMEDWLTAKLAYEGLPSKTYLSKTLAQYTSKTCSNCGFTITSADYDRVLEKLKKTATGWMTTINGKELKVEGQITYYNRYKRQNVVKDLSVELDRLSEESVNNDISSWTKGRSGEALSLLKKRFSHRPVQEKFVCLNCGFETHADEQAALNIARSWLFLRSQEYKKYQTNKTTGNTDKRAFVETWQSFYRKKLKEVWKPAV

SEQ ID NO: 31933 - protein, 978 aa, synthetic construct
  REGION 1..978: note = engineered CasX variant
QEIGRINKIRRRLVKDSNTKKAGKTGPMKTLLVRVMTPDLRERLENLRKKPENIPQPISNTSRANLNKLLTDYTEMKKAILHVYWEEFQKDPVGLMSRVAQPASKKIDQNKLKPEMDEKGNLTTAGFACSQCGQPLFVYKLEQVSEKGKAYTNYFGRCNVAEHEKLILLAQLKPEKDSDEAVTYSLGKFGQRALDFYSIHVTKESTHPVKPLAQIAGNRYASAPVGKALSDACMGTIASFLSKYQDIIIEHQKVVKGNQKRLESLRELAGKENLEYPSVTLPPQPHTKEGVDAYNEVIARVRMWVNLNLWQKLKLSRDDAKPLLRLKGFPSFPLVERQANEVDWWDMVCNVKKLINEKKEDGKVFWQNLAGYKRQEALRPYLSSEEDRKKGKKFARYQLGDLLLHLEKKHGEDWGKVYDEAWERIDKKVEGLSKHIKLEEERRSEDAQSKAALTDWLRAKASFVIEGLKEADKDEFCRCELKLQKWYGDLRGKPFAIEAENSILDISGFSKQYNCAFIWQKDGVKKLNLYLIINYFKGGKLRFKKIKPEAFEANRFYTVINKKSGEIVPMEVNFNFDDPNLIILPLAFGKRQGREFIWNDLLSLETGSLKLANGRVIEKTLYNRRTRQDEPALFVALTFERREVLDSSNIKPMNLIGVDRGENIPAVIALTDPEGCPLSRFKDSLGNPTHILRIGESYKEKQRTIQAKKEVEQRRAGGYSRKYASKAKNLADDMVRNTARDLLYYAVTQDAMLIFENLSRGFGRQGKRTFMAERQYTRMEDWLTAKLAYEGLPSKTYLSKTLAQYTSKTCSNCGFTITSADYDRVLEKLKKTATGWMTTINGKELKVEGQITYYNRYKRQNVVKDLSVELDRLSEESVNNDISSWTKGRSGEALSLLKKRFSHRPVQEKFVCLNCGFETHADEQAALNIARSWLFLRSQEYKKYQTNKTTGNTDKRAFVETWQSFYRKKLKEVWKPAV

SEQ ID NO: 31934 - protein, 978 aa, synthetic construct
  REGION 1..978: note = engineered CasX variant
QEIGRINKIRRRLVKDSNTKKAGKTGPMKTLLVRVMTPDLRERLENLRKKPENIPQPISNTSRANLNKLLTDYTEMKKAILHVYWEEFQKDPVGLMSRVAQPASKKIDQNKLKPEMDEKGNLTTAGFACSQCGQPLFVYKLEQVSEKGKAYTNYFGRCNVAEHEKLILLAQLKPEKDSDEAVTYSLGKFGQRALDFYSIHVTKESTHPVKPLAQIAGNRYASVPVGKALSDACMGTIASFLSKYQDIIIEHQKVVKGNQKRLESLRELAGKENLEYPSVTLPPQPHTKEGVDAYNEVIARVRMWVNLNLWQKLKLSRDDAKPLLRLKGFPSFPLVERQANEVDWWDMVCNVKKLINEKKEDGKVFWQNLAGYKRQEALRPYLSSEEDRKKGKKFARYQLGDLLLHLEKKHGEDWGKVYDEAWERIDKKVEGLSKHIKLEEERRSEDAQSKAALTDWLRAKASFVIEGLKEADKDEFCRCELKLQKWYGDLRGKPFAIEAENSILDISGFSKQYNCAFIWQKDGVKKLNLYLIINYFKGGKLRFKKIKPEAFEANRFYTVINKKSGEIVPMEVNFNFDDPNLIILPLAFGKRQGREFIWNDLLSLETGSLKLANGRVIEKTLYNRRTRQDEPALFVALTFERREVLDSSNIKPMNLIGVDRGENIPAVIALTDPEGCPLSRFKDSLGNPTHILRIGESYKEKQRTIQAKKEVEQRRAGGYSRKYASKAKNLADDMVRNTARDLLYYAVTQDAMLIFENLSRGFGRQGKRTFMAERQYTRMEDWLTAKLAYEGLPSKTYLSKTLAQYTSKTCSNCGFTITSADYDRVLEKLKKTATGWMTTINGKELKVEGQITYYNRYKRQNVVKDLSVELDRLSEESVNNDISSWTKGRSGEALSLLKKRFSHRPVQEKFVCLNCGFETHADEQAALNIARSWLFLRSQEYKKYQTNKTTGNTDKRAFVETWQSFYRKKLKEVWKPAV

SEQ ID NO: 31935 - protein, 978 aa, synthetic construct
  REGION 1..978: note = engineered CasX variant
QEIGRINKIRRRLVKDSNTKKAGKTGPMKTLLVRVMTPDLRERLENLRKKPENIPQPISNTSRANLNKLLTDYTEMKKAILHVYWEEFQKDPVGLMSRVAQPASKKIDQNKLKPEMDEKGNLTTAGFACSQCGQPLFVYKLEQVSEKGKAYTNYFGRCNVAEHEKLILLAQLKPEKDSDEAVTYSLGKFGQRALDFYSIHVTKESTHPVKPLAQIAGNRYASYPVGKALSDACMGTIASFLSKYQDIIIEHQKVVKGNQKRLESLRELAGKENLEYPSVTLPPQPHTSEGVDAYNEVIARVRMWVNLNLWQKLKLSRDDAKPLLRLKGFPSFPLVERQANEVDWWDMVCNVKKLINEKKEDGKVFWQNLAGYKRQEALRPYLSSEEDRKKGKKFARYQLGDLLLHLEKKHGEDWGKVYDEAWERIDKKVEGLSKHIKLEEERRSEDAQSKAALTDWLRAKASFVIEGLKEADKDEFCRCELKLQKWYGDLRGKPFAIEAENSILDISGFSKQYNCAFIWQKDGVKKLNLYLIINYFKGGKLRFKKIKPEAFEANRFYTVINKKSGEIVPMEVNFNFDDPNLIILPLAFGKRQGREFIWNDLLSLETGSLKLANGRVIEKTLYNRRTRQDEPALFVALTFERREVLDSSNIKPMNLIGVDRGENIPAVIALTDPEGCPLSRFKDSLGNPTHILRIGESYKEKQRTIQAKKEVEQRRAGGYSRKYASKAKNLADDMVRNTARDLLYYAVTQDAMLIFENLSRGFGRQGKRTFMAERQYTRMEDWLTAKLAYEGLPSKTYLSKTLAQYTSKTCSNCGFTITSADYDRVLEKLKKTATGWMTTINGKELKVEGQITYYNRYKRQNVVKDLSVELDRLSEESVNNDISSWTKGRSGEALSLLKKRFSHRPVQEKFVCLNCGFETHADEQAALNIARSWLFLRSQEYKKYQTNKTTGNTDKRAFVETWQSFYRKKLKEVWKPAV

SEQ ID NO: 31936 - protein, 978 aa, synthetic construct
  REGION 1..978: note = engineered CasX variant
QEIGRINKIRRRLVKDSNTKKAGKTGPMKTLLVRVMTPDLRERLENLRKKPENIPQPISNTSRANLNKLLTDYTEMKKAILHVYWEEFQKDPVGLMSRVAQPASKKIDQNKLKPEMDEKGNLTTAGFACSQCGQPLFVYKLEQVSEKGKAYTNYFGRCNVAEHEKLILLAQLKPEKDSDEAVTYSLGKFGQRALDFYSIHVTKESTHPVKPLAQIAGNRYASHPVGKALSDACMGTIASFLSKYQDIIIEHQKVVKGNQKRLESLRELAGKENLEYPSVTLPPQPHTSEGVDAYNEVIARVRMWVNLNLWQKLKLSRDDAKPLLRLKGFPSFPLVERQANEVDWWDMVCNVKKLINEKKEDGKVFWQNLAGYKRQEALRPYLSSEEDRKKGKKFARYQLGDLLLHLEKKHGEDWGKVYDEAWERIDKKVEGLSKHIKLEEERRSEDAQSKAALTDWLRAKASFVIEGLKEADKDEFCRCELKLQKWYGDLRGKPFAIEAENSILDISGFSKQYNCAFIWQKDGVKKLNLYLIINYFKGGKLRFKKIKPEAFEANRFYTVINKKSGEIVPMEVNFNFDDPNLIILPLAFGKRQGREFIWNDLLSLETGSLKLANGRVIEKTLYNRRTRQDEPALFVALTFERREVLDSSNIKPMNLIGVDRGENIPAVIALTDPEGCPLSRFKDSLGNPTHILRIGESYKEKQRTIQAKKEVEQRRAGGYSRKYASKAKNLADDMVRNTARDLLYYAVTQDAMLIFENLSRGFGRQGKRTFMAERQYTRMEDWLTAKLAYEGLPSKTYLSKTLAQYTSKTCSNCGFTITSADYDRVLEKLKKTATGWMTTINGKELKVEGQITYYNRYKRQNVVKDLSVELDRLSEESVNNDISSWTKGRSGEALSLLKKRFSHRPVQEKFVCLNCGFETHADEQAALNIARSWLFLRSQEYKKYQTNKTTGNTDKRAFVETWQSFYRKKLKEVWKPAV

SEQ ID NO: 31937 - protein, 978 aa, synthetic construct
  REGION 1..978: note = engineered CasX variant
QEIGRINKIRRRLVKDSNTKKAGKTGPMKTLLVRVMTPDLRERLENLRKKPENIPQPISNTSRANLNKLLTDYTEMKKAILHVYWEEFQKDPVGLMSRVAQPASKKIDQNKLKPEMDEKGNLTTAGFACSQCGQPLFVYKLEQVSEKGKAYTNYFGRCNVAEHEKLILLAQLKPEKDSDEAVTYSLGKFGQRALDFYSIHVTKESTHPVKPLAQIAGNRYASSPVGKALSDACMGTIASFLSKYQDIIIEHQKVVKGNQKRLESLRELAGKENLEYPSVTLPPQPHTSEGVDAYNEVIARVRMWVNLNLWQKLKLSRDDAKPLLRLKGFPSFPLVERQANEVDWWDMVCNVKKLINEKKEDGKVFWQNLAGYKRQEALRPYLSSEEDRKKGKKFARYQLGDLLLHLEKKHGEDWGKVYDEAWERIDKKVEGLSKHIKLEEERRSEDAQSKAALTDWLRAKASFVIEGLKEADKDEFCRCELKLQKWYGDLRGKPFAIEAENSILDISGFSKQYNCAFIWQKDGVKKLNLYLIINYFKGGKLRFKKIKPEAFEANRFYTVINKKSGEIVPMEVNFNFDDPNLIILPLAFGKRQGREFIWNDLLSLETGSLKLANGRVIEKTLYNRRTRQDEPALFVALTFERREVLDSSNIKPMNLIGVDRGENIPAVIALTDPEGCPLSRFKDSLGNPTHILRIGESYKEKQRTIQAKKEVEQRRAGGYSRKYASKAKNLADDMVRNTARDLLYYAVTQDAMLIFENLSRGFGRQGKRTFMAERQYTRMEDWLTAKLAYEGLPSKTYLSKTLAQYTSKTCSNCGFTITSADYDRVLEKLKKTATGWMTTINGKELKVEGQITYYNRYKRQNVVKDLSVELDRLSEESVNNDISSWTKGRSGEALSLLKKRFSHRPVQEKFVCLNCGFETHADEQAALNIARSWLFLRSQEYKKYQTNKTTGNTDKRAFVETWQSFYRKKLKEVWKPAV

SEQ ID NO: 31938 - protein, 978 aa, synthetic construct
  REGION 1..978: note = engineered CasX variant
QEIGRINKIRRRLVKDSNTKKAGKTGPMKTLLVRVMTPDLRERLENLRKKPENIPQPISNTSRANLNKLLTDYTEMKKAILHVYWEEFQKDPVGLMSRVAQPASKKIDQNKLKPEMDEKGNLTTAGFACSQCGQPLFVYKLEQVSEKGKAYTNYFGRCNVAEHEKLILLAQLKPEKDSDEAVTYSLGKFGQRALDFYSIHVTKESTHPVKPLAQIAGNRYASTPVGKALSDACMGTIASFLSKYQDIIIEHQKVVKGNQKRLESLRELAGKENLEYPSVTLPPQPHTSEGVDAYNEVIARVRMWVNLNLWQKLKLSRDDAKPLLRLKGFPSFPLVERQANEVDWWDMVCNVKKLINEKKEDGKVFWQNLAGYKRQEALRPYLSSEEDRKKGKKFARYQLGDLLLHLEKKHGEDWGKVYDEAWERIDKKVEGLSKHIKLEEERRSEDAQSKAALTDWLRAKASFVIEGLKEADKDEFCRCELKLQKWYGDLRGKPFAIEAENSILDISGFSKQYNCAFIWQKDGVKKLNLYLIINYFKGGKLRFKKIKPEAFEANRFYTVINKKSGEIVPMEVNFNFDDPNLIILPLAFGKRQGREFIWNDLLSLETGSLKLANGRVIEKTLYNRRTRQDEPALFVALTFERREVLDSSNIKPMNLIGVDRGENIPAVIALTDPEGCPLSRFKDSLGNPTHILRIGESYKEKQRTIQAKKEVEQRRAGGYSRKYASKAKNLADDMVRNTARDLLYYAVTQDAMLIFENLSRGFGRQGKRTFMAERQYTRMEDWLTAKLAYEGLPSKTYLSKTLAQYTSKTCSNCGFTITSADYDRVLEKLKKTATGWMTTINGKELKVEGQITYYNRYKRQNVVKDLSVELDRLSEESVNNDISSWTKGRSGEALSLLKKRFSHRPVQEKFVCLNCGFETHADEQAALNIARSWLFLRSQEYKKYQTNKTTGNTDKRAFVETWQSFYRKKLKEVWKPAV

SEQ ID NO: 31939 - protein, 978 aa, synthetic construct
  REGION 1..978: note = engineered CasX variant
QEIGRINKIRRRLVKDSNTKKAGKTGPMKTLLVRVMTPDLRERLENLRKKPENIPQPISNTSRANLNKLLTDYTEMKKAILHVYWEEFQKDPVGLMSRVAQPASKKIDQNKLKPEMDEKGNLTTAGFACSQCGQPLFVYKLEQVSEKGKAYTNYFGRCNVAEHEKLILLAQLKPEKDSDEAVTYSLGKFGQRALDFYSIHVTKESTHPVKPLAQIAGNRYASAPVGKALSDACMGTIASFLSKYQDIIIEHQKVVKGNQKRLESLRELAGKENLEYPSVTLPPQPHTSEGVDAYNEVIARVRMWVNLNLWQKLKLSRDDAKPLLRLKGFPSFPLVERQANEVDWWDMVCNVKKLINEKKEDGKVFWQNLAGYKRQEALRPYLSSEEDRKKGKKFARYQLGDLLLHLEKKHGEDWGKVYDEAWERIDKKVEGLSKHIKLEEERRSEDAQSKAALTDWLRAKASFVIEGLKEADKDEFCRCELKLQKWYGDLRGKPFAIEAENSILDISGFSKQYNCAFIWQKDGVKKLNLYLIINYFKGGKLRFKKIKPEAFEANRFYTVINKKSGEIVPMEVNFNFDDPNLIILPLAFGKRQGREFIWNDLLSLETGSLKLANGRVIEKTLYNRRTRQDEPALFVALTFERREVLDSSNIKPMNLIGVDRGENIPAVIALTDPEGCPLSRFKDSLGNPTHILRIGESYKEKQRTIQAKKEVEQRRAGGYSRKYASKAKNLADDMVRNTARDLLYYAVTQDAMLIFENLSRGFGRQGKRTFMAERQYTRMEDWLTAKLAYEGLPSKTYLSKTLAQYTSKTCSNCGFTITSADYDRVLEKLKKTATGWMTTINGKELKVEGQITYYNRYKRQNVVKDLSVELDRLSEESVNNDISSWTKGRSGEALSLLKKRFSHRPVQEKFVCLNCGFETHADEQAALNIARSWLFLRSQEYKKYQTNKTTGNTDKRAFVETWQSFYRKKLKEVWKPAV

SEQ ID NO: 31940 - protein, 978 aa, synthetic construct
  REGION 1..978: note = engineered CasX variant
QEIGRINKIRRRLVKDSNTKKAGKTGPMKTLLVRVMTPDLRERLENLRKKPENIPQPISNTSRANLNKLLTDYTEMKKAILHVYWEEFQKDPVGLMSRVAQPASKKIDQNKLKPEMDEKGNLTTAGFACSQCGQPLFVYKLEQVSEKGKAYTNYFGRCNVAEHEKLILLAQLKPEKDSDEAVTYSLGKFGQRALDFYSIHVTKESTHPVKPLAQIAGNRYASVPVGKALSDACMGTIASFLSKYQDIIIEHQKVVKGNQKRLESLRELAGKENLEYPSVTLPPQPHTSEGVDAYNEVIARVRMWVNLNLWQKLKLSRDDAKPLLRLKGFPSFPLVERQANEVDWWDMVCNVKKLINEKKEDGKVFWQNLAGYKRQEALRPYLSSEEDRKKGKKFARYQLGDLLLHLEKKHGEDWGKVYDEAWERIDKKVEGLSKHIKLEEERRSEDAQSKAALTDWLRAKASFVIEGLKEADKDEFCRCELKLQKWYGDLRGKPFAIEAENSILDISGFSKQYNCAFIWQKDGVKKLNLYLIINYFKGGKLRFKKIKPEAFEANRFYTVINKKSGEIVPMEVNFNFDDPNLIILPLAFGKRQGREFIWNDLLSLETGSLKLANGRVIEKTLYNRRTRQDEPALFVALTFERREVLDSSNIKPMNLIGVDRGENIPAVIALTDPEGCPLSRFKDSLGNPTHILRIGESYKEKQRTIQAKKEVEQRRAGGYSRKYASKAKNLADDMVRNTARDLLYYAVTQDAMLIFENLSRGFGRQGKRTFMAERQYTRMEDWLTAKLAYEGLPSKTYLSKTLAQYTSKTCSNCGFTITSADYDRVLEKLKKTATGWMTTINGKELKVEGQITYYNRYKRQNVVKDLSVELDRLSEESVNNDISSWTKGRSGEALSLLKKRFSHRPVQEKFVCLNCGFETHADEQAALNIARSWLFLRSQEYKKYQTNKTTGNTDKRAFVETWQSFYRKKLKEVWKPAV

SEQ ID NO: 31941 - protein, 978 aa, synthetic construct
  REGION 1..978: note = engineered CasX variant
QEIGRINKIRRRLVKDSNTKKAGKTGPMKTLLVRVMTPDLRERLENLRKKPENIPQPISNTSRANLNKLLTDYTEMKKAILHVYWEEFQKDPVGLMSRVAQPASKKIDQNKLKPEMDEKGNLTTAGFACSQCGQPLFVYKLEQVSEKGKAYTNYFGRCNVAEHEKLIKLAQLKPEKDSDEAVTYSLGKFGQRALDFYSIHVTKESTHPVKPLAQIAGNRYASGPVGKALSDACMGTIASFLSKYQDIIIEHQKVVKGNQKRLESLRELAGKENLEYPSVTLPPQPHTSEGVDAYNEVIARVRMWVNLNLWQKLKLSRDDAKPLLRLKGFPSFPLVERQANEVDWWDMVCNVKKLINEKKEDGKVFWQNLAGYKRQEALRPYLSSEEDRKKGKKFARYQLGDLLLHLEKKHGEDWGKVYDEAWERIDKKVEGLSKHIKLEEERRSEDAQSKAALTDWLRAKASFVIEGLKEADKDEFCRCELKLQKWYGDLRGKPFAIEAENSILDISGFSKQYNCAFIWQKDGVKKLNLYLIINYFKGGKLRFKKIKPEAFEANRFYTVINKKSGEIVPMEVNFNFDDPNLIILPLAFGKRQGREFIWNDLLSLETGSLKLANGRVIEKTLYNRRTRQDEPALFVALTFERREVLDSSNIKPMNLIGVDRGENIPAVIALTDPEGCPLSRFKDSLGNPTHILRIGESYKEKQRTIQAKKEVEQRRAGGYSRKYASKAKNLADDMVRNTARDLLYYAVTQDAMLIFENLSRGFGRQGKRTFMAERQYTRMEDWLTAKLAYEGLPSKTYLSKTLAQYTSKTCSNCGFTITSADYDRVLEKLKKTATGWMTTINGKELKVEGQITYYNRYKRQNVVKDLSVELDRLSEESVNNDISSWTKGRSGEALSLLKKRFSHRPVQEKFVCLNCGFETHADEQAALNIARSWLFLRSQEYKKYQTNKTTGNTDKRAFVETWQSFYRKKLKEVWKPAV

SEQ ID NO: 31942 - protein, 977 aa, synthetic construct
  REGION 1..977: note = engineered CasX variant
QEIGRINKIRRRLVKDSNTKKAGKTGPMKTLLVRVMTPDLRERLENLRKKPENIPQPISNTSRANLNKLLTDYTEMKKAILHVYWEEFQKDPVGLMSRVAQPASKKIDQNKLKPEMDEKGNLTTAGFACSQCGQPLFVYKLEQVSEKGKAYTNYFGRCNVAEHEKLILLAQLKPEKDSDEAVTYSLGKFGQRALDFYSIHVTKESTHPVKPLAQIAGNRYASPVGKALSDACMGTIASFLSKYQDIIIEHQKVVKGNQKRLESLRELAGKENLEYPSVTLPPQPHTSEGVDAYNEVIARVRMWVNLNLWQKLKLSRDDAKPLLRLKGFPSFPLVERQANEVDWWDMVCNVKKLINEKKEDGKVFWQNLAGYKRQEALRPYLSSEEDRKKGKKFARYQLGDLLLHLEKKHGEDWGKVYDEAWERIDKKVEGLSKHIKLEEERRSEDAQSKAALTDWLRAKASFVIEGLKEADKDEFCRCELKLQKWYGDLRGKPFAIEAENSILDISGFSKQYNCAFIWQKDGVKKLNLYLIINYFKGGKLRFKKIKPEAFEANRFYTVINKKSGEIVPMEVNFNFDDPNLIILPLAFGKRQGREFIWNDLLSLETGSLKLANGRVIEKTLYNRRTRQDEPALFVALTFERREVLDSSNIKPMNLIGVDRGENIPAVIALTDPEGCPLSRFKDSLGNPTHILRIGESYKEKQRTIQAKKEVEQRRAGGYSRKYASKAKNLADDMVRNTARDLLYYAVTQDAMLIFENLSRGFGRQGKRTFMAERQYTRMEDWLTAKLAYEGLPSKTYLSKTLAQYTSKTCSNCGFTITSADYDRVLEKLKKTATGWMTTINGKELKVEGQITYYNRYKRQNVVKDLSVELDRLSEESVNNDISSWTKGRSGEALSLLKKRFSHRPVQEKFVCLNCGFETHADEQAALNIARSWLFLRSQEYKKYQTNKTTGNTDKRAFVETWQSFYRKKLKEVWKPAV

SEQ ID NO: 31943 - protein, 978 aa, synthetic construct
  REGION 1..978: note = engineered CasX variant
QEIGRINKIRRRLVKDSNTKKAGKTGPMKTLLVRVMTPDLRERLENLRKKPENIPQPISNTSRANLNKLLTDYTEMKKAILHVYWEEFQKDPVGLMSRVAQPASKKIDQNKLKPEMDEKGNLTTAGFACSQCGQPLFVYKLEQVSEKGKAYTNYFGRCNVAEHEKLILLAQLKPEKDSDEAVTYSLGKFGQRALDFYSIHVTKESTHPVKPLAQIAGNRYASYPVGKALSDACMGTIASFLSKYQDIIIEHQKVVKGNQKRLESLRELAGKENLEYPSVTLPPQPHTKEGLDAYNEVIARVRMWVNLNLWQKLKLSRDDAKPLLRLKGFPSFPLVERQANEVDWWDMVCNVKKLINEKKEDGKVFWQNLAGYKRQEALRPYLSSEEDRKKGKKFARYQLGDLLLHLEKKHGEDWGKVYDEAWERIDKKVEGLSKHIKLEEERRSEDAQSKAALTDWLRAKASFVIEGLKEADKDEFCRCELKLQKWYGDLRGKPFAIEAENSILDISGFSKQYNCAFIWQKDGVKKLNLYLIINYFKGGKLRFKKIKPEAFEANRFYTVINKKSGEIVPMEVNFNFDDPNLIILPLAFGKRQGREFIWNDLLSLETGSLKLANGRVIEKTLYNRRTRQDEPALFVALTFERREVLDSSNIKPMNLIGVDRGENIPAVIALTDPEGCPLSRFKDSLGNPTHILRIGESYKEKQRTIQAKKEVEQRRAGGYSRKYASKAKNLADDMVRNTARDLLYYAVTQDAMLIFENLSRGFGRQGKRTFMAERQYTRMEDWLTAKLAYEGLPSKTYLSKTLAQYTSKTCSNCGFTITSADYDRVLEKLKKTATGWMTTINGKELKVEGQITYYNRYKRQNVVKDLSVELDRLSEESVNNDISSWTKGRSGEALSLLKKRFSHRPVQEKFVCLNCGFETHADEQAALNIARSWLFLRSQEYKKYQTNKTTGNTDKRAFVETWQSFYRKKLKEVWKPAV

SEQ ID NO: 31944 - protein, 978 aa, synthetic construct
  REGION 1..978: note = engineered CasX variant
QEIGRINKIRRRLVKDSNTKKAGKTGPMKTLLVRVMTPDLRERLENLRKKPENIPQPISNTSRANLNKLLTDYTEMKKAILHVYWEEFQKDPVGLMSRVAQPASKKIDQNKLKPEMDEKGNLTTAGFACSQCGQPLFVYKLEQVSEKGKAYTNYFGRCNVAEHEKLILLAQLKPEKDSDEAVTYSLGKFGQRALDFYSIHVTKESTHPVKPLAQIAGNRYASHPVGKALSDACMGTIASFLSKYQDIIIEHQKVVKGNQKRLESLRELAGKENLEYPSVTLPPQPHTKEGLDAYNEVIARVRMWVNLNLWQKLKLSRDDAKPLLRLKGFPSFPLVERQANEVDWWDMVCNVKKLINEKKEDGKVFWQNLAGYKRQEALRPYLSSEEDRKKGKKFARYQLGDLLLHLEKKHGEDWGKVYDEAWERIDKKVEGLSKHIKLEEERRSEDAQSKAALTDWLRAKASFVIEGLKEADKDEFCRCELKLQKWYGDLRGKPFAIEAENSILDISGFSKQYNCAFIWQKDGVKKLNLYLIINYFKGGKLRFKKIKPEAFEANRFYTVINKKSGEIVPMEVNFNFDDPNLIILPLAFGKRQGREFIWNDLLSLETGSLKLANGRVIEKTLYNRRTRQDEPALFVALTFERREVLDSSNIKPMNLIGVDRGENIPAVIALTDPEGCPLSRFKDSLGNPTHILRIGESYKEKQRTIQAKKEVEQRRAGGYSRKYASKAKNLADDMVRNTARDLLYYAVTQDAMLIFENLSRGFGRQGKRTFMAERQYTRMEDWLTAKLAYEGLPSKTYLSKTLAQYTSKTCSNCGFTITSADYDRVLEKLKKTATGWMTTINGKELKVEGQITYYNRYKRQNVVKDLSVELDRLSEESVNNDISSWTKGRSGEALSLLKKRFSHRPVQEKFVCLNCGFETHADEQAALNIARSWLFLRSQEYKKYQTNKTTGNTDKRAFVETWQSFYRKKLKEVWKPAV

SEQ ID NO: 31945 - protein, 978 aa, synthetic construct
  REGION 1..978: note = engineered CasX variant
QEIGRINKIRRRLVKDSNTKKAGKTGPMKTLLVRVMTPDLRERLENLRKKPENIPQPISNTSRANLNKLLTDYTEMKKAILHVYWEEFQKDPVGLMSRVAQPASKKIDQNKLKPEMDEKGNLTTAGFACSQCGQPLFVYKLEQVSEKGKAYTNYFGRCNVAEHEKLILLAQLKPEKDSDEAVTYSLGKFGQRALDFYSIHVTKESTHPVKPLAQIAGNRYASSPVGKALSDACMGTIASFLSKYQDIIIEHQKVVKGNQKRLESLRELAGKENLEYPSVTLPPQPHTKEGLDAYNEVIARVRMWVNLNLWQKLKLSRDDAKPLLRLKGFPSFPLVERQANEVDWWDMVCNVKKLINEKKEDGKVFWQNLAGYKRQEALRPYLSSEEDRKKGKKFARYQLGDLLLHLEKKHGEDWGKVYDEAWERIDKKVEGLSKHIKLEEERRSEDAQSKAALTDWLRAKASFVIEGLKEADKDEFCRCELKLQKWYGDLRGKPFAIEAENSILDISGFSKQYNCAFIWQKDGVKKLNLYLIINYFKGGKLRFKKIKPEAFEANRFYTVINKKSGEIVPMEVNFNFDDPNLIILPLAFGKRQGREFIWNDLLSLETGSLKLANGRVIEKTLYNRRTRQDEPALFVALTFERREVLDSSNIKPMNLIGVDRGENIPAVIALTDPEGCPLSRFKDSLGNPTHILRIGESYKEKQRTIQAKKEVEQRRAGGYSRKYASKAKNLADDMVRNTARDLLYYAVTQDAMLIFENLSRGFGRQGKRTFMAERQYTRMEDWLTAKLAYEGLPSKTYLSKTLAQYTSKTCSNCGFTITSADYDRVLEKLKKTATGWMTTINGKELKVEGQITYYNRYKRQNVVKDLSVELDRLSEESVNNDISSWTKGRSGEALSLLKKRFSHRPVQEKFVCLNCGFETHADEQAALNIARSWLFLRSQEYKKYQTNKTTGNTDKRAFVETWQSFYRKKLKEVWKPAV

SEQ ID NO: 31946 - protein, 978 aa, synthetic construct
  REGION 1..978: note = engineered CasX variant
QEIGRINKIRRRLVKDSNTKKAGKTGPMKTLLVRVMTPDLRERLENLRKKPENIPQPISNTSRANLNKLLTDYTEMKKAILHVYWEEFQKDPVGLMSRVAQPASKKIDQNKLKPEMDEKGNLTTAGFACSQCGQPLFVYKLEQVSEKGKAYTNYFGRCNVAEHEKLILLAQLKPEKDSDEAVTYSLGKFGQRALDFYSIHVTKESTHPVKPLAQIAGNRYASTPVGKALSDACMGTIASFLSKYQDIIIEHQKVVKGNQKRLESLRELAGKENLEYPSVTLPPQPHTKEGLDAYNEVIARVRMWVNLNLWQKLKLSRDDAKPLLRLKGFPSFPLVERQANEVDWWDMVCNVKKLINEKKEDGKVFWQNLAGYKRQEALRPYLSSEEDRKKGKKFARYQLGDLLLHLEKKHGEDWGKVYDEAWERIDKKVEGLSKHIKLEEERRSEDAQSKAALTDWLRAKASFVIEGLKEADKDEFCRCELKLQKWYGDLRGKPFAIEAENSILDISGFSKQYNCAFIWQKDGVKKLNLYLIINYFKGGKLRFKKIKPEAFEANRFYTVINKKSGEIVPMEVNFNFDDPNLIILPLAFGKRQGREFIWNDLLSLETGSLKLANGRVIEKTLYNRRTRQDEPALFVALTFERREVLDSSNIKPMNLIGVDRGENIPAVIALTDPEGCPLSRFKDSLGNPTHILRIGESYKEKQRTIQAKKEVEQRRAGGYSRKYASKAKNLADDMVRNTARDLLYYAVTQDAMLIFENLSRGFGRQGKRTFMAERQYTRMEDWLTAKLAYEGLPSKTYLSKTLAQYTSKTCSNCGFTITSADYDRVLEKLKKTATGWMTTINGKELKVEGQITYYNRYKRQNVVKDLSVELDRLSEESVNNDISSWTKGRSGEALSLLKKRFSHRPVQEKFVCLNCGFETHADEQAALNIARSWLFLRSQEYKKYQTNKTTGNTDKRAFVETWQSFYRKKLKEVWKPAV

SEQ ID NO: 31947 - protein, 978 aa, synthetic construct
  REGION 1..978: note = engineered CasX variant
QEIGRINKIRRRLVKDSNTKKAGKTGPMKTLLVRVMTPDLRERLENLRKKPENIPQPISNTSRANLNKLLTDYTEMKKAILHVYWEEFQKDPVGLMSRVAQPASKKIDQNKLKPEMDEKGNLTTAGFACSQCGQPLFVYKLEQVSEKGKAYTNYFGRCNVAEHEKLILLAQLKPEKDSDEAVTYSLGKFGQRALDFYSIHVTKESTHPVKPLAQIAGNRYASAPVGKALSDACMGTIASFLSKYQDIIIEHQKVVKGNQKRLESLRELAGKENLEYPSVTLPPQPHTKEGLDAYNEVIARVRMWVNLNLWQKLKLSRDDAKPLLRLKGFPSFPLVERQANEVDWWDMVCNVKKLINEKKEDGKVFWQNLAGYKRQEALRPYLSSEEDRKKGKKFARYQLGDLLLHLEKKHGEDWGKVYDEAWERIDKKVEGLSKHIKLEEERRSEDAQSKAALTDWLRAKASFVIEGLKEADKDEFCRCELKLQKWYGDLRGKPFAIEAENSILDISGFSKQYNCAFIWQKDGVKKLNLYLIINYFKGGKLRFKKIKPEAFEANRFYTVINKKSGEIVPMEVNFNFDDPNLIILPLAFGKRQGREFIWNDLLSLETGSLKLANGRVIEKTLYNRRTRQDEPALFVALTFERREVLDSSNIKPMNLIGVDRGENIPAVIALTDPEGCPLSRFKDSLGNPTHILRIGESYKEKQRTIQAKKEVEQRRAGGYSRKYASKAKNLADDMVRNTARDLLYYAVTQDAMLIFENLSRGFGRQGKRTFMAERQYTRMEDWLTAKLAYEGLPSKTYLSKTLAQYTSKTCSNCGFTITSADYDRVLEKLKKTATGWMTTINGKELKVEGQITYYNRYKRQNVVKDLSVELDRLSEESVNNDISSWTKGRSGEALSLLKKRFSHRPVQEKFVCLNCGFETHADEQAALNIARSWLFLRSQEYKKYQTNKTTGNTDKRAFVETWQSFYRKKLKEVWKPAV

SEQ ID NO: 31948 - protein, 978 aa, synthetic construct
  REGION 1..978: note = engineered CasX variant
QEIGRINKIRRRLVKDSNTKKAGKTGPMKTLLVRVMTPDLRERLENLRKKPENIPQPISNTSRANLNKLLTDYTEMKKAILHVYWEEFQKDPVGLMSRVAQPASKKIDQNKLKPEMDEKGNLTTAGFACSQCGQPLFVYKLEQVSEKGKAYTNYFGRCNVAEHEKLILLAQLKPEKDSDEAVTYSLGKFGQRALDFYSIHVTKESTHPVKPLAQIAGNRYASVPVGKALSDACMGTIASFLSKYQDIIIEHQKVVKGNQKRLESLRELAGKENLEYPSVTLPPQPHTKEGLDAYNEVIARVRMWVNLNLWQKLKLSRDDAKPLLRLKGFPSFPLVERQANEVDWWDMVCNVKKLINEKKEDGKVFWQNLAGYKRQEALRPYLSSEEDRKKGKKFARYQLGDLLLHLEKKHGEDWGKVYDEAWERIDKKVEGLSKHIKLEEERRSEDAQSKAALTDWLRAKASFVIEGLKEADKDEFCRCELKLQKWYGDLRGKPFAIEAENSILDISGFSKQYNCAFIWQKDGVKKLNLYLIINYFKGGKLRFKKIKPEAFEANRFYTVINKKSGEIVPMEVNFNFDDPNLIILPLAFGKRQGREFIWNDLLSLETGSLKLANGRVIEKTLYNRRTRQDEPALFVALTFERREVLDSSNIKPMNLIGVDRGENIPAVIALTDPEGCPLSRFKDSLGNPTHILRIGESYKEKQRTIQAKKEVEQRRAGGYSRKYASKAKNLADDMVRNTARDLLYYAVTQDAMLIFENLSRGFGRQGKRTFMAERQYTRMEDWLTAKLAYEGLPSKTYLSKTLAQYTSKTCSNCGFTITSADYDRVLEKLKKTATGWMTTINGKELKVEGQITYYNRYKRQNVVKDLSVELDRLSEESVNNDISSWTKGRSGEALSLLKKRFSHRPVQEKFVCLNCGFETHADEQAALNIARSWLFLRSQEYKKYQTNKTTGNTDKRAFVETWQSFYRKKLKEVWKPAV

SEQ ID NO: 31949 - protein, 978 aa, synthetic construct
  REGION 1..978: note = engineered CasX variant
QEIGRINKIRRRLVKDSNTKKAGKTGPMKTLLVRVMTPDLRERLENLRKKPENIPQPISNTSRANLNKLLTDYTEMKKAILHVYWEEFQKDPVGLMSRVAQPASKKIDQNKLKPEMDEKGNLTTAGFACSQCGQPLFVYKLEQVSEKGKAYTNYFGRCNVAEHEKLIKLAQLKPEKDSDEAVTYSLGKFGQRALDFYSIHVTKESTHPVKPLAQIAGNRYASGPVGKALSDACMGTIASFLSKYQDIIIEHQKVVKGNQKRLESLRELAGKENLEYPSVTLPPQPHTKEGLDAYNEVIARVRMWVNLNLWQKLKLSRDDAKPLLRLKGFPSFPLVERQANEVDWWDMVCNVKKLINEKKEDGKVFWQNLAGYKRQEALRPYLSSEEDRKKGKKFARYQLGDLLLHLEKKHGEDWGKVYDEAWERIDKKVEGLSKHIKLEEERRSEDAQSKAALTDWLRAKASFVIEGLKEADKDEFCRCELKLQKWYGDLRGKPFAIEAENSILDISGFSKQYNCAFIWQKDGVKKLNLYLIINYFKGGKLRFKKIKPEAFEANRFYTVINKKSGEIVPMEVNFNFDDPNLIILPLAFGKRQGREFIWNDLLSLETGSLKLANGRVIEKTLYNRRTRQDEPALFVALTFERREVLDSSNIKPMNLIGVDRGENIPAVIALTDPEGCPLSRFKDSLGNPTHILRIGESYKEKQRTIQAKKEVEQRRAGGYSRKYASKAKNLADDMVRNTARDLLYYAVTQDAMLIFENLSRGFGRQGKRTFMAERQYTRMEDWLTAKLAYEGLPSKTYLSKTLAQYTSKTCSNCGFTITSADYDRVLEKLKKTATGWMTTINGKELKVEGQITYYNRYKRQNVVKDLSVELDRLSEESVNNDISSWTKGRSGEALSLLKKRFSHRPVQEKFVCLNCGFETHADEQAALNIARSWLFLRSQEYKKYQTNKTTGNTDKRAFVETWQSFYRKKLKEVWKPAV

SEQ ID NO: 31950 - protein, 977 aa, synthetic construct
  REGION 1..977: note = engineered CasX variant
QEIGRINKIRRRLVKDSNTKKAGKTGPMKTLLVRVMTPDLRERLENLRKKPENIPQPISNTSRANLNKLLTDYTEMKKAILHVYWEEFQKDPVGLMSRVAQPASKKIDQNKLKPEMDEKGNLTTAGFACSQCGQPLFVYKLEQVSEKGKAYTNYFGRCNVAEHEKLILLAQLKPEKDSDEAVTYSLGKFGQRALDFYSIHVTKESTHPVKPLAQIAGNRYASPVGKALSDACMGTIASFLSKYQDIIIEHQKVVKGNQKRLESLRELAGKENLEYPSVTLPPQPHTKEGLDAYNEVIARVRMWVNLNLWQKLKLSRDDAKPLLRLKGFPSFPLVERQANEVDWWDMVCNVKKLINEKKEDGKVFWQNLAGYKRQEALRPYLSSEEDRKKGKKFARYQLGDLLLHLEKKHGEDWGKVYDEAWERIDKKVEGLSKHIKLEEERRSEDAQSKAALTDWLRAKASFVIEGLKEADKDEFCRCELKLQKWYGDLRGKPFAIEAENSILDISGFSKQYNCAFIWQKDGVKKLNLYLIINYFKGGKLRFKKIKPEAFEANRFYTVINKKSGEIVPMEVNFNFDDPNLIILPLAFGKRQGREFIWNDLLSLETGSLKLANGRVIEKTLYNRRTRQDEPALFVALTFERREVLDSSNIKPMNLIGVDRGENIPAVIALTDPEGCPLSRFKDSLGNPTHILRIGESYKEKQRTIQAKKEVEQRRAGGYSRKYASKAKNLADDMVRNTARDLLYYAVTQDAMLIFENLSRGFGRQGKRTFMAERQYTRMEDWLTAKLAYEGLPSKTYLSKTLAQYTSKTCSNCGFTITSADYDRVLEKLKKTATGWMTTINGKELKVEGQITYYNRYKRQNVVKDLSVELDRLSEESVNNDISSWTKGRSGEALSLLKKRFSHRPVQEKFVCLNCGFETHADEQAALNIARSWLFLRSQEYKKYQTNKTTGNTDKRAFVETWQSFYRKKLKEVWKPAV

SEQ ID NO: 31951 - protein, 978 aa, synthetic construct
  REGION 1..978: note = engineered CasX variant
QEIGRINKIRRRLVKDSNTKKAGKTGPMKTLLVRVMTPDLRERLENLRKKPENIPQPISNTSRANLNKLLTDYTEMKKAILHVYWEEFQKDPVGLMSRVAQPASKKIDQNKLKPEMDEKGNLTTAGFACSQCGQPLFVYKLEQVSEKGKAYTNYFGRCNVAEHEKLILLAQLKPEKDSDEAVTYSLGKFGQRALDFYSIHVTKESTHPVKPLAQIAGNRYASYPVGKALSDACMGTIASFLSKYQDIIIEHQKVVKGNQKRLESLRELAGKENLEYPSVTLPPQPHTKEGVDAYNEVIARVRTWVNLNLWQKLKLSRDDAKPLLRLKGFPSFPLVERQANEVDWWDMVCNVKKLINEKKEDGKVFWQNLAGYKRQEALRPYLSSEEDRKKGKKFARYQLGDLLLHLEKKHGEDWGKVYDEAWERIDKKVEGLSKHIKLEEERRSEDAQSKAALTDWLRAKASFVIEGLKEADKDEFCRCELKLQKWYGDLRGKPFAIEAENSILDISGFSKQYNCAFIWQKDGVKKLNLYLIINYFKGGKLRFKKIKPEAFEANRFYTVINKKSGEIVPMEVNFNFDDPNLIILPLAFGKRQGREFIWNDLLSLETGSLKLANGRVIEKTLYNRRTRQDEPALFVALTFERREVLDSSNIKPMNLIGVDRGENIPAVIALTDPEGCPLSRFKDSLGNPTHILRIGESYKEKQRTIQAKKEVEQRRAGGYSRKYASKAKNLADDMVRNTARDLLYYAVTQDAMLIFENLSRGFGRQGKRTFMAERQYTRMEDWLTAKLAYEGLPSKTYLSKTLAQYTSKTCSNCGFTITSADYDRVLEKLKKTATGWMTTINGKELKVEGQITYYNRYKRQNVVKDLSVELDRLSEESVNNDISSWTKGRSGEALSLLKKRFSHRPVQEKFVCLNCGFETHADEQAALNIARSWLFLRSQEYKKYQTNKTTGNTDKRAFVETWQSFYRKKLKEVWKPAV

SEQ ID NO: 31952 - protein, 978 aa, synthetic construct
  REGION 1..978: note = engineered CasX variant
QEIGRINKIRRRLVKDSNTKKAGKTGPMKTLLVRVMTPDLRERLENLRKKPENIPQPISNTSRANLNKLLTDYTEMKKAILHVYWEEFQKDPVGLMSRVAQPASKKIDQNKLKPEMDEKGNLTTAGFACSQCGQPLFVYKLEQVSEKGKAYTNYFGRCNVAEHEKLILLAQLKPEKDSDEAVTYSLGKFGQRALDFYSIHVTKESTHPVKPLAQIAGNRYASHPVGKALSDACMGTIASFLSKYQDIIIEHQKVVKGNQKRLESLRELAGKENLEYPSVTLPPQPHTKEGVDAYNEVIARVRTWVNLNLWQKLKLSRDDAKPLLRLKGFPSFPLVERQANEVDWWDMVCNVKKLINEKKEDGKVFWQNLAGYKRQEALRPYLSSEEDRKKGKKFARYQLGDLLLHLEKKHGEDWGKVYDEAWERIDKKVEGLSKHIKLEEERRSEDAQSKAALTDWLRAKASFVIEGLKEADKDEFCRCELKLQKWYGDLRGKPFAIEAENSILDISGFSKQYNCAFIWQKDGVKKLNLYLIINYFKGGKLRFKKIKPEAFEANRFYTVINKKSGEIVPMEVNFNFDDPNLIILPLAFGKRQGREFIWNDLLSLETGSLKLANGRVIEKTLYNRRTRQDEPALFVALTFERREVLDSSNIKPMNLIGVDRGENIPAVIALTDPEGCPLSRFKDSLGNPTHILRIGESYKEKQRTIQAKKEVEQRRAGGYSRKYASKAKNLADDMVRNTARDLLYYAVTQDAMLIFENLSRGFGRQGKRTFMAERQYTRMEDWLTAKLAYEGLPSKTYLSKTLAQYTSKTCSNCGFTITSADYDRVLEKLKKTATGWMTTINGKELKVEGQITYYNRYKRQNVVKDLSVELDRLSEESVNNDISSWTKGRSGEALSLLKKRFSHRPVQEKFVCLNCGFETHADEQAALNIARSWLFLRSQEYKKYQTNKTTGNTDKRAFVETWQSFYRKKLKEVWKPAV

SEQ ID NO: 31953 - protein, 978 aa, synthetic construct
  REGION 1..978: note = engineered CasX variant
QEIGRINKIRRRLVKDSNTKKAGKTGPMKTLLVRVMTPDLRERLENLRKKPENIPQPISNTSRANLNKLLTDYTEMKKAILHVYWEEFQKDPVGLMSRVAQPASKKIDQNKLKPEMDEKGNLTTAGFACSQCGQPLFVYKLEQVSEKGKAYTNYFGRCNVAEHEKLILLAQLKPEKDSDEAVTYSLGKFGQRALDFYSIHVTKESTHPVKPLAQIAGNRYASSPVGKALSDACMGTIASFLSKYQDIIIEHQKVVKGNQKRLESLRELAGKENLEYPSVTLPPQPHTKEGVDAYNEVIARVRTWVNLNLWQKLKLSRDDAKPLLRLKGFPSFPLVERQANEVDWWDMVCNVKKLINEKKEDGKVFWQNLAGYKRQEALRPYLSSEEDRKKGKKFARYQLGDLLLHLEKKHGEDWGKVYDEAWERIDKKVEGLSKHIKLEEERRSEDAQSKAALTDWLRAKASFVIEGLKEADKDEFCRCELKLQKWYGDLRGKPFAIEAENSILDISGFSKQYNCAFIWQKDGVKKLNLYLIINYFKGGKLRFKKIKPEAFEANRFYTVINKKSGEIVPMEVNFNFDDPNLIILPLAFGKRQGREFIWNDLLSLETGSLKLANGRVIEKTLYNRRTRQDEPALFVALTFERREVLDSSNIKPMNLIGVDRGENIPAVIALTDPEGCPLSRFKDSLGNPTHILRIGESYKEKQRTIQAKKEVEQRRAGGYSRKYASKAKNLADDMVRNTARDLLYYAVTQDAMLIFENLSRGFGRQGKRTFMAERQYTRMEDWLTAKLAYEGLPSKTYLSKTLAQYTSKTCSNCGFTITSADYDRVLEKLKKTATGWMTTINGKELKVEGQITYYNRYKRQNVVKDLSVELDRLSEESVNNDISSWTKGRSGEALSLLKKRFSHRPVQEKFVCLNCGFETHADEQAALNIARSWLFLRSQEYKKYQTNKTTGNTDKRAFVETWQSFYRKKLKEVWKPAV

SEQ ID NO: 31954 - protein, 978 aa, synthetic construct
  REGION 1..978: note = engineered CasX variant
QEIGRINKIRRRLVKDSNTKKAGKTGPMKTLLVRVMTPDLRERLENLRKKPENIPQPISNTSRANLNKLLTDYTEMKKAILHVYWEEFQKDPVGLMSRVAQPASKKIDQNKLKPEMDEKGNLTTAGFACSQCGQPLFVYKLEQVSEKGKAYTNYFGRCNVAEHEKLILLAQLKPEKDSDEAVTYSLGKFGQRALDFYSIHVTKESTHPVKPLAQIAGNRYASTPVGKALSDACMGTIASFLSKYQDIIIEHQKVVKGNQKRLESLRELAGKENLEYPSVTLPPQPHTKEGVDAYNEVIARVRTWVNLNLWQKLKLSRDDAKPLLRLKGFPSFPLVERQANEVDWWDMVCNVKKLINEKKEDGKVFWQNLAGYKRQEALRPYLSSEEDRKKGKKFARYQLGDLLLHLEKKHGEDWGKVYDEAWERIDKKVEGLSKHIKLEEERRSEDAQSKAALTDWLRAKASFVIEGLKEADKDEFCRCELKLQKWYGDLRGKPFAIEAENSILDISGFSKQYNCAFIWQKDGVKKLNLYLIINYFKGGKLRFKKIKPEAFEANRFYTVINKKSGEIVPMEVNFNFDDPNLIILPLAFGKRQGREFIWNDLLSLETGSLKLANGRVIEKTLYNRRTRQDEPALFVALTFERREVLDSSNIKPMNLIGVDRGENIPAVIALTDPEGCPLSRFKDSLGNPTHILRIGESYKEKQRTIQAKKEVEQRRAGGYSRKYASKAKNLADDMVRNTARDLLYYAVTQDAMLIFENLSRGFGRQGKRTFMAERQYTRMEDWLTAKLAYEGLPSKTYLSKTLAQYTSKTCSNCGFTITSADYDRVLEKLKKTATGWMTTINGKELKVEGQITYYNRYKRQNVVKDLSVELDRLSEESVNNDISSWTKGRSGEALSLLKKRFSHRPVQEKFVCLNCGFETHADEQAALNIARSWLFLRSQEYKKYQTNKTTGNTDKRAFVETWQSFYRKKLKEVWKPAV

SEQ ID NO: 31955 - protein, 978 aa, synthetic construct
  REGION 1..978: note = engineered CasX variant
QEIGRINKIRRRLVKDSNTKKAGKTGPMKTLLVRVMTPDLRERLENLRKKPENIPQPISNTSRANLNKLLTDYTEMKKAILHVYWEEFQKDPVGLMSRVAQPASKKIDQNKLKPEMDEKGNLTTAGFACSQCGQPLFVYKLEQVSEKGKAYTNYFGRCNVAEHEKLILLAQLKPEKDSDEAVTYSLGKFGQRALDFYSIHVTKESTHPVKPLAQIAGNRYASAPVGKALSDACMGTIASFLSKYQDIIIEHQKVVKGNQKRLESLRELAGKENLEYPSVTLPPQPHTKEGVDAYNEVIARVRTWVNLNLWQKLKLSRDDAKPLLRLKGFPSFPLVERQANEVDWWDMVCNVKKLINEKKEDGKVFWQNLAGYKRQEALRPYLSSEEDRKKGKKFARYQLGDLLLHLEKKHGEDWGKVYDEAWERIDKKVEGLSKHIKLEEERRSEDAQSKAALTDWLRAKASFVIEGLKEADKDEFCRCELKLQKWYGDLRGKPFAIEAENSILDISGFSKQYNCAFIWQKDGVKKLNLYLIINYFKGGKLRFKKIKPEAFEANRFYTVINKKSGEIVPMEVNFNFDDPNLIILPLAFGKRQGREFIWNDLLSLETGSLKLANGRVIEKTLYNRRTRQDEPALFVALTFERREVLDSSNIKPMNLIGVDRGENIPAVIALTDPEGCPLSRFKDSLGNPTHILRIGESYKEKQRTIQAKKEVEQRRAGGYSRKYASKAKNLADDMVRNTARDLLYYAVTQDAMLIFENLSRGFGRQGKRTFMAERQYTRMEDWLTAKLAYEGLPSKTYLSKTLAQYTSKTCSNCGFTITSADYDRVLEKLKKTATGWMTTINGKELKVEGQITYYNRYKRQNVVKDLSVELDRLSEESVNNDISSWTKGRSGEALSLLKKRFSHRPVQEKFVCLNCGFETHADEQAALNIARSWLFLRSQEYKKYQTNKTTGNTDKRAFVETWQSFYRKKLKEVWKPAV

SEQ ID NO: 31956 - protein, 978 aa, synthetic construct
  REGION 1..978: note = engineered CasX variant
QEIGRINKIRRRLVKDSNTKKAGKTGPMKTLLVRVMTPDLRERLENLRKKPENIPQPISNTSRANLNKLLTDYTEMKKAILHVYWEEFQKDPVGLMSRVAQPASKKIDQNKLKPEMDEKGNLTTAGFACSQCGQPLFVYKLEQVSEKGKAYTNYFGRCNVAEHEKLILLAQLKPEKDSDEAVTYSLGKFGQRALDFYSIHVTKESTHPVKPLAQIAGNRYASVPVGKALSDACMGTIASFLSKYQDIIIEHQKVVKGNQKRLESLRELAGKENLEYPSVTLPPQPHTKEGVDAYNEVIARVRTWVNLNLWQKLKLSRDDAKPLLRLKGFPSFPLVERQANEVDWWDMVCNVKKLINEKKEDGKVFWQNLAGYKRQEALRPYLSSEEDRKKGKKFARYQLGDLLLHLEKKHGEDWGKVYDEAWERIDKKVEGLSKHIKLEEERRSEDAQSKAALTDWLRAKASFVIEGLKEADKDEFCRCELKLQKWYGDLRGKPFAIEAENSILDISGFSKQYNCAFIWQKDGVKKLNLYLIINYFKGGKLRFKKIKPEAFEANRFYTVINKKSGEIVPMEVNFNFDDPNLIILPLAFGKRQGREFIWNDLLSLETGSLKLANGRVIEKTLYNRRTRQDEPALFVALTFERREVLDSSNIKPMNLIGVDRGENIPAVIALTDPEGCPLSRFKDSLGNPTHILRIGESYKEKQRTIQAKKEVEQRRAGGYSRKYASKAKNLADDMVRNTARDLLYYAVTQDAMLIFENLSRGFGRQGKRTFMAERQYTRMEDWLTAKLAYEGLPSKTYLSKTLAQYTSKTCSNCGFTITSADYDRVLEKLKKTATGWMTTINGKELKVEGQITYYNRYKRQNVVKDLSVELDRLSEESVNNDISSWTKGRSGEALSLLKKRFSHRPVQEKFVCLNCGFETHADEQAALNIARSWLFLRSQEYKKYQTNKTTGNTDKRAFVETWQSFYRKKLKEVWKPAV

SEQ ID NO: 31957 - protein, 978 aa, synthetic construct
  REGION 1..978: note = engineered CasX variant
QEIGRINKIRRRLVKDSNTKKAGKTGPMKTLLVRVMTPDLRERLENLRKKPENIPQPISNTSRANLNKLLTDYTEMKKAILHVYWEEFQKDPVGLMSRVAQPASKKIDQNKLKPEMDEKGNLTTAGFACSQCGQPLFVYKLEQVSEKGKAYTNYFGRCNVAEHEKLIKLAQLKPEKDSDEAVTYSLGKFGQRALDFYSIHVTKESTHPVKPLAQIAGNRYASGPVGKALSDACMGTIASFLSKYQDIIIEHQKVVKGNQKRLESLRELAGKENLEYPSVTLPPQPHTKEGVDAYNEVIARVRTWVNLNLWQKLKLSRDDAKPLLRLKGFPSFPLVERQANEVDWWDMVCNVKKLINEKKEDGKVFWQNLAGYKRQEALRPYLSSEEDRKKGKKFARYQLGDLLLHLEKKHGEDWGKVYDEAWERIDKKVEGLSKHIKLEEERRSEDAQSKAALTDWLRAKASFVIEGLKEADKDEFCRCELKLQKWYGDLRGKPFAIEAENSILDISGFSKQYNCAFIWQKDGVKKLNLYLIINYFKGGKLRFKKIKPEAFEANRFYTVINKKSGEIVPMEVNFNFDDPNLIILPLAFGKRQGREFIWNDLLSLETGSLKLANGRVIEKTLYNRRTRQDEPALFVALTFERREVLDSSNIKPMNLIGVDRGENIPAVIALTDPEGCPLSRFKDSLGNPTHILRIGESYKEKQRTIQAKKEVEQRRAGGYSRKYASKAKNLADDMVRNTARDLLYYAVTQDAMLIFENLSRGFGRQGKRTFMAERQYTRMEDWLTAKLAYEGLPSKTYLSKTLAQYTSKTCSNCGFTITSADYDRVLEKLKKTATGWMTTINGKELKVEGQITYYNRYKRQNVVKDLSVELDRLSEESVNNDISSWTKGRSGEALSLLKKRFSHRPVQEKFVCLNCGFETHADEQAALNIARSWLFLRSQEYKKYQTNKTTGNTDKRAFVETWQSFYRKKLKEVWKPAV

SEQ ID NO: 31958 - protein, 977 aa, synthetic construct
  REGION 1..977: note = engineered CasX variant
QEIGRINKIRRRLVKDSNTKKAGKTGPMKTLLVRVMTPDLRERLENLRKKPENIPQPISNTSRANLNKLLTDYTEMKKAILHVYWEEFQKDPVGLMSRVAQPASKKIDQNKLKPEMDEKGNLTTAGFACSQCGQPLFVYKLEQVSEKGKAYTNYFGRCNVAEHEKLILLAQLKPEKDSDEAVTYSLGKFGQRALDFYSIHVTKESTHPVKPLAQIAGNRYASPVGKALSDACMGTIASFLSKYQDIIIEHQKVVKGNQKRLESLRELAGKENLEYPSVTLPPQPHTKEGVDAYNEVIARVRTWVNLNLWQKLKLSRDDAKPLLRLKGFPSFPLVERQANEVDWWDMVCNVKKLINEKKEDGKVFWQNLAGYKRQEALRPYLSSEEDRKKGKKFARYQLGDLLLHLEKKHGEDWGKVYDEAWERIDKKVEGLSKHIKLEEERRSEDAQSKAALTDWLRAKASFVIEGLKEADKDEFCRCELKLQKWYGDLRGKPFAIEAENSILDISGFSKQYNCAFIWQKDGVKKLNLYLIINYFKGGKLRFKKIKPEAFEANRFYTVINKKSGEIVPMEVNFNFDDPNLIILPLAFGKRQGREFIWNDLLSLETGSLKLANGRVIEKTLYNRRTRQDEPALFVALTFERREVLDSSNIKPMNLIGVDRGENIPAVIALTDPEGCPLSRFKDSLGNPTHILRIGESYKEKQRTIQAKKEVEQRRAGGYSRKYASKAKNLADDMVRNTARDLLYYAVTQDAMLIFENLSRGFGRQGKRTFMAERQYTRMEDWLTAKLAYEGLPSKTYLSKTLAQYTSKTCSNCGFTITSADYDRVLEKLKKTATGWMTTINGKELKVEGQITYYNRYKRQNVVKDLSVELDRLSEESVNNDISSWTKGRSGEALSLLKKRFSHRPVQEKFVCLNCGFETHADEQAALNIARSWLFLRSQEYKKYQTNKTTGNTDKRAFVETWQSFYRKKLKEVWKPAV

SEQ ID NO: 31959 - protein, 978 aa, synthetic construct
  REGION 1..978: note = engineered CasX variant
QEIGRINKIRRRLVKDSNTKKAGKTGPMKTLLVRVMTPDLRERLENLRKKPENIPQPISNTSRANLNKLLTDYTEMKKAILHVYWEEFQKDPVGLMSRVAQPASKKIDQNKLKPEMDEKGNLTTAGFACSQCGQPLFVYKLEQVSEKGKAYTNYFGRCNVAEHEKLILLAQLKPEKDSDEAVTYSLGKFGQRALDFYSIHVTKESTHPVKPLAQIAGNRYASYPVGKALSDACMGTIASFLSKYQDIIIEHQKVVKGNQKRLESLRELAGKENLEYPSVTLPPQPHTKEGVDAYNEVIARVRWWVNLNLWQKLKLSRDDAKPLLRLKGFPSFPLVERQANEVDWWDMVCNVKKLINEKKEDGKVFWQNLAGYKRQEALRPYLSSEEDRKKGKKFARYQLGDLLLHLEKKHGEDWGKVYDEAWERIDKKVEGLSKHIKLEEERRSEDAQSKAALTDWLRAKASFVIEGLKEADKDEFCRCELKLQKWYGDLRGKPFAIEAENSILDISGFSKQYNCAFIWQKDGVKKLNLYLIINYFKGGKLRFKKIKPEAFEANRFYTVINKKSGEIVPMEVNFNFDDPNLIILPLAFGKRQGREFIWNDLLSLETGSLKLANGRVIEKTLYNRRTRQDEPALFVALTFERREVLDSSNIKPMNLIGVDRGENIPAVIALTDPEGCPLSRFKDSLGNPTHILRIGESYKEKQRTIQAKKEVEQRRAGGYSRKYASKAKNLADDMVRNTARDLLYYAVTQDAMLIFENLSRGFGRQGKRTFMAERQYTRMEDWLTAKLAYEGLPSKTYLSKTLAQYTSKTCSNCGFTITSADYDRVLEKLKKTATGWMTTINGKELKVEGQITYYNRYKRQNVVKDLSVELDRLSEESVNNDISSWTKGRSGEALSLLKKRFSHRPVQEKFVCLNCGFETHADEQAALNIARSWLFLRSQEYKKYQTNKTTGNTDKRAFVETWQSFYRKKLKEVWKPAV

SEQ ID NO: 31960 - protein, 978 aa, synthetic construct
  REGION 1..978: note = engineered CasX variant
QEIGRINKIRRRLVKDSNTKKAGKTGPMKTLLVRVMTPDLRERLENLRKKPENIPQPISNTSRANLNKLLTDYTEMKKAILHVYWEEFQKDPVGLMSRVAQPASKKIDQNKLKPEMDEKGNLTTAGFACSQCGQPLFVYKLEQVSEKGKAYTNYFGRCNVAEHEKLILLAQLKPEKDSDEAVTYSLGKFGQRALDFYSIHVTKESTHPVKPLAQIAGNRYASHPVGKALSDACMGTIASFLSKYQDIIIEHQKVVKGNQKRLESLRELAGKENLEYPSVTLPPQPHTKEGVDAYNEVIARVRWWVNLNLWQKLKLSRDDAKPLLRLKGFPSFPLVERQANEVDWWDMVCNVKKLINEKKEDGKVFWQNLAGYKRQEALRPYLSSEEDRKKGKKFARYQLGDLLLHLEKKHGEDWGKVYDEAWERIDKKVEGLSKHIKLEEERRSEDAQSKAALTDWLRAKASFVIEGLKEADKDEFCRCELKLQKWYGDLRGKPFAIEAENSILDISGFSKQYNCAFIWQKDGVKKLNLYLIINYFKGGKLRFKKIKPEAFEANRFYTVINKKSGEIVPMEVNFNFDDPNLIILPLAFGKRQGREFIWNDLLSLETGSLKLANGRVIEKTLYNRRTRQDEPALFVALTFERREVLDSSNIKPMNLIGVDRGENIPAVIALTDPEGCPLSRFKDSLGNPTHILRIGESYKEKQRTIQAKKEVEQRRAGGYSRKYASKAKNLADDMVRNTARDLLYYAVTQDAMLIFENLSRGFGRQGKRTFMAERQYTRMEDWLTAKLAYEGLPSKTYLSKTLAQYTSKTCSNCGFTITSADYDRVLEKLKKTATGWMTTINGKELKVEGQITYYNRYKRQNVVKDLSVELDRLSEESVNNDISSWTKGRSGEALSLLKKRFSHRPVQEKFVCLNCGFETHADEQAALNIARSWLFLRSQEYKKYQTNKTTGNTDKRAFVETWQSFYRKKLKEVWKPAV

SEQ ID NO: 31961 - protein, 978 aa, synthetic construct
  REGION 1..978: note = engineered CasX variant
QEIGRINKIRRRLVKDSNTKKAGKTGPMKTLLVRVMTPDLRERLENLRKKPENIPQPISNTSRANLNKLLTDYTEMKKAILHVYWEEFQKDPVGLMSRVAQPASKKIDQNKLKPEMDEKGNLTTAGFACSQCGQPLFVYKLEQVSEKGKAYTNYFGRCNVAEHEKLILLAQLKPEKDSDEAVTYSLGKFGQRALDFYSIHVTKESTHPVKPLAQIAGNRYASSPVGKALSDACMGTIASFLSKYQDIIIEHQKVVKGNQKRLESLRELAGKENLEYPSVTLPPQPHTKEGVDAYNEVIARVRWWVNLNLWQKLKLSRDDAKPLLRLKGFPSFPLVERQANEVDWWDMVCNVKKLINEKKEDGKVFWQNLAGYKRQEALRPYLSSEEDRKKGKKFARYQLGDLLLHLEKKHGEDWGKVYDEAWERIDKKVEGLSKHIKLEEERRSEDAQSKAALTDWLRAKASFVIEGLKEADKDEFCRCELKLQKWYGDLRGKPFAIEAENSILDISGFSKQYNCAFIWQKDGVKKLNLYLIINYFKGGKLRFKKIKPEAFEANRFYTVINKKSGEIVPMEVNFNFDDPNLIILPLAFGKRQGREFIWNDLLSLETGSLKLANGRVIEKTLYNRRTRQDEPALFVALTFERREVLDSSNIKPMNLIGVDRGENIPAVIALTDPEGCPLSRFKDSLGNPTHILRIGESYKEKQRTIQAKKEVEQRRAGGYSRKYASKAKNLADDMVRNTARDLLYYAVTQDAMLIFENLSRGFGRQGKRTFMAERQYTRMEDWLTAKLAYEGLPSKTYLSKTLAQYTSKTCSNCGFTITSADYDRVLEKLKKTATGWMTTINGKELKVEGQITYYNRYKRQNVVKDLSVELDRLSEESVNNDISSWTKGRSGEALSLLKKRFSHRPVQEKFVCLNCGFETHADEQAALNIARSWLFLRSQEYKKYQTNKTTGNTDKRAFVETWQSFYRKKLKEVWKPAV

SEQ ID NO: 31962 - protein, 978 aa, synthetic construct
  REGION 1..978: note = engineered CasX variant
QEIGRINKIRRRLVKDSNTKKAGKTGPMKTLLVRVMTPDLRERLENLRKKPENIPQPISNTSRANLNKLLTDYTEMKKAILHVYWEEFQKDPVGLMSRVAQPASKKIDQNKLKPEMDEKGNLTTAGFACSQCGQPLFVYKLEQVSEKGKAYTNYFGRCNVAEHEKLILLAQLKPEKDSDEAVTYSLGKFGQRALDFYSIHVTKESTHPVKPLAQIAGNRYASTPVGKALSDACMGTIASFLSKYQDIIIEHQKVVKGNQKRLESLRELAGKENLEYPSVTLPPQPHTKEGVDAYNEVIARVRWWVNLNLWQKLKLSRDDAKPLLRLKGFPSFPLVERQANEVDWWDMVCNVKKLINEKKEDGKVFWQNLAGYKRQEALRPYLSSEEDRKKGKKFARYQLGDLLLHLEKKHGEDWGKVYDEAWERIDKKVEGLSKHIKLEEERRSEDAQSKAALTDWLRAKASFVIEGLKEADKDEFCRCELKLQKWYGDLRGKPFAIEAENSILDISGFSKQYNCAFIWQKDGVKKLNLYLIINYFKGGKLRFKKIKPEAFEANRFYTVINKKSGEIVPMEVNFNFDDPNLIILPLAFGKRQGREFIWNDLLSLETGSLKLANGRVIEKTLYNRRTRQDEPALFVALTFERREVLDSSNIKPMNLIGVDRGENIPAVIALTDPEGCPLSRFKDSLGNPTHILRIGESYKEKQRTIQAKKEVEQRRAGGYSRKYASKAKNLADDMVRNTARDLLYYAVTQDAMLIFENLSRGFGRQGKRTFMAERQYTRMEDWLTAKLAYEGLPSKTYLSKTLAQYTSKTCSNCGFTITSADYDRVLEKLKKTATGWMTTINGKELKVEGQITYYNRYKRQNVVKDLSVELDRLSEESVNNDISSWTKGRSGEALSLLKKRFSHRPVQEKFVCLNCGFETHADEQAALNIARSWLFLRSQEYKKYQTNKTTGNTDKRAFVETWQSFYRKKLKEVWKPAV

SEQ ID NO: 31963 - protein, 978 aa, synthetic construct
  REGION 1..978: note = engineered CasX variant
QEIGRINKIRRRLVKDSNTKKAGKTGPMKTLLVRVMTPDLRERLENLRKKPENIPQPISNTSRANLNKLLTDYTEMKKAILHVYWEEFQKDPVGLMSRVAQPASKKIDQNKLKPEMDEKGNLTTAGFACSQCGQPLFVYKLEQVSEKGKAYTNYFGRCNVAEHEKLILLAQLKPEKDSDEAVTYSLGKFGQRALDFYSIHVTKESTHPVKPLAQIAGNRYASAPVGKALSDACMGTIASFLSKYQDIIIEHQKVVKGNQKRLESLRELAGKENLEYPSVTLPPQPHTKEGVDAYNEVIARVRWWVNLNLWQKLKLSRDDAKPLLRLKGFPSFPLVERQANEVDWWDMVCNVKKLINEKKEDGKVFWQNLAGYKRQEALRPYLSSEEDRKKGKKFARYQLGDLLLHLEKKHGEDWGKVYDEAWERIDKKVEGLSKHIKLEEERRSEDAQSKAALTDWLRAKASFVIEGLKEADKDEFCRCELKLQKWYGDLRGKPFAIEAENSILDISGFSKQYNCAFIWQKDGVKKLNLYLIINYFKGGKLRFKKIKPEAFEANRFYTVINKKSGEIVPMEVNFNFDDPNLIILPLAFGKRQGREFIWNDLLSLETGSLKLANGRVIEKTLYNRRTRQDEPALFVALTFERREVLDSSNIKPMNLIGVDRGENIPAVIALTDPEGCPLSRFKDSLGNPTHILRIGESYKEKQRTIQAKKEVEQRRAGGYSRKYASKAKNLADDMVRNTARDLLYYAVTQDAMLIFENLSRGFGRQGKRTFMAERQYTRMEDWLTAKLAYEGLPSKTYLSKTLAQYTSKTCSNCGFTITSADYDRVLEKLKKTATGWMTTINGKELKVEGQITYYNRYKRQNVVKDLSVELDRLSEESVNNDISSWTKGRSGEALSLLKKRFSHRPVQEKFVCLNCGFETHADEQAALNIARSWLFLRSQEYKKYQTNKTTGNTDKRAFVETWQSFYRKKLKEVWKPAV

SEQ ID NO: 31964 - protein, 978 aa, synthetic construct
  REGION 1..978: note = engineered CasX variant
QEIGRINKIRRRLVKDSNTKKAGKTGPMKTLLVRVMTPDLRERLENLRKKPENIPQPISNTSRANLNKLLTDYTEMKKAILHVYWEEFQKDPVGLMSRVAQPASKKIDQNKLKPEMDEKGNLTTAGFACSQCGQPLFVYKLEQVSEKGKAYTNYFGRCNVAEHEKLILLAQLKPEKDSDEAVTYSLGKFGQRALDFYSIHVTKESTHPVKPLAQIAGNRYASVPVGKALSDACMGTIASFLSKYQDIIIEHQKVVKGNQKRLESLRELAGKENLEYPSVTLPPQPHTKEGVDAYNEVIARVRWWVNLNLWQKLKLSRDDAKPLLRLKGFPSFPLVERQANEVDWWDMVCNVKKLINEKKEDGKVFWQNLAGYKRQEALRPYLSSEEDRKKGKKFARYQLGDLLLHLEKKHGEDWGKVYDEAWERIDKKVEGLSKHIKLEEERRSEDAQSKAALTDWLRAKASFVIEGLKEADKDEFCRCELKLQKWYGDLRGKPFAIEAENSILDISGFSKQYNCAFIWQKDGVKKLNLYLIINYFKGGKLRFKKIKPEAFEANRFYTVINKKSGEIVPMEVNFNFDDPNLIILPLAFGKRQGREFIWNDLLSLETGSLKLANGRVIEKTLYNRRTRQDEPALFVALTFERREVLDSSNIKPMNLIGVDRGENIPAVIALTDPEGCPLSRFKDSLGNPTHILRIGESYKEKQRTIQAKKEVEQRRAGGYSRKYASKAKNLADDMVRNTARDLLYYAVTQDAMLIFENLSRGFGRQGKRTFMAERQYTRMEDWLTAKLAYEGLPSKTYLSKTLAQYTSKTCSNCGFTITSADYDRVLEKLKKTATGWMTTINGKELKVEGQITYYNRYKRQNVVKDLSVELDRLSEESVNNDISSWTKGRSGEALSLLKKRFSHRPVQEKFVCLNCGFETHADEQAALNIARSWLFLRSQEYKKYQTNKTTGNTDKRAFVETWQSFYRKKLKEVWKPAV

SEQ ID NO: 31965 - protein, 978 aa, synthetic construct
  REGION 1..978: note = engineered CasX variant
QEIGRINKIRRRLVKDSNTKKAGKTGPMKTLLVRVMTPDLRERLENLRKKPENIPQPISNTSRANLNKLLTDYTEMKKAILHVYWEEFQKDPVGLMSRVAQPASKKIDQNKLKPEMDEKGNLTTAGFACSQCGQPLFVYKLEQVSEKGKAYTNYFGRCNVAEHEKLIKLAQLKPEKDSDEAVTYSLGKFGQRALDFYSIHVTKESTHPVKPLAQIAGNRYASGPVGKALSDACMGTIASFLSKYQDIIIEHQKVVKGNQKRLESLRELAGKENLEYPSVTLPPQPHTKEGVDAYNEVIARVRWWVNLNLWQKLKLSRDDAKPLLRLKGFPSFPLVERQANEVDWWDMVCNVKKLINEKKEDGKVFWQNLAGYKRQEALRPYLSSEEDRKKGKKFARYQLGDLLLHLEKKHGEDWGKVYDEAWERIDKKVEGLSKHIKLEEERRSEDAQSKAALTDWLRAKASFVIEGLKEADKDEFCRCELKLQKWYGDLRGKPFAIEAENSILDISGFSKQYNCAFIWQKDGVKKLNLYLIINYFKGGKLRFKKIKPEAFEANRFYTVINKKSGEIVPMEVNFNFDDPNLIILPLAFGKRQGREFIWNDLLSLETGSLKLANGRVIEKTLYNRRTRQDEPALFVALTFERREVLDSSNIKPMNLIGVDRGENIPAVIALTDPEGCPLSRFKDSLGNPTHILRIGESYKEKQRTIQAKKEVEQRRAGGYSRKYASKAKNLADDMVRNTARDLLYYAVTQDAMLIFENLSRGFGRQGKRTFMAERQYTRMEDWLTAKLAYEGLPSKTYLSKTLAQYTSKTCSNCGFTITSADYDRVLEKLKKTATGWMTTINGKELKVEGQITYYNRYKRQNVVKDLSVELDRLSEESVNNDISSWTKGRSGEALSLLKKRFSHRPVQEKFVCLNCGFETHADEQAALNIARSWLFLRSQEYKKYQTNKTTGNTDKRAFVETWQSFYRKKLKEVWKPAV

SEQ ID NO: 31966 - protein, 977 aa, synthetic construct
  REGION 1..977: note = engineered CasX variant
QEIGRINKIRRRLVKDSNTKKAGKTGPMKTLLVRVMTPDLRERLENLRKKPENIPQPISNTSRANLNKLLTDYTEMKKAILHVYWEEFQKDPVGLMSRVAQPASKKIDQNKLKPEMDEKGNLTTAGFACSQCGQPLFVYKLEQVSEKGKAYTNYFGRCNVAEHEKLILLAQLKPEKDSDEAVTYSLGKFGQRALDFYSIHVTKESTHPVKPLAQIAGNRYASPVGKALSDACMGTIASFLSKYQDIIIEHQKVVKGNQKRLESLRELAGKENLEYPSVTLPPQPHTKEGVDAYNEVIARVRWWVNLNLWQKLKLSRDDAKPLLRLKGFPSFPLVERQANEVDWWDMVCNVKKLINEKKEDGKVFWQNLAGYKRQEALRPYLSSEEDRKKGKKFARYQLGDLLLHLEKKHGEDWGKVYDEAWERIDKKVEGLSKHIKLEEERRSEDAQSKAALTDWLRAKASFVIEGLKEADKDEFCRCELKLQKWYGDLRGKPFAIEAENSILDISGFSKQYNCAFIWQKDGVKKLNLYLIINYFKGGKLRFKKIKPEAFEANRFYTVINKKSGEIVPMEVNFNFDDPNLIILPLAFGKRQGREFIWNDLLSLETGSLKLANGRVIEKTLYNRRTRQDEPALFVALTFERREVLDSSNIKPMNLIGVDRGENIPAVIALTDPEGCPLSRFKDSLGNPTHILRIGESYKEKQRTIQAKKEVEQRRAGGYSRKYASKAKNLADDMVRNTARDLLYYAVTQDAMLIFENLSRGFGRQGKRTFMAERQYTRMEDWLTAKLAYEGLPSKTYLSKTLAQYTSKTCSNCGFTITSADYDRVLEKLKKTATGWMTTINGKELKVEGQITYYNRYKRQNVVKDLSVELDRLSEESVNNDISSWTKGRSGEALSLLKKRFSHRPVQEKFVCLNCGFETHADEQAALNIARSWLFLRSQEYKKYQTNKTTGNTDKRAFVETWQSFYRKKLKEVWKPAV

SEQ ID NO: 31967 - protein, 979 aa, synthetic construct
  REGION 1..979: note = engineered CasX variant
QEIGRINKIRRRLVKDSNTKKAGKTGPMKTLLVRVMTPDLRERLENLRKKPENIPQPISNTSRANLNKLLTDYTEMKKAILHVYWEEFQKDPVGLMSRVAQPASKKIDQNKLKPEMDEKGNLTTAGFACSQCGQPLFVYKLEQVSEKGKAYTNYFGRCNVAEHEKLILLAQLKPEKDSDEAVTYSLGKFGQRALDFYSIHVTKESTHPVKPLAQIAGNRYASYPVGKALSDACMGTIASFLSKYQDIIIEHQKVVKGNQKRLESLRELAGKENLEYPSVTLPPQPHTKEGVDAYNEVIARVRMWVNLNLWQKLKLSRDDAKPLLRLKGFPSFPLVERQQANEVDWWDMVCNVKKLINEKKEDGKVFWQNLAGYKRQEALRPYLSSEEDRKKGKKFARYQLGDLLLHLEKKHGEDWGKVYDEAWERIDKKVEGLSKHIKLEEERRSEDAQSKAALTDWLRAKASFVIEGLKEADKDEFCRCELKLQKWYGDLRGKPFAIEAENSILDISGFSKQYNCAFIWQKDGVKKLNLYLIINYFKGGKLRFKKIKPEAFEANRFYTVINKKSGEIVPMEVNFNFDDPNLIILPLAFGKRQGREFIWNDLLSLETGSLKLANGRVIEKTLYNRRTRQDEPALFVALTFERREVLDSSNIKPMNLIGVDRGENIPAVIALTDPEGCPLSRFKDSLGNPTHILRIGESYKEKQRTIQAKKEVEQRRAGGYSRKYASKAKNLADDMVRNTARDLLYYAVTQDAMLIFENLSRGFGRQGKRTFMAERQYTRMEDWLTAKLAYEGLPSKTYLSKTLAQYTSKTCSNCGFTITSADYDRVLEKLKKTATGWMTTINGKELKVEGQITYYNRYKRQNVVKDLSVELDRLSEESVNNDISSWTKGRSGEALSLLKKRFSHRPVQEKFVCLNCGFETHADEQAALNIARSWLFLRSQEYKKYQTNKTTGNTDKRAFVETWQSFYRKKLKEVWKPAV

SEQ ID NO: 31968 - protein, 979 aa, synthetic construct
  REGION 1..979: note = engineered CasX variant
QEIGRINKIRRRLVKDSNTKKAGKTGPMKTLLVRVMTPDLRERLENLRKKPENIPQPISNTSRANLNKLLTDYTEMKKAILHVYWEEFQKDPVGLMSRVAQPASKKIDQNKLKPEMDEKGNLTTAGFACSQCGQPLFVYKLEQVSEKGKAYTNYFGRCNVAEHEKLILLAQLKPEKDSDEAVTYSLGKFGQRALDFYSIHVTKESTHPVKPLAQIAGNRYASHPVGKALSDACMGTIASFLSKYQDIIIEHQKVVKGNQKRLESLRELAGKENLEYPSVTLPPQPHTKEGVDAYNEVIARVRMWVNLNLWQKLKLSRDDAKPLLRLKGFPSFPLVERQQANEVDWWDMVCNVKKLINEKKEDGKVFWQNLAGYKRQEALRPYLSSEEDRKKGKKFARYQLGDLLLHLEKKHGEDWGKVYDEAWERIDKKVEGLSKHIKLEEERRSEDAQSKAALTDWLRAKASFVIEGLKEADKDEFCRCELKLQKWYGDLRGKPFAIEAENSILDISGFSKQYNCAFIWQKDGVKKLNLYLIINYFKGGKLRFKKIKPEAFEANRFYTVINKKSGEIVPMEVNFNFDDPNLIILPLAFGKRQGREFIWNDLLSLETGSLKLANGRVIEKTLYNRRTRQDEPALFVALTFERREVLDSSNIKPMNLIGVDRGENIPAVIALTDPEGCPLSRFKDSLGNPTHILRIGESYKEKQRTIQAKKEVEQRRAGGYSRKYASKAKNLADDMVRNTARDLLYYAVTQDAMLIFENLSRGFGRQGKRTFMAERQYTRMEDWLTAKLAYEGLPSKTYLSKTLAQYTSKTCSNCGFTITSADYDRVLEKLKKTATGWMTTINGKELKVEGQITYYNRYKRQNVVKDLSVELDRLSEESVNNDISSWTKGRSGEALSLLKKRFSHRPVQEKFVCLNCGFETHADEQAALNIARSWLFLRSQEYKKYQTNKTTGNTDKRAFVETWQSFYRKKLKEVWKPAV

SEQ ID NO: 31969 - protein, 979 aa, synthetic construct
  REGION 1..979: note = engineered CasX variant
QEIGRINKIRRRLVKDSNTKKAGKTGPMKTLLVRVMTPDLRERLENLRKKPENIPQPISNTSRANLNKLLTDYTEMKKAILHVYWEEFQKDPVGLMSRVAQPASKKIDQNKLKPEMDEKGNLTTAGFACSQCGQPLFVYKLEQVSEKGKAYTNYFGRCNVAEHEKLILLAQLKPEKDSDEAVTYSLGKFGQRALDFYSIHVTKESTHPVKPLAQIAGNRYASSPVGKALSDACMGTIASFLSKYQDIIIEHQKVVKGNQKRLESLRELAGKENLEYPSVTLPPQPHTKEGVDAYNEVIARVRMWVNLNLWQKLKLSRDDAKPLLRLKGFPSFPLVERQQANEVDWWDMVCNVKKLINEKKEDGKVFWQNLAGYKRQEALRPYLSSEEDRKKGKKFARYQLGDLLLHLEKKHGEDWGKVYDEAWERIDKKVEGLSKHIKLEEERRSEDAQSKAALTDWLRAKASFVIEGLKEADKDEFCRCELKLQKWYGDLRGKPFAIEAENSILDISGFSKQYNCAFIWQKDGVKKLNLYLIINYFKGGKLRFKKIKPEAFEANRFYTVINKKSGEIVPMEVNFNFDDPNLIILPLAFGKRQGREFIWNDLLSLETGSLKLANGRVIEKTLYNRRTRQDEPALFVALTFERREVLDSSNIKPMNLIGVDRGENIPAVIALTDPEGCPLSRFKDSLGNPTHILRIGESYKEKQRTIQAKKEVEQRRAGGYSRKYASKAKNLADDMVRNTARDLLYYAVTQDAMLIFENLSRGFGRQGKRTFMAERQYTRMEDWLTAKLAYEGLPSKTYLSKTLAQYTSKTCSNCGFTITSADYDRVLEKLKKTATGWMTTINGKELKVEGQITYYNRYKRQNVVKDLSVELDRLSEESVNNDISSWTKGRSGEALSLLKKRFSHRPVQEKFVCLNCGFETHADEQAALNIARSWLFLRSQEYKKYQTNKTTGNTDKRAFVETWQSFYRKKLKEVWKPAV

SEQ ID NO: 31970 - protein, 979 aa, synthetic construct
  REGION 1..979: note = engineered CasX variant
QEIGRINKIRRRLVKDSNTKKAGKTGPMKTLLVRVMTPDLRERLENLRKKPENIPQPISNTSRANLNKLLTDYTEMKKAILHVYWEEFQKDPVGLMSRVAQPASKKIDQNKLKPEMDEKGNLTTAGFACSQCGQPLFVYKLEQVSEKGKAYTNYFGRCNVAEHEKLILLAQLKPEKDSDEAVTYSLGKFGQRALDFYSIHVTKESTHPVKPLAQIAGNRYASTPVGKALSDACMGTIASFLSKYQDIIIEHQKVVKGNQKRLESLRELAGKENLEYPSVTLPPQPHTKEGVDAYNEVIARVRMWVNLNLWQKLKLSRDDAKPLLRLKGFPSFPLVERQQANEVDWWDMVCNVKKLINEKKEDGKVFWQNLAGYKRQEALRPYLSSEEDRKKGKKFARYQLGDLLLHLEKKHGEDWGKVYDEAWERIDKKVEGLSKHIKLEEERRSEDAQSKAALTDWLRAKASFVIEGLKEADKDEFCRCELKLQKWYGDLRGKPFAIEAENSILDISGFSKQYNCAFIWQKDGVKKLNLYLIINYFKGGKLRFKKIKPEAFEANRFYTVINKKSGEIVPMEVNFNFDDPNLIILPLAFGKRQGREFIWNDLLSLETGSLKLANGRVIEKTLYNRRTRQDEPALFVALTFERREVLDSSNIKPMNLIGVDRGENIPAVIALTDPEGCPLSRFKDSLGNPTHILRIGESYKEKQRTIQAKKEVEQRRAGGYSRKYASKAKNLADDMVRNTARDLLYYAVTQDAMLIFENLSRGFGRQGKRTFMAERQYTRMEDWLTAKLAYEGLPSKTYLSKTLAQYTSKTCSNCGFTITSADYDRVLEKLKKTATGWMTTINGKELKVEGQITYYNRYKRQNVVKDLSVELDRLSEESVNNDISSWTKGRSGEALSLLKKRFSHRPVQEKFVCLNCGFETHADEQAALNIARSWLFLRSQEYKKYQTNKTTGNTDKRAFVETWQSFYRKKLKEVWKPAV

SEQ ID NO: 31971 - protein, 979 aa, synthetic construct
  REGION 1..979: note = engineered CasX variant
QEIGRINKIRRRLVKDSNTKKAGKTGPMKTLLVRVMTPDLRERLENLRKKPENIPQPISNTSRANLNKLLTDYTEMKKAILHVYWEEFQKDPVGLMSRVAQPASKKIDQNKLKPEMDEKGNLTTAGFACSQCGQPLFVYKLEQVSEKGKAYTNYFGRCNVAEHEKLILLAQLKPEKDSDEAVTYSLGKFGQRALDFYSIHVTKESTHPVKPLAQIAGNRYASAPVGKALSDACMGTIASFLSKYQDIIIEHQKVVKGNQKRLESLRELAGKENLEYPSVTLPPQPHTKEGVDAYNEVIARVRMWVNLNLWQKLKLSRDDAKPLLRLKGFPSFPLVERQQANEVDWWDMVCNVKKLINEKKEDGKVFWQNLAGYKRQEALRPYLSSEEDRKKGKKFARYQLGDLLLHLEKKHGEDWGKVYDEAWERIDKKVEGLSKHIKLEEERRSEDAQSKAALTDWLRAKASFVIEGLKEADKDEFCRCELKLQKWYGDLRGKPFAIEAENSILDISGFSKQYNCAFIWQKDGVKKLNLYLIINYFKGGKLRFKKIKPEAFEANRFYTVINKKSGEIVPMEVNFNFDDPNLIILPLAFGKRQGREFIWNDLLSLETGSLKLANGRVIEKTLYNRRTRQDEPALFVALTFERREVLDSSNIKPMNLIGVDRGENIPAVIALTDPEGCPLSRFKDSLGNPTHILRIGESYKEKQRTIQAKKEVEQRRAGGYSRKYASKAKNLADDMVRNTARDLLYYAVTQDAMLIFENLSRGFGRQGKRTFMAERQYTRMEDWLTAKLAYEGLPSKTYLSKTLAQYTSKTCSNCGFTITSADYDRVLEKLKKTATGWMTTINGKELKVEGQITYYNRYKRQNVVKDLSVELDRLSEESVNNDISSWTKGRSGEALSLLKKRFSHRPVQEKFVCLNCGFETHADEQAALNIARSWLFLRSQEYKKYQTNKTTGNTDKRAFVETWQSFYRKKLKEVWKPAV

SEQ ID NO: 31972 - protein, 979 aa, synthetic construct
  REGION 1..979: note = engineered CasX variant
QEIGRINKIRRRLVKDSNTKKAGKTGPMKTLLVRVMTPDLRERLENLRKKPENIPQPISNTSRANLNKLLTDYTEMKKAILHVYWEEFQKDPVGLMSRVAQPASKKIDQNKLKPEMDEKGNLTTAGFACSQCGQPLFVYKLEQVSEKGKAYTNYFGRCNVAEHEKLILLAQLKPEKDSDEAVTYSLGKFGQRALDFYSIHVTKESTHPVKPLAQIAGNRYASVPVGKALSDACMGTIASFLSKYQDIIIEHQKVVKGNQKRLESLRELAGKENLEYPSVTLPPQPHTKEGVDAYNEVIARVRMWVNLNLWQKLKLSRDDAKPLLRLKGFPSFPLVERQQANEVDWWDMVCNVKKLINEKKEDGKVFWQNLAGYKRQEALRPYLSSEEDRKKGKKFARYQLGDLLLHLEKKHGEDWGKVYDEAWERIDKKVEGLSKHIKLEEERRSEDAQSKAALTDWLRAKASFVIEGLKEADKDEFCRCELKLQKWYGDLRGKPFAIEAENSILDISGFSKQYNCAFIWQKDGVKKLNLYLIINYFKGGKLRFKKIKPEAFEANRFYTVINKKSGEIVPMEVNFNFDDPNLIILPLAFGKRQGREFIWNDLLSLETGSLKLANGRVIEKTLYNRRTRQDEPALFVALTFERREVLDSSNIKPMNLIGVDRGENIPAVIALTDPEGCPLSRFKDSLGNPTHILRIGESYKEKQRTIQAKKEVEQRRAGGYSRKYASKAKNLADDMVRNTARDLLYYAVTQDAMLIFENLSRGFGRQGKRTFMAERQYTRMEDWLTAKLAYEGLPSKTYLSKTLAQYTSKTCSNCGFTITSADYDRVLEKLKKTATGWMTTINGKELKVEGQITYYNRYKRQNVVKDLSVELDRLSEESVNNDISSWTKGRSGEALSLLKKRFSHRPVQEKFVCLNCGFETHADEQAALNIARSWLFLRSQEYKKYQTNKTTGNTDKRAFVETWQSFYRKKLKEVWKPAV

SEQ ID NO: 31973 - protein, 979 aa, synthetic construct
  REGION 1..979: note = engineered CasX variant
QEIGRINKIRRRLVKDSNTKKAGKTGPMKTLLVRVMTPDLRERLENLRKKPENIPQPISNTSRANLNKLLTDYTEMKKAILHVYWEEFQKDPVGLMSRVAQPASKKIDQNKLKPEMDEKGNLTTAGFACSQCGQPLFVYKLEQVSEKGKAYTNYFGRCNVAEHEKLIKLAQLKPEKDSDEAVTYSLGKFGQRALDFYSIHVTKESTHPVKPLAQIAGNRYASGPVGKALSDACMGTIASFLSKYQDIIIEHQKVVKGNQKRLESLRELAGKENLEYPSVTLPPQPHTKEGVDAYNEVIARVRMWVNLNLWQKLKLSRDDAKPLLRLKGFPSFPLVERQQANEVDWWDMVCNVKKLINEKKEDGKVFWQNLAGYKRQEALRPYLSSEEDRKKGKKFARYQLGDLLLHLEKKHGEDWGKVYDEAWERIDKKVEGLSKHIKLEEERRSEDAQSKAALTDWLRAKASFVIEGLKEADKDEFCRCELKLQKWYGDLRGKPFAIEAENSILDISGFSKQYNCAFIWQKDGVKKLNLYLIINYFKGGKLRFKKIKPEAFEANRFYTVINKKSGEIVPMEVNFNFDDPNLIILPLAFGKRQGREFIWNDLLSLETGSLKLANGRVIEKTLYNRRTRQDEPALFVALTFERREVLDSSNIKPMNLIGVDRGENIPAVIALTDPEGCPLSRFKDSLGNPTHILRIGESYKEKQRTIQAKKEVEQRRAGGYSRKYASKAKNLADDMVRNTARDLLYYAVTQDAMLIFENLSRGFGRQGKRTFMAERQYTRMEDWLTAKLAYEGLPSKTYLSKTLAQYTSKTCSNCGFTITSADYDRVLEKLKKTATGWMTTINGKELKVEGQITYYNRYKRQNVVKDLSVELDRLSEESVNNDISSWTKGRSGEALSLLKKRFSHRPVQEKFVCLNCGFETHADEQAALNIARSWLFLRSQEYKKYQTNKTTGNTDKRAFVETWQSFYRKKLKEVWKPAV

SEQ ID NO: 31974 - protein, 978 aa, synthetic construct
  REGION 1..978: note = engineered CasX variant
QEIGRINKIRRRLVKDSNTKKAGKTGPMKTLLVRVMTPDLRERLENLRKKPENIPQPISNTSRANLNKLLTDYTEMKKAILHVYWEEFQKDPVGLMSRVAQPASKKIDQNKLKPEMDEKGNLTTAGFACSQCGQPLFVYKLEQVSEKGKAYTNYFGRCNVAEHEKLILLAQLKPEKDSDEAVTYSLGKFGQRALDFYSIHVTKESTHPVKPLAQIAGNRYASPVGKALSDACMGTIASFLSKYQDIIIEHQKVVKGNQKRLESLRELAGKENLEYPSVTLPPQPHTKEGVDAYNEVIARVRMWVNLNLWQKLKLSRDDAKPLLRLKGFPSFPLVERQQANEVDWWDMVCNVKKLINEKKEDGKVFWQNLAGYKRQEALRPYLSSEEDRKKGKKFARYQLGDLLLHLEKKHGEDWGKVYDEAWERIDKKVEGLSKHIKLEEERRSEDAQSKAALTDWLRAKASFVIEGLKEADKDEFCRCELKLQKWYGDLRGKPFAIEAENSILDISGFSKQYNCAFIWQKDGVKKLNLYLIINYFKGGKLRFKKIKPEAFEANRFYTVINKKSGEIVPMEVNFNFDDPNLIILPLAFGKRQGREFIWNDLLSLETGSLKLANGRVIEKTLYNRRTRQDEPALFVALTFERREVLDSSNIKPMNLIGVDRGENIPAVIALTDPEGCPLSRFKDSLGNPTHILRIGESYKEKQRTIQAKKEVEQRRAGGYSRKYASKAKNLADDMVRNTARDLLYYAVTQDAMLIFENLSRGFGRQGKRTFMAERQYTRMEDWLTAKLAYEGLPSKTYLSKTLAQYTSKTCSNCGFTITSADYDRVLEKLKKTATGWMTTINGKELKVEGQITYYNRYKRQNVVKDLSVELDRLSEESVNNDISSWTKGRSGEALSLLKKRFSHRPVQEKFVCLNCGFETHADEQAALNIARSWLFLRSQEYKKYQTNKTTGNTDKRAFVETWQSFYRKKLKEVWKPAV

SEQ ID NO: 31975 - protein, 979 aa, synthetic construct
  REGION 1..979: note = engineered CasX variant
QEIGRINKIRRRLVKDSNTKKAGKTGPMKTLLVRVMTPDLRERLENLRKKPENIPQPISNTSRANLNKLLTDYTEMKKAILHVYWEEFQKDPVGLMSRVAQPASKKIDQNKLKPEMDEKGNLTTAGFACSQCGQPLFVYKLEQVSEKGKAYTNYFGRCNVAEHEKLILLAQLKPEKDSDEAVTYSLGKFGQRALDFYSIHVTKESTHPVKPLAQIAGNRYASYPVGKALSDACMGTIASFLSKYQDIIIEHQKVVKGNQKRLESLRELAGKENLEYPSVTLPPQPHTKEGVDAYNEVIARVRMWVNLNLWQKLKLSRDDAKPLLRLKGFPSFPLVERQANAEVDWWDMVCNVKKLINEKKEDGKVFWQNLAGYKRQEALRPYLSSEEDRKKGKKFARYQLGDLLLHLEKKHGEDWGKVYDEAWERIDKKVEGLSKHIKLEEERRSEDAQSKAALTDWLRAKASFVIEGLKEADKDEFCRCELKLQKWYGDLRGKPFAIEAENSILDISGFSKQYNCAFIWQKDGVKKLNLYLIINYFKGGKLRFKKIKPEAFEANRFYTVINKKSGEIVPMEVNFNFDDPNLIILPLAFGKRQGREFIWNDLLSLETGSLKLANGRVIEKTLYNRRTRQDEPALFVALTFERREVLDSSNIKPMNLIGVDRGENIPAVIALTDPEGCPLSRFKDSLGNPTHILRIGESYKEKQRTIQAKKEVEQRRAGGYSRKYASKAKNLADDMVRNTARDLLYYAVTQDAMLIFENLSRGFGRQGKRTFMAERQYTRMEDWLTAKLAYEGLPSKTYLSKTLAQYTSKTCSNCGFTITSADYDRVLEKLKKTATGWMTTINGKELKVEGQITYYNRYKRQNVVKDLSVELDRLSEESVNNDISSWTKGRSGEALSLLKKRFSHRPVQEKFVCLNCGFETHADEQAALNIARSWLFLRSQEYKKYQTNKTTGNTDKRAFVETWQSFYRKKLKEVWKPAV

SEQ ID NO: 31976 - protein, 979 aa, synthetic construct
  REGION 1..979: note = engineered CasX variant
QEIGRINKIRRRLVKDSNTKKAGKTGPMKTLLVRVMTPDLRERLENLRKKPENIPQPISNTSRANLNKLLTDYTEMKKAILHVYWEEFQKDPVGLMSRVAQPASKKIDQNKLKPEMDEKGNLTTAGFACSQCGQPLFVYKLEQVSEKGKAYTNYFGRCNVAEHEKLILLAQLKPEKDSDEAVTYSLGKFGQRALDFYSIHVTKESTHPVKPLAQIAGNRYASHPVGKALSDACMGTIASFLSKYQDIIIEHQKVVKGNQKRLESLRELAGKENLEYPSVTLPPQPHTKEGVDAYNEVIARVRMWVNLNLWQKLKLSRDDAKPLLRLKGFPSFPLVERQANAEVDWWDMVCNVKKLINEKKEDGKVFWQNLAGYKRQEALRPYLSSEEDRKKGKKFARYQLGDLLLHLEKKHGEDWGKVYDEAWERIDKKVEGLSKHIKLEEERRSEDAQSKAALTDWLRAKASFVIEGLKEADKDEFCRCELKLQKWYGDLRGKPFAIEAENSILDISGFSKQYNCAFIWQKDGVKKLNLYLIINYFKGGKLRFKKIKPEAFEANRFYTVINKKSGEIVPMEVNFNFDDPNLIILPLAFGKRQGREFIWNDLLSLETGSLKLANGRVIEKTLYNRRTRQDEPALFVALTFERREVLDSSNIKPMNLIGVDRGENIPAVIALTDPEGCPLSRFKDSLGNPTHILRIGESYKEKQRTIQAKKEVEQRRAGGYSRKYASKAKNLADDMVRNTARDLLYYAVTQDAMLIFENLSRGFGRQGKRTFMAERQYTRMEDWLTAKLAYEGLPSKTYLSKTLAQYTSKTCSNCGFTITSADYDRVLEKLKKTATGWMTTINGKELKVEGQITYYNRYKRQNVVKDLSVELDRLSEESVNNDISSWTKGRSGEALSLLKKRFSHRPVQEKFVCLNCGFETHADEQAALNIARSWLFLRSQEYKKYQTNKTTGNTDKRAFVETWQSFYRKKLKEVWKPAV

SEQ ID NO: 31977 - protein, 979 aa, synthetic construct
  REGION 1..979: note = engineered CasX variant
QEIGRINKIRRRLVKDSNTKKAGKTGPMKTLLVRVMTPDLRERLENLRKKPENIPQPISNTSRANLNKLLTDYTEMKKAILHVYWEEFQKDPVGLMSRVAQPASKKIDQNKLKPEMDEKGNLTTAGFACSQCGQPLFVYKLEQVSEKGKAYTNYFGRCNVAEHEKLILLAQLKPEKDSDEAVTYSLGKFGQRALDFYSIHVTKESTHPVKPLAQIAGNRYASSPVGKALSDACMGTIASFLSKYQDIIIEHQKVVKGNQKRLESLRELAGKENLEYPSVTLPPQPHTKEGVDAYNEVIARVRMWVNLNLWQKLKLSRDDAKPLLRLKGFPSFPLVERQANAEVDWWDMVCNVKKLINEKKEDGKVFWQNLAGYKRQEALRPYLSSEEDRKKGKKFARYQLGDLLLHLEKKHGEDWGKVYDEAWERIDKKVEGLSKHIKLEEERRSEDAQSKAALTDWLRAKASFVIEGLKEADKDEFCRCELKLQKWYGDLRGKPFAIEAENSILDISGFSKQYNCAFIWQKDGVKKLNLYLIINYFKGGKLRFKKIKPEAFEANRFYTVINKKSGEIVPMEVNFNFDDPNLIILPLAFGKRQGREFIWNDLLSLETGSLKLANGRVIEKTLYNRRTRQDEPALFVALTFERREVLDSSNIKPMNLIGVDRGENIPAVIALTDPEGCPLSRFKDSLGNPTHILRIGESYKEKQRTIQAKKEVEQRRAGGYSRKYASKAKNLADDMVRNTARDLLYYAVTQDAMLIFENLSRGFGRQGKRTFMAERQYTRMEDWLTAKLAYEGLPSKTYLSKTLAQYTSKTCSNCGFTITSADYDRVLEKLKKTATGWMTTINGKELKVEGQITYYNRYKRQNVVKDLSVELDRLSEESVNNDISSWTKGRSGEALSLLKKRFSHRPVQEKFVCLNCGFETHADEQAALNIARSWLFLRSQEYKKYQTNKTTGNTDKRAFVETWQSFYRKKLKEVWKPAV

SEQ ID NO: 31978 - protein, 979 aa, synthetic construct
  REGION 1..979: note = engineered CasX variant
QEIGRINKIRRRLVKDSNTKKAGKTGPMKTLLVRVMTPDLRERLENLRKKPENIPQPISNTSRANLNKLLTDYTEMKKAILHVYWEEFQKDPVGLMSRVAQPASKKIDQNKLKPEMDEKGNLTTAGFACSQCGQPLFVYKLEQVSEKGKAYTNYFGRCNVAEHEKLILLAQLKPEKDSDEAVTYSLGKFGQRALDFYSIHVTKESTHPVKPLAQIAGNRYASTPVGKALSDACMGTIASFLSKYQDIIIEHQKVVKGNQKRLESLRELAGKENLEYPSVTLPPQPHTKEGVDAYNEVIARVRMWVNLNLWQKLKLSRDDAKPLLRLKGFPSFPLVERQANAEVDWWDMVCNVKKLINEKKEDGKVFWQNLAGYKRQEALRPYLSSEEDRKKGKKFARYQLGDLLLHLEKKHGEDWGKVYDEAWERIDKKVEGLSKHIKLEEERRSEDAQSKAALTDWLRAKASFVIEGLKEADKDEFCRCELKLQKWYGDLRGKPFAIEAENSILDISGFSKQYNCAFIWQKDGVKKLNLYLIINYFKGGKLRFKKIKPEAFEANRFYTVINKKSGEIVPMEVNFNFDDPNLIILPLAFGKRQGREFIWNDLLSLETGSLKLANGRVIEKTLYNRRTRQDEPALFVALTFERREVLDSSNIKPMNLIGVDRGENIPAVIALTDPEGCPLSRFKDSLGNPTHILRIGESYKEKQRTIQAKKEVEQRRAGGYSRKYASKAKNLADDMVRNTARDLLYYAVTQDAMLIFENLSRGFGRQGKRTFMAERQYTRMEDWLTAKLAYEGLPSKTYLSKTLAQYTSKTCSNCGFTITSADYDRVLEKLKKTATGWMTTINGKELKVEGQITYYNRYKRQNVVKDLSVELDRLSEESVNNDISSWTKGRSGEALSLLKKRFSHRPVQEKFVCLNCGFETHADEQAALNIARSWLFLRSQEYKKYQTNKTTGNTDKRAFVETWQSFYRKKLKEVWKPAV

SEQ ID NO: 31979 - protein, 979 aa, synthetic construct
  REGION 1..979: note = engineered CasX variant
QEIGRINKIRRRLVKDSNTKKAGKTGPMKTLLVRVMTPDLRERLENLRKKPENIPQPISNTSRANLNKLLTDYTEMKKAILHVYWEEFQKDPVGLMSRVAQPASKKIDQNKLKPEMDEKGNLTTAGFACSQCGQPLFVYKLEQVSEKGKAYTNYFGRCNVAEHEKLILLAQLKPEKDSDEAVTYSLGKFGQRALDFYSIHVTKESTHPVKPLAQIAGNRYASAPVGKALSDACMGTIASFLSKYQDIIIEHQKVVKGNQKRLESLRELAGKENLEYPSVTLPPQPHTKEGVDAYNEVIARVRMWVNLNLWQKLKLSRDDAKPLLRLKGFPSFPLVERQANAEVDWWDMVCNVKKLINEKKEDGKVFWQNLAGYKRQEALRPYLSSEEDRKKGKKFARYQLGDLLLHLEKKHGEDWGKVYDEAWERIDKKVEGLSKHIKLEEERRSEDAQSKAALTDWLRAKASFVIEGLKEADKDEFCRCELKLQKWYGDLRGKPFAIEAENSILDISGFSKQYNCAFIWQKDGVKKLNLYLIINYFKGGKLRFKKIKPEAFEANRFYTVINKKSGEIVPMEVNFNFDDPNLIILPLAFGKRQGREFIWNDLLSLETGSLKLANGRVIEKTLYNRRTRQDEPALFVALTFERREVLDSSNIKPMNLIGVDRGENIPAVIALTDPEGCPLSRFKDSLGNPTHILRIGESYKEKQRTIQAKKEVEQRRAGGYSRKYASKAKNLADDMVRNTARDLLYYAVTQDAMLIFENLSRGFGRQGKRTFMAERQYTRMEDWLTAKLAYEGLPSKTYLSKTLAQYTSKTCSNCGFTITSADYDRVLEKLKKTATGWMTTINGKELKVEGQITYYNRYKRQNVVKDLSVELDRLSEESVNNDISSWTKGRSGEALSLLKKRFSHRPVQEKFVCLNCGFETHADEQAALNIARSWLFLRSQEYKKYQTNKTTGNTDKRAFVETWQSFYRKKLKEVWKPAV

SEQ ID NO: 31980 - protein, 979 aa, synthetic construct
  REGION 1..979: note = engineered CasX variant
QEIGRINKIRRRLVKDSNTKKAGKTGPMKTLLVRVMTPDLRERLENLRKKPENIPQPISNTSRANLNKLLTDYTEMKKAILHVYWEEFQKDPVGLMSRVAQPASKKIDQNKLKPEMDEKGNLTTAGFACSQCGQPLFVYKLEQVSEKGKAYTNYFGRCNVAEHEKLILLAQLKPEKDSDEAVTYSLGKFGQRALDFYSIHVTKESTHPVKPLAQIAGNRYASVPVGKALSDACMGTIASFLSKYQDIIIEHQKVVKGNQKRLESLRELAGKENLEYPSVTLPPQPHTKEGVDAYNEVIARVRMWVNLNLWQKLKLSRDDAKPLLRLKGFPSFPLVERQANAEVDWWDMVCNVKKLINEKKEDGKVFWQNLAGYKRQEALRPYLSSEEDRKKGKKFARYQLGDLLLHLEKKHGEDWGKVYDEAWERIDKKVEGLSKHIKLEEERRSEDAQSKAALTDWLRAKASFVIEGLKEADKDEFCRCELKLQKWYGDLRGKPFAIEAENSILDISGFSKQYNCAFIWQKDGVKKLNLYLIINYFKGGKLRFKKIKPEAFEANRFYTVINKKSGEIVPMEVNFNFDDPNLIILPLAFGKRQGREFIWNDLLSLETGSLKLANGRVIEKTLYNRRTRQDEPALFVALTFERREVLDSSNIKPMNLIGVDRGENIPAVIALTDPEGCPLSRFKDSLGNPTHILRIGESYKEKQRTIQAKKEVEQRRAGGYSRKYASKAKNLADDMVRNTARDLLYYAVTQDAMLIFENLSRGFGRQGKRTFMAERQYTRMEDWLTAKLAYEGLPSKTYLSKTLAQYTSKTCSNCGFTITSADYDRVLEKLKKTATGWMTTINGKELKVEGQITYYNRYKRQNVVKDLSVELDRLSEESVNNDISSWTKGRSGEALSLLKKRFSHRPVQEKFVCLNCGFETHADEQAALNIARSWLFLRSQEYKKYQTNKTTGNTDKRAFVETWQSFYRKKLKEVWKPAV

SEQ ID NO: 31981 - protein, 979 aa, synthetic construct
  REGION 1..979: note = engineered CasX variant
QEIGRINKIRRRLVKDSNTKKAGKTGPMKTLLVRVMTPDLRERLENLRKKPENIPQPISNTSRANLNKLLTDYTEMKKAILHVYWEEFQKDPVGLMSRVAQPASKKIDQNKLKPEMDEKGNLTTAGFACSQCGQPLFVYKLEQVSEKGKAYTNYFGRCNVAEHEKLIKLAQLKPEKDSDEAVTYSLGKFGQRALDFYSIHVTKESTHPVKPLAQIAGNRYASGPVGKALSDACMGTIASFLSKYQDIIIEHQKVVKGNQKRLESLRELAGKENLEYPSVTLPPQPHTKEGVDAYNEVIARVRMWVNLNLWQKLKLSRDDAKPLLRLKGFPSFPLVERQANAEVDWWDMVCNVKKLINEKKEDGKVFWQNLAGYKRQEALRPYLSSEEDRKKGKKFARYQLGDLLLHLEKKHGEDWGKVYDEAWERIDKKVEGLSKHIKLEEERRSEDAQSKAALTDWLRAKASFVIEGLKEADKDEFCRCELKLQKWYGDLRGKPFAIEAENSILDISGFSKQYNCAFIWQKDGVKKLNLYLIINYFKGGKLRFKKIKPEAFEANRFYTVINKKSGEIVPMEVNFNFDDPNLIILPLAFGKRQGREFIWNDLLSLETGSLKLANGRVIEKTLYNRRTRQDEPALFVALTFERREVLDSSNIKPMNLIGVDRGENIPAVIALTDPEGCPLSRFKDSLGNPTHILRIGESYKEKQRTIQAKKEVEQRRAGGYSRKYASKAKNLADDMVRNTARDLLYYAVTQDAMLIFENLSRGFGRQGKRTFMAERQYTRMEDWLTAKLAYEGLPSKTYLSKTLAQYTSKTCSNCGFTITSADYDRVLEKLKKTATGWMTTINGKELKVEGQITYYNRYKRQNVVKDLSVELDRLSEESVNNDISSWTKGRSGEALSLLKKRFSHRPVQEKFVCLNCGFETHADEQAALNIARSWLFLRSQEYKKYQTNKTTGNTDKRAFVETWQSFYRKKLKEVWKPAV

SEQ ID NO: 31982 - protein, 978 aa, synthetic construct
  REGION 1..978: note = engineered CasX variant
QEIGRINKIRRRLVKDSNTKKAGKTGPMKTLLVRVMTPDLRERLENLRKKPENIPQPISNTSRANLNKLLTDYTEMKKAILHVYWEEFQKDPVGLMSRVAQPASKKIDQNKLKPEMDEKGNLTTAGFACSQCGQPLFVYKLEQVSEKGKAYTNYFGRCNVAEHEKLILLAQLKPEKDSDEAVTYSLGKFGQRALDFYSIHVTKESTHPVKPLAQIAGNRYASPVGKALSDACMGTIASFLSKYQDIIIEHQKVVKGNQKRLESLRELAGKENLEYPSVTLPPQPHTKEGVDAYNEVIARVRMWVNLNLWQKLKLSRDDAKPLLRLKGFPSFPLVERQANAEVDWWDMVCNVKKLINEKKEDGKVFWQNLAGYKRQEALRPYLSSEEDRKKGKKFARYQLGDLLLHLEKKHGEDWGKVYDEAWERIDKKVEGLSKHIKLEEERRSEDAQSKAALTDWLRAKASFVIEGLKEADKDEFCRCELKLQKWYGDLRGKPFAIEAENSILDISGFSKQYNCAFIWQKDGVKKLNLYLIINYFKGGKLRFKKIKPEAFEANRFYTVINKKSGEIVPMEVNFNFDDPNLIILPLAFGKRQGREFIWNDLLSLETGSLKLANGRVIEKTLYNRRTRQDEPALFVALTFERREVLDSSNIKPMNLIGVDRGENIPAVIALTDPEGCPLSRFKDSLGNPTHILRIGESYKEKQRTIQAKKEVEQRRAGGYSRKYASKAKNLADDMVRNTARDLLYYAVTQDAMLIFENLSRGFGRQGKRTFMAERQYTRMEDWLTAKLAYEGLPSKTYLSKTLAQYTSKTCSNCGFTITSADYDRVLEKLKKTATGWMTTINGKELKVEGQITYYNRYKRQNVVKDLSVELDRLSEESVNNDISSWTKGRSGEALSLLKKRFSHRPVQEKFVCLNCGFETHADEQAALNIARSWLFLRSQEYKKYQTNKTTGNTDKRAFVETWQSFYRKKLKEVWKPAV

SEQ ID NO: 31983 - protein, 978 aa, synthetic construct
  REGION 1..978: note = engineered CasX variant
QEIGRINKIRRRLVKDSNTKKAGKTGPMKTLLVRVMTPDLRERLENLRKKPENIPQPISNTSRANLNKLLTDYTEMKKAILHVYWEEFQKDPVGLMSRVAQPASKKIDQNKLKPEMDEKGNLTTAGFACSQCGQPLFVYKLEQVSEKGKAYTNYFGRCNVAEHEKLILLAQLKPEKDSDEAVTYSLGKFGQRALDFYSIHVTKESTHPVKPLAQIAGNRYASYPVGKALSDACMGTIASFLSKYQDIIIEHQKVVKGNQKRLESLRELAGKENLEYPSVTLPPQPHTKEGVDAYNEVIARVRMWVNLNLWQKLKLSRDDAKPLLRLKGFPSFPLVERQANEVDWWDMVCNVKKLINEKKEDGKVFWQNLAGYKRQEALRPYLSSEEDRKKGKKFARTQLGDLLLHLEKKHGEDWGKVYDEAWERIDKKVEGLSKHIKLEEERRSEDAQSKAALTDWLRAKASFVIEGLKEADKDEFCRCELKLQKWYGDLRGKPFAIEAENSILDISGFSKQYNCAFIWQKDGVKKLNLYLIINYFKGGKLRFKKIKPEAFEANRFYTVINKKSGEIVPMEVNFNFDDPNLIILPLAFGKRQGREFIWNDLLSLETGSLKLANGRVIEKTLYNRRTRQDEPALFVALTFERREVLDSSNIKPMNLIGVDRGENIPAVIALTDPEGCPLSRFKDSLGNPTHILRIGESYKEKQRTIQAKKEVEQRRAGGYSRKYASKAKNLADDMVRNTARDLLYYAVTQDAMLIFENLSRGFGRQGKRTFMAERQYTRMEDWLTAKLAYEGLPSKTYLSKTLAQYTSKTCSNCGFTITSADYDRVLEKLKKTATGWMTTINGKELKVEGQITYYNRYKRQNVVKDLSVELDRLSEESVNNDISSWTKGRSGEALSLLKKRFSHRPVQEKFVCLNCGFETHADEQAALNIARSWLFLRSQEYKKYQTNKTTGNTDKRAFVETWQSFYRKKLKEVWKPAV

SEQ ID NO: 31984 - protein, 978 aa, synthetic construct
  REGION 1..978: note = engineered CasX variant
QEIGRINKIRRRLVKDSNTKKAGKTGPMKTLLVRVMTPDLRERLENLRKKPENIPQPISNTSRANLNKLLTDYTEMKKAILHVYWEEFQKDPVGLMSRVAQPASKKIDQNKLKPEMDEKGNLTTAGFACSQCGQPLFVYKLEQVSEKGKAYTNYFGRCNVAEHEKLILLAQLKPEKDSDEAVTYSLGKFGQRALDFYSIHVTKESTHPVKPLAQIAGNRYASHPVGKALSDACMGTIASFLSKYQDIIIEHQKVVKGNQKRLESLRELAGKENLEYPSVTLPPQPHTKEGVDAYNEVIARVRMWVNLNLWQKLKLSRDDAKPLLRLKGFPSFPLVERQANEVDWWDMVCNVKKLINEKKEDGKVFWQNLAGYKRQEALRPYLSSEEDRKKGKKFARTQLGDLLLHLEKKHGEDWGKVYDEAWERIDKKVEGLSKHIKLEEERRSEDAQSKAALTDWLRAKASFVIEGLKEADKDEFCRCELKLQKWYGDLRGKPFAIEAENSILDISGFSKQYNCAFIWQKDGVKKLNLYLIINYFKGGKLRFKKIKPEAFEANRFYTVINKKSGEIVPMEVNFNFDDPNLIILPLAFGKRQGREFIWNDLLSLETGSLKLANGRVIEKTLYNRRTRQDEPALFVALTFERREVLDSSNIKPMNLIGVDRGENIPAVIALTDPEGCPLSRFKDSLGNPTHILRIGESYKEKQRTIQAKKEVEQRRAGGYSRKYASKAKNLADDMVRNTARDLLYYAVTQDAMLIFENLSRGFGRQGKRTFMAERQYTRMEDWLTAKLAYEGLPSKTYLSKTLAQYTSKTCSNCGFTITSADYDRVLEKLKKTATGWMTTINGKELKVEGQITYYNRYKRQNVVKDLSVELDRLSEESVNNDISSWTKGRSGEALSLLKKRFSHRPVQEKFVCLNCGFETHADEQAALNIARSWLFLRSQEYKKYQTNKTTGNTDKRAFVETWQSFYRKKLKEVWKPAV

SEQ ID NO: 31985 - protein, 978 aa, synthetic construct
  REGION 1..978: note = engineered CasX variant
QEIGRINKIRRRLVKDSNTKKAGKTGPMKTLLVRVMTPDLRERLENLRKKPENIPQPISNTSRANLNKLLTDYTEMKKAILHVYWEEFQKDPVGLMSRVAQPASKKIDQNKLKPEMDEKGNLTTAGFACSQCGQPLFVYKLEQVSEKGKAYTNYFGRCNVAEHEKLILLAQLKPEKDSDEAVTYSLGKFGQRALDFYSIHVTKESTHPVKPLAQIAGNRYASSPVGKALSDACMGTIASFLSKYQDIIIEHQKVVKGNQKRLESLRELAGKENLEYPSVTLPPQPHTKEGVDAYNEVIARVRMWVNLNLWQKLKLSRDDAKPLLRLKGFPSFPLVERQANEVDWWDMVCNVKKLINEKKEDGKVFWQNLAGYKRQEALRPYLSSEEDRKKGKKFARTQLGDLLLHLEKKHGEDWGKVYDEAWERIDKKVEGLSKHIKLEEERRSEDAQSKAALTDWLRAKASFVIEGLKEADKDEFCRCELKLQKWYGDLRGKPFAIEAENSILDISGFSKQYNCAFIWQKDGVKKLNLYLIINYFKGGKLRFKKIKPEAFEANRFYTVINKKSGEIVPMEVNFNFDDPNLIILPLAFGKRQGREFIWNDLLSLETGSLKLANGRVIEKTLYNRRTRQDEPALFVALTFERREVLDSSNIKPMNLIGVDRGENIPAVIALTDPEGCPLSRFKDSLGNPTHILRIGESYKEKQRTIQAKKEVEQRRAGGYSRKYASKAKNLADDMVRNTARDLLYYAVTQDAMLIFENLSRGFGRQGKRTFMAERQYTRMEDWLTAKLAYEGLPSKTYLSKTLAQYTSKTCSNCGFTITSADYDRVLEKLKKTATGWMTTINGKELKVEGQITYYNRYKRQNVVKDLSVELDRLSEESVNNDISSWTKGRSGEALSLLKKRFSHRPVQEKFVCLNCGFETHADEQAALNIARSWLFLRSQEYKKYQTNKTTGNTDKRAFVETWQSFYRKKLKEVWKPAV

SEQ ID NO: 31986 - protein, 978 aa, synthetic construct
  REGION 1..978: note = engineered CasX variant
QEIGRINKIRRRLVKDSNTKKAGKTGPMKTLLVRVMTPDLRERLENLRKKPENIPQPISNTSRANLNKLLTDYTEMKKAILHVYWEEFQKDPVGLMSRVAQPASKKIDQNKLKPEMDEKGNLTTAGFACSQCGQPLFVYKLEQVSEKGKAYTNYFGRCNVAEHEKLILLAQLKPEKDSDEAVTYSLGKFGQRALDFYSIHVTKESTHPVKPLAQIAGNRYASTPVGKALSDACMGTIASFLSKYQDIIIEHQKVVKGNQKRLESLRELAGKENLEYPSVTLPPQPHTKEGVDAYNEVIARVRMWVNLNLWQKLKLSRDDAKPLLRLKGFPSFPLVERQANEVDWWDMVCNVKKLINEKKEDGKVFWQNLAGYKRQEALRPYLSSEEDRKKGKKFARTQLGDLLLHLEKKHGEDWGKVYDEAWERIDKKVEGLSKHIKLEEERRSEDAQSKAALTDWLRAKASFVIEGLKEADKDEFCRCELKLQKWYGDLRGKPFAIEAENSILDISGFSKQYNCAFIWQKDGVKKLNLYLIINYFKGGKLRFKKIKPEAFEANRFYTVINKKSGEIVPMEVNFNFDDPNLIILPLAFGKRQGREFIWNDLLSLETGSLKLANGRVIEKTLYNRRTRQDEPALFVALTFERREVLDSSNIKPMNLIGVDRGENIPAVIALTDPEGCPLSRFKDSLGNPTHILRIGESYKEKQRTIQAKKEVEQRRAGGYSRKYASKAKNLADDMVRNTARDLLYYAVTQDAMLIFENLSRGFGRQGKRTFMAERQYTRMEDWLTAKLAYEGLPSKTYLSKTLAQYTSKTCSNCGFTITSADYDRVLEKLKKTATGWMTTINGKELKVEGQITYYNRYKRQNVVKDLSVELDRLSEESVNNDISSWTKGRSGEALSLLKKRFSHRPVQEKFVCLNCGFETHADEQAALNIARSWLFLRSQEYKKYQTNKTTGNTDKRAFVETWQSFYRKKLKEVWKPAV

SEQ ID NO: 31987 - protein, 978 aa, synthetic construct
  REGION 1..978: note = engineered CasX variant
QEIGRINKIRRRLVKDSNTKKAGKTGPMKTLLVRVMTPDLRERLENLRKKPENIPQPISNTSRANLNKLLTDYTEMKKAILHVYWEEFQKDPVGLMSRVAQPASKKIDQNKLKPEMDEKGNLTTAGFACSQCGQPLFVYKLEQVSEKGKAYTNYFGRCNVAEHEKLILLAQLKPEKDSDEAVTYSLGKFGQRALDFYSIHVTKESTHPVKPLAQIAGNRYASAPVGKALSDACMGTIASFLSKYQDIIIEHQKVVKGNQKRLESLRELAGKENLEYPSVTLPPQPHTKEGVDAYNEVIARVRMWVNLNLWQKLKLSRDDAKPLLRLKGFPSFPLVERQANEVDWWDMVCNVKKLINEKKEDGKVFWQNLAGYKRQEALRPYLSSEEDRKKGKKFARTQLGDLLLHLEKKHGEDWGKVYDEAWERIDKKVEGLSKHIKLEEERRSEDAQSKAALTDWLRAKASFVIEGLKEADKDEFCRCELKLQKWYGDLRGKPFAIEAENSILDISGFSKQYNCAFIWQKDGVKKLNLYLIINYFKGGKLRFKKIKPEAFEANRFYTVINKKSGEIVPMEVNFNFDDPNLIILPLAFGKRQGREFIWNDLLSLETGSLKLANGRVIEKTLYNRRTRQDEPALFVALTFERREVLDSSNIKPMNLIGVDRGENIPAVIALTDPEGCPLSRFKDSLGNPTHILRIGESYKEKQRTIQAKKEVEQRRAGGYSRKYASKAKNLADDMVRNTARDLLYYAVTQDAMLIFENLSRGFGRQGKRTFMAERQYTRMEDWLTAKLAYEGLPSKTYLSKTLAQYTSKTCSNCGFTITSADYDRVLEKLKKTATGWMTTINGKELKVEGQITYYNRYKRQNVVKDLSVELDRLSEESVNNDISSWTKGRSGEALSLLKKRFSHRPVQEKFVCLNCGFETHADEQAALNIARSWLFLRSQEYKKYQTNKTTGNTDKRAFVETWQSFYRKKLKEVWKPAV

SEQ ID NO: 31988 - protein, 978 aa, synthetic construct
  REGION 1..978: note = engineered CasX variant
QEIGRINKIRRRLVKDSNTKKAGKTGPMKTLLVRVMTPDLRERLENLRKKPENIPQPISNTSRANLNKLLTDYTEMKKAILHVYWEEFQKDPVGLMSRVAQPASKKIDQNKLKPEMDEKGNLTTAGFACSQCGQPLFVYKLEQVSEKGKAYTNYFGRCNVAEHEKLILLAQLKPEKDSDEAVTYSLGKFGQRALDFYSIHVTKESTHPVKPLAQIAGNRYASVPVGKALSDACMGTIASFLSKYQDIIIEHQKVVKGNQKRLESLRELAGKENLEYPSVTLPPQPHTKEGVDAYNEVIARVRMWVNLNLWQKLKLSRDDAKPLLRLKGFPSFPLVERQANEVDWWDMVCNVKKLINEKKEDGKVFWQNLAGYKRQEALRPYLSSEEDRKKGKKFARTQLGDLLLHLEKKHGEDWGKVYDEAWERIDKKVEGLSKHIKLEEERRSEDAQSKAALTDWLRAKASFVIEGLKEADKDEFCRCELKLQKWYGDLRGKPFAIEAENSILDISGFSKQYNCAFIWQKDGVKKLNLYLIINYFKGGKLRFKKIKPEAFEANRFYTVINKKSGEIVPMEVNFNFDDPNLIILPLAFGKRQGREFIWNDLLSLETGSLKLANGRVIEKTLYNRRTRQDEPALFVALTFERREVLDSSNIKPMNLIGVDRGENIPAVIALTDPEGCPLSRFKDSLGNPTHILRIGESYKEKQRTIQAKKEVEQRRAGGYSRKYASKAKNLADDMVRNTARDLLYYAVTQDAMLIFENLSRGFGRQGKRTFMAERQYTRMEDWLTAKLAYEGLPSKTYLSKTLAQYTSKTCSNCGFTITSADYDRVLEKLKKTATGWMTTINGKELKVEGQITYYNRYKRQNVVKDLSVELDRLSEESVNNDISSWTKGRSGEALSLLKKRFSHRPVQEKFVCLNCGFETHADEQAALNIARSWLFLRSQEYKKYQTNKTTGNTDKRAFVETWQSFYRKKLKEVWKPAV

SEQ ID NO: 31989 - protein, 978 aa, synthetic construct
  REGION 1..978: note = engineered CasX variant
QEIGRINKIRRRLVKDSNTKKAGKTGPMKTLLVRVMTPDLRERLENLRKKPENIPQPISNTSRANLNKLLTDYTEMKKAILHVYWEEFQKDPVGLMSRVAQPASKKIDQNKLKPEMDEKGNLTTAGFACSQCGQPLFVYKLEQVSEKGKAYTNYFGRCNVAEHEKLIKLAQLKPEKDSDEAVTYSLGKFGQRALDFYSIHVTKESTHPVKPLAQIAGNRYASGPVGKALSDACMGTIASFLSKYQDIIIEHQKVVKGNQKRLESLRELAGKENLEYPSVTLPPQPHTKEGVDAYNEVIARVRMWVNLNLWQKLKLSRDDAKPLLRLKGFPSFPLVERQANEVDWWDMVCNVKKLINEKKEDGKVFWQNLAGYKRQEALRPYLSSEEDRKKGKKFARTQLGDLLLHLEKKHGEDWGKVYDEAWERIDKKVEGLSKHIKLEEERRSEDAQSKAALTDWLRAKASFVIEGLKEADKDEFCRCELKLQKWYGDLRGKPFAIEAENSILDISGFSKQYNCAFIWQKDGVKKLNLYLIINYFKGGKLRFKKIKPEAFEANRFYTVINKKSGEIVPMEVNFNFDDPNLIILPLAFGKRQGREFIWNDLLSLETGSLKLANGRVIEKTLYNRRTRQDEPALFVALTFERREVLDSSNIKPMNLIGVDRGENIPAVIALTDPEGCPLSRFKDSLGNPTHILRIGESYKEKQRTIQAKKEVEQRRAGGYSRKYASKAKNLADDMVRNTARDLLYYAVTQDAMLIFENLSRGFGRQGKRTFMAERQYTRMEDWLTAKLAYEGLPSKTYLSKTLAQYTSKTCSNCGFTITSADYDRVLEKLKKTATGWMTTINGKELKVEGQITYYNRYKRQNVVKDLSVELDRLSEESVNNDISSWTKGRSGEALSLLKKRFSHRPVQEKFVCLNCGFETHADEQAALNIARSWLFLRSQEYKKYQTNKTTGNTDKRAFVETWQSFYRKKLKEVWKPAV

SEQ ID NO: 31990 - protein, 977 aa, synthetic construct
  REGION 1..977: note = engineered CasX variant
QEIGRINKIRRRLVKDSNTKKAGKTGPMKTLLVRVMTPDLRERLENLRKKPENIPQPISNTSRANLNKLLTDYTEMKKAILHVYWEEFQKDPVGLMSRVAQPASKKIDQNKLKPEMDEKGNLTTAGFACSQCGQPLFVYKLEQVSEKGKAYTNYFGRCNVAEHEKLILLAQLKPEKDSDEAVTYSLGKFGQRALDFYSIHVTKESTHPVKPLAQIAGNRYASPVGKALSDACMGTIASFLSKYQDIIIEHQKVVKGNQKRLESLRELAGKENLEYPSVTLPPQPHTKEGVDAYNEVIARVRMWVNLNLWQKLKLSRDDAKPLLRLKGFPSFPLVERQANEVDWWDMVCNVKKLINEKKEDGKVFWQNLAGYKRQEALRPYLSSEEDRKKGKKFARTQLGDLLLHLEKKHGEDWGKVYDEAWERIDKKVEGLSKHIKLEEERRSEDAQSKAALTDWLRAKASFVIEGLKEADKDEFCRCELKLQKWYGDLRGKPFAIEAENSILDISGFSKQYNCAFIWQKDGVKKLNLYLIINYFKGGKLRFKKIKPEAFEANRFYTVINKKSGEIVPMEVNFNFDDPNLIILPLAFGKRQGREFIWNDLLSLETGSLKLANGRVIEKTLYNRRTRQDEPALFVALTFERREVLDSSNIKPMNLIGVDRGENIPAVIALTDPEGCPLSRFKDSLGNPTHILRIGESYKEKQRTIQAKKEVEQRRAGGYSRKYASKAKNLADDMVRNTARDLLYYAVTQDAMLIFENLSRGFGRQGKRTFMAERQYTRMEDWLTAKLAYEGLPSKTYLSKTLAQYTSKTCSNCGFTITSADYDRVLEKLKKTATGWMTTINGKELKVEGQITYYNRYKRQNVVKDLSVELDRLSEESVNNDISSWTKGRSGEALSLLKKRFSHRPVQEKFVCLNCGFETHADEQAALNIARSWLFLRSQEYKKYQTNKTTGNTDKRAFVETWQSFYRKKLKEVWKPAV

SEQ ID NO: 31991 - protein, 979 aa, synthetic construct
  REGION 1..979: note = engineered CasX variant
QEIGRINKIRRRLVKDSNTKKAGKTGPMKTLLVRVMTPDLRERLENLRKKPENIPQPISNTSRANLNKLLTDYTEMKKAILHVYWEEFQKDPVGLMSRVAQPASKKIDQNKLKPEMDEKGNLTTAGFACSQCGQPLFVYKLEQVSEKGKAYTNYFGRCNVAEHEKLILLAQLKPEKDSDEAVTYSLGKFGQRALDFYSIHVTKESTHPVKPLAQIAGNRYASYPVGKALSDACMGTIASFLSKYQDIIIEHQKVVKGNQKRLESLRELAGKENLEYPSVTLPPQPHTKEGVDAYNEVIARVRMWVNLNLWQKLKLSRDDAKPLLRLKGFPSFPLVERQANEVDWWDMVCNVKKLINEKKEDGKVFWQNLAGYKRQEALRPYLSSEEDRKKGKKFARYQLGDLLLHLEKKHEGEDWGKVYDEAWERIDKKVEGLSKHIKLEEERRSEDAQSKAALTDWLRAKASFVIEGLKEADKDEFCRCELKLQKWYGDLRGKPFAIEAENSILDISGFSKQYNCAFIWQKDGVKKLNLYLIINYFKGGKLRFKKIKPEAFEANRFYTVINKKSGEIVPMEVNFNFDDPNLIILPLAFGKRQGREFIWNDLLSLETGSLKLANGRVIEKTLYNRRTRQDEPALFVALTFERREVLDSSNIKPMNLIGVDRGENIPAVIALTDPEGCPLSRFKDSLGNPTHILRIGESYKEKQRTIQAKKEVEQRRAGGYSRKYASKAKNLADDMVRNTARDLLYYAVTQDAMLIFENLSRGFGRQGKRTFMAERQYTRMEDWLTAKLAYEGLPSKTYLSKTLAQYTSKTCSNCGFTITSADYDRVLEKLKKTATGWMTTINGKELKVEGQITYYNRYKRQNVVKDLSVELDRLSEESVNNDISSWTKGRSGEALSLLKKRFSHRPVQEKFVCLNCGFETHADEQAALNIARSWLFLRSQEYKKYQTNKTTGNTDKRAFVETWQSFYRKKLKEVWKPAV

SEQ ID NO: 31992 - protein, 979 aa, synthetic construct
  REGION 1..979: note = engineered CasX variant
QEIGRINKIRRRLVKDSNTKKAGKTGPMKTLLVRVMTPDLRERLENLRKKPENIPQPISNTSRANLNKLLTDYTEMKKAILHVYWEEFQKDPVGLMSRVAQPASKKIDQNKLKPEMDEKGNLTTAGFACSQCGQPLFVYKLEQVSEKGKAYTNYFGRCNVAEHEKLILLAQLKPEKDSDEAVTYSLGKFGQRALDFYSIHVTKESTHPVKPLAQIAGNRYASHPVGKALSDACMGTIASFLSKYQDIIIEHQKVVKGNQKRLESLRELAGKENLEYPSVTLPPQPHTKEGVDAYNEVIARVRMWVNLNLWQKLKLSRDDAKPLLRLKGFPSFPLVERQANEVDWWDMVCNVKKLINEKKEDGKVFWQNLAGYKRQEALRPYLSSEEDRKKGKKFARYQLGDLLLHLEKKHEGEDWGKVYDEAWERIDKKVEGLSKHIKLEEERRSEDAQSKAALTDWLRAKASFVIEGLKEADKDEFCRCELKLQKWYGDLRGKPFAIEAENSILDISGFSKQYNCAFIWQKDGVKKLNLYLIINYFKGGKLRFKKIKPEAFEANRFYTVINKKSGEIVPMEVNFNFDDPNLIILPLAFGKRQGREFIWNDLLSLETGSLKLANGRVIEKTLYNRRTRQDEPALFVALTFERREVLDSSNIKPMNLIGVDRGENIPAVIALTDPEGCPLSRFKDSLGNPTHILRIGESYKEKQRTIQAKKEVEQRRAGGYSRKYASKAKNLADDMVRNTARDLLYYAVTQDAMLIFENLSRGFGRQGKRTFMAERQYTRMEDWLTAKLAYEGLPSKTYLSKTLAQYTSKTCSNCGFTITSADYDRVLEKLKKTATGWMTTINGKELKVEGQITYYNRYKRQNVVKDLSVELDRLSEESVNNDISSWTKGRSGEALSLLKKRFSHRPVQEKFVCLNCGFETHADEQAALNIARSWLFLRSQEYKKYQTNKTTGNTDKRAFVETWQSFYRKKLKEVWKPAV

SEQ ID NO: 31993 - protein, 979 aa, synthetic construct
  REGION 1..979: note = engineered CasX variant
QEIGRINKIRRRLVKDSNTKKAGKTGPMKTLLVRVMTPDLRERLENLRKKPENIPQPISNTSRANLNKLLTDYTEMKKAILHVYWEEFQKDPVGLMSRVAQPASKKIDQNKLKPEMDEKGNLTTAGFACSQCGQPLFVYKLEQVSEKGKAYTNYFGRCNVAEHEKLILLAQLKPEKDSDEAVTYSLGKFGQRALDFYSIHVTKESTHPVKPLAQIAGNRYASSPVGKALSDACMGTIASFLSKYQDIIIEHQKVVKGNQKRLESLRELAGKENLEYPSVTLPPQPHTKEGVDAYNEVIARVRMWVNLNLWQKLKLSRDDAKPLLRLKGFPSFPLVERQANEVDWWDMVCNVKKLINEKKEDGKVFWQNLAGYKRQEALRPYLSSEEDRKKGKKFARYQLGDLLLHLEKKHEGEDWGKVYDEAWERIDKKVEGLSKHIKLEEERRSEDAQSKAALTDWLRAKASFVIEGLKEADKDEFCRCELKLQKWYGDLRGKPFAIEAENSILDISGFSKQYNCAFIWQKDGVKKLNLYLIINYFKGGKLRFKKIKPEAFEANRFYTVINKKSGEIVPMEVNFNFDDPNLIILPLAFGKRQGREFIWNDLLSLETGSLKLANGRVIEKTLYNRRTRQDEPALFVALTFERREVLDSSNIKPMNLIGVDRGENIPAVIALTDPEGCPLSRFKDSLGNPTHILRIGESYKEKQRTIQAKKEVEQRRAGGYSRKYASKAKNLADDMVRNTARDLLYYAVTQDAMLIFENLSRGFGRQGKRTFMAERQYTRMEDWLTAKLAYEGLPSKTYLSKTLAQYTSKTCSNCGFTITSADYDRVLEKLKKTATGWMTTINGKELKVEGQITYYNRYKRQNVVKDLSVELDRLSEESVNNDISSWTKGRSGEALSLLKKRFSHRPVQEKFVCLNCGFETHADEQAALNIARSWLFLRSQEYKKYQTNKTTGNTDKRAFVETWQSFYRKKLKEVWKPAV

SEQ ID NO: 31994 - protein, 979 aa, synthetic construct
  REGION 1..979: note = engineered CasX variant
QEIGRINKIRRRLVKDSNTKKAGKTGPMKTLLVRVMTPDLRERLENLRKKPENIPQPISNTSRANLNKLLTDYTEMKKAILHVYWEEFQKDPVGLMSRVAQPASKKIDQNKLKPEMDEKGNLTTAGFACSQCGQPLFVYKLEQVSEKGKAYTNYFGRCNVAEHEKLILLAQLKPEKDSDEAVTYSLGKFGQRALDFYSIHVTKESTHPVKPLAQIAGNRYASTPVGKALSDACMGTIASFLSKYQDIIIEHQKVVKGNQKRLESLRELAGKENLEYPSVTLPPQPHTKEGVDAYNEVIARVRMWVNLNLWQKLKLSRDDAKPLLRLKGFPSFPLVERQANEVDWWDMVCNVKKLINEKKEDGKVFWQNLAGYKRQEALRPYLSSEEDRKKGKKFARYQLGDLLLHLEKKHEGEDWGKVYDEAWERIDKKVEGLSKHIKLEEERRSEDAQSKAALTDWLRAKASFVIEGLKEADKDEFCRCELKLQKWYGDLRGKPFAIEAENSILDISGFSKQYNCAFIWQKDGVKKLNLYLIINYFKGGKLRFKKIKPEAFEANRFYTVINKKSGEIVPMEVNFNFDDPNLIILPLAFGKRQGREFIWNDLLSLETGSLKLANGRVIEKTLYNRRTRQDEPALFVALTFERREVLDSSNIKPMNLIGVDRGENIPAVIALTDPEGCPLSRFKDSLGNPTHILRIGESYKEKQRTIQAKKEVEQRRAGGYSRKYASKAKNLADDMVRNTARDLLYYAVTQDAMLIFENLSRGFGRQGKRTFMAERQYTRMEDWLTAKLAYEGLPSKTYLSKTLAQYTSKTCSNCGFTITSADYDRVLEKLKKTATGWMTTINGKELKVEGQITYYNRYKRQNVVKDLSVELDRLSEESVNNDISSWTKGRSGEALSLLKKRFSHRPVQEKFVCLNCGFETHADEQAALNIARSWLFLRSQEYKKYQTNKTTGNTDKRAFVETWQSFYRKKLKEVWKPAV

SEQ ID NO: 31995 - protein, 979 aa, synthetic construct
  REGION 1..979: note = engineered CasX variant
QEIGRINKIRRRLVKDSNTKKAGKTGPMKTLLVRVMTPDLRERLENLRKKPENIPQPISNTSRANLNKLLTDYTEMKKAILHVYWEEFQKDPVGLMSRVAQPASKKIDQNKLKPEMDEKGNLTTAGFACSQCGQPLFVYKLEQVSEKGKAYTNYFGRCNVAEHEKLILLAQLKPEKDSDEAVTYSLGKFGQRALDFYSIHVTKESTHPVKPLAQIAGNRYASAPVGKALSDACMGTIASFLSKYQDIIIEHQKVVKGNQKRLESLRELAGKENLEYPSVTLPPQPHTKEGVDAYNEVIARVRMWVNLNLWQKLKLSRDDAKPLLRLKGFPSFPLVERQANEVDWWDMVCNVKKLINEKKEDGKVFWQNLAGYKRQEALRPYLSSEEDRKKGKKFARYQLGDLLLHLEKKHEGEDWGKVYDEAWERIDKKVEGLSKHIKLEEERRSEDAQSKAALTDWLRAKASFVIEGLKEADKDEFCRCELKLQKWYGDLRGKPFAIEAENSILDISGFSKQYNCAFIWQKDGVKKLNLYLIINYFKGGKLRFKKIKPEAFEANRFYTVINKKSGEIVPMEVNFNFDDPNLIILPLAFGKRQGREFIWNDLLSLETGSLKLANGRVIEKTLYNRRTRQDEPALFVALTFERREVLDSSNIKPMNLIGVDRGENIPAVIALTDPEGCPLSRFKDSLGNPTHILRIGESYKEKQRTIQAKKEVEQRRAGGYSRKYASKAKNLADDMVRNTARDLLYYAVTQDAMLIFENLSRGFGRQGKRTFMAERQYTRMEDWLTAKLAYEGLPSKTYLSKTLAQYTSKTCSNCGFTITSADYDRVLEKLKKTATGWMTTINGKELKVEGQITYYNRYKRQNVVKDLSVELDRLSEESVNNDISSWTKGRSGEALSLLKKRFSHRPVQEKFVCLNCGFETHADEQAALNIARSWLFLRSQEYKKYQTNKTTGNTDKRAFVETWQSFYRKKLKEVWKPAV

SEQ ID NO: 31996 - protein, 979 aa, synthetic construct
  REGION 1..979: note = engineered CasX variant
QEIGRINKIRRRLVKDSNTKKAGKTGPMKTLLVRVMTPDLRERLENLRKKPENIPQPISNTSRANLNKLLTDYTEMKKAILHVYWEEFQKDPVGLMSRVAQPASKKIDQNKLKPEMDEKGNLTTAGFACSQCGQPLFVYKLEQVSEKGKAYTNYFGRCNVAEHEKLILLAQLKPEKDSDEAVTYSLGKFGQRALDFYSIHVTKESTHPVKPLAQIAGNRYASVPVGKALSDACMGTIASFLSKYQDIIIEHQKVVKGNQKRLESLRELAGKENLEYPSVTLPPQPHTKEGVDAYNEVIARVRMWVNLNLWQKLKLSRDDAKPLLRLKGFPSFPLVERQANEVDWWDMVCNVKKLINEKKEDGKVFWQNLAGYKRQEALRPYLSSEEDRKKGKKFARYQLGDLLLHLEKKHEGEDWGKVYDEAWERIDKKVEGLSKHIKLEEERRSEDAQSKAALTDWLRAKASFVIEGLKEADKDEFCRCELKLQKWYGDLRGKPFAIEAENSILDISGFSKQYNCAFIWQKDGVKKLNLYLIINYFKGGKLRFKKIKPEAFEANRFYTVINKKSGEIVPMEVNFNFDDPNLIILPLAFGKRQGREFIWNDLLSLETGSLKLANGRVIEKTLYNRRTRQDEPALFVALTFERREVLDSSNIKPMNLIGVDRGENIPAVIALTDPEGCPLSRFKDSLGNPTHILRIGESYKEKQRTIQAKKEVEQRRAGGYSRKYASKAKNLADDMVRNTARDLLYYAVTQDAMLIFENLSRGFGRQGKRTFMAERQYTRMEDWLTAKLAYEGLPSKTYLSKTLAQYTSKTCSNCGFTITSADYDRVLEKLKKTATGWMTTINGKELKVEGQITYYNRYKRQNVVKDLSVELDRLSEESVNNDISSWTKGRSGEALSLLKKRFSHRPVQEKFVCLNCGFETHADEQAALNIARSWLFLRSQEYKKYQTNKTTGNTDKRAFVETWQSFYRKKLKEVWKPAV

SEQ ID NO: 31997 - protein, 979 aa, synthetic construct
  REGION 1..979: note = engineered CasX variant
QEIGRINKIRRRLVKDSNTKKAGKTGPMKTLLVRVMTPDLRERLENLRKKPENIPQPISNTSRANLNKLLTDYTEMKKAILHVYWEEFQKDPVGLMSRVAQPASKKIDQNKLKPEMDEKGNLTTAGFACSQCGQPLFVYKLEQVSEKGKAYTNYFGRCNVAEHEKLIKLAQLKPEKDSDEAVTYSLGKFGQRALDFYSIHVTKESTHPVKPLAQIAGNRYASGPVGKALSDACMGTIASFLSKYQDIIIEHQKVVKGNQKRLESLRELAGKENLEYPSVTLPPQPHTKEGVDAYNEVIARVRMWVNLNLWQKLKLSRDDAKPLLRLKGFPSFPLVERQANEVDWWDMVCNVKKLINEKKEDGKVFWQNLAGYKRQEALRPYLSSEEDRKKGKKFARYQLGDLLLHLEKKHEGEDWGKVYDEAWERIDKKVEGLSKHIKLEEERRSEDAQSKAALTDWLRAKASFVIEGLKEADKDEFCRCELKLQKWYGDLRGKPFAIEAENSILDISGFSKQYNCAFIWQKDGVKKLNLYLIINYFKGGKLRFKKIKPEAFEANRFYTVINKKSGEIVPMEVNFNFDDPNLIILPLAFGKRQGREFIWNDLLSLETGSLKLANGRVIEKTLYNRRTRQDEPALFVALTFERREVLDSSNIKPMNLIGVDRGENIPAVIALTDPEGCPLSRFKDSLGNPTHILRIGESYKEKQRTIQAKKEVEQRRAGGYSRKYASKAKNLADDMVRNTARDLLYYAVTQDAMLIFENLSRGFGRQGKRTFMAERQYTRMEDWLTAKLAYEGLPSKTYLSKTLAQYTSKTCSNCGFTITSADYDRVLEKLKKTATGWMTTINGKELKVEGQITYYNRYKRQNVVKDLSVELDRLSEESVNNDISSWTKGRSGEALSLLKKRFSHRPVQEKFVCLNCGFETHADEQAALNIARSWLFLRSQEYKKYQTNKTTGNTDKRAFVETWQSFYRKKLKEVWKPAV

SEQ ID NO: 31998 - protein, 978 aa, synthetic construct
  REGION 1..978: note = engineered CasX variant
QEIGRINKIRRRLVKDSNTKKAGKTGPMKTLLVRVMTPDLRERLENLRKKPENIPQPISNTSRANLNKLLTDYTEMKKAILHVYWEEFQKDPVGLMSRVAQPASKKIDQNKLKPEMDEKGNLTTAGFACSQCGQPLFVYKLEQVSEKGKAYTNYFGRCNVAEHEKLILLAQLKPEKDSDEAVTYSLGKFGQRALDFYSIHVTKESTHPVKPLAQIAGNRYASPVGKALSDACMGTIASFLSKYQDIIIEHQKVVKGNQKRLESLRELAGKENLEYPSVTLPPQPHTKEGVDAYNEVIARVRMWVNLNLWQKLKLSRDDAKPLLRLKGFPSFPLVERQANEVDWWDMVCNVKKLINEKKEDGKVFWQNLAGYKRQEALRPYLSSEEDRKKGKKFARYQLGDLLLHLEKKHEGEDWGKVYDEAWERIDKKVEGLSKHIKLEEERRSEDAQSKAALTDWLRAKASFVIEGLKEADKDEFCRCELKLQKWYGDLRGKPFAIEAENSILDISGFSKQYNCAFIWQKDGVKKLNLYLIINYFKGGKLRFKKIKPEAFEANRFYTVINKKSGEIVPMEVNFNFDDPNLIILPLAFGKRQGREFIWNDLLSLETGSLKLANGRVIEKTLYNRRTRQDEPALFVALTFERREVLDSSNIKPMNLIGVDRGENIPAVIALTDPEGCPLSRFKDSLGNPTHILRIGESYKEKQRTIQAKKEVEQRRAGGYSRKYASKAKNLADDMVRNTARDLLYYAVTQDAMLIFENLSRGFGRQGKRTFMAERQYTRMEDWLTAKLAYEGLPSKTYLSKTLAQYTSKTCSNCGFTITSADYDRVLEKLKKTATGWMTTINGKELKVEGQITYYNRYKRQNVVKDLSVELDRLSEESVNNDISSWTKGRSGEALSLLKKRFSHRPVQEKFVCLNCGFETHADEQAALNIARSWLFLRSQEYKKYQTNKTTGNTDKRAFVETWQSFYRKKLKEVWKPAV

SEQ ID NO: 31999 - protein, 978 aa, synthetic construct
  REGION 1..978: note = engineered CasX variant
QEIGRINKIRRRLVKDSNTKKAGKTGPMKTLLVRVMTPDLRERLENLRKKPENIPQPISNTSRANLNKLLTDYTEMKKAILHVYWEEFQKDPVGLMSRVAQPASKKIDQNKLKPEMDEKGNLTTAGFACSQCGQPLFVYKLEQVSEKGKAYTNYFGRCNVAEHEKLILLAQLKPEKDSDEAVTYSLGKFGQRALDFYSIHVTKESTHPVKPLAQIAGNRYASYPVGKALSDACMGTIASFLSKYQDIIIEHQKVVKGNQKRLESLRELAGKENLEYPSVTLPPQPHTKEGVDAYNEVIARVRMWVNLNLWQKLKLSRDDAKPLLRLKGFPSFPLVERQANEVDWWDMVCNVKKLINEKKEDGKVFWQNLAGYKRQEALRPYLSSEEDRKKGKKFARYQLGDLLLHLEKKHGEDWGKVYDEAWERIDKKVEGLSKHIKLEEERRSEDAQSKAALTDWLRAKASFVIEGLKEADKDEFCRCDLKLQKWYGDLRGKPFAIEAENSILDISGFSKQYNCAFIWQKDGVKKLNLYLIINYFKGGKLRFKKIKPEAFEANRFYTVINKKSGEIVPMEVNFNFDDPNLIILPLAFGKRQGREFIWNDLLSLETGSLKLANGRVIEKTLYNRRTRQDEPALFVALTFERREVLDSSNIKPMNLIGVDRGENIPAVIALTDPEGCPLSRFKDSLGNPTHILRIGESYKEKQRTIQAKKEVEQRRAGGYSRKYASKAKNLADDMVRNTARDLLYYAVTQDAMLIFENLSRGFGRQGKRTFMAERQYTRMEDWLTAKLAYEGLPSKTYLSKTLAQYTSKTCSNCGFTITSADYDRVLEKLKKTATGWMTTINGKELKVEGQITYYNRYKRQNVVKDLSVELDRLSEESVNNDISSWTKGRSGEALSLLKKRFSHRPVQEKFVCLNCGFETHADEQAALNIARSWLFLRSQEYKKYQTNKTTGNTDKRAFVETWQSFYRKKLKEVWKPAV

SEQ ID NO: 32000 - protein, 978 aa, synthetic construct
  REGION 1..978: note = engineered CasX variant
QEIGRINKIRRRLVKDSNTKKAGKTGPMKTLLVRVMTPDLRERLENLRKKPENIPQPISNTSRANLNKLLTDYTEMKKAILHVYWEEFQKDPVGLMSRVAQPASKKIDQNKLKPEMDEKGNLTTAGFACSQCGQPLFVYKLEQVSEKGKAYTNYFGRCNVAEHEKLILLAQLKPEKDSDEAVTYSLGKFGQRALDFYSIHVTKESTHPVKPLAQIAGNRYASHPVGKALSDACMGTIASFLSKYQDIIIEHQKVVKGNQKRLESLRELAGKENLEYPSVTLPPQPHTKEGVDAYNEVIARVRMWVNLNLWQKLKLSRDDAKPLLRLKGFPSFPLVERQANEVDWWDMVCNVKKLINEKKEDGKVFWQNLAGYKRQEALRPYLSSEEDRKKGKKFARYQLGDLLLHLEKKHGEDWGKVYDEAWERIDKKVEGLSKHIKLEEERRSEDAQSKAALTDWLRAKASFVIEGLKEADKDEFCRCDLKLQKWYGDLRGKPFAIEAENSILDISGFSKQYNCAFIWQKDGVKKLNLYLIINYFKGGKLRFKKIKPEAFEANRFYTVINKKSGEIVPMEVNFNFDDPNLIILPLAFGKRQGREFIWNDLLSLETGSLKLANGRVIEKTLYNRRTRQDEPALFVALTFERREVLDSSNIKPMNLIGVDRGENIPAVIALTDPEGCPLSRFKDSLGNPTHILRIGESYKEKQRTIQAKKEVEQRRAGGYSRKYASKAKNLADDMVRNTARDLLYYAVTQDAMLIFENLSRGFGRQGKRTFMAERQYTRMEDWLTAKLAYEGLPSKTYLSKTLAQYTSKTCSNCGFTITSADYDRVLEKLKKTATGWMTTINGKELKVEGQITYYNRYKRQNVVKDLSVELDRLSEESVNNDISSWTKGRSGEALSLLKKRFSHRPVQEKFVCLNCGFETHADEQAALNIARSWLFLRSQEYKKYQTNKTTGNTDKRAFVETWQSFYRKKLKEVWKPAV

SEQ ID NO: 32001 - protein, 978 aa, synthetic construct
  REGION 1..978: note = engineered CasX variant
QEIGRINKIRRRLVKDSNTKKAGKTGPMKTLLVRVMTPDLRERLENLRKKPENIPQPISNTSRANLNKLLTDYTEMKKAILHVYWEEFQKDPVGLMSRVAQPASKKIDQNKLKPEMDEKGNLTTAGFACSQCGQPLFVYKLEQVSEKGKAYTNYFGRCNVAEHEKLILLAQLKPEKDSDEAVTYSLGKFGQRALDFYSIHVTKESTHPVKPLAQIAGNRYASSPVGKALSDACMGTIASFLSKYQDIIIEHQKVVKGNQKRLESLRELAGKENLEYPSVTLPPQPHTKEGVDAYNEVIARVRMWVNLNLWQKLKLSRDDAKPLLRLKGFPSFPLVERQANEVDWWDMVCNVKKLINEKKEDGKVFWQNLAGYKRQEALRPYLSSEEDRKKGKKFARYQLGDLLLHLEKKHGEDWGKVYDEAWERIDKKVEGLSKHIKLEEERRSEDAQSKAALTDWLRAKASFVIEGLKEADKDEFCRCDLKLQKWYGDLRGKPFAIEAENSILDISGFSKQYNCAFIWQKDGVKKLNLYLIINYFKGGKLRFKKIKPEAFEANRFYTVINKKSGEIVPMEVNFNFDDPNLIILPLAFGKRQGREFIWNDLLSLETGSLKLANGRVIEKTLYNRRTRQDEPALFVALTFERREVLDSSNIKPMNLIGVDRGENIPAVIALTDPEGCPLSRFKDSLGNPTHILRIGESYKEKQRTIQAKKEVEQRRAGGYSRKYASKAKNLADDMVRNTARDLLYYAVTQDAMLIFENLSRGFGRQGKRTFMAERQYTRMEDWLTAKLAYEGLPSKTYLSKTLAQYTSKTCSNCGFTITSADYDRVLEKLKKTATGWMTTINGKELKVEGQITYYNRYKRQNVVKDLSVELDRLSEESVNNDISSWTKGRSGEALSLLKKRFSHRPVQEKFVCLNCGFETHADEQAALNIARSWLFLRSQEYKKYQTNKTTGNTDKRAFVETWQSFYRKKLKEVWKPAV

SEQ ID NO: 32002 - protein, 978 aa, synthetic construct
  REGION 1..978: note = engineered CasX variant
QEIGRINKIRRRLVKDSNTKKAGKTGPMKTLLVRVMTPDLRERLENLRKKPENIPQPISNTSRANLNKLLTDYTEMKKAILHVYWEEFQKDPVGLMSRVAQPASKKIDQNKLKPEMDEKGNLTTAGFACSQCGQPLFVYKLEQVSEKGKAYTNYFGRCNVAEHEKLILLAQLKPEKDSDEAVTYSLGKFGQRALDFYSIHVTKESTHPVKPLAQIAGNRYASTPVGKALSDACMGTIASFLSKYQDIIIEHQKVVKGNQKRLESLRELAGKENLEYPSVTLPPQPHTKEGVDAYNEVIARVRMWVNLNLWQKLKLSRDDAKPLLRLKGFPSFPLVERQANEVDWWDMVCNVKKLINEKKEDGKVFWQNLAGYKRQEALRPYLSSEEDRKKGKKFARYQLGDLLLHLEKKHGEDWGKVYDEAWERIDKKVEGLSKHIKLEEERRSEDAQSKAALTDWLRAKASFVIEGLKEADKDEFCRCDLKLQKWYGDLRGKPFAIEAENSILDISGFSKQYNCAFIWQKDGVKKLNLYLIINYFKGGKLRFKKIKPEAFEANRFYTVINKKSGEIVPMEVNFNFDDPNLIILPLAFGKRQGREFIWNDLLSLETGSLKLANGRVIEKTLYNRRTRQDEPALFVALTFERREVLDSSNIKPMNLIGVDRGENIPAVIALTDPEGCPLSRFKDSLGNPTHILRIGESYKEKQRTIQAKKEVEQRRAGGYSRKYASKAKNLADDMVRNTARDLLYYAVTQDAMLIFENLSRGFGRQGKRTFMAERQYTRMEDWLTAKLAYEGLPSKTYLSKTLAQYTSKTCSNCGFTITSADYDRVLEKLKKTATGWMTTINGKELKVEGQITYYNRYKRQNVVKDLSVELDRLSEESVNNDISSWTKGRSGEALSLLKKRFSHRPVQEKFVCLNCGFETHADEQAALNIARSWLFLRSQEYKKYQTNKTTGNTDKRAFVETWQSFYRKKLKEVWKPAV

SEQ ID NO: 32003 - protein, 978 aa, synthetic construct
  REGION 1..978: note = engineered CasX variant
QEIGRINKIRRRLVKDSNTKKAGKTGPMKTLLVRVMTPDLRERLENLRKKPENIPQPISNTSRANLNKLLTDYTEMKKAILHVYWEEFQKDPVGLMSRVAQPASKKIDQNKLKPEMDEKGNLTTAGFACSQCGQPLFVYKLEQVSEKGKAYTNYFGRCNVAEHEKLILLAQLKPEKDSDEAVTYSLGKFGQRALDFYSIHVTKESTHPVKPLAQIAGNRYASAPVGKALSDACMGTIASFLSKYQDIIIEHQKVVKGNQKRLESLRELAGKENLEYPSVTLPPQPHTKEGVDAYNEVIARVRMWVNLNLWQKLKLSRDDAKPLLRLKGFPSFPLVERQANEVDWWDMVCNVKKLINEKKEDGKVFWQNLAGYKRQEALRPYLSSEEDRKKGKKFARYQLGDLLLHLEKKHGEDWGKVYDEAWERIDKKVEGLSKHIKLEEERRSEDAQSKAALTDWLRAKASFVIEGLKEADKDEFCRCDLKLQKWYGDLRGKPFAIEAENSILDISGFSKQYNCAFIWQKDGVKKLNLYLIINYFKGGKLRFKKIKPEAFEANRFYTVINKKSGEIVPMEVNFNFDDPNLIILPLAFGKRQGREFIWNDLLSLETGSLKLANGRVIEKTLYNRRTRQDEPALFVALTFERREVLDSSNIKPMNLIGVDRGENIPAVIALTDPEGCPLSRFKDSLGNPTHILRIGESYKEKQRTIQAKKEVEQRRAGGYSRKYASKAKNLADDMVRNTARDLLYYAVTQDAMLIFENLSRGFGRQGKRTFMAERQYTRMEDWLTAKLAYEGLPSKTYLSKTLAQYTSKTCSNCGFTITSADYDRVLEKLKKTATGWMTTINGKELKVEGQITYYNRYKRQNVVKDLSVELDRLSEESVNNDISSWTKGRSGEALSLLKKRFSHRPVQEKFVCLNCGFETHADEQAALNIARSWLFLRSQEYKKYQTNKTTGNTDKRAFVETWQSFYRKKLKEVWKPAV

SEQ ID NO: 32004 - protein, 978 aa, synthetic construct
  REGION 1..978: note = engineered CasX variant
QEIGRINKIRRRLVKDSNTKKAGKTGPMKTLLVRVMTPDLRERLENLRKKPENIPQPISNTSRANLNKLLTDYTEMKKAILHVYWEEFQKDPVGLMSRVAQPASKKIDQNKLKPEMDEKGNLTTAGFACSQCGQPLFVYKLEQVSEKGKAYTNYFGRCNVAEHEKLILLAQLKPEKDSDEAVTYSLGKFGQRALDFYSIHVTKESTHPVKPLAQIAGNRYASVPVGKALSDACMGTIASFLSKYQDIIIEHQKVVKGNQKRLESLRELAGKENLEYPSVTLPPQPHTKEGVDAYNEVIARVRMWVNLNLWQKLKLSRDDAKPLLRLKGFPSFPLVERQANEVDWWDMVCNVKKLINEKKEDGKVFWQNLAGYKRQEALRPYLSSEEDRKKGKKFARYQLGDLLLHLEKKHGEDWGKVYDEAWERIDKKVEGLSKHIKLEEERRSEDAQSKAALTDWLRAKASFVIEGLKEADKDEFCRCDLKLQKWYGDLRGKPFAIEAENSILDISGFSKQYNCAFIWQKDGVKKLNLYLIINYFKGGKLRFKKIKPEAFEANRFYTVINKKSGEIVPMEVNFNFDDPNLIILPLAFGKRQGREFIWNDLLSLETGSLKLANGRVIEKTLYNRRTRQDEPALFVALTFERREVLDSSNIKPMNLIGVDRGENIPAVIALTDPEGCPLSRFKDSLGNPTHILRIGESYKEKQRTIQAKKEVEQRRAGGYSRKYASKAKNLADDMVRNTARDLLYYAVTQDAMLIFENLSRGFGRQGKRTFMAERQYTRMEDWLTAKLAYEGLPSKTYLSKTLAQYTSKTCSNCGFTITSADYDRVLEKLKKTATGWMTTINGKELKVEGQITYYNRYKRQNVVKDLSVELDRLSEESVNNDISSWTKGRSGEALSLLKKRFSHRPVQEKFVCLNCGFETHADEQAALNIARSWLFLRSQEYKKYQTNKTTGNTDKRAFVETWQSFYRKKLKEVWKPAV

SEQ ID NO: 32005 - protein, 978 aa, synthetic construct
  REGION 1..978: note = engineered CasX variant
QEIGRINKIRRRLVKDSNTKKAGKTGPMKTLLVRVMTPDLRERLENLRKKPENIPQPISNTSRANLNKLLTDYTEMKKAILHVYWEEFQKDPVGLMSRVAQPASKKIDQNKLKPEMDEKGNLTTAGFACSQCGQPLFVYKLEQVSEKGKAYTNYFGRCNVAEHEKLIKLAQLKPEKDSDEAVTYSLGKFGQRALDFYSIHVTKESTHPVKPLAQIAGNRYASGPVGKALSDACMGTIASFLSKYQDIIIEHQKVVKGNQKRLESLRELAGKENLEYPSVTLPPQPHTKEGVDAYNEVIARVRMWVNLNLWQKLKLSRDDAKPLLRLKGFPSFPLVERQANEVDWWDMVCNVKKLINEKKEDGKVFWQNLAGYKRQEALRPYLSSEEDRKKGKKFARYQLGDLLLHLEKKHGEDWGKVYDEAWERIDKKVEGLSKHIKLEEERRSEDAQSKAALTDWLRAKASFVIEGLKEADKDEFCRCDLKLQKWYGDLRGKPFAIEAENSILDISGFSKQYNCAFIWQKDGVKKLNLYLIINYFKGGKLRFKKIKPEAFEANRFYTVINKKSGEIVPMEVNFNFDDPNLIILPLAFGKRQGREFIWNDLLSLETGSLKLANGRVIEKTLYNRRTRQDEPALFVALTFERREVLDSSNIKPMNLIGVDRGENIPAVIALTDPEGCPLSRFKDSLGNPTHILRIGESYKEKQRTIQAKKEVEQRRAGGYSRKYASKAKNLADDMVRNTARDLLYYAVTQDAMLIFENLSRGFGRQGKRTFMAERQYTRMEDWLTAKLAYEGLPSKTYLSKTLAQYTSKTCSNCGFTITSADYDRVLEKLKKTATGWMTTINGKELKVEGQITYYNRYKRQNVVKDLSVELDRLSEESVNNDISSWTKGRSGEALSLLKKRFSHRPVQEKFVCLNCGFETHADEQAALNIARSWLFLRSQEYKKYQTNKTTGNTDKRAFVETWQSFYRKKLKEVWKPAV

SEQ ID NO: 32006 - protein, 977 aa, synthetic construct
  REGION 1..977: note = engineered CasX variant
QEIGRINKIRRRLVKDSNTKKAGKTGPMKTLLVRVMTPDLRERLENLRKKPENIPQPISNTSRANLNKLLTDYTEMKKAILHVYWEEFQKDPVGLMSRVAQPASKKIDQNKLKPEMDEKGNLTTAGFACSQCGQPLFVYKLEQVSEKGKAYTNYFGRCNVAEHEKLILLAQLKPEKDSDEAVTYSLGKFGQRALDFYSIHVTKESTHPVKPLAQIAGNRYASPVGKALSDACMGTIASFLSKYQDIIIEHQKVVKGNQKRLESLRELAGKENLEYPSVTLPPQPHTKEGVDAYNEVIARVRMWVNLNLWQKLKLSRDDAKPLLRLKGFPSFPLVERQANEVDWWDMVCNVKKLINEKKEDGKVFWQNLAGYKRQEALRPYLSSEEDRKKGKKFARYQLGDLLLHLEKKHGEDWGKVYDEAWERIDKKVEGLSKHIKLEEERRSEDAQSKAALTDWLRAKASFVIEGLKEADKDEFCRCDLKLQKWYGDLRGKPFAIEAENSILDISGFSKQYNCAFIWQKDGVKKLNLYLIINYFKGGKLRFKKIKPEAFEANRFYTVINKKSGEIVPMEVNFNFDDPNLIILPLAFGKRQGREFIWNDLLSLETGSLKLANGRVIEKTLYNRRTRQDEPALFVALTFERREVLDSSNIKPMNLIGVDRGENIPAVIALTDPEGCPLSRFKDSLGNPTHILRIGESYKEKQRTIQAKKEVEQRRAGGYSRKYASKAKNLADDMVRNTARDLLYYAVTQDAMLIFENLSRGFGRQGKRTFMAERQYTRMEDWLTAKLAYEGLPSKTYLSKTLAQYTSKTCSNCGFTITSADYDRVLEKLKKTATGWMTTINGKELKVEGQITYYNRYKRQNVVKDLSVELDRLSEESVNNDISSWTKGRSGEALSLLKKRFSHRPVQEKFVCLNCGFETHADEQAALNIARSWLFLRSQEYKKYQTNKTTGNTDKRAFVETWQSFYRKKLKEVWKPAV

SEQ ID NO: 32007 - protein, 978 aa, synthetic construct
  REGION 1..978: note = engineered CasX variant
QEIGRINKIRRRLVKDSNTKKAGKTGPMKTLLVRVMTPDLRERLENLRKKPENIPQPISNTSRANLNKLLTDYTEMKKAILHVYWEEFQKDPVGLMSRVAQPASKKIDQNKLKPEMDEKGNLTTAGFACSQCGQPLFVYKLEQVSEKGKAYTNYFGRCNVAEHEKLILLAQLKPEKDSDEAVTYSLGKFGQRALDFYSIHVTKESTHPVKPLAQIAGNRYASYPVGKALSDACMGTIASFLSKYQDIIIEHQKVVKGNQKRLESLRELAGKENLEYPSVTLPPQPHTKEGVDAYNEVIARVRMWVNLNLWQKLKLSRDDAKPLLRLKGFPSFPLVERQANEVDWWDMVCNVKKLINEKKEDGKVFWQNLAGYKRQEALRPYLSSEEDRKKGKKFARYQLGDLLLHLEKKHGEDWGKVYDEAWERIDKKVEGLSKHIKLEEERRSEDAQSKAALTDWLRAKASFVIEGLKEADKDEFCRCELKLQKWYGDLRGKPFAIEAENSILDISGFSKQYNCAFIWQKDGVKKLNLYLIINYFKGGKLRFKKIKPEAFEANRFYTVINKKSGEIVPMEVNFNFDDPNLIILPLAFGKRFGREFIWNDLLSLETGSLKLANGRVIEKTLYNRRTRQDEPALFVALTFERREVLDSSNIKPMNLIGVDRGENIPAVIALTDPEGCPLSRFKDSLGNPTHILRIGESYKEKQRTIQAKKEVEQRRAGGYSRKYASKAKNLADDMVRNTARDLLYYAVTQDAMLIFENLSRGFGRQGKRTFMAERQYTRMEDWLTAKLAYEGLPSKTYLSKTLAQYTSKTCSNCGFTITSADYDRVLEKLKKTATGWMTTINGKELKVEGQITYYNRYKRQNVVKDLSVELDRLSEESVNNDISSWTKGRSGEALSLLKKRFSHRPVQEKFVCLNCGFETHADEQAALNIARSWLFLRSQEYKKYQTNKTTGNTDKRAFVETWQSFYRKKLKEVWKPAV

SEQ ID NO: 32008 - protein, 978 aa, synthetic construct
  REGION 1..978: note = engineered CasX variant
QEIGRINKIRRRLVKDSNTKKAGKTGPMKTLLVRVMTPDLRERLENLRKKPENIPQPISNTSRANLNKLLTDYTEMKKAILHVYWEEFQKDPVGLMSRVAQPASKKIDQNKLKPEMDEKGNLTTAGFACSQCGQPLFVYKLEQVSEKGKAYTNYFGRCNVAEHEKLILLAQLKPEKDSDEAVTYSLGKFGQRALDFYSIHVTKESTHPVKPLAQIAGNRYASHPVGKALSDACMGTIASFLSKYQDIIIEHQKVVKGNQKRLESLRELAGKENLEYPSVTLPPQPHTKEGVDAYNEVIARVRMWVNLNLWQKLKLSRDDAKPLLRLKGFPSFPLVERQANEVDWWDMVCNVKKLINEKKEDGKVFWQNLAGYKRQEALRPYLSSEEDRKKGKKFARYQLGDLLLHLEKKHGEDWGKVYDEAWERIDKKVEGLSKHIKLEEERRSEDAQSKAALTDWLRAKASFVIEGLKEADKDEFCRCELKLQKWYGDLRGKPFAIEAENSILDISGFSKQYNCAFIWQKDGVKKLNLYLIINYFKGGKLRFKKIKPEAFEANRFYTVINKKSGEIVPMEVNFNFDDPNLIILPLAFGKRFGREFIWNDLLSLETGSLKLANGRVIEKTLYNRRTRQDEPALFVALTFERREVLDSSNIKPMNLIGVDRGENIPAVIALTDPEGCPLSRFKDSLGNPTHILRIGESYKEKQRTIQAKKEVEQRRAGGYSRKYASKAKNLADDMVRNTARDLLYYAVTQDAMLIFENLSRGFGRQGKRTFMAERQYTRMEDWLTAKLAYEGLPSKTYLSKTLAQYTSKTCSNCGFTITSADYDRVLEKLKKTATGWMTTINGKELKVEGQITYYNRYKRQNVVKDLSVELDRLSEESVNNDISSWTKGRSGEALSLLKKRFSHRPVQEKFVCLNCGFETHADEQAALNIARSWLFLRSQEYKKYQTNKTTGNTDKRAFVETWQSFYRKKLKEVWKPAV

SEQ ID NO: 32009 - protein, 978 aa, synthetic construct
  REGION 1..978: note = engineered CasX variant
QEIGRINKIRRRLVKDSNTKKAGKTGPMKTLLVRVMTPDLRERLENLRKKPENIPQPISNTSRANLNKLLTDYTEMKKAILHVYWEEFQKDPVGLMSRVAQPASKKIDQNKLKPEMDEKGNLTTAGFACSQCGQPLFVYKLEQVSEKGKAYTNYFGRCNVAEHEKLILLAQLKPEKDSDEAVTYSLGKFGQRALDFYSIHVTKESTHPVKPLAQIAGNRYASSPVGKALSDACMGTIASFLSKYQDIIIEHQKVVKGNQKRLESLRELAGKENLEYPSVTLPPQPHTKEGVDAYNEVIARVRMWVNLNLWQKLKLSRDDAKPLLRLKGFPSFPLVERQANEVDWWDMVCNVKKLINEKKEDGKVFWQNLAGYKRQEALRPYLSSEEDRKKGKKFARYQLGDLLLHLEKKHGEDWGKVYDEAWERIDKKVEGLSKHIKLEEERRSEDAQSKAALTDWLRAKASFVIEGLKEADKDEFCRCELKLQKWYGDLRGKPFAIEAENSILDISGFSKQYNCAFIWQKDGVKKLNLYLIINYFKGGKLRFKKIKPEAFEANRFYTVINKKSGEIVPMEVNFNFDDPNLIILPLAFGKRFGREFIWNDLLSLETGSLKLANGRVIEKTLYNRRTRQDEPALFVALTFERREVLDSSNIKPMNLIGVDRGENIPAVIALTDPEGCPLSRFKDSLGNPTHILRIGESYKEKQRTIQAKKEVEQRRAGGYSRKYASKAKNLADDMVRNTARDLLYYAVTQDAMLIFENLSRGFGRQGKRTFMAERQYTRMEDWLTAKLAYEGLPSKTYLSKTLAQYTSKTCSNCGFTITSADYDRVLEKLKKTATGWMTTINGKELKVEGQITYYNRYKRQNVVKDLSVELDRLSEESVNNDISSWTKGRSGEALSLLKKRFSHRPVQEKFVCLNCGFETHADEQAALNIARSWLFLRSQEYKKYQTNKTTGNTDKRAFVETWQSFYRKKLKEVWKPAV

SEQ ID NO: 32010 - protein, 978 aa, synthetic construct
  REGION 1..978: note = engineered CasX variant
QEIGRINKIRRRLVKDSNTKKAGKTGPMKTLLVRVMTPDLRERLENLRKKPENIPQPISNTSRANLNKLLTDYTEMKKAILHVYWEEFQKDPVGLMSRVAQPASKKIDQNKLKPEMDEKGNLTTAGFACSQCGQPLFVYKLEQVSEKGKAYTNYFGRCNVAEHEKLILLAQLKPEKDSDEAVTYSLGKFGQRALDFYSIHVTKESTHPVKPLAQIAGNRYASTPVGKALSDACMGTIASFLSKYQDIIIEHQKVVKGNQKRLESLRELAGKENLEYPSVTLPPQPHTKEGVDAYNEVIARVRMWVNLNLWQKLKLSRDDAKPLLRLKGFPSFPLVERQANEVDWWDMVCNVKKLINEKKEDGKVFWQNLAGYKRQEALRPYLSSEEDRKKGKKFARYQLGDLLLHLEKKHGEDWGKVYDEAWERIDKKVEGLSKHIKLEEERRSEDAQSKAALTDWLRAKASFVIEGLKEADKDEFCRCELKLQKWYGDLRGKPFAIEAENSILDISGFSKQYNCAFIWQKDGVKKLNLYLIINYFKGGKLRFKKIKPEAFEANRFYTVINKKSGEIVPMEVNFNFDDPNLIILPLAFGKRFGREFIWNDLLSLETGSLKLANGRVIEKTLYNRRTRQDEPALFVALTFERREVLDSSNIKPMNLIGVDRGENIPAVIALTDPEGCPLSRFKDSLGNPTHILRIGESYKEKQRTIQAKKEVEQRRAGGYSRKYASKAKNLADDMVRNTARDLLYYAVTQDAMLIFENLSRGFGRQGKRTFMAERQYTRMEDWLTAKLAYEGLPSKTYLSKTLAQYTSKTCSNCGFTITSADYDRVLEKLKKTATGWMTTINGKELKVEGQITYYNRYKRQNVVKDLSVELDRLSEESVNNDISSWTKGRSGEALSLLKKRFSHRPVQEKFVCLNCGFETHADEQAALNIARSWLFLRSQEYKKYQTNKTTGNTDKRAFVETWQSFYRKKLKEVWKPAV

SEQ ID NO: 32011 - protein, 978 aa, synthetic construct
  REGION 1..978: note = engineered CasX variant
QEIGRINKIRRRLVKDSNTKKAGKTGPMKTLLVRVMTPDLRERLENLRKKPENIPQPISNTSRANLNKLLTDYTEMKKAILHVYWEEFQKDPVGLMSRVAQPASKKIDQNKLKPEMDEKGNLTTAGFACSQCGQPLFVYKLEQVSEKGKAYTNYFGRCNVAEHEKLILLAQLKPEKDSDEAVTYSLGKFGQRALDFYSIHVTKESTHPVKPLAQIAGNRYASAPVGKALSDACMGTIASFLSKYQDIIIEHQKVVKGNQKRLESLRELAGKENLEYPSVTLPPQPHTKEGVDAYNEVIARVRMWVNLNLWQKLKLSRDDAKPLLRLKGFPSFPLVERQANEVDWWDMVCNVKKLINEKKEDGKVFWQNLAGYKRQEALRPYLSSEEDRKKGKKFARYQLGDLLLHLEKKHGEDWGKVYDEAWERIDKKVEGLSKHIKLEEERRSEDAQSKAALTDWLRAKASFVIEGLKEADKDEFCRCELKLQKWYGDLRGKPFAIEAENSILDISGFSKQYNCAFIWQKDGVKKLNLYLIINYFKGGKLRFKKIKPEAFEANRFYTVINKKSGEIVPMEVNFNFDDPNLIILPLAFGKRFGREFIWNDLLSLETGSLKLANGRVIEKTLYNRRTRQDEPALFVALTFERREVLDSSNIKPMNLIGVDRGENIPAVIALTDPEGCPLSRFKDSLGNPTHILRIGESYKEKQRTIQAKKEVEQRRAGGYSRKYASKAKNLADDMVRNTARDLLYYAVTQDAMLIFENLSRGFGRQGKRTFMAERQYTRMEDWLTAKLAYEGLPSKTYLSKTLAQYTSKTCSNCGFTITSADYDRVLEKLKKTATGWMTTINGKELKVEGQITYYNRYKRQNVVKDLSVELDRLSEESVNNDISSWTKGRSGEALSLLKKRFSHRPVQEKFVCLNCGFETHADEQAALNIARSWLFLRSQEYKKYQTNKTTGNTDKRAFVETWQSFYRKKLKEVWKPAV

SEQ ID NO: 32012 - protein, 978 aa, synthetic construct
  REGION 1..978: note = engineered CasX variant
QEIGRINKIRRRLVKDSNTKKAGKTGPMKTLLVRVMTPDLRERLENLRKKPENIPQPISNTSRANLNKLLTDYTEMKKAILHVYWEEFQKDPVGLMSRVAQPASKKIDQNKLKPEMDEKGNLTTAGFACSQCGQPLFVYKLEQVSEKGKAYTNYFGRCNVAEHEKLILLAQLKPEKDSDEAVTYSLGKFGQRALDFYSIHVTKESTHPVKPLAQIAGNRYASVPVGKALSDACMGTIASFLSKYQDIIIEHQKVVKGNQKRLESLRELAGKENLEYPSVTLPPQPHTKEGVDAYNEVIARVRMWVNLNLWQKLKLSRDDAKPLLRLKGFPSFPLVERQANEVDWWDMVCNVKKLINEKKEDGKVFWQNLAGYKRQEALRPYLSSEEDRKKGKKFARYQLGDLLLHLEKKHGEDWGKVYDEAWERIDKKVEGLSKHIKLEEERRSEDAQSKAALTDWLRAKASFVIEGLKEADKDEFCRCELKLQKWYGDLRGKPFAIEAENSILDISGFSKQYNCAFIWQKDGVKKLNLYLIINYFKGGKLRFKKIKPEAFEANRFYTVINKKSGEIVPMEVNFNFDDPNLIILPLAFGKRFGREFIWNDLLSLETGSLKLANGRVIEKTLYNRRTRQDEPALFVALTFERREVLDSSNIKPMNLIGVDRGENIPAVIALTDPEGCPLSRFKDSLGNPTHILRIGESYKEKQRTIQAKKEVEQRRAGGYSRKYASKAKNLADDMVRNTARDLLYYAVTQDAMLIFENLSRGFGRQGKRTFMAERQYTRMEDWLTAKLAYEGLPSKTYLSKTLAQYTSKTCSNCGFTITSADYDRVLEKLKKTATGWMTTINGKELKVEGQITYYNRYKRQNVVKDLSVELDRLSEESVNNDISSWTKGRSGEALSLLKKRFSHRPVQEKFVCLNCGFETHADEQAALNIARSWLFLRSQEYKKYQTNKTTGNTDKRAFVETWQSFYRKKLKEVWKPAV

SEQ ID NO: 32013 - protein, 978 aa, synthetic construct
  REGION 1..978: note = engineered CasX variant
QEIGRINKIRRRLVKDSNTKKAGKTGPMKTLLVRVMTPDLRERLENLRKKPENIPQPISNTSRANLNKLLTDYTEMKKAILHVYWEEFQKDPVGLMSRVAQPASKKIDQNKLKPEMDEKGNLTTAGFACSQCGQPLFVYKLEQVSEKGKAYTNYFGRCNVAEHEKLIKLAQLKPEKDSDEAVTYSLGKFGQRALDFYSIHVTKESTHPVKPLAQIAGNRYASGPVGKALSDACMGTIASFLSKYQDIIIEHQKVVKGNQKRLESLRELAGKENLEYPSVTLPPQPHTKEGVDAYNEVIARVRMWVNLNLWQKLKLSRDDAKPLLRLKGFPSFPLVERQANEVDWWDMVCNVKKLINEKKEDGKVFWQNLAGYKRQEALRPYLSSEEDRKKGKKFARYQLGDLLLHLEKKHGEDWGKVYDEAWERIDKKVEGLSKHIKLEEERRSEDAQSKAALTDWLRAKASFVIEGLKEADKDEFCRCELKLQKWYGDLRGKPFAIEAENSILDISGFSKQYNCAFIWQKDGVKKLNLYLIINYFKGGKLRFKKIKPEAFEANRFYTVINKKSGEIVPMEVNFNFDDPNLIILPLAFGKRFGREFIWNDLLSLETGSLKLANGRVIEKTLYNRRTRQDEPALFVALTFERREVLDSSNIKPMNLIGVDRGENIPAVIALTDPEGCPLSRFKDSLGNPTHILRIGESYKEKQRTIQAKKEVEQRRAGGYSRKYASKAKNLADDMVRNTARDLLYYAVTQDAMLIFENLSRGFGRQGKRTFMAERQYTRMEDWLTAKLAYEGLPSKTYLSKTLAQYTSKTCSNCGFTITSADYDRVLEKLKKTATGWMTTINGKELKVEGQITYYNRYKRQNVVKDLSVELDRLSEESVNNDISSWTKGRSGEALSLLKKRFSHRPVQEKFVCLNCGFETHADEQAALNIARSWLFLRSQEYKKYQTNKTTGNTDKRAFVETWQSFYRKKLKEVWKPAV

SEQ ID NO: 32014 - protein, 977 aa, synthetic construct
  REGION 1..977: note = engineered CasX variant
QEIGRINKIRRRLVKDSNTKKAGKTGPMKTLLVRVMTPDLRERLENLRKKPENIPQPISNTSRANLNKLLTDYTEMKKAILHVYWEEFQKDPVGLMSRVAQPASKKIDQNKLKPEMDEKGNLTTAGFACSQCGQPLFVYKLEQVSEKGKAYTNYFGRCNVAEHEKLILLAQLKPEKDSDEAVTYSLGKFGQRALDFYSIHVTKESTHPVKPLAQIAGNRYASPVGKALSDACMGTIASFLSKYQDIIIEHQKVVKGNQKRLESLRELAGKENLEYPSVTLPPQPHTKEGVDAYNEVIARVRMWVNLNLWQKLKLSRDDAKPLLRLKGFPSFPLVERQANEVDWWDMVCNVKKLINEKKEDGKVFWQNLAGYKRQEALRPYLSSEEDRKKGKKFARYQLGDLLLHLEKKHGEDWGKVYDEAWERIDKKVEGLSKHIKLEEERRSEDAQSKAALTDWLRAKASFVIEGLKEADKDEFCRCELKLQKWYGDLRGKPFAIEAENSILDISGFSKQYNCAFIWQKDGVKKLNLYLIINYFKGGKLRFKKIKPEAFEANRFYTVINKKSGEIVPMEVNFNFDDPNLIILPLAFGKRFGREFIWNDLLSLETGSLKLANGRVIEKTLYNRRTRQDEPALFVALTFERREVLDSSNIKPMNLIGVDRGENIPAVIALTDPEGCPLSRFKDSLGNPTHILRIGESYKEKQRTIQAKKEVEQRRAGGYSRKYASKAKNLADDMVRNTARDLLYYAVTQDAMLIFENLSRGFGRQGKRTFMAERQYTRMEDWLTAKLAYEGLPSKTYLSKTLAQYTSKTCSNCGFTITSADYDRVLEKLKKTATGWMTTINGKELKVEGQITYYNRYKRQNVVKDLSVELDRLSEESVNNDISSWTKGRSGEALSLLKKRFSHRPVQEKFVCLNCGFETHADEQAALNIARSWLFLRSQEYKKYQTNKTTGNTDKRAFVETWQSFYRKKLKEVWKPAV

SEQ ID NO: 32015 - protein, 978 aa, synthetic construct
  REGION 1..978: note = engineered CasX variant
QEIGRINKIRRRLVKDSNTKKAGKTGPMKTLLVRVMTPDLRERLENLRKKPENIPQPISNTSRANLNKLLTDYTEMKKAILHVYWEEFQKDPVGLMSRVAQPASKKIDQNKLKPEMDEKGNLTTAGFACSQCGQPLFVYKLEQVSEKGKAYTNYFGRCNVAEHEKLILLAQLKPEKDSDEAVTYSLGKFGQRALDFYSIHVTKESTHPVKPLAQIAGNRYASYPVGKALSDACMGTIASFLSKYQDIIIEHQKVVKGNQKRLESLRELAGKENLEYPSVTLPPQPHTKEGVDAYNEVIARVRMWVNLNLWQKLKLSRDDAKPLLRLKGFPSFPLVERQANEVDWWDMVCNVKKLINEKKEDGKVFWQNLAGYKRQEALRPYLSSEEDRKKGKKFARYQLGDLLLHLEKKHGEDWGKVYDEAWERIDKKVEGLSKHIKLEEERRSEDAQSKAALTDWLRAKASFVIEGLKEADKDEFCRCELKLQKWYGDLRGKPFAIEAENSILDISGFSKQYNCAFIWQKDGVKKLNLYLIINYFKGGKLRFKKIKPEAFEANRFYTVINKKSGEIVPMEVNFNFDDPNLIILPLAFGKRVGREFIWNDLLSLETGSLKLANGRVIEKTLYNRRTRQDEPALFVALTFERREVLDSSNIKPMNLIGVDRGENIPAVIALTDPEGCPLSRFKDSLGNPTHILRIGESYKEKQRTIQAKKEVEQRRAGGYSRKYASKAKNLADDMVRNTARDLLYYAVTQDAMLIFENLSRGFGRQGKRTFMAERQYTRMEDWLTAKLAYEGLPSKTYLSKTLAQYTSKTCSNCGFTITSADYDRVLEKLKKTATGWMTTINGKELKVEGQITYYNRYKRQNVVKDLSVELDRLSEESVNNDISSWTKGRSGEALSLLKKRFSHRPVQEKFVCLNCGFETHADEQAALNIARSWLFLRSQEYKKYQTNKTTGNTDKRAFVETWQSFYRKKLKEVWKPAV

SEQ ID NO: 32016 - protein, 978 aa, synthetic construct
  REGION 1..978: note = engineered CasX variant
QEIGRINKIRRRLVKDSNTKKAGKTGPMKTLLVRVMTPDLRERLENLRKKPENIPQPISNTSRANLNKLLTDYTEMKKAILHVYWEEFQKDPVGLMSRVAQPASKKIDQNKLKPEMDEKGNLTTAGFACSQCGQPLFVYKLEQVSEKGKAYTNYFGRCNVAEHEKLILLAQLKPEKDSDEAVTYSLGKFGQRALDFYSIHVTKESTHPVKPLAQIAGNRYASHPVGKALSDACMGTIASFLSKYQDIIIEHQKVVKGNQKRLESLRELAGKENLEYPSVTLPPQPHTKEGVDAYNEVIARVRMWVNLNLWQKLKLSRDDAKPLLRLKGFPSFPLVERQANEVDWWDMVCNVKKLINEKKEDGKVFWQNLAGYKRQEALRPYLSSEEDRKKGKKFARYQLGDLLLHLEKKHGEDWGKVYDEAWERIDKKVEGLSKHIKLEEERRSEDAQSKAALTDWLRAKASFVIEGLKEADKDEFCRCELKLQKWYGDLRGKPFAIEAENSILDISGFSKQYNCAFIWQKDGVKKLNLYLIINYFKGGKLRFKKIKPEAFEANRFYTVINKKSGEIVPMEVNFNFDDPNLIILPLAFGKRVGREFIWNDLLSLETGSLKLANGRVIEKTLYNRRTRQDEPALFVALTFERREVLDSSNIKPMNLIGVDRGENIPAVIALTDPEGCPLSRFKDSLGNPTHILRIGESYKEKQRTIQAKKEVEQRRAGGYSRKYASKAKNLADDMVRNTARDLLYYAVTQDAMLIFENLSRGFGRQGKRTFMAERQYTRMEDWLTAKLAYEGLPSKTYLSKTLAQYTSKTCSNCGFTITSADYDRVLEKLKKTATGWMTTINGKELKVEGQITYYNRYKRQNVVKDLSVELDRLSEESVNNDISSWTKGRSGEALSLLKKRFSHRPVQEKFVCLNCGFETHADEQAALNIARSWLFLRSQEYKKYQTNKTTGNTDKRAFVETWQSFYRKKLKEVWKPAV

SEQ ID NO: 32017 - protein, 978 aa, synthetic construct
  REGION 1..978: note = engineered CasX variant
QEIGRINKIRRRLVKDSNTKKAGKTGPMKTLLVRVMTPDLRERLENLRKKPENIPQPISNTSRANLNKLLTDYTEMKKAILHVYWEEFQKDPVGLMSRVAQPASKKIDQNKLKPEMDEKGNLTTAGFACSQCGQPLFVYKLEQVSEKGKAYTNYFGRCNVAEHEKLILLAQLKPEKDSDEAVTYSLGKFGQRALDFYSIHVTKESTHPVKPLAQIAGNRYASSPVGKALSDACMGTIASFLSKYQDIIIEHQKVVKGNQKRLESLRELAGKENLEYPSVTLPPQPHTKEGVDAYNEVIARVRMWVNLNLWQKLKLSRDDAKPLLRLKGFPSFPLVERQANEVDWWDMVCNVKKLINEKKEDGKVFWQNLAGYKRQEALRPYLSSEEDRKKGKKFARYQLGDLLLHLEKKHGEDWGKVYDEAWERIDKKVEGLSKHIKLEEERRSEDAQSKAALTDWLRAKASFVIEGLKEADKDEFCRCELKLQKWYGDLRGKPFAIEAENSILDISGFSKQYNCAFIWQKDGVKKLNLYLIINYFKGGKLRFKKIKPEAFEANRFYTVINKKSGEIVPMEVNFNFDDPNLIILPLAFGKRVGREFIWNDLLSLETGSLKLANGRVIEKTLYNRRTRQDEPALFVALTFERREVLDSSNIKPMNLIGVDRGENIPAVIALTDPEGCPLSRFKDSLGNPTHILRIGESYKEKQRTIQAKKEVEQRRAGGYSRKYASKAKNLADDMVRNTARDLLYYAVTQDAMLIFENLSRGFGRQGKRTFMAERQYTRMEDWLTAKLAYEGLPSKTYLSKTLAQYTSKTCSNCGFTITSADYDRVLEKLKKTATGWMTTINGKELKVEGQITYYNRYKRQNVVKDLSVELDRLSEESVNNDISSWTKGRSGEALSLLKKRFSHRPVQEKFVCLNCGFETHADEQAALNIARSWLFLRSQEYKKYQTNKTTGNTDKRAFVETWQSFYRKKLKEVWKPAV

SEQ ID NO: 32018 - protein, 978 aa, synthetic construct
  REGION 1..978: note = engineered CasX variant
QEIGRINKIRRRLVKDSNTKKAGKTGPMKTLLVRVMTPDLRERLENLRKKPENIPQPISNTSRANLNKLLTDYTEMKKAILHVYWEEFQKDPVGLMSRVAQPASKKIDQNKLKPEMDEKGNLTTAGFACSQCGQPLFVYKLEQVSEKGKAYTNYFGRCNVAEHEKLILLAQLKPEKDSDEAVTYSLGKFGQRALDFYSIHVTKESTHPVKPLAQIAGNRYASTPVGKALSDACMGTIASFLSKYQDIIIEHQKVVKGNQKRLESLRELAGKENLEYPSVTLPPQPHTKEGVDAYNEVIARVRMWVNLNLWQKLKLSRDDAKPLLRLKGFPSFPLVERQANEVDWWDMVCNVKKLINEKKEDGKVFWQNLAGYKRQEALRPYLSSEEDRKKGKKFARYQLGDLLLHLEKKHGEDWGKVYDEAWERIDKKVEGLSKHIKLEEERRSEDAQSKAALTDWLRAKASFVIEGLKEADKDEFCRCELKLQKWYGDLRGKPFAIEAENSILDISGFSKQYNCAFIWQKDGVKKLNLYLIINYFKGGKLRFKKIKPEAFEANRFYTVINKKSGEIVPMEVNFNFDDPNLIILPLAFGKRVGREFIWNDLLSLETGSLKLANGRVIEKTLYNRRTRQDEPALFVALTFERREVLDSSNIKPMNLIGVDRGENIPAVIALTDPEGCPLSRFKDSLGNPTHILRIGESYKEKQRTIQAKKEVEQRRAGGYSRKYASKAKNLADDMVRNTARDLLYYAVTQDAMLIFENLSRGFGRQGKRTFMAERQYTRMEDWLTAKLAYEGLPSKTYLSKTLAQYTSKTCSNCGFTITSADYDRVLEKLKKTATGWMTTINGKELKVEGQITYYNRYKRQNVVKDLSVELDRLSEESVNNDISSWTKGRSGEALSLLKKRFSHRPVQEKFVCLNCGFETHADEQAALNIARSWLFLRSQEYKKYQTNKTTGNTDKRAFVETWQSFYRKKLKEVWKPAV

SEQ ID NO: 32019 - protein, 978 aa, synthetic construct
  REGION 1..978: note = engineered CasX variant
QEIGRINKIRRRLVKDSNTKKAGKTGPMKTLLVRVMTPDLRERLENLRKKPENIPQPISNTSRANLNKLLTDYTEMKKAILHVYWEEFQKDPVGLMSRVAQPASKKIDQNKLKPEMDEKGNLTTAGFACSQCGQPLFVYKLEQVSEKGKAYTNYFGRCNVAEHEKLILLAQLKPEKDSDEAVTYSLGKFGQRALDFYSIHVTKESTHPVKPLAQIAGNRYASAPVGKALSDACMGTIASFLSKYQDIIIEHQKVVKGNQKRLESLRELAGKENLEYPSVTLPPQPHTKEGVDAYNEVIARVRMWVNLNLWQKLKLSRDDAKPLLRLKGFPSFPLVERQANEVDWWDMVCNVKKLINEKKEDGKVFWQNLAGYKRQEALRPYLSSEEDRKKGKKFARYQLGDLLLHLEKKHGEDWGKVYDEAWERIDKKVEGLSKHIKLEEERRSEDAQSKAALTDWLRAKASFVIEGLKEADKDEFCRCELKLQKWYGDLRGKPFAIEAENSILDISGFSKQYNCAFIWQKDGVKKLNLYLIINYFKGGKLRFKKIKPEAFEANRFYTVINKKSGEIVPMEVNFNFDDPNLIILPLAFGKRVGREFIWNDLLSLETGSLKLANGRVIEKTLYNRRTRQDEPALFVALTFERREVLDSSNIKPMNLIGVDRGENIPAVIALTDPEGCPLSRFKDSLGNPTHILRIGESYKEKQRTIQAKKEVEQRRAGGYSRKYASKAKNLADDMVRNTARDLLYYAVTQDAMLIFENLSRGFGRQGKRTFMAERQYTRMEDWLTAKLAYEGLPSKTYLSKTLAQYTSKTCSNCGFTITSADYDRVLEKLKKTATGWMTTINGKELKVEGQITYYNRYKRQNVVKDLSVELDRLSEESVNNDISSWTKGRSGEALSLLKKRFSHRPVQEKFVCLNCGFETHADEQAALNIARSWLFLRSQEYKKYQTNKTTGNTDKRAFVETWQSFYRKKLKEVWKPAV

SEQ ID NO: 32020 - protein, 978 aa, synthetic construct
  REGION 1..978: note = engineered CasX variant
QEIGRINKIRRRLVKDSNTKKAGKTGPMKTLLVRVMTPDLRERLENLRKKPENIPQPISNTSRANLNKLLTDYTEMKKAILHVYWEEFQKDPVGLMSRVAQPASKKIDQNKLKPEMDEKGNLTTAGFACSQCGQPLFVYKLEQVSEKGKAYTNYFGRCNVAEHEKLILLAQLKPEKDSDEAVTYSLGKFGQRALDFYSIHVTKESTHPVKPLAQIAGNRYASVPVGKALSDACMGTIASFLSKYQDIIIEHQKVVKGNQKRLESLRELAGKENLEYPSVTLPPQPHTKEGVDAYNEVIARVRMWVNLNLWQKLKLSRDDAKPLLRLKGFPSFPLVERQANEVDWWDMVCNVKKLINEKKEDGKVFWQNLAGYKRQEALRPYLSSEEDRKKGKKFARYQLGDLLLHLEKKHGEDWGKVYDEAWERIDKKVEGLSKHIKLEEERRSEDAQSKAALTDWLRAKASFVIEGLKEADKDEFCRCELKLQKWYGDLRGKPFAIEAENSILDISGFSKQYNCAFIWQKDGVKKLNLYLIINYFKGGKLRFKKIKPEAFEANRFYTVINKKSGEIVPMEVNFNFDDPNLIILPLAFGKRVGREFIWNDLLSLETGSLKLANGRVIEKTLYNRRTRQDEPALFVALTFERREVLDSSNIKPMNLIGVDRGENIPAVIALTDPEGCPLSRFKDSLGNPTHILRIGESYKEKQRTIQAKKEVEQRRAGGYSRKYASKAKNLADDMVRNTARDLLYYAVTQDAMLIFENLSRGFGRQGKRTFMAERQYTRMEDWLTAKLAYEGLPSKTYLSKTLAQYTSKTCSNCGFTITSADYDRVLEKLKKTATGWMTTINGKELKVEGQITYYNRYKRQNVVKDLSVELDRLSEESVNNDISSWTKGRSGEALSLLKKRFSHRPVQEKFVCLNCGFETHADEQAALNIARSWLFLRSQEYKKYQTNKTTGNTDKRAFVETWQSFYRKKLKEVWKPAV

SEQ ID NO: 32021 - protein, 978 aa, synthetic construct
  REGION 1..978: note = engineered CasX variant
QEIGRINKIRRRLVKDSNTKKAGKTGPMKTLLVRVMTPDLRERLENLRKKPENIPQPISNTSRANLNKLLTDYTEMKKAILHVYWEEFQKDPVGLMSRVAQPASKKIDQNKLKPEMDEKGNLTTAGFACSQCGQPLFVYKLEQVSEKGKAYTNYFGRCNVAEHEKLIKLAQLKPEKDSDEAVTYSLGKFGQRALDFYSIHVTKESTHPVKPLAQIAGNRYASGPVGKALSDACMGTIASFLSKYQDIIIEHQKVVKGNQKRLESLRELAGKENLEYPSVTLPPQPHTKEGVDAYNEVIARVRMWVNLNLWQKLKLSRDDAKPLLRLKGFPSFPLVERQANEVDWWDMVCNVKKLINEKKEDGKVFWQNLAGYKRQEALRPYLSSEEDRKKGKKFARYQLGDLLLHLEKKHGEDWGKVYDEAWERIDKKVEGLSKHIKLEEERRSEDAQSKAALTDWLRAKASFVIEGLKEADKDEFCRCELKLQKWYGDLRGKPFAIEAENSILDISGFSKQYNCAFIWQKDGVKKLNLYLIINYFKGGKLRFKKIKPEAFEANRFYTVINKKSGEIVPMEVNFNFDDPNLIILPLAFGKRVGREFIWNDLLSLETGSLKLANGRVIEKTLYNRRTRQDEPALFVALTFERREVLDSSNIKPMNLIGVDRGENIPAVIALTDPEGCPLSRFKDSLGNPTHILRIGESYKEKQRTIQAKKEVEQRRAGGYSRKYASKAKNLADDMVRNTARDLLYYAVTQDAMLIFENLSRGFGRQGKRTFMAERQYTRMEDWLTAKLAYEGLPSKTYLSKTLAQYTSKTCSNCGFTITSADYDRVLEKLKKTATGWMTTINGKELKVEGQITYYNRYKRQNVVKDLSVELDRLSEESVNNDISSWTKGRSGEALSLLKKRFSHRPVQEKFVCLNCGFETHADEQAALNIARSWLFLRSQEYKKYQTNKTTGNTDKRAFVETWQSFYRKKLKEVWKPAV

SEQ ID NO: 32022 - protein, 977 aa, synthetic construct
  REGION 1..977: note = engineered CasX variant
QEIGRINKIRRRLVKDSNTKKAGKTGPMKTLLVRVMTPDLRERLENLRKKPENIPQPISNTSRANLNKLLTDYTEMKKAILHVYWEEFQKDPVGLMSRVAQPASKKIDQNKLKPEMDEKGNLTTAGFACSQCGQPLFVYKLEQVSEKGKAYTNYFGRCNVAEHEKLILLAQLKPEKDSDEAVTYSLGKFGQRALDFYSIHVTKESTHPVKPLAQIAGNRYASPVGKALSDACMGTIASFLSKYQDIIIEHQKVVKGNQKRLESLRELAGKENLEYPSVTLPPQPHTKEGVDAYNEVIARVRMWVNLNLWQKLKLSRDDAKPLLRLKGFPSFPLVERQANEVDWWDMVCNVKKLINEKKEDGKVFWQNLAGYKRQEALRPYLSSEEDRKKGKKFARYQLGDLLLHLEKKHGEDWGKVYDEAWERIDKKVEGLSKHIKLEEERRSEDAQSKAALTDWLRAKASFVIEGLKEADKDEFCRCELKLQKWYGDLRGKPFAIEAENSILDISGFSKQYNCAFIWQKDGVKKLNLYLIINYFKGGKLRFKKIKPEAFEANRFYTVINKKSGEIVPMEVNFNFDDPNLIILPLAFGKRVGREFIWNDLLSLETGSLKLANGRVIEKTLYNRRTRQDEPALFVALTFERREVLDSSNIKPMNLIGVDRGENIPAVIALTDPEGCPLSRFKDSLGNPTHILRIGESYKEKQRTIQAKKEVEQRRAGGYSRKYASKAKNLADDMVRNTARDLLYYAVTQDAMLIFENLSRGFGRQGKRTFMAERQYTRMEDWLTAKLAYEGLPSKTYLSKTLAQYTSKTCSNCGFTITSADYDRVLEKLKKTATGWMTTINGKELKVEGQITYYNRYKRQNVVKDLSVELDRLSEESVNNDISSWTKGRSGEALSLLKKRFSHRPVQEKFVCLNCGFETHADEQAALNIARSWLFLRSQEYKKYQTNKTTGNTDKRAFVETWQSFYRKKLKEVWKPAV

SEQ ID NO: 32023 - protein, 979 aa, synthetic construct
  REGION 1..979: note = engineered CasX variant
QEIGRINKIRRRLVKDSNTKKAGKTGPMKTLLVRVMTPDLRERLENLRKKPENIPQPISNTSRANLNKLLTDYTEMKKAILHVYWEEFQKDPVGLMSRVAQPASKKIDQNKLKPEMDEKGNLTTAGFACSQCGQPLFVYKLEQVSEKGKAYTNYFGRCNVAEHEKLILLAQLKPEKDSDEAVTYSLGKFGQRALDFYSIHVTKESTHPVKPLAQIAGNRYASYPVGKALSDACMGTIASFLSKYQDIIIEHQKVVKGNQKRLESLRELAGKENLEYPSVTLPPQPHTKEGVDAYNEVIARVRMWVNLNLWQKLKLSRDDAKPLLRLKGFPSFPLVERQANEVDWWDMVCNVKKLINEKKEDGKVFWQNLAGYKRQEALRPYLSSEEDRKKGKKFARYQLGDLLLHLEKKHGEDWGKVYDEAWERIDKKVEGLSKHIKLEEERRSEDAQSKAALTDWLRAKASFVIEGLKEADKDEFCRCELKLQKWYGDLRGKPFAIEAENSILDISGFSKQYNCAFIWQKDGVKKLNLYLIINYFKGGKLRFKKIKPEAFEANRFYTVINKKSGEIVPMEVNFNFDDPNLIILPLAFGKRQGREFIWNDLLSLETGSLKLANGRVIEKTLYNRRTRQDEPALFVALTFERREVLDSSNIKTPMNLIGVDRGENIPAVIALTDPEGCPLSRFKDSLGNPTHILRIGESYKEKQRTIQAKKEVEQRRAGGYSRKYASKAKNLADDMVRNTARDLLYYAVTQDAMLIFENLSRGFGRQGKRTFMAERQYTRMEDWLTAKLAYEGLPSKTYLSKTLAQYTSKTCSNCGFTITSADYDRVLEKLKKTATGWMTTINGKELKVEGQITYYNRYKRQNVVKDLSVELDRLSEESVNNDISSWTKGRSGEALSLLKKRFSHRPVQEKFVCLNCGFETHADEQAALNIARSWLFLRSQEYKKYQTNKTTGNTDKRAFVETWQSFYRKKLKEVWKPAV

SEQ ID NO: 32024 - protein, 979 aa, synthetic construct
  REGION 1..979: note = engineered CasX variant
QEIGRINKIRRRLVKDSNTKKAGKTGPMKTLLVRVMTPDLRERLENLRKKPENIPQPISNTSRANLNKLLTDYTEMKKAILHVYWEEFQKDPVGLMSRVAQPASKKIDQNKLKPEMDEKGNLTTAGFACSQCGQPLFVYKLEQVSEKGKAYTNYFGRCNVAEHEKLILLAQLKPEKDSDEAVTYSLGKFGQRALDFYSIHVTKESTHPVKPLAQIAGNRYASHPVGKALSDACMGTIASFLSKYQDIIIEHQKVVKGNQKRLESLRELAGKENLEYPSVTLPPQPHTKEGVDAYNEVIARVRMWVNLNLWQKLKLSRDDAKPLLRLKGFPSFPLVERQANEVDWWDMVCNVKKLINEKKEDGKVFWQNLAGYKRQEALRPYLSSEEDRKKGKKFARYQLGDLLLHLEKKHGEDWGKVYDEAWERIDKKVEGLSKHIKLEEERRSEDAQSKAALTDWLRAKASFVIEGLKEADKDEFCRCELKLQKWYGDLRGKPFAIEAENSILDISGFSKQYNCAFIWQKDGVKKLNLYLIINYFKGGKLRFKKIKPEAFEANRFYTVINKKSGEIVPMEVNFNFDDPNLIILPLAFGKRQGREFIWNDLLSLETGSLKLANGRVIEKTLYNRRTRQDEPALFVALTFERREVLDSSNIKTPMNLIGVDRGENIPAVIALTDPEGCPLSRFKDSLGNPTHILRIGESYKEKQRTIQAKKEVEQRRAGGYSRKYASKAKNLADDMVRNTARDLLYYAVTQDAMLIFENLSRGFGRQGKRTFMAERQYTRMEDWLTAKLAYEGLPSKTYLSKTLAQYTSKTCSNCGFTITSADYDRVLEKLKKTATGWMTTINGKELKVEGQITYYNRYKRQNVVKDLSVELDRLSEESVNNDISSWTKGRSGEALSLLKKRFSHRPVQEKFVCLNCGFETHADEQAALNIARSWLFLRSQEYKKYQTNKTTGNTDKRAFVETWQSFYRKKLKEVWKPAV

SEQ ID NO: 32025 - protein, 979 aa, synthetic construct
  REGION 1..979: note = engineered CasX variant
QEIGRINKIRRRLVKDSNTKKAGKTGPMKTLLVRVMTPDLRERLENLRKKPENIPQPISNTSRANLNKLLTDYTEMKKAILHVYWEEFQKDPVGLMSRVAQPASKKIDQNKLKPEMDEKGNLTTAGFACSQCGQPLFVYKLEQVSEKGKAYTNYFGRCNVAEHEKLILLAQLKPEKDSDEAVTYSLGKFGQRALDFYSIHVTKESTHPVKPLAQIAGNRYASSPVGKALSDACMGTIASFLSKYQDIIIEHQKVVKGNQKRLESLRELAGKENLEYPSVTLPPQPHTKEGVDAYNEVIARVRMWVNLNLWQKLKLSRDDAKPLLRLKGFPSFPLVERQANEVDWWDMVCNVKKLINEKKEDGKVFWQNLAGYKRQEALRPYLSSEEDRKKGKKFARYQLGDLLLHLEKKHGEDWGKVYDEAWERIDKKVEGLSKHIKLEEERRSEDAQSKAALTDWLRAKASFVIEGLKEADKDEFCRCELKLQKWYGDLRGKPFAIEAENSILDISGFSKQYNCAFIWQKDGVKKLNLYLIINYFKGGKLRFKKIKPEAFEANRFYTVINKKSGEIVPMEVNFNFDDPNLIILPLAFGKRQGREFIWNDLLSLETGSLKLANGRVIEKTLYNRRTRQDEPALFVALTFERREVLDSSNIKTPMNLIGVDRGENIPAVIALTDPEGCPLSRFKDSLGNPTHILRIGESYKEKQRTIQAKKEVEQRRAGGYSRKYASKAKNLADDMVRNTARDLLYYAVTQDAMLIFENLSRGFGRQGKRTFMAERQYTRMEDWLTAKLAYEGLPSKTYLSKTLAQYTSKTCSNCGFTITSADYDRVLEKLKKTATGWMTTINGKELKVEGQITYYNRYKRQNVVKDLSVELDRLSEESVNNDISSWTKGRSGEALSLLKKRFSHRPVQEKFVCLNCGFETHADEQAALNIARSWLFLRSQEYKKYQTNKTTGNTDKRAFVETWQSFYRKKLKEVWKPAV

SEQ ID NO: 32026 - protein, 979 aa, synthetic construct
  REGION 1..979: note = engineered CasX variant
QEIGRINKIRRRLVKDSNTKKAGKTGPMKTLLVRVMTPDLRERLENLRKKPENIPQPISNTSRANLNKLLTDYTEMKKAILHVYWEEFQKDPVGLMSRVAQPASKKIDQNKLKPEMDEKGNLTTAGFACSQCGQPLFVYKLEQVSEKGKAYTNYFGRCNVAEHEKLILLAQLKPEKDSDEAVTYSLGKFGQRALDFYSIHVTKESTHPVKPLAQIAGNRYASTPVGKALSDACMGTIASFLSKYQDIIIEHQKVVKGNQKRLESLRELAGKENLEYPSVTLPPQPHTKEGVDAYNEVIARVRMWVNLNLWQKLKLSRDDAKPLLRLKGFPSFPLVERQANEVDWWDMVCNVKKLINEKKEDGKVFWQNLAGYKRQEALRPYLSSEEDRKKGKKFARYQLGDLLLHLEKKHGEDWGKVYDEAWERIDKKVEGLSKHIKLEEERRSEDAQSKAALTDWLRAKASFVIEGLKEADKDEFCRCELKLQKWYGDLRGKPFAIEAENSILDISGFSKQYNCAFIWQKDGVKKLNLYLIINYFKGGKLRFKKIKPEAFEANRFYTVINKKSGEIVPMEVNFNFDDPNLIILPLAFGKRQGREFIWNDLLSLETGSLKLANGRVIEKTLYNRRTRQDEPALFVALTFERREVLDSSNIKTPMNLIGVDRGENIPAVIALTDPEGCPLSRFKDSLGNPTHILRIGESYKEKQRTIQAKKEVEQRRAGGYSRKYASKAKNLADDMVRNTARDLLYYAVTQDAMLIFENLSRGFGRQGKRTFMAERQYTRMEDWLTAKLAYEGLPSKTYLSKTLAQYTSKTCSNCGFTITSADYDRVLEKLKKTATGWMTTINGKELKVEGQITYYNRYKRQNVVKDLSVELDRLSEESVNNDISSWTKGRSGEALSLLKKRFSHRPVQEKFVCLNCGFETHADEQAALNIARSWLFLRSQEYKKYQTNKTTGNTDKRAFVETWQSFYRKKLKEVWKPAV

SEQ ID NO: 32027 - protein, 979 aa, synthetic construct
  REGION 1..979: note = engineered CasX variant
QEIGRINKIRRRLVKDSNTKKAGKTGPMKTLLVRVMTPDLRERLENLRKKPENIPQPISNTSRANLNKLLTDYTEMKKAILHVYWEEFQKDPVGLMSRVAQPASKKIDQNKLKPEMDEKGNLTTAGFACSQCGQPLFVYKLEQVSEKGKAYTNYFGRCNVAEHEKLILLAQLKPEKDSDEAVTYSLGKFGQRALDFYSIHVTKESTHPVKPLAQIAGNRYASAPVGKALSDACMGTIASFLSKYQDIIIEHQKVVKGNQKRLESLRELAGKENLEYPSVTLPPQPHTKEGVDAYNEVIARVRMWVNLNLWQKLKLSRDDAKPLLRLKGFPSFPLVERQANEVDWWDMVCNVKKLINEKKEDGKVFWQNLAGYKRQEALRPYLSSEEDRKKGKKFARYQLGDLLLHLEKKHGEDWGKVYDEAWERIDKKVEGLSKHIKLEEERRSEDAQSKAALTDWLRAKASFVIEGLKEADKDEFCRCELKLQKWYGDLRGKPFAIEAENSILDISGFSKQYNCAFIWQKDGVKKLNLYLIINYFKGGKLRFKKIKPEAFEANRFYTVINKKSGEIVPMEVNFNFDDPNLIILPLAFGKRQGREFIWNDLLSLETGSLKLANGRVIEKTLYNRRTRQDEPALFVALTFERREVLDSSNIKTPMNLIGVDRGENIPAVIALTDPEGCPLSRFKDSLGNPTHILRIGESYKEKQRTIQAKKEVEQRRAGGYSRKYASKAKNLADDMVRNTARDLLYYAVTQDAMLIFENLSRGFGRQGKRTFMAERQYTRMEDWLTAKLAYEGLPSKTYLSKTLAQYTSKTCSNCGFTITSADYDRVLEKLKKTATGWMTTINGKELKVEGQITYYNRYKRQNVVKDLSVELDRLSEESVNNDISSWTKGRSGEALSLLKKRFSHRPVQEKFVCLNCGFETHADEQAALNIARSWLFLRSQEYKKYQTNKTTGNTDKRAFVETWQSFYRKKLKEVWKPAV

SEQ ID NO: 32028 - protein, 979 aa, synthetic construct
  REGION 1..979: note = engineered CasX variant
QEIGRINKIRRRLVKDSNTKKAGKTGPMKTLLVRVMTPDLRERLENLRKKPENIPQPISNTSRANLNKLLTDYTEMKKAILHVYWEEFQKDPVGLMSRVAQPASKKIDQNKLKPEMDEKGNLTTAGFACSQCGQPLFVYKLEQVSEKGKAYTNYFGRCNVAEHEKLILLAQLKPEKDSDEAVTYSLGKFGQRALDFYSIHVTKESTHPVKPLAQIAGNRYASVPVGKALSDACMGTIASFLSKYQDIIIEHQKVVKGNQKRLESLRELAGKENLEYPSVTLPPQPHTKEGVDAYNEVIARVRMWVNLNLWQKLKLSRDDAKPLLRLKGFPSFPLVERQANEVDWWDMVCNVKKLINEKKEDGKVFWQNLAGYKRQEALRPYLSSEEDRKKGKKFARYQLGDLLLHLEKKHGEDWGKVYDEAWERIDKKVEGLSKHIKLEEERRSEDAQSKAALTDWLRAKASFVIEGLKEADKDEFCRCELKLQKWYGDLRGKPFAIEAENSILDISGFSKQYNCAFIWQKDGVKKLNLYLIINYFKGGKLRFKKIKPEAFEANRFYTVINKKSGEIVPMEVNFNFDDPNLIILPLAFGKRQGREFIWNDLLSLETGSLKLANGRVIEKTLYNRRTRQDEPALFVALTFERREVLDSSNIKTPMNLIGVDRGENIPAVIALTDPEGCPLSRFKDSLGNPTHILRIGESYKEKQRTIQAKKEVEQRRAGGYSRKYASKAKNLADDMVRNTARDLLYYAVTQDAMLIFENLSRGFGRQGKRTFMAERQYTRMEDWLTAKLAYEGLPSKTYLSKTLAQYTSKTCSNCGFTITSADYDRVLEKLKKTATGWMTTINGKELKVEGQITYYNRYKRQNVVKDLSVELDRLSEESVNNDISSWTKGRSGEALSLLKKRFSHRPVQEKFVCLNCGFETHADEQAALNIARSWLFLRSQEYKKYQTNKTTGNTDKRAFVETWQSFYRKKLKEVWKPAV

SEQ ID NO: 32029 - protein, 979 aa, synthetic construct
  REGION 1..979: note = engineered CasX variant
QEIGRINKIRRRLVKDSNTKKAGKTGPMKTLLVRVMTPDLRERLENLRKKPENIPQPISNTSRANLNKLLTDYTEMKKAILHVYWEEFQKDPVGLMSRVAQPASKKIDQNKLKPEMDEKGNLTTAGFACSQCGQPLFVYKLEQVSEKGKAYTNYFGRCNVAEHEKLIKLAQLKPEKDSDEAVTYSLGKFGQRALDFYSIHVTKESTHPVKPLAQIAGNRYASGPVGKALSDACMGTIASFLSKYQDIIIEHQKVVKGNQKRLESLRELAGKENLEYPSVTLPPQPHTKEGVDAYNEVIARVRMWVNLNLWQKLKLSRDDAKPLLRLKGFPSFPLVERQANEVDWWDMVCNVKKLINEKKEDGKVFWQNLAGYKRQEALRPYLSSEEDRKKGKKFARYQLGDLLLHLEKKHGEDWGKVYDEAWERIDKKVEGLSKHIKLEEERRSEDAQSKAALTDWLRAKASFVIEGLKEADKDEFCRCELKLQKWYGDLRGKPFAIEAENSILDISGFSKQYNCAFIWQKDGVKKLNLYLIINYFKGGKLRFKKIKPEAFEANRFYTVINKKSGEIVPMEVNFNFDDPNLIILPLAFGKRQGREFIWNDLLSLETGSLKLANGRVIEKTLYNRRTRQDEPALFVALTFERREVLDSSNIKTPMNLIGVDRGENIPAVIALTDPEGCPLSRFKDSLGNPTHILRIGESYKEKQRTIQAKKEVEQRRAGGYSRKYASKAKNLADDMVRNTARDLLYYAVTQDAMLIFENLSRGFGRQGKRTFMAERQYTRMEDWLTAKLAYEGLPSKTYLSKTLAQYTSKTCSNCGFTITSADYDRVLEKLKKTATGWMTTINGKELKVEGQITYYNRYKRQNVVKDLSVELDRLSEESVNNDISSWTKGRSGEALSLLKKRFSHRPVQEKFVCLNCGFETHADEQAALNIARSWLFLRSQEYKKYQTNKTTGNTDKRAFVETWQSFYRKKLKEVWKPAV

SEQ ID NO: 32030 - protein, 978 aa, synthetic construct
  REGION 1..978: note = engineered CasX variant
QEIGRINKIRRRLVKDSNTKKAGKTGPMKTLLVRVMTPDLRERLENLRKKPENIPQPISNTSRANLNKLLTDYTEMKKAILHVYWEEFQKDPVGLMSRVAQPASKKIDQNKLKPEMDEKGNLTTAGFACSQCGQPLFVYKLEQVSEKGKAYTNYFGRCNVAEHEKLILLAQLKPEKDSDEAVTYSLGKFGQRALDFYSIHVTKESTHPVKPLAQIAGNRYASPVGKALSDACMGTIASFLSKYQDIIIEHQKVVKGNQKRLESLRELAGKENLEYPSVTLPPQPHTKEGVDAYNEVIARVRMWVNLNLWQKLKLSRDDAKPLLRLKGFPSFPLVERQANEVDWWDMVCNVKKLINEKKEDGKVFWQNLAGYKRQEALRPYLSSEEDRKKGKKFARYQLGDLLLHLEKKHGEDWGKVYDEAWERIDKKVEGLSKHIKLEEERRSEDAQSKAALTDWLRAKASFVIEGLKEADKDEFCRCELKLQKWYGDLRGKPFAIEAENSILDISGFSKQYNCAFIWQKDGVKKLNLYLIINYFKGGKLRFKKIKPEAFEANRFYTVINKKSGEIVPMEVNFNFDDPNLIILPLAFGKRQGREFIWNDLLSLETGSLKLANGRVIEKTLYNRRTRQDEPALFVALTFERREVLDSSNIKTPMNLIGVDRGENIPAVIALTDPEGCPLSRFKDSLGNPTHILRIGESYKEKQRTIQAKKEVEQRRAGGYSRKYASKAKNLADDMVRNTARDLLYYAVTQDAMLIFENLSRGFGRQGKRTFMAERQYTRMEDWLTAKLAYEGLPSKTYLSKTLAQYTSKTCSNCGFTITSADYDRVLEKLKKTATGWMTTINGKELKVEGQITYYNRYKRQNVVKDLSVELDRLSEESVNNDISSWTKGRSGEALSLLKKRFSHRPVQEKFVCLNCGFETHADEQAALNIARSWLFLRSQEYKKYQTNKTTGNTDKRAFVETWQSFYRKKLKEVWKPAV

SEQ ID NO: 32031 - protein, 979 aa, synthetic construct
  REGION 1..979: note = engineered CasX variant
QEIGRINKIRRRLVKDSNTKKAGKTGPMKTLLVRVMTPDLRERLENLRKKPENIPQPISNTSRANLNKLLTDYTEMKKAILHVYWEEFQKDPVGLMSRVAQPASKKIDQNKLKPEMDEKGNLTTAGFACSQCGQPLFVYKLEQVSEKGKAYTNYFGRCNVAEHEKLILLAQLKPEKDSDEAVTYSLGKFGQRALDFYSIHVTKESTHPVKPLAQIAGNRYASYPVGKALSDACMGTIASFLSKYQDIIIEHQKVVKGNQKRLESLRELAGKENLEYPSVTLPPQPHTKEGVDAYNEVIARVRMWVNLNLWQKLKLSRDDAKPLLRLKGFPSFPLVERQANEVDWWDMVCNVKKLINEKKEDGKVFWQNLAGYKRQEALRPYLSSEEDRKKGKKFARYQLGDLLLHLEKKHGEDWGKVYDEAWERIDKKVEGLSKHIKLEEERRSEDAQSKAALTDWLRAKASFVIEGLKEADKDEFCRCELKLQKWYGDLRGKPFAIEAENSILDISGFSKQYNCAFIWQKDGVKKLNLYLIINYFKGGKLRFKKIKPEAFEANRFYTVINKKSGEIVPMEVNFNFDDPNLIILPLAFGKRQGREFIWNDLLSLETGSLKLANGRVIEKTLYNRRTRQDEPALFVALTFERREVLDSSNIKPMSNLIGVDRGENIPAVIALTDPEGCPLSRFKDSLGNPTHILRIGESYKEKQRTIQAKKEVEQRRAGGYSRKYASKAKNLADDMVRNTARDLLYYAVTQDAMLIFENLSRGFGRQGKRTFMAERQYTRMEDWLTAKLAYEGLPSKTYLSKTLAQYTSKTCSNCGFTITSADYDRVLEKLKKTATGWMTTINGKELKVEGQITYYNRYKRQNVVKDLSVELDRLSEESVNNDISSWTKGRSGEALSLLKKRFSHRPVQEKFVCLNCGFETHADEQAALNIARSWLFLRSQEYKKYQTNKTTGNTDKRAFVETWQSFYRKKLKEVWKPAV

SEQ ID NO: 32032 - protein, 979 aa, synthetic construct
  REGION 1..979: note = engineered CasX variant
QEIGRINKIRRRLVKDSNTKKAGKTGPMKTLLVRVMTPDLRERLENLRKKPENIPQPISNTSRANLNKLLTDYTEMKKAILHVYWEEFQKDPVGLMSRVAQPASKKIDQNKLKPEMDEKGNLTTAGFACSQCGQPLFVYKLEQVSEKGKAYTNYFGRCNVAEHEKLILLAQLKPEKDSDEAVTYSLGKFGQRALDFYSIHVTKESTHPVKPLAQIAGNRYASHPVGKALSDACMGTIASFLSKYQDIIIEHQKVVKGNQKRLESLRELAGKENLEYPSVTLPPQPHTKEGVDAYNEVIARVRMWVNLNLWQKLKLSRDDAKPLLRLKGFPSFPLVERQANEVDWWDMVCNVKKLINEKKEDGKVFWQNLAGYKRQEALRPYLSSEEDRKKGKKFARYQLGDLLLHLEKKHGEDWGKVYDEAWERIDKKVEGLSKHIKLEEERRSEDAQSKAALTDWLRAKASFVIEGLKEADKDEFCRCELKLQKWYGDLRGKPFAIEAENSILDISGFSKQYNCAFIWQKDGVKKLNLYLIINYFKGGKLRFKKIKPEAFEANRFYTVINKKSGEIVPMEVNFNFDDPNLIILPLAFGKRQGREFIWNDLLSLETGSLKLANGRVIEKTLYNRRTRQDEPALFVALTFERREVLDSSNIKPMSNLIGVDRGENIPAVIALTDPEGCPLSRFKDSLGNPTHILRIGESYKEKQRTIQAKKEVEQRRAGGYSRKYASKAKNLADDMVRNTARDLLYYAVTQDAMLIFENLSRGFGRQGKRTFMAERQYTRMEDWLTAKLAYEGLPSKTYLSKTLAQYTSKTCSNCGFTITSADYDRVLEKLKKTATGWMTTINGKELKVEGQITYYNRYKRQNVVKDLSVELDRLSEESVNNDISSWTKGRSGEALSLLKKRFSHRPVQEKFVCLNCGFETHADEQAALNIARSWLFLRSQEYKKYQTNKTTGNTDKRAFVETWQSFYRKKLKEVWKPAV

SEQ ID NO: 32033 - protein, 979 aa, synthetic construct
  REGION 1..979: note = engineered CasX variant
QEIGRINKIRRRLVKDSNTKKAGKTGPMKTLLVRVMTPDLRERLENLRKKPENIPQPISNTSRANLNKLLTDYTEMKKAILHVYWEEFQKDPVGLMSRVAQPASKKIDQNKLKPEMDEKGNLTTAGFACSQCGQPLFVYKLEQVSEKGKAYTNYFGRCNVAEHEKLILLAQLKPEKDSDEAVTYSLGKFGQRALDFYSIHVTKESTHPVKPLAQIAGNRYASSPVGKALSDACMGTIASFLSKYQDIIIEHQKVVKGNQKRLESLRELAGKENLEYPSVTLPPQPHTKEGVDAYNEVIARVRMWVNLNLWQKLKLSRDDAKPLLRLKGFPSFPLVERQANEVDWWDMVCNVKKLINEKKEDGKVFWQNLAGYKRQEALRPYLSSEEDRKKGKKFARYQLGDLLLHLEKKHGEDWGKVYDEAWERIDKKVEGLSKHIKLEEERRSEDAQSKAALTDWLRAKASFVIEGLKEADKDEFCRCELKLQKWYGDLRGKPFAIEAENSILDISGFSKQYNCAFIWQKDGVKKLNLYLIINYFKGGKLRFKKIKPEAFEANRFYTVINKKSGEIVPMEVNFNFDDPNLIILPLAFGKRQGREFIWNDLLSLETGSLKLANGRVIEKTLYNRRTRQDEPALFVALTFERREVLDSSNIKPMSNLIGVDRGENIPAVIALTDPEGCPLSRFKDSLGNPTHILRIGESYKEKQRTIQAKKEVEQRRAGGYSRKYASKAKNLADDMVRNTARDLLYYAVTQDAMLIFENLSRGFGRQGKRTFMAERQYTRMEDWLTAKLAYEGLPSKTYLSKTLAQYTSKTCSNCGFTITSADYDRVLEKLKKTATGWMTTINGKELKVEGQITYYNRYKRQNVVKDLSVELDRLSEESVNNDISSWTKGRSGEALSLLKKRFSHRPVQEKFVCLNCGFETHADEQAALNIARSWLFLRSQEYKKYQTNKTTGNTDKRAFVETWQSFYRKKLKEVWKPAV

SEQ ID NO: 32034 - protein, 979 aa, synthetic construct
  REGION 1..979: note = engineered CasX variant
QEIGRINKIRRRLVKDSNTKKAGKTGPMKTLLVRVMTPDLRERLENLRKKPENIPQPISNTSRANLNKLLTDYTEMKKAILHVYWEEFQKDPVGLMSRVAQPASKKIDQNKLKPEMDEKGNLTTAGFACSQCGQPLFVYKLEQVSEKGKAYTNYFGRCNVAEHEKLILLAQLKPEKDSDEAVTYSLGKFGQRALDFYSIHVTKESTHPVKPLAQIAGNRYASTPVGKALSDACMGTIASFLSKYQDIIIEHQKVVKGNQKRLESLRELAGKENLEYPSVTLPPQPHTKEGVDAYNEVIARVRMWVNLNLWQKLKLSRDDAKPLLRLKGFPSFPLVERQANEVDWWDMVCNVKKLINEKKEDGKVFWQNLAGYKRQEALRPYLSSEEDRKKGKKFARYQLGDLLLHLEKKHGEDWGKVYDEAWERIDKKVEGLSKHIKLEEERRSEDAQSKAALTDWLRAKASFVIEGLKEADKDEFCRCELKLQKWYGDLRGKPFAIEAENSILDISGFSKQYNCAFIWQKDGVKKLNLYLIINYFKGGKLRFKKIKPEAFEANRFYTVINKKSGEIVPMEVNFNFDDPNLIILPLAFGKRQGREFIWNDLLSLETGSLKLANGRVIEKTLYNRRTRQDEPALFVALTFERREVLDSSNIKPMSNLIGVDRGENIPAVIALTDPEGCPLSRFKDSLGNPTHILRIGESYKEKQRTIQAKKEVEQRRAGGYSRKYASKAKNLADDMVRNTARDLLYYAVTQDAMLIFENLSRGFGRQGKRTFMAERQYTRMEDWLTAKLAYEGLPSKTYLSKTLAQYTSKTCSNCGFTITSADYDRVLEKLKKTATGWMTTINGKELKVEGQITYYNRYKRQNVVKDLSVELDRLSEESVNNDISSWTKGRSGEALSLLKKRFSHRPVQEKFVCLNCGFETHADEQAALNIARSWLFLRSQEYKKYQTNKTTGNTDKRAFVETWQSFYRKKLKEVWKPAV

SEQ ID NO: 32035 - protein, 979 aa, synthetic construct
  REGION 1..979: note = engineered CasX variant
QEIGRINKIRRRLVKDSNTKKAGKTGPMKTLLVRVMTPDLRERLENLRKKPENIPQPISNTSRANLNKLLTDYTEMKKAILHVYWEEFQKDPVGLMSRVAQPASKKIDQNKLKPEMDEKGNLTTAGFACSQCGQPLFVYKLEQVSEKGKAYTNYFGRCNVAEHEKLILLAQLKPEKDSDEAVTYSLGKFGQRALDFYSIHVTKESTHPVKPLAQIAGNRYASAPVGKALSDACMGTIASFLSKYQDIIIEHQKVVKGNQKRLESLRELAGKENLEYPSVTLPPQPHTKEGVDAYNEVIARVRMWVNLNLWQKLKLSRDDAKPLLRLKGFPSFPLVERQANEVDWWDMVCNVKKLINEKKEDGKVFWQNLAGYKRQEALRPYLSSEEDRKKGKKFARYQLGDLLLHLEKKHGEDWGKVYDEAWERIDKKVEGLSKHIKLEEERRSEDAQSKAALTDWLRAKASFVIEGLKEADKDEFCRCELKLQKWYGDLRGKPFAIEAENSILDISGFSKQYNCAFIWQKDGVKKLNLYLIINYFKGGKLRFKKIKPEAFEANRFYTVINKKSGEIVPMEVNFNFDDPNLIILPLAFGKRQGREFIWNDLLSLETGSLKLANGRVIEKTLYNRRTRQDEPALFVALTFERREVLDSSNIKPMSNLIGVDRGENIPAVIALTDPEGCPLSRFKDSLGNPTHILRIGESYKEKQRTIQAKKEVEQRRAGGYSRKYASKAKNLADDMVRNTARDLLYYAVTQDAMLIFENLSRGFGRQGKRTFMAERQYTRMEDWLTAKLAYEGLPSKTYLSKTLAQYTSKTCSNCGFTITSADYDRVLEKLKKTATGWMTTINGKELKVEGQITYYNRYKRQNVVKDLSVELDRLSEESVNNDISSWTKGRSGEALSLLKKRFSHRPVQEKFVCLNCGFETHADEQAALNIARSWLFLRSQEYKKYQTNKTTGNTDKRAFVETWQSFYRKKLKEVWKPAV

SEQ ID NO: 32036 - protein, 979 aa, synthetic construct
  REGION 1..979: note = engineered CasX variant
QEIGRINKIRRRLVKDSNTKKAGKTGPMKTLLVRVMTPDLRERLENLRKKPENIPQPISNTSRANLNKLLTDYTEMKKAILHVYWEEFQKDPVGLMSRVAQPASKKIDQNKLKPEMDEKGNLTTAGFACSQCGQPLFVYKLEQVSEKGKAYTNYFGRCNVAEHEKLILLAQLKPEKDSDEAVTYSLGKFGQRALDFYSIHVTKESTHPVKPLAQIAGNRYASVPVGKALSDACMGTIASFLSKYQDIIIEHQKVVKGNQKRLESLRELAGKENLEYPSVTLPPQPHTKEGVDAYNEVIARVRMWVNLNLWQKLKLSRDDAKPLLRLKGFPSFPLVERQANEVDWWDMVCNVKKLINEKKEDGKVFWQNLAGYKRQEALRPYLSSEEDRKKGKKFARYQLGDLLLHLEKKHGEDWGKVYDEAWERIDKKVEGLSKHIKLEEERRSEDAQSKAALTDWLRAKASFVIEGLKEADKDEFCRCELKLQKWYGDLRGKPFAIEAENSILDISGFSKQYNCAFIWQKDGVKKLNLYLIINYFKGGKLRFKKIKPEAFEANRFYTVINKKSGEIVPMEVNFNFDDPNLIILPLAFGKRQGREFIWNDLLSLETGSLKLANGRVIEKTLYNRRTRQDEPALFVALTFERREVLDSSNIKPMSNLIGVDRGENIPAVIALTDPEGCPLSRFKDSLGNPTHILRIGESYKEKQRTIQAKKEVEQRRAGGYSRKYASKAKNLADDMVRNTARDLLYYAVTQDAMLIFENLSRGFGRQGKRTFMAERQYTRMEDWLTAKLAYEGLPSKTYLSKTLAQYTSKTCSNCGFTITSADYDRVLEKLKKTATGWMTTINGKELKVEGQITYYNRYKRQNVVKDLSVELDRLSEESVNNDISSWTKGRSGEALSLLKKRFSHRPVQEKFVCLNCGFETHADEQAALNIARSWLFLRSQEYKKYQTNKTTGNTDKRAFVETWQSFYRKKLKEVWKPAV

SEQ ID NO: 32037 - protein, 979 aa, synthetic construct
  REGION 1..979: note = engineered CasX variant
QEIGRINKIRRRLVKDSNTKKAGKTGPMKTLLVRVMTPDLRERLENLRKKPENIPQPISNTSRANLNKLLTDYTEMKKAILHVYWEEFQKDPVGLMSRVAQPASKKIDQNKLKPEMDEKGNLTTAGFACSQCGQPLFVYKLEQVSEKGKAYTNYFGRCNVAEHEKLIKLAQLKPEKDSDEAVTYSLGKFGQRALDFYSIHVTKESTHPVKPLAQIAGNRYASGPVGKALSDACMGTIASFLSKYQDIIIEHQKVVKGNQKRLESLRELAGKENLEYPSVTLPPQPHTKEGVDAYNEVIARVRMWVNLNLWQKLKLSRDDAKPLLRLKGFPSFPLVERQANEVDWWDMVCNVKKLINEKKEDGKVFWQNLAGYKRQEALRPYLSSEEDRKKGKKFARYQLGDLLLHLEKKHGEDWGKVYDEAWERIDKKVEGLSKHIKLEEERRSEDAQSKAALTDWLRAKASFVIEGLKEADKDEFCRCELKLQKWYGDLRGKPFAIEAENSILDISGFSKQYNCAFIWQKDGVKKLNLYLIINYFKGGKLRFKKIKPEAFEANRFYTVINKKSGEIVPMEVNFNFDDPNLIILPLAFGKRQGREFIWNDLLSLETGSLKLANGRVIEKTLYNRRTRQDEPALFVALTFERREVLDSSNIKPMSNLIGVDRGENIPAVIALTDPEGCPLSRFKDSLGNPTHILRIGESYKEKQRTIQAKKEVEQRRAGGYSRKYASKAKNLADDMVRNTARDLLYYAVTQDAMLIFENLSRGFGRQGKRTFMAERQYTRMEDWLTAKLAYEGLPSKTYLSKTLAQYTSKTCSNCGFTITSADYDRVLEKLKKTATGWMTTINGKELKVEGQITYYNRYKRQNVVKDLSVELDRLSEESVNNDISSWTKGRSGEALSLLKKRFSHRPVQEKFVCLNCGFETHADEQAALNIARSWLFLRSQEYKKYQTNKTTGNTDKRAFVETWQSFYRKKLKEVWKPAV

SEQ ID NO: 32038 - protein, 978 aa, synthetic construct
  REGION 1..978: note = engineered CasX variant
QEIGRINKIRRRLVKDSNTKKAGKTGPMKTLLVRVMTPDLRERLENLRKKPENIPQPISNTSRANLNKLLTDYTEMKKAILHVYWEEFQKDPVGLMSRVAQPASKKIDQNKLKPEMDEKGNLTTAGFACSQCGQPLFVYKLEQVSEKGKAYTNYFGRCNVAEHEKLILLAQLKPEKDSDEAVTYSLGKFGQRALDFYSIHVTKESTHPVKPLAQIAGNRYASPVGKALSDACMGTIASFLSKYQDIIIEHQKVVKGNQKRLESLRELAGKENLEYPSVTLPPQPHTKEGVDAYNEVIARVRMWVNLNLWQKLKLSRDDAKPLLRLKGFPSFPLVERQANEVDWWDMVCNVKKLINEKKEDGKVFWQNLAGYKRQEALRPYLSSEEDRKKGKKFARYQLGDLLLHLEKKHGEDWGKVYDEAWERIDKKVEGLSKHIKLEEERRSEDAQSKAALTDWLRAKASFVIEGLKEADKDEFCRCELKLQKWYGDLRGKPFAIEAENSILDISGFSKQYNCAFIWQKDGVKKLNLYLIINYFKGGKLRFKKIKPEAFEANRFYTVINKKSGEIVPMEVNFNFDDPNLIILPLAFGKRQGREFIWNDLLSLETGSLKLANGRVIEKTLYNRRTRQDEPALFVALTFERREVLDSSNIKPMSNLIGVDRGENIPAVIALTDPEGCPLSRFKDSLGNPTHILRIGESYKEKQRTIQAKKEVEQRRAGGYSRKYASKAKNLADDMVRNTARDLLYYAVTQDAMLIFENLSRGFGRQGKRTFMAERQYTRMEDWLTAKLAYEGLPSKTYLSKTLAQYTSKTCSNCGFTITSADYDRVLEKLKKTATGWMTTINGKELKVEGQITYYNRYKRQNVVKDLSVELDRLSEESVNNDISSWTKGRSGEALSLLKKRFSHRPVQEKFVCLNCGFETHADEQAALNIARSWLFLRSQEYKKYQTNKTTGNTDKRAFVETWQSFYRKKLKEVWKPAV

SEQ ID NO: 32039 - protein, 978 aa, synthetic construct
  REGION 1..978: note = engineered CasX variant
QEIGRINKIRRRLVKDSNTKKAGKTGPMKTLLVRVMTPDLRERLENLRKKPENIPQPISNTSRANLNKLLTDYTEMKKAILHVYWEEFQKDPVGLMSRVAQPASKKIDQNKLKPEMDEKGNLTTAGFACSQCGQPLFVYKLEQVSEKGKAYTNYFGRCNVAEHEKLILLAQLKPEKDSDEAVTYSLGKFGQRALDFYSIHVTKESTHPVKPLAQIAGNRYASYPVGKALSDACMGTIASFLSKYQDIIIEHQKVVKGNQKRLESLRELAGKENLEYPSVTLPPQPHTKEGVDAYNEVIARVRMWVNLNLWQKLKLSRDDAKPLLRLKGFPSFPLVERQANEVDWWDMVCNVKKLINEKKEDGKVFWQNLAGYKRQEALRPYLSSEEDRKKGKKFARYQLGDLLLHLEKKHGEDWGKVYDEAWERIDKKVEGLSKHIKLEEERRSEDAQSKAALTDWLRAKASFVIEGLKEADKDEFCRCELKLQKWYGDLRGKPFAIEAENSILDISGFSKQYNCAFIWQKDGVKKLNLYLIINYFKGGKLRFKKIKPEAFEANRFYTVINKKSGEIVPMEVNFNFDDPNLIILPLAFGKRQGREFIWNDLLSLETGSLKLANGRVIEKTLYNRRTRQDEPALFVALTFERREVLDSSNIKPMNLIGVDRGENIPAVIALTDPEGCPLSRFKDSLGNPTHILRIRESYKEKQRTIQAKKEVEQRRAGGYSRKYASKAKNLADDMVRNTARDLLYYAVTQDAMLIFENLSRGFGRQGKRTFMAERQYTRMEDWLTAKLAYEGLPSKTYLSKTLAQYTSKTCSNCGFTITSADYDRVLEKLKKTATGWMTTINGKELKVEGQITYYNRYKRQNVVKDLSVELDRLSEESVNNDISSWTKGRSGEALSLLKKRFSHRPVQEKFVCLNCGFETHADEQAALNIARSWLFLRSQEYKKYQTNKTTGNTDKRAFVETWQSFYRKKLKEVWKPAV

SEQ ID NO: 32040 - protein, 978 aa, synthetic construct
  REGION 1..978: note = engineered CasX variant
QEIGRINKIRRRLVKDSNTKKAGKTGPMKTLLVRVMTPDLRERLENLRKKPENIPQPISNTSRANLNKLLTDYTEMKKAILHVYWEEFQKDPVGLMSRVAQPASKKIDQNKLKPEMDEKGNLTTAGFACSQCGQPLFVYKLEQVSEKGKAYTNYFGRCNVAEHEKLILLAQLKPEKDSDEAVTYSLGKFGQRALDFYSIHVTKESTHPVKPLAQIAGNRYASHPVGKALSDACMGTIASFLSKYQDIIIEHQKVVKGNQKRLESLRELAGKENLEYPSVTLPPQPHTKEGVDAYNEVIARVRMWVNLNLWQKLKLSRDDAKPLLRLKGFPSFPLVERQANEVDWWDMVCNVKKLINEKKEDGKVFWQNLAGYKRQEALRPYLSSEEDRKKGKKFARYQLGDLLLHLEKKHGEDWGKVYDEAWERIDKKVEGLSKHIKLEEERRSEDAQSKAALTDWLRAKASFVIEGLKEADKDEFCRCELKLQKWYGDLRGKPFAIEAENSILDISGFSKQYNCAFIWQKDGVKKLNLYLIINYFKGGKLRFKKIKPEAFEANRFYTVINKKSGEIVPMEVNFNFDDPNLIILPLAFGKRQGREFIWNDLLSLETGSLKLANGRVIEKTLYNRRTRQDEPALFVALTFERREVLDSSNIKPMNLIGVDRGENIPAVIALTDPEGCPLSRFKDSLGNPTHILRIRESYKEKQRTIQAKKEVEQRRAGGYSRKYASKAKNLADDMVRNTARDLLYYAVTQDAMLIFENLSRGFGRQGKRTFMAERQYTRMEDWLTAKLAYEGLPSKTYLSKTLAQYTSKTCSNCGFTITSADYDRVLEKLKKTATGWMTTINGKELKVEGQITYYNRYKRQNVVKDLSVELDRLSEESVNNDISSWTKGRSGEALSLLKKRFSHRPVQEKFVCLNCGFETHADEQAALNIARSWLFLRSQEYKKYQTNKTTGNTDKRAFVETWQSFYRKKLKEVWKPAV

SEQ ID NO: 32041 - protein, 978 aa, synthetic construct
  REGION 1..978: note = engineered CasX variant
QEIGRINKIRRRLVKDSNTKKAGKTGPMKTLLVRVMTPDLRERLENLRKKPENIPQPISNTSRANLNKLLTDYTEMKKAILHVYWEEFQKDPVGLMSRVAQPASKKIDQNKLKPEMDEKGNLTTAGFACSQCGQPLFVYKLEQVSEKGKAYTNYFGRCNVAEHEKLILLAQLKPEKDSDEAVTYSLGKFGQRALDFYSIHVTKESTHPVKPLAQIAGNRYASSPVGKALSDACMGTIASFLSKYQDIIIEHQKVVKGNQKRLESLRELAGKENLEYPSVTLPPQPHTKEGVDAYNEVIARVRMWVNLNLWQKLKLSRDDAKPLLRLKGFPSFPLVERQANEVDWWDMVCNVKKLINEKKEDGKVFWQNLAGYKRQEALRPYLSSEEDRKKGKKFARYQLGDLLLHLEKKHGEDWGKVYDEAWERIDKKVEGLSKHIKLEEERRSEDAQSKAALTDWLRAKASFVIEGLKEADKDEFCRCELKLQKWYGDLRGKPFAIEAENSILDISGFSKQYNCAFIWQKDGVKKLNLYLIINYFKGGKLRFKKIKPEAFEANRFYTVINKKSGEIVPMEVNFNFDDPNLIILPLAFGKRQGREFIWNDLLSLETGSLKLANGRVIEKTLYNRRTRQDEPALFVALTFERREVLDSSNIKPMNLIGVDRGENIPAVIALTDPEGCPLSRFKDSLGNPTHILRIRESYKEKQRTIQAKKEVEQRRAGGYSRKYASKAKNLADDMVRNTARDLLYYAVTQDAMLIFENLSRGFGRQGKRTFMAERQYTRMEDWLTAKLAYEGLPSKTYLSKTLAQYTSKTCSNCGFTITSADYDRVLEKLKKTATGWMTTINGKELKVEGQITYYNRYKRQNVVKDLSVELDRLSEESVNNDISSWTKGRSGEALSLLKKRFSHRPVQEKFVCLNCGFETHADEQAALNIARSWLFLRSQEYKKYQTNKTTGNTDKRAFVETWQSFYRKKLKEVWKPAV

SEQ ID NO: 32042 - protein, 978 aa, synthetic construct
  REGION 1..978: note = engineered CasX variant
QEIGRINKIRRRLVKDSNTKKAGKTGPMKTLLVRVMTPDLRERLENLRKKPENIPQPISNTSRANLNKLLTDYTEMKKAILHVYWEEFQKDPVGLMSRVAQPASKKIDQNKLKPEMDEKGNLTTAGFACSQCGQPLFVYKLEQVSEKGKAYTNYFGRCNVAEHEKLILLAQLKPEKDSDEAVTYSLGKFGQRALDFYSIHVTKESTHPVKPLAQIAGNRYASTPVGKALSDACMGTIASFLSKYQDIIIEHQKVVKGNQKRLESLRELAGKENLEYPSVTLPPQPHTKEGVDAYNEVIARVRMWVNLNLWQKLKLSRDDAKPLLRLKGFPSFPLVERQANEVDWWDMVCNVKKLINEKKEDGKVFWQNLAGYKRQEALRPYLSSEEDRKKGKKFARYQLGDLLLHLEKKHGEDWGKVYDEAWERIDKKVEGLSKHIKLEEERRSEDAQSKAALTDWLRAKASFVIEGLKEADKDEFCRCELKLQKWYGDLRGKPFAIEAENSILDISGFSKQYNCAFIWQKDGVKKLNLYLIINYFKGGKLRFKKIKPEAFEANRFYTVINKKSGEIVPMEVNFNFDDPNLIILPLAFGKRQGREFIWNDLLSLETGSLKLANGRVIEKTLYNRRTRQDEPALFVALTFERREVLDSSNIKPMNLIGVDRGENIPAVIALTDPEGCPLSRFKDSLGNPTHILRIRESYKEKQRTIQAKKEVEQRRAGGYSRKYASKAKNLADDMVRNTARDLLYYAVTQDAMLIFENLSRGFGRQGKRTFMAERQYTRMEDWLTAKLAYEGLPSKTYLSKTLAQYTSKTCSNCGFTITSADYDRVLEKLKKTATGWMTTINGKELKVEGQITYYNRYKRQNVVKDLSVELDRLSEESVNNDISSWTKGRSGEALSLLKKRFSHRPVQEKFVCLNCGFETHADEQAALNIARSWLFLRSQEYKKYQTNKTTGNTDKRAFVETWQSFYRKKLKEVWKPAV

SEQ ID NO: 32043 - protein, 978 aa, synthetic construct
  REGION 1..978: note = engineered CasX variant
QEIGRINKIRRRLVKDSNTKKAGKTGPMKTLLVRVMTPDLRERLENLRKKPENIPQPISNTSRANLNKLLTDYTEMKKAILHVYWEEFQKDPVGLMSRVAQPASKKIDQNKLKPEMDEKGNLTTAGFACSQCGQPLFVYKLEQVSEKGKAYTNYFGRCNVAEHEKLILLAQLKPEKDSDEAVTYSLGKFGQRALDFYSIHVTKESTHPVKPLAQIAGNRYASAPVGKALSDACMGTIASFLSKYQDIIIEHQKVVKGNQKRLESLRELAGKENLEYPSVTLPPQPHTKEGVDAYNEVIARVRMWVNLNLWQKLKLSRDDAKPLLRLKGFPSFPLVERQANEVDWWDMVCNVKKLINEKKEDGKVFWQNLAGYKRQEALRPYLSSEEDRKKGKKFARYQLGDLLLHLEKKHGEDWGKVYDEAWERIDKKVEGLSKHIKLEEERRSEDAQSKAALTDWLRAKASFVIEGLKEADKDEFCRCELKLQKWYGDLRGKPFAIEAENSILDISGFSKQYNCAFIWQKDGVKKLNLYLIINYFKGGKLRFKKIKPEAFEANRFYTVINKKSGEIVPMEVNFNFDDPNLIILPLAFGKRQGREFIWNDLLSLETGSLKLANGRVIEKTLYNRRTRQDEPALFVALTFERREVLDSSNIKPMNLIGVDRGENIPAVIALTDPEGCPLSRFKDSLGNPTHILRIRESYKEKQRTIQAKKEVEQRRAGGYSRKYASKAKNLADDMVRNTARDLLYYAVTQDAMLIFENLSRGFGRQGKRTFMAERQYTRMEDWLTAKLAYEGLPSKTYLSKTLAQYTSKTCSNCGFTITSADYDRVLEKLKKTATGWMTTINGKELKVEGQITYYNRYKRQNVVKDLSVELDRLSEESVNNDISSWTKGRSGEALSLLKKRFSHRPVQEKFVCLNCGFETHADEQAALNIARSWLFLRSQEYKKYQTNKTTGNTDKRAFVETWQSFYRKKLKEVWKPAV

SEQ ID NO: 32044 - protein, 978 aa, synthetic construct
  REGION 1..978: note = engineered CasX variant
QEIGRINKIRRRLVKDSNTKKAGKTGPMKTLLVRVMTPDLRERLENLRKKPENIPQPISNTSRANLNKLLTDYTEMKKAILHVYWEEFQKDPVGLMSRVAQPASKKIDQNKLKPEMDEKGNLTTAGFACSQCGQPLFVYKLEQVSEKGKAYTNYFGRCNVAEHEKLILLAQLKPEKDSDEAVTYSLGKFGQRALDFYSIHVTKESTHPVKPLAQIAGNRYASVPVGKALSDACMGTIASFLSKYQDIIIEHQKVVKGNQKRLESLRELAGKENLEYPSVTLPPQPHTKEGVDAYNEVIARVRMWVNLNLWQKLKLSRDDAKPLLRLKGFPSFPLVERQANEVDWWDMVCNVKKLINEKKEDGKVFWQNLAGYKRQEALRPYLSSEEDRKKGKKFARYQLGDLLLHLEKKHGEDWGKVYDEAWERIDKKVEGLSKHIKLEEERRSEDAQSKAALTDWLRAKASFVIEGLKEADKDEFCRCELKLQKWYGDLRGKPFAIEAENSILDISGFSKQYNCAFIWQKDGVKKLNLYLIINYFKGGKLRFKKIKPEAFEANRFYTVINKKSGEIVPMEVNFNFDDPNLIILPLAFGKRQGREFIWNDLLSLETGSLKLANGRVIEKTLYNRRTRQDEPALFVALTFERREVLDSSNIKPMNLIGVDRGENIPAVIALTDPEGCPLSRFKDSLGNPTHILRIRESYKEKQRTIQAKKEVEQRRAGGYSRKYASKAKNLADDMVRNTARDLLYYAVTQDAMLIFENLSRGFGRQGKRTFMAERQYTRMEDWLTAKLAYEGLPSKTYLSKTLAQYTSKTCSNCGFTITSADYDRVLEKLKKTATGWMTTINGKELKVEGQITYYNRYKRQNVVKDLSVELDRLSEESVNNDISSWTKGRSGEALSLLKKRFSHRPVQEKFVCLNCGFETHADEQAALNIARSWLFLRSQEYKKYQTNKTTGNTDKRAFVETWQSFYRKKLKEVWKPAV

SEQ ID NO: 32045 - protein, 978 aa, synthetic construct
  REGION 1..978: note = engineered CasX variant
QEIGRINKIRRRLVKDSNTKKAGKTGPMKTLLVRVMTPDLRERLENLRKKPENIPQPISNTSRANLNKLLTDYTEMKKAILHVYWEEFQKDPVGLMSRVAQPASKKIDQNKLKPEMDEKGNLTTAGFACSQCGQPLFVYKLEQVSEKGKAYTNYFGRCNVAEHEKLIKLAQLKPEKDSDEAVTYSLGKFGQRALDFYSIHVTKESTHPVKPLAQIAGNRYASGPVGKALSDACMGTIASFLSKYQDIIIEHQKVVKGNQKRLESLRELAGKENLEYPSVTLPPQPHTKEGVDAYNEVIARVRMWVNLNLWQKLKLSRDDAKPLLRLKGFPSFPLVERQANEVDWWDMVCNVKKLINEKKEDGKVFWQNLAGYKRQEALRPYLSSEEDRKKGKKFARYQLGDLLLHLEKKHGEDWGKVYDEAWERIDKKVEGLSKHIKLEEERRSEDAQSKAALTDWLRAKASFVIEGLKEADKDEFCRCELKLQKWYGDLRGKPFAIEAENSILDISGFSKQYNCAFIWQKDGVKKLNLYLIINYFKGGKLRFKKIKPEAFEANRFYTVINKKSGEIVPMEVNFNFDDPNLIILPLAFGKRQGREFIWNDLLSLETGSLKLANGRVIEKTLYNRRTRQDEPALFVALTFERREVLDSSNIKPMNLIGVDRGENIPAVIALTDPEGCPLSRFKDSLGNPTHILRIRESYKEKQRTIQAKKEVEQRRAGGYSRKYASKAKNLADDMVRNTARDLLYYAVTQDAMLIFENLSRGFGRQGKRTFMAERQYTRMEDWLTAKLAYEGLPSKTYLSKTLAQYTSKTCSNCGFTITSADYDRVLEKLKKTATGWMTTINGKELKVEGQITYYNRYKRQNVVKDLSVELDRLSEESVNNDISSWTKGRSGEALSLLKKRFSHRPVQEKFVCLNCGFETHADEQAALNIARSWLFLRSQEYKKYQTNKTTGNTDKRAFVETWQSFYRKKLKEVWKPAV

SEQ ID NO: 32046 - protein, 977 aa, synthetic construct
  REGION 1..977: note = engineered CasX variant
QEIGRINKIRRRLVKDSNTKKAGKTGPMKTLLVRVMTPDLRERLENLRKKPENIPQPISNTSRANLNKLLTDYTEMKKAILHVYWEEFQKDPVGLMSRVAQPASKKIDQNKLKPEMDEKGNLTTAGFACSQCGQPLFVYKLEQVSEKGKAYTNYFGRCNVAEHEKLILLAQLKPEKDSDEAVTYSLGKFGQRALDFYSIHVTKESTHPVKPLAQIAGNRYASPVGKALSDACMGTIASFLSKYQDIIIEHQKVVKGNQKRLESLRELAGKENLEYPSVTLPPQPHTKEGVDAYNEVIARVRMWVNLNLWQKLKLSRDDAKPLLRLKGFPSFPLVERQANEVDWWDMVCNVKKLINEKKEDGKVFWQNLAGYKRQEALRPYLSSEEDRKKGKKFARYQLGDLLLHLEKKHGEDWGKVYDEAWERIDKKVEGLSKHIKLEEERRSEDAQSKAALTDWLRAKASFVIEGLKEADKDEFCRCELKLQKWYGDLRGKPFAIEAENSILDISGFSKQYNCAFIWQKDGVKKLNLYLIINYFKGGKLRFKKIKPEAFEANRFYTVINKKSGEIVPMEVNFNFDDPNLIILPLAFGKRQGREFIWNDLLSLETGSLKLANGRVIEKTLYNRRTRQDEPALFVALTFERREVLDSSNIKPMNLIGVDRGENIPAVIALTDPEGCPLSRFKDSLGNPTHILRIRESYKEKQRTIQAKKEVEQRRAGGYSRKYASKAKNLADDMVRNTARDLLYYAVTQDAMLIFENLSRGFGRQGKRTFMAERQYTRMEDWLTAKLAYEGLPSKTYLSKTLAQYTSKTCSNCGFTITSADYDRVLEKLKKTATGWMTTINGKELKVEGQITYYNRYKRQNVVKDLSVELDRLSEESVNNDISSWTKGRSGEALSLLKKRFSHRPVQEKFVCLNCGFETHADEQAALNIARSWLFLRSQEYKKYQTNKTTGNTDKRAFVETWQSFYRKKLKEVWKPAV

SEQ ID NO: 32047 - protein, 978 aa, synthetic construct
  REGION 1..978: note = engineered CasX variant
QEIGRINKIRRRLVKDSNTKKAGKTGPMKTLLVRVMTPDLRERLENLRKKPENIPQPISNTSRANLNKLLTDYTEMKKAILHVYWEEFQKDPVGLMSRVAQPASKKIDQNKLKPEMDEKGNLTTAGFACSQCGQPLFVYKLEQVSEKGKAYTNYFGRCNVAEHEKLILLAQLKPEKDSDEAVTYSLGKFGQRALDFYSIHVTKESTHPVKPLAQIAGNRYASYPVGKALSDACMGTIASFLSKYQDIIIEHQKVVKGNQKRLESLRELAGKENLEYPSVTLPPQPHTKEGVDAYNEVIARVRMWVNLNLWQKLKLSRDDAKPLLRLKGFPSFPLVERQANEVDWWDMVCNVKKLINEKKEDGKVFWQNLAGYKRQEALRPYLSSEEDRKKGKKFARYQLGDLLLHLEKKHGEDWGKVYDEAWERIDKKVEGLSKHIKLEEERRSEDAQSKAALTDWLRAKASFVIEGLKEADKDEFCRCELKLQKWYGDLRGKPFAIEAENSILDISGFSKQYNCAFIWQKDGVKKLNLYLIINYFKGGKLRFKKIKPEAFEANRFYTVINKKSGEIVPMEVNFNFDDPNLIILPLAFGKRQGREFIWNDLLSLETGSLKLANGRVIEKTLYNRRTRQDEPALFVALTFERREVLDSSNIKPMNLIGVDRGENIPAVIALTDPEGCPLSRFKDSLGNPTHILRIGESYKEKQRTIQAKKEVEQRRAGGYSRKYASKAKNLADDMVRNTARDLLYYAVTQDAMLIFENLSRGFGRQGKRTFSAERQYTRMEDWLTAKLAYEGLPSKTYLSKTLAQYTSKTCSNCGFTITSADYDRVLEKLKKTATGWMTTINGKELKVEGQITYYNRYKRQNVVKDLSVELDRLSEESVNNDISSWTKGRSGEALSLLKKRFSHRPVQEKFVCLNCGFETHADEQAALNIARSWLFLRSQEYKKYQTNKTTGNTDKRAFVETWQSFYRKKLKEVWKPAV

SEQ ID NO: 32048 - protein, 978 aa, synthetic construct
  REGION 1..978: note = engineered CasX variant
QEIGRINKIRRRLVKDSNTKKAGKTGPMKTLLVRVMTPDLRERLENLRKKPENIPQPISNTSRANLNKLLTDYTEMKKAILHVYWEEFQKDPVGLMSRVAQPASKKIDQNKLKPEMDEKGNLTTAGFACSQCGQPLFVYKLEQVSEKGKAYTNYFGRCNVAEHEKLILLAQLKPEKDSDEAVTYSLGKFGQRALDFYSIHVTKESTHPVKPLAQIAGNRYASHPVGKALSDACMGTIASFLSKYQDIIIEHQKVVKGNQKRLESLRELAGKENLEYPSVTLPPQPHTKEGVDAYNEVIARVRMWVNLNLWQKLKLSRDDAKPLLRLKGFPSFPLVERQANEVDWWDMVCNVKKLINEKKEDGKVFWQNLAGYKRQEALRPYLSSEEDRKKGKKFARYQLGDLLLHLEKKHGEDWGKVYDEAWERIDKKVEGLSKHIKLEEERRSEDAQSKAALTDWLRAKASFVIEGLKEADKDEFCRCELKLQKWYGDLRGKPFAIEAENSILDISGFSKQYNCAFIWQKDGVKKLNLYLIINYFKGGKLRFKKIKPEAFEANRFYTVINKKSGEIVPMEVNFNFDDPNLIILPLAFGKRQGREFIWNDLLSLETGSLKLANGRVIEKTLYNRRTRQDEPALFVALTFERREVLDSSNIKPMNLIGVDRGENIPAVIALTDPEGCPLSRFKDSLGNPTHILRIGESYKEKQRTIQAKKEVEQRRAGGYSRKYASKAKNLADDMVRNTARDLLYYAVTQDAMLIFENLSRGFGRQGKRTFSAERQYTRMEDWLTAKLAYEGLPSKTYLSKTLAQYTSKTCSNCGFTITSADYDRVLEKLKKTATGWMTTINGKELKVEGQITYYNRYKRQNVVKDLSVELDRLSEESVNNDISSWTKGRSGEALSLLKKRFSHRPVQEKFVCLNCGFETHADEQAALNIARSWLFLRSQEYKKYQTNKTTGNTDKRAFVETWQSFYRKKLKEVWKPAV

SEQ ID NO: 32049 - protein, 978 aa, synthetic construct
  REGION 1..978: note = engineered CasX variant
QEIGRINKIRRRLVKDSNTKKAGKTGPMKTLLVRVMTPDLRERLENLRKKPENIPQPISNTSRANLNKLLTDYTEMKKAILHVYWEEFQKDPVGLMSRVAQPASKKIDQNKLKPEMDEKGNLTTAGFACSQCGQPLFVYKLEQVSEKGKAYTNYFGRCNVAEHEKLILLAQLKPEKDSDEAVTYSLGKFGQRALDFYSIHVTKESTHPVKPLAQIAGNRYASSPVGKALSDACMGTIASFLSKYQDIIIEHQKVVKGNQKRLESLRELAGKENLEYPSVTLPPQPHTKEGVDAYNEVIARVRMWVNLNLWQKLKLSRDDAKPLLRLKGFPSFPLVERQANEVDWWDMVCNVKKLINEKKEDGKVFWQNLAGYKRQEALRPYLSSEEDRKKGKKFARYQLGDLLLHLEKKHGEDWGKVYDEAWERIDKKVEGLSKHIKLEEERRSEDAQSKAALTDWLRAKASFVIEGLKEADKDEFCRCELKLQKWYGDLRGKPFAIEAENSILDISGFSKQYNCAFIWQKDGVKKLNLYLIINYFKGGKLRFKKIKPEAFEANRFYTVINKKSGEIVPMEVNFNFDDPNLIILPLAFGKRQGREFIWNDLLSLETGSLKLANGRVIEKTLYNRRTRQDEPALFVALTFERREVLDSSNIKPMNLIGVDRGENIPAVIALTDPEGCPLSRFKDSLGNPTHILRIGESYKEKQRTIQAKKEVEQRRAGGYSRKYASKAKNLADDMVRNTARDLLYYAVTQDAMLIFENLSRGFGRQGKRTFSAERQYTRMEDWLTAKLAYEGLPSKTYLSKTLAQYTSKTCSNCGFTITSADYDRVLEKLKKTATGWMTTINGKELKVEGQITYYNRYKRQNVVKDLSVELDRLSEESVNNDISSWTKGRSGEALSLLKKRFSHRPVQEKFVCLNCGFETHADEQAALNIARSWLFLRSQEYKKYQTNKTTGNTDKRAFVETWQSFYRKKLKEVWKPAV

SEQ ID NO: 32050 - protein, 978 aa, synthetic construct
  REGION 1..978: note = engineered CasX variant
QEIGRINKIRRRLVKDSNTKKAGKTGPMKTLLVRVMTPDLRERLENLRKKPENIPQPISNTSRANLNKLLTDYTEMKKAILHVYWEEFQKDPVGLMSRVAQPASKKIDQNKLKPEMDEKGNLTTAGFACSQCGQPLFVYKLEQVSEKGKAYTNYFGRCNVAEHEKLILLAQLKPEKDSDEAVTYSLGKFGQRALDFYSIHVTKESTHPVKPLAQIAGNRYASTPVGKALSDACMGTIASFLSKYQDIIIEHQKVVKGNQKRLESLRELAGKENLEYPSVTLPPQPHTKEGVDAYNEVIARVRMWVNLNLWQKLKLSRDDAKPLLRLKGFPSFPLVERQANEVDWWDMVCNVKKLINEKKEDGKVFWQNLAGYKRQEALRPYLSSEEDRKKGKKFARYQLGDLLLHLEKKHGEDWGKVYDEAWERIDKKVEGLSKHIKLEEERRSEDAQSKAALTDWLRAKASFVIEGLKEADKDEFCRCELKLQKWYGDLRGKPFAIEAENSILDISGFSKQYNCAFIWQKDGVKKLNLYLIINYFKGGKLRFKKIKPEAFEANRFYTVINKKSGEIVPMEVNFNFDDPNLIILPLAFGKRQGREFIWNDLLSLETGSLKLANGRVIEKTLYNRRTRQDEPALFVALTFERREVLDSSNIKPMNLIGVDRGENIPAVIALTDPEGCPLSRFKDSLGNPTHILRIGESYKEKQRTIQAKKEVEQRRAGGYSRKYASKAKNLADDMVRNTARDLLYYAVTQDAMLIFENLSRGFGRQGKRTFSAERQYTRMEDWLTAKLAYEGLPSKTYLSKTLAQYTSKTCSNCGFTITSADYDRVLEKLKKTATGWMTTINGKELKVEGQITYYNRYKRQNVVKDLSVELDRLSEESVNNDISSWTKGRSGEALSLLKKRFSHRPVQEKFVCLNCGFETHADEQAALNIARSWLFLRSQEYKKYQTNKTTGNTDKRAFVETWQSFYRKKLKEVWKPAV

SEQ ID NO: 32051 - protein, 978 aa, synthetic construct
  REGION 1..978: note = engineered CasX variant
QEIGRINKIRRRLVKDSNTKKAGKTGPMKTLLVRVMTPDLRERLENLRKKPENIPQPISNTSRANLNKLLTDYTEMKKAILHVYWEEFQKDPVGLMSRVAQPASKKIDQNKLKPEMDEKGNLTTAGFACSQCGQPLFVYKLEQVSEKGKAYTNYFGRCNVAEHEKLILLAQLKPEKDSDEAVTYSLGKFGQRALDFYSIHVTKESTHPVKPLAQIAGNRYASAPVGKALSDACMGTIASFLSKYQDIIIEHQKVVKGNQKRLESLRELAGKENLEYPSVTLPPQPHTKEGVDAYNEVIARVRMWVNLNLWQKLKLSRDDAKPLLRLKGFPSFPLVERQANEVDWWDMVCNVKKLINEKKEDGKVFWQNLAGYKRQEALRPYLSSEEDRKKGKKFARYQLGDLLLHLEKKHGEDWGKVYDEAWERIDKKVEGLSKHIKLEEERRSEDAQSKAALTDWLRAKASFVIEGLKEADKDEFCRCELKLQKWYGDLRGKPFAIEAENSILDISGFSKQYNCAFIWQKDGVKKLNLYLIINYFKGGKLRFKKIKPEAFEANRFYTVINKKSGEIVPMEVNFNFDDPNLIILPLAFGKRQGREFIWNDLLSLETGSLKLANGRVIEKTLYNRRTRQDEPALFVALTFERREVLDSSNIKPMNLIGVDRGENIPAVIALTDPEGCPLSRFKDSLGNPTHILRIGESYKEKQRTIQAKKEVEQRRAGGYSRKYASKAKNLADDMVRNTARDLLYYAVTQDAMLIFENLSRGFGRQGKRTFSAERQYTRMEDWLTAKLAYEGLPSKTYLSKTLAQYTSKTCSNCGFTITSADYDRVLEKLKKTATGWMTTINGKELKVEGQITYYNRYKRQNVVKDLSVELDRLSEESVNNDISSWTKGRSGEALSLLKKRFSHRPVQEKFVCLNCGFETHADEQAALNIARSWLFLRSQEYKKYQTNKTTGNTDKRAFVETWQSFYRKKLKEVWKPAV

SEQ ID NO: 32052 - protein, 978 aa, synthetic construct
  REGION 1..978: note = engineered CasX variant
QEIGRINKIRRRLVKDSNTKKAGKTGPMKTLLVRVMTPDLRERLENLRKKPENIPQPISNTSRANLNKLLTDYTEMKKAILHVYWEEFQKDPVGLMSRVAQPASKKIDQNKLKPEMDEKGNLTTAGFACSQCGQPLFVYKLEQVSEKGKAYTNYFGRCNVAEHEKLILLAQLKPEKDSDEAVTYSLGKFGQRALDFYSIHVTKESTHPVKPLAQIAGNRYASVPVGKALSDACMGTIASFLSKYQDIIIEHQKVVKGNQKRLESLRELAGKENLEYPSVTLPPQPHTKEGVDAYNEVIARVRMWVNLNLWQKLKLSRDDAKPLLRLKGFPSFPLVERQANEVDWWDMVCNVKKLINEKKEDGKVFWQNLAGYKRQEALRPYLSSEEDRKKGKKFARYQLGDLLLHLEKKHGEDWGKVYDEAWERIDKKVEGLSKHIKLEEERRSEDAQSKAALTDWLRAKASFVIEGLKEADKDEFCRCELKLQKWYGDLRGKPFAIEAENSILDISGFSKQYNCAFIWQKDGVKKLNLYLIINYFKGGKLRFKKIKPEAFEANRFYTVINKKSGEIVPMEVNFNFDDPNLIILPLAFGKRQGREFIWNDLLSLETGSLKLANGRVIEKTLYNRRTRQDEPALFVALTFERREVLDSSNIKPMNLIGVDRGENIPAVIALTDPEGCPLSRFKDSLGNPTHILRIGESYKEKQRTIQAKKEVEQRRAGGYSRKYASKAKNLADDMVRNTARDLLYYAVTQDAMLIFENLSRGFGRQGKRTFSAERQYTRMEDWLTAKLAYEGLPSKTYLSKTLAQYTSKTCSNCGFTITSADYDRVLEKLKKTATGWMTTINGKELKVEGQITYYNRYKRQNVVKDLSVELDRLSEESVNNDISSWTKGRSGEALSLLKKRFSHRPVQEKFVCLNCGFETHADEQAALNIARSWLFLRSQEYKKYQTNKTTGNTDKRAFVETWQSFYRKKLKEVWKPAV

SEQ ID NO: 32053 - protein, 978 aa, synthetic construct
  REGION 1..978: note = engineered CasX variant
QEIGRINKIRRRLVKDSNTKKAGKTGPMKTLLVRVMTPDLRERLENLRKKPENIPQPISNTSRANLNKLLTDYTEMKKAILHVYWEEFQKDPVGLMSRVAQPASKKIDQNKLKPEMDEKGNLTTAGFACSQCGQPLFVYKLEQVSEKGKAYTNYFGRCNVAEHEKLIKLAQLKPEKDSDEAVTYSLGKFGQRALDFYSIHVTKESTHPVKPLAQIAGNRYASGPVGKALSDACMGTIASFLSKYQDIIIEHQKVVKGNQKRLESLRELAGKENLEYPSVTLPPQPHTKEGVDAYNEVIARVRMWVNLNLWQKLKLSRDDAKPLLRLKGFPSFPLVERQANEVDWWDMVCNVKKLINEKKEDGKVFWQNLAGYKRQEALRPYLSSEEDRKKGKKFARYQLGDLLLHLEKKHGEDWGKVYDEAWERIDKKVEGLSKHIKLEEERRSEDAQSKAALTDWLRAKASFVIEGLKEADKDEFCRCELKLQKWYGDLRGKPFAIEAENSILDISGFSKQYNCAFIWQKDGVKKLNLYLIINYFKGGKLRFKKIKPEAFEANRFYTVINKKSGEIVPMEVNFNFDDPNLIILPLAFGKRQGREFIWNDLLSLETGSLKLANGRVIEKTLYNRRTRQDEPALFVALTFERREVLDSSNIKPMNLIGVDRGENIPAVIALTDPEGCPLSRFKDSLGNPTHILRIGESYKEKQRTIQAKKEVEQRRAGGYSRKYASKAKNLADDMVRNTARDLLYYAVTQDAMLIFENLSRGFGRQGKRTFSAERQYTRMEDWLTAKLAYEGLPSKTYLSKTLAQYTSKTCSNCGFTITSADYDRVLEKLKKTATGWMTTINGKELKVEGQITYYNRYKRQNVVKDLSVELDRLSEESVNNDISSWTKGRSGEALSLLKKRFSHRPVQEKFVCLNCGFETHADEQAALNIARSWLFLRSQEYKKYQTNKTTGNTDKRAFVETWQSFYRKKLKEVWKPAV

SEQ ID NO: 32054 - protein, 977 aa, synthetic construct
  REGION 1..977: note = engineered CasX variant
QEIGRINKIRRRLVKDSNTKKAGKTGPMKTLLVRVMTPDLRERLENLRKKPENIPQPISNTSRANLNKLLTDYTEMKKAILHVYWEEFQKDPVGLMSRVAQPASKKIDQNKLKPEMDEKGNLTTAGFACSQCGQPLFVYKLEQVSEKGKAYTNYFGRCNVAEHEKLILLAQLKPEKDSDEAVTYSLGKFGQRALDFYSIHVTKESTHPVKPLAQIAGNRYASPVGKALSDACMGTIASFLSKYQDIIIEHQKVVKGNQKRLESLRELAGKENLEYPSVTLPPQPHTKEGVDAYNEVIARVRMWVNLNLWQKLKLSRDDAKPLLRLKGFPSFPLVERQANEVDWWDMVCNVKKLINEKKEDGKVFWQNLAGYKRQEALRPYLSSEEDRKKGKKFARYQLGDLLLHLEKKHGEDWGKVYDEAWERIDKKVEGLSKHIKLEEERRSEDAQSKAALTDWLRAKASFVIEGLKEADKDEFCRCELKLQKWYGDLRGKPFAIEAENSILDISGFSKQYNCAFIWQKDGVKKLNLYLIINYFKGGKLRFKKIKPEAFEANRFYTVINKKSGEIVPMEVNFNFDDPNLIILPLAFGKRQGREFIWNDLLSLETGSLKLANGRVIEKTLYNRRTRQDEPALFVALTFERREVLDSSNIKPMNLIGVDRGENIPAVIALTDPEGCPLSRFKDSLGNPTHILRIGESYKEKQRTIQAKKEVEQRRAGGYSRKYASKAKNLADDMVRNTARDLLYYAVTQDAMLIFENLSRGFGRQGKRTFSAERQYTRMEDWLTAKLAYEGLPSKTYLSKTLAQYTSKTCSNCGFTITSADYDRVLEKLKKTATGWMTTINGKELKVEGQITYYNRYKRQNVVKDLSVELDRLSEESVNNDISSWTKGRSGEALSLLKKRFSHRPVQEKFVCLNCGFETHADEQAALNIARSWLFLRSQEYKKYQTNKTTGNTDKRAFVETWQSFYRKKLKEVWKPAV

SEQ ID NO: 32055 - protein, 978 aa, synthetic construct
  REGION 1..978: note = engineered CasX variant
QEIGRINKIRRRLVKDSNTKKAGKTGPMKTLLVRVMTPDLRERLENLRKKPENIPQPISNTSRANLNKLLTDYTEMKKAILHVYWEEFQKDPVGLMSRVAQPASKKIDQNKLKPEMDEKGNLTTAGFACSQCGQPLFVYKLEQVSEKGKAYTNYFGRCNVAEHEKLILLAQLKPEKDSDEAVTYSLGKFGQRALDFYSIHVTKESTHPVKPLAQIAGNRYASYPVGKALSDACMGTIASFLSKYQDIIIEHQKVVKGNQKRLESLRELAGKENLEYPSVTLPPQPHTKEGVDAYNEVIARVRMWVNLNLWQKLKLSRDDAKPLLRLKGFPSFPLVERQANEVDWWDMVCNVKKLINEKKEDGKVFWQNLAGYKRQEALRPYLSSEEDRKKGKKFARYQLGDLLLHLEKKHGEDWGKVYDEAWERIDKKVEGLSKHIKLEEERRSEDAQSKAALTDWLRAKASFVIEGLKEADKDEFCRCELKLQKWYGDLRGKPFAIEAENSILDISGFSKQYNCAFIWQKDGVKKLNLYLIINYFKGGKLRFKKIKPEAFEANRFYTVINKKSGEIVPMEVNFNFDDPNLIILPLAFGKRQGREFIWNDLLSLETGSLKLANGRVIEKTLYNRRTRQDEPALFVALTFERREVLDSSNIKPMNLIGVDRGENIPAVIALTDPEGCPLSRFKDSLGNPTHILRIGESYKEKQRTIQAKKEVEQRRAGGYSRKYASKAKNLADDMVRNTARDLLYYAVTQDAMLIFENLSRGFGRQGKRTFMAERQYTRMEDWLTAKLAYEGLPSKTYLSKTLAQYTSKTCSNCGFTITSADYDRVLEKLKKTATGWMTTINGKELKVEGQITYYNRYKRQNVVKDLSVELDRLSEESVNNDISSWDKGRSGEALSLLKKRFSHRPVQEKFVCLNCGFETHADEQAALNIARSWLFLRSQEYKKYQTNKTTGNTDKRAFVETWQSFYRKKLKEVWKPAV

SEQ ID NO: 32056 - protein, 978 aa, synthetic construct
  REGION 1..978: note = engineered CasX variant
QEIGRINKIRRRLVKDSNTKKAGKTGPMKTLLVRVMTPDLRERLENLRKKPENIPQPISNTSRANLNKLLTDYTEMKKAILHVYWEEFQKDPVGLMSRVAQPASKKIDQNKLKPEMDEKGNLTTAGFACSQCGQPLFVYKLEQVSEKGKAYTNYFGRCNVAEHEKLILLAQLKPEKDSDEAVTYSLGKFGQRALDFYSIHVTKESTHPVKPLAQIAGNRYASHPVGKALSDACMGTIASFLSKYQDIIIEHQKVVKGNQKRLESLRELAGKENLEYPSVTLPPQPHTKEGVDAYNEVIARVRMWVNLNLWQKLKLSRDDAKPLLRLKGFPSFPLVERQANEVDWWDMVCNVKKLINEKKEDGKVFWQNLAGYKRQEALRPYLSSEEDRKKGKKFARYQLGDLLLHLEKKHGEDWGKVYDEAWERIDKKVEGLSKHIKLEEERRSEDAQSKAALTDWLRAKASFVIEGLKEADKDEFCRCELKLQKWYGDLRGKPFAIEAENSILDISGFSKQYNCAFIWQKDGVKKLNLYLIINYFKGGKLRFKKIKPEAFEANRFYTVINKKSGEIVPMEVNFNFDDPNLIILPLAFGKRQGREFIWNDLLSLETGSLKLANGRVIEKTLYNRRTRQDEPALFVALTFERREVLDSSNIKPMNLIGVDRGENIPAVIALTDPEGCPLSRFKDSLGNPTHILRIGESYKEKQRTIQAKKEVEQRRAGGYSRKYASKAKNLADDMVRNTARDLLYYAVTQDAMLIFENLSRGFGRQGKRTFMAERQYTRMEDWLTAKLAYEGLPSKTYLSKTLAQYTSKTCSNCGFTITSADYDRVLEKLKKTATGWMTTINGKELKVEGQITYYNRYKRQNVVKDLSVELDRLSEESVNNDISSWDKGRSGEALSLLKKRFSHRPVQEKFVCLNCGFETHADEQAALNIARSWLFLRSQEYKKYQTNKTTGNTDKRAFVETWQSFYRKKLKEVWKPAV

SEQ ID NO: 32057 - protein, 978 aa, synthetic construct
  REGION 1..978: note = engineered CasX variant
QEIGRINKIRRRLVKDSNTKKAGKTGPMKTLLVRVMTPDLRERLENLRKKPENIPQPISNTSRANLNKLLTDYTEMKKAILHVYWEEFQKDPVGLMSRVAQPASKKIDQNKLKPEMDEKGNLTTAGFACSQCGQPLFVYKLEQVSEKGKAYTNYFGRCNVAEHEKLILLAQLKPEKDSDEAVTYSLGKFGQRALDFYSIHVTKESTHPVKPLAQIAGNRYASSPVGKALSDACMGTIASFLSKYQDIIIEHQKVVKGNQKRLESLRELAGKENLEYPSVTLPPQPHTKEGVDAYNEVIARVRMWVNLNLWQKLKLSRDDAKPLLRLKGFPSFPLVERQANEVDWWDMVCNVKKLINEKKEDGKVFWQNLAGYKRQEALRPYLSSEEDRKKGKKFARYQLGDLLLHLEKKHGEDWGKVYDEAWERIDKKVEGLSKHIKLEEERRSEDAQSKAALTDWLRAKASFVIEGLKEADKDEFCRCELKLQKWYGDLRGKPFAIEAENSILDISGFSKQYNCAFIWQKDGVKKLNLYLIINYFKGGKLRFKKIKPEAFEANRFYTVINKKSGEIVPMEVNFNFDDPNLIILPLAFGKRQGREFIWNDLLSLETGSLKLANGRVIEKTLYNRRTRQDEPALFVALTFERREVLDSSNIKPMNLIGVDRGENIPAVIALTDPEGCPLSRFKDSLGNPTHILRIGESYKEKQRTIQAKKEVEQRRAGGYSRKYASKAKNLADDMVRNTARDLLYYAVTQDAMLIFENLSRGFGRQGKRTFMAERQYTRMEDWLTAKLAYEGLPSKTYLSKTLAQYTSKTCSNCGFTITSADYDRVLEKLKKTATGWMTTINGKELKVEGQITYYNRYKRQNVVKDLSVELDRLSEESVNNDISSWDKGRSGEALSLLKKRFSHRPVQEKFVCLNCGFETHADEQAALNIARSWLFLRSQEYKKYQTNKTTGNTDKRAFVETWQSFYRKKLKEVWKPAV

SEQ ID NO: 32058 - protein, 978 aa, synthetic construct
  REGION 1..978: note = engineered CasX variant
QEIGRINKIRRRLVKDSNTKKAGKTGPMKTLLVRVMTPDLRERLENLRKKPENIPQPISNTSRANLNKLLTDYTEMKKAILHVYWEEFQKDPVGLMSRVAQPASKKIDQNKLKPEMDEKGNLTTAGFACSQCGQPLFVYKLEQVSEKGKAYTNYFGRCNVAEHEKLILLAQLKPEKDSDEAVTYSLGKFGQRALDFYSIHVTKESTHPVKPLAQIAGNRYASTPVGKALSDACMGTIASFLSKYQDIIIEHQKVVKGNQKRLESLRELAGKENLEYPSVTLPPQPHTKEGVDAYNEVIARVRMWVNLNLWQKLKLSRDDAKPLLRLKGFPSFPLVERQANEVDWWDMVCNVKKLINEKKEDGKVFWQNLAGYKRQEALRPYLSSEEDRKKGKKFARYQLGDLLLHLEKKHGEDWGKVYDEAWERIDKKVEGLSKHIKLEEERRSEDAQSKAALTDWLRAKASFVIEGLKEADKDEFCRCELKLQKWYGDLRGKPFAIEAENSILDISGFSKQYNCAFIWQKDGVKKLNLYLIINYFKGGKLRFKKIKPEAFEANRFYTVINKKSGEIVPMEVNFNFDDPNLIILPLAFGKRQGREFIWNDLLSLETGSLKLANGRVIEKTLYNRRTRQDEPALFVALTFERREVLDSSNIKPMNLIGVDRGENIPAVIALTDPEGCPLSRFKDSLGNPTHILRIGESYKEKQRTIQAKKEVEQRRAGGYSRKYASKAKNLADDMVRNTARDLLYYAVTQDAMLIFENLSRGFGRQGKRTFMAERQYTRMEDWLTAKLAYEGLPSKTYLSKTLAQYTSKTCSNCGFTITSADYDRVLEKLKKTATGWMTTINGKELKVEGQITYYNRYKRQNVVKDLSVELDRLSEESVNNDISSWDKGRSGEALSLLKKRFSHRPVQEKFVCLNCGFETHADEQAALNIARSWLFLRSQEYKKYQTNKTTGNTDKRAFVETWQSFYRKKLKEVWKPAV

SEQ ID NO: 32059 - protein, 978 aa, synthetic construct
  REGION 1..978: note = engineered CasX variant
QEIGRINKIRRRLVKDSNTKKAGKTGPMKTLLVRVMTPDLRERLENLRKKPENIPQPISNTSRANLNKLLTDYTEMKKAILHVYWEEFQKDPVGLMSRVAQPASKKIDQNKLKPEMDEKGNLTTAGFACSQCGQPLFVYKLEQVSEKGKAYTNYFGRCNVAEHEKLILLAQLKPEKDSDEAVTYSLGKFGQRALDFYSIHVTKESTHPVKPLAQIAGNRYASAPVGKALSDACMGTIASFLSKYQDIIIEHQKVVKGNQKRLESLRELAGKENLEYPSVTLPPQPHTKEGVDAYNEVIARVRMWVNLNLWQKLKLSRDDAKPLLRLKGFPSFPLVERQANEVDWWDMVCNVKKLINEKKEDGKVFWQNLAGYKRQEALRPYLSSEEDRKKGKKFARYQLGDLLLHLEKKHGEDWGKVYDEAWERIDKKVEGLSKHIKLEEERRSEDAQSKAALTDWLRAKASFVIEGLKEADKDEFCRCELKLQKWYGDLRGKPFAIEAENSILDISGFSKQYNCAFIWQKDGVKKLNLYLIINYFKGGKLRFKKIKPEAFEANRFYTVINKKSGEIVPMEVNFNFDDPNLIILPLAFGKRQGREFIWNDLLSLETGSLKLANGRVIEKTLYNRRTRQDEPALFVALTFERREVLDSSNIKPMNLIGVDRGENIPAVIALTDPEGCPLSRFKDSLGNPTHILRIGESYKEKQRTIQAKKEVEQRRAGGYSRKYASKAKNLADDMVRNTARDLLYYAVTQDAMLIFENLSRGFGRQGKRTFMAERQYTRMEDWLTAKLAYEGLPSKTYLSKTLAQYTSKTCSNCGFTITSADYDRVLEKLKKTATGWMTTINGKELKVEGQITYYNRYKRQNVVKDLSVELDRLSEESVNNDISSWDKGRSGEALSLLKKRFSHRPVQEKFVCLNCGFETHADEQAALNIARSWLFLRSQEYKKYQTNKTTGNTDKRAFVETWQSFYRKKLKEVWKPAV

SEQ ID NO: 32060 - protein, 978 aa, synthetic construct
  REGION 1..978: note = engineered CasX variant
QEIGRINKIRRRLVKDSNTKKAGKTGPMKTLLVRVMTPDLRERLENLRKKPENIPQPISNTSRANLNKLLTDYTEMKKAILHVYWEEFQKDPVGLMSRVAQPASKKIDQNKLKPEMDEKGNLTTAGFACSQCGQPLFVYKLEQVSEKGKAYTNYFGRCNVAEHEKLILLAQLKPEKDSDEAVTYSLGKFGQRALDFYSIHVTKESTHPVKPLAQIAGNRYASVPVGKALSDACMGTIASFLSKYQDIIIEHQKVVKGNQKRLESLRELAGKENLEYPSVTLPPQPHTKEGVDAYNEVIARVRMWVNLNLWQKLKLSRDDAKPLLRLKGFPSFPLVERQANEVDWWDMVCNVKKLINEKKEDGKVFWQNLAGYKRQEALRPYLSSEEDRKKGKKFARYQLGDLLLHLEKKHGEDWGKVYDEAWERIDKKVEGLSKHIKLEEERRSEDAQSKAALTDWLRAKASFVIEGLKEADKDEFCRCELKLQKWYGDLRGKPFAIEAENSILDISGFSKQYNCAFIWQKDGVKKLNLYLIINYFKGGKLRFKKIKPEAFEANRFYTVINKKSGEIVPMEVNFNFDDPNLIILPLAFGKRQGREFIWNDLLSLETGSLKLANGRVIEKTLYNRRTRQDEPALFVALTFERREVLDSSNIKPMNLIGVDRGENIPAVIALTDPEGCPLSRFKDSLGNPTHILRIGESYKEKQRTIQAKKEVEQRRAGGYSRKYASKAKNLADDMVRNTARDLLYYAVTQDAMLIFENLSRGFGRQGKRTFMAERQYTRMEDWLTAKLAYEGLPSKTYLSKTLAQYTSKTCSNCGFTITSADYDRVLEKLKKTATGWMTTINGKELKVEGQITYYNRYKRQNVVKDLSVELDRLSEESVNNDISSWDKGRSGEALSLLKKRFSHRPVQEKFVCLNCGFETHADEQAALNIARSWLFLRSQEYKKYQTNKTTGNTDKRAFVETWQSFYRKKLKEVWKPAV

SEQ ID NO: 32061 - protein, 978 aa, synthetic construct
  REGION 1..978: note = engineered CasX variant
QEIGRINKIRRRLVKDSNTKKAGKTGPMKTLLVRVMTPDLRERLENLRKKPENIPQPISNTSRANLNKLLTDYTEMKKAILHVYWEEFQKDPVGLMSRVAQPASKKIDQNKLKPEMDEKGNLTTAGFACSQCGQPLFVYKLEQVSEKGKAYTNYFGRCNVAEHEKLIKLAQLKPEKDSDEAVTYSLGKFGQRALDFYSIHVTKESTHPVKPLAQIAGNRYASGPVGKALSDACMGTIASFLSKYQDIIIEHQKVVKGNQKRLESLRELAGKENLEYPSVTLPPQPHTKEGVDAYNEVIARVRMWVNLNLWQKLKLSRDDAKPLLRLKGFPSFPLVERQANEVDWWDMVCNVKKLINEKKEDGKVFWQNLAGYKRQEALRPYLSSEEDRKKGKKFARYQLGDLLLHLEKKHGEDWGKVYDEAWERIDKKVEGLSKHIKLEEERRSEDAQSKAALTDWLRAKASFVIEGLKEADKDEFCRCELKLQKWYGDLRGKPFAIEAENSILDISGFSKQYNCAFIWQKDGVKKLNLYLIINYFKGGKLRFKKIKPEAFEANRFYTVINKKSGEIVPMEVNFNFDDPNLIILPLAFGKRQGREFIWNDLLSLETGSLKLANGRVIEKTLYNRRTRQDEPALFVALTFERREVLDSSNIKPMNLIGVDRGENIPAVIALTDPEGCPLSRFKDSLGNPTHILRIGESYKEKQRTIQAKKEVEQRRAGGYSRKYASKAKNLADDMVRNTARDLLYYAVTQDAMLIFENLSRGFGRQGKRTFMAERQYTRMEDWLTAKLAYEGLPSKTYLSKTLAQYTSKTCSNCGFTITSADYDRVLEKLKKTATGWMTTINGKELKVEGQITYYNRYKRQNVVKDLSVELDRLSEESVNNDISSWDKGRSGEALSLLKKRFSHRPVQEKFVCLNCGFETHADEQAALNIARSWLFLRSQEYKKYQTNKTTGNTDKRAFVETWQSFYRKKLKEVWKPAV

SEQ ID NO: 32062 - protein, 977 aa, synthetic construct
  REGION 1..977: note = engineered CasX variant
QEIGRINKIRRRLVKDSNTKKAGKTGPMKTLLVRVMTPDLRERLENLRKKPENIPQPISNTSRANLNKLLTDYTEMKKAILHVYWEEFQKDPVGLMSRVAQPASKKIDQNKLKPEMDEKGNLTTAGFACSQCGQPLFVYKLEQVSEKGKAYTNYFGRCNVAEHEKLILLAQLKPEKDSDEAVTYSLGKFGQRALDFYSIHVTKESTHPVKPLAQIAGNRYASPVGKALSDACMGTIASFLSKYQDIIIEHQKVVKGNQKRLESLRELAGKENLEYPSVTLPPQPHTKEGVDAYNEVIARVRMWVNLNLWQKLKLSRDDAKPLLRLKGFPSFPLVERQANEVDWWDMVCNVKKLINEKKEDGKVFWQNLAGYKRQEALRPYLSSEEDRKKGKKFARYQLGDLLLHLEKKHGEDWGKVYDEAWERIDKKVEGLSKHIKLEEERRSEDAQSKAALTDWLRAKASFVIEGLKEADKDEFCRCELKLQKWYGDLRGKPFAIEAENSILDISGFSKQYNCAFIWQKDGVKKLNLYLIINYFKGGKLRFKKIKPEAFEANRFYTVINKKSGEIVPMEVNFNFDDPNLIILPLAFGKRQGREFIWNDLLSLETGSLKLANGRVIEKTLYNRRTRQDEPALFVALTFERREVLDSSNIKPMNLIGVDRGENIPAVIALTDPEGCPLSRFKDSLGNPTHILRIGESYKEKQRTIQAKKEVEQRRAGGYSRKYASKAKNLADDMVRNTARDLLYYAVTQDAMLIFENLSRGFGRQGKRTFMAERQYTRMEDWLTAKLAYEGLPSKTYLSKTLAQYTSKTCSNCGFTITSADYDRVLEKLKKTATGWMTTINGKELKVEGQITYYNRYKRQNVVKDLSVELDRLSEESVNNDISSWDKGRSGEALSLLKKRFSHRPVQEKFVCLNCGFETHADEQAALNIARSWLFLRSQEYKKYQTNKTTGNTDKRAFVETWQSFYRKKLKEVWKPAV

SEQ ID NO: 32063 - protein, 978 aa, synthetic construct
  REGION 1..978: note = engineered CasX variant
QEIGRINKIRRRLVKDSNTKKAGKTGPMKTLLVRVMTPDLRERLENLRKKPENIPQPISNTSRANLNKLLTDYTEMKKAILHVYWEEFQVDPVGLMSRVAQPASKKIDQNKLKPEMDEKGNLTTAGFACSQCGQPLFVYKLEQVSEKGKAYTNYFGRCNVAEHEKLILLAQLKPEKDSDEAVTYSLGKFGQRALDFYSIHVTKESTHPVKPLAQIAGNRYASYPVGKALSDACMGTIASFLSKYQDIIIEHQKVVKGNQKRLESLRELAGKENLEYPSVTLPPQPHTKEGVDAYNEVIARVRMWVNLNLWQKLKLSRDDAKPLLRLKGFPSFPLVERQANEVDWWDMVCNVKKLINEKKEDGKVFWQNLAGYKRQEALRPYLSSEEDRKKGKKFARYQLGDLLLHLEKKHGEDWGKVYDEAWERIDKKVEGLSKHIKLEEERRSEDAQSKAALTDWLRAKASFVIEGLKEADKDEFCRCELKLQKWYGDLRGKPFAIEAENSILDISGFSKQYNCAFIWQKDGVKKLNLYLIINYFKGGKLRFKKIKPEAFEANRFYTVINKKSGEIVPMEVNFNFDDPNLIILPLAFGKRQGREFIWNDLLSLETGSLKLANGRVIEKTLYNRRTRQDEPALFVALTFERREVLDSSNIKPMNLIGVDRGENIPAVIALTDPEGCPLSRFKDSLGNPTHILRIGESYKEKQRTIQAKKEVEQRRAGGYSRKYASKAKNLADDMVRNTARDLLYYAVTQDAMLIFENLSRGFGRQGKRTFMAERQYTRMEDWLTAKLAYEGLPSKTYLSKTLAQYTSKTCSNCGFTITSADYDRVLEKLKKTATGWMTTINGKELKVEGQITYYNRYKRQNVVKDLSVELDRLSEESVNNDISSWTKGRSGEALSLLKKRFSHRPVQEKFVCLNCGFETHADEQAALNIARSWLFLRSQEYKKYQTNKTTGNTDKRAFVETWQSFYRKKLKEVWKPAV

SEQ ID NO: 32064 - protein, 978 aa, synthetic construct
  REGION 1..978: note = engineered CasX variant
QEIGRINKIRRRLVKDSNTKKAGKTGPMKTLLVRVMTPDLRERLENLRKKPENIPQPISNTSRANLNKLLTDYTEMKKAILHVYWEEFQVDPVGLMSRVAQPASKKIDQNKLKPEMDEKGNLTTAGFACSQCGQPLFVYKLEQVSEKGKAYTNYFGRCNVAEHEKLILLAQLKPEKDSDEAVTYSLGKFGQRALDFYSIHVTKESTHPVKPLAQIAGNRYASHPVGKALSDACMGTIASFLSKYQDIIIEHQKVVKGNQKRLESLRELAGKENLEYPSVTLPPQPHTKEGVDAYNEVIARVRMWVNLNLWQKLKLSRDDAKPLLRLKGFPSFPLVERQANEVDWWDMVCNVKKLINEKKEDGKVFWQNLAGYKRQEALRPYLSSEEDRKKGKKFARYQLGDLLLHLEKKHGEDWGKVYDEAWERIDKKVEGLSKHIKLEEERRSEDAQSKAALTDWLRAKASFVIEGLKEADKDEFCRCELKLQKWYGDLRGKPFAIEAENSILDISGFSKQYNCAFIWQKDGVKKLNLYLIINYFKGGKLRFKKIKPEAFEANRFYTVINKKSGEIVPMEVNFNFDDPNLIILPLAFGKRQGREFIWNDLLSLETGSLKLANGRVIEKTLYNRRTRQDEPALFVALTFERREVLDSSNIKPMNLIGVDRGENIPAVIALTDPEGCPLSRFKDSLGNPTHILRIGESYKEKQRTIQAKKEVEQRRAGGYSRKYASKAKNLADDMVRNTARDLLYYAVTQDAMLIFENLSRGFGRQGKRTFMAERQYTRMEDWLTAKLAYEGLPSKTYLSKTLAQYTSKTCSNCGFTITSADYDRVLEKLKKTATGWMTTINGKELKVEGQITYYNRYKRQNVVKDLSVELDRLSEESVNNDISSWTKGRSGEALSLLKKRFSHRPVQEKFVCLNCGFETHADEQAALNIARSWLFLRSQEYKKYQTNKTTGNTDKRAFVETWQSFYRKKLKEVWKPAV

SEQ ID NO: 32065 - protein, 978 aa, synthetic construct
  REGION 1..978: note = engineered CasX variant
QEIGRINKIRRRLVKDSNTKKAGKTGPMKTLLVRVMTPDLRERLENLRKKPENIPQPISNTSRANLNKLLTDYTEMKKAILHVYWEEFQVDPVGLMSRVAQPASKKIDQNKLKPEMDEKGNLTTAGFACSQCGQPLFVYKLEQVSEKGKAYTNYFGRCNVAEHEKLILLAQLKPEKDSDEAVTYSLGKFGQRALDFYSIHVTKESTHPVKPLAQIAGNRYASSPVGKALSDACMGTIASFLSKYQDIIIEHQKVVKGNQKRLESLRELAGKENLEYPSVTLPPQPHTKEGVDAYNEVIARVRMWVNLNLWQKLKLSRDDAKPLLRLKGFPSFPLVERQANEVDWWDMVCNVKKLINEKKEDGKVFWQNLAGYKRQEALRPYLSSEEDRKKGKKFARYQLGDLLLHLEKKHGEDWGKVYDEAWERIDKKVEGLSKHIKLEEERRSEDAQSKAALTDWLRAKASFVIEGLKEADKDEFCRCELKLQKWYGDLRGKPFAIEAENSILDISGFSKQYNCAFIWQKDGVKKLNLYLIINYFKGGKLRFKKIKPEAFEANRFYTVINKKSGEIVPMEVNFNFDDPNLIILPLAFGKRQGREFIWNDLLSLETGSLKLANGRVIEKTLYNRRTRQDEPALFVALTFERREVLDSSNIKPMNLIGVDRGENIPAVIALTDPEGCPLSRFKDSLGNPTHILRIGESYKEKQRTIQAKKEVEQRRAGGYSRKYASKAKNLADDMVRNTARDLLYYAVTQDAMLIFENLSRGFGRQGKRTFMAERQYTRMEDWLTAKLAYEGLPSKTYLSKTLAQYTSKTCSNCGFTITSADYDRVLEKLKKTATGWMTTINGKELKVEGQITYYNRYKRQNVVKDLSVELDRLSEESVNNDISSWTKGRSGEALSLLKKRFSHRPVQEKFVCLNCGFETHADEQAALNIARSWLFLRSQEYKKYQTNKTTGNTDKRAFVETWQSFYRKKLKEVWKPAV

SEQ ID NO: 32066 - protein, 978 aa, synthetic construct
  REGION 1..978: note = engineered CasX variant
QEIGRINKIRRRLVKDSNTKKAGKTGPMKTLLVRVMTPDLRERLENLRKKPENIPQPISNTSRANLNKLLTDYTEMKKAILHVYWEEFQVDPVGLMSRVAQPASKKIDQNKLKPEMDEKGNLTTAGFACSQCGQPLFVYKLEQVSEKGKAYTNYFGRCNVAEHEKLILLAQLKPEKDSDEAVTYSLGKFGQRALDFYSIHVTKESTHPVKPLAQIAGNRYASTPVGKALSDACMGTIASFLSKYQDIIIEHQKVVKGNQKRLESLRELAGKENLEYPSVTLPPQPHTKEGVDAYNEVIARVRMWVNLNLWQKLKLSRDDAKPLLRLKGFPSFPLVERQANEVDWWDMVCNVKKLINEKKEDGKVFWQNLAGYKRQEALRPYLSSEEDRKKGKKFARYQLGDLLLHLEKKHGEDWGKVYDEAWERIDKKVEGLSKHIKLEEERRSEDAQSKAALTDWLRAKASFVIEGLKEADKDEFCRCELKLQKWYGDLRGKPFAIEAENSILDISGFSKQYNCAFIWQKDGVKKLNLYLIINYFKGGKLRFKKIKPEAFEANRFYTVINKKSGEIVPMEVNFNFDDPNLIILPLAFGKRQGREFIWNDLLSLETGSLKLANGRVIEKTLYNRRTRQDEPALFVALTFERREVLDSSNIKPMNLIGVDRGENIPAVIALTDPEGCPLSRFKDSLGNPTHILRIGESYKEKQRTIQAKKEVEQRRAGGYSRKYASKAKNLADDMVRNTARDLLYYAVTQDAMLIFENLSRGFGRQGKRTFMAERQYTRMEDWLTAKLAYEGLPSKTYLSKTLAQYTSKTCSNCGFTITSADYDRVLEKLKKTATGWMTTINGKELKVEGQITYYNRYKRQNVVKDLSVELDRLSEESVNNDISSWTKGRSGEALSLLKKRFSHRPVQEKFVCLNCGFETHADEQAALNIARSWLFLRSQEYKKYQTNKTTGNTDKRAFVETWQSFYRKKLKEVWKPAV

SEQ ID NO: 32067 - protein, 978 aa, synthetic construct
  REGION 1..978: note = engineered CasX variant
QEIGRINKIRRRLVKDSNTKKAGKTGPMKTLLVRVMTPDLRERLENLRKKPENIPQPISNTSRANLNKLLTDYTEMKKAILHVYWEEFQVDPVGLMSRVAQPASKKIDQNKLKPEMDEKGNLTTAGFACSQCGQPLFVYKLEQVSEKGKAYTNYFGRCNVAEHEKLILLAQLKPEKDSDEAVTYSLGKFGQRALDFYSIHVTKESTHPVKPLAQIAGNRYASAPVGKALSDACMGTIASFLSKYQDIIIEHQKVVKGNQKRLESLRELAGKENLEYPSVTLPPQPHTKEGVDAYNEVIARVRMWVNLNLWQKLKLSRDDAKPLLRLKGFPSFPLVERQANEVDWWDMVCNVKKLINEKKEDGKVFWQNLAGYKRQEALRPYLSSEEDRKKGKKFARYQLGDLLLHLEKKHGEDWGKVYDEAWERIDKKVEGLSKHIKLEEERRSEDAQSKAALTDWLRAKASFVIEGLKEADKDEFCRCELKLQKWYGDLRGKPFAIEAENSILDISGFSKQYNCAFIWQKDGVKKLNLYLIINYFKGGKLRFKKIKPEAFEANRFYTVINKKSGEIVPMEVNFNFDDPNLIILPLAFGKRQGREFIWNDLLSLETGSLKLANGRVIEKTLYNRRTRQDEPALFVALTFERREVLDSSNIKPMNLIGVDRGENIPAVIALTDPEGCPLSRFKDSLGNPTHILRIGESYKEKQRTIQAKKEVEQRRAGGYSRKYASKAKNLADDMVRNTARDLLYYAVTQDAMLIFENLSRGFGRQGKRTFMAERQYTRMEDWLTAKLAYEGLPSKTYLSKTLAQYTSKTCSNCGFTITSADYDRVLEKLKKTATGWMTTINGKELKVEGQITYYNRYKRQNVVKDLSVELDRLSEESVNNDISSWTKGRSGEALSLLKKRFSHRPVQEKFVCLNCGFETHADEQAALNIARSWLFLRSQEYKKYQTNKTTGNTDKRAFVETWQSFYRKKLKEVWKPAV

SEQ ID NO: 32068 - protein, 978 aa, synthetic construct
  REGION 1..978: note = engineered CasX variant
QEIGRINKIRRRLVKDSNTKKAGKTGPMKTLLVRVMTPDLRERLENLRKKPENIPQPISNTSRANLNKLLTDYTEMKKAILHVYWEEFQVDPVGLMSRVAQPASKKIDQNKLKPEMDEKGNLTTAGFACSQCGQPLFVYKLEQVSEKGKAYTNYFGRCNVAEHEKLILLAQLKPEKDSDEAVTYSLGKFGQRALDFYSIHVTKESTHPVKPLAQIAGNRYASVPVGKALSDACMGTIASFLSKYQDIIIEHQKVVKGNQKRLESLRELAGKENLEYPSVTLPPQPHTKEGVDAYNEVIARVRMWVNLNLWQKLKLSRDDAKPLLRLKGFPSFPLVERQANEVDWWDMVCNVKKLINEKKEDGKVFWQNLAGYKRQEALRPYLSSEEDRKKGKKFARYQLGDLLLHLEKKHGEDWGKVYDEAWERIDKKVEGLSKHIKLEEERRSEDAQSKAALTDWLRAKASFVIEGLKEADKDEFCRCELKLQKWYGDLRGKPFAIEAENSILDISGFSKQYNCAFIWQKDGVKKLNLYLIINYFKGGKLRFKKIKPEAFEANRFYTVINKKSGEIVPMEVNFNFDDPNLIILPLAFGKRQGREFIWNDLLSLETGSLKLANGRVIEKTLYNRRTRQDEPALFVALTFERREVLDSSNIKPMNLIGVDRGENIPAVIALTDPEGCPLSRFKDSLGNPTHILRIGESYKEKQRTIQAKKEVEQRRAGGYSRKYASKAKNLADDMVRNTARDLLYYAVTQDAMLIFENLSRGFGRQGKRTFMAERQYTRMEDWLTAKLAYEGLPSKTYLSKTLAQYTSKTCSNCGFTITSADYDRVLEKLKKTATGWMTTINGKELKVEGQITYYNRYKRQNVVKDLSVELDRLSEESVNNDISSWTKGRSGEALSLLKKRFSHRPVQEKFVCLNCGFETHADEQAALNIARSWLFLRSQEYKKYQTNKTTGNTDKRAFVETWQSFYRKKLKEVWKPAV

SEQ ID NO: 32069 - protein, 978 aa, synthetic construct
  REGION 1..978: note = engineered CasX variant
QEIGRINKIRRRLVKDSNTKKAGKTGPMKTLLVRVMTPDLRERLENLRKKPENIPQPISNTSRANLNKLLTDYTEMKKAILHVYWEEFQVDPVGLMSRVAQPASKKIDQNKLKPEMDEKGNLTTAGFACSQCGQPLFVYKLEQVSEKGKAYTNYFGRCNVAEHEKLIKLAQLKPEKDSDEAVTYSLGKFGQRALDFYSIHVTKESTHPVKPLAQIAGNRYASGPVGKALSDACMGTIASFLSKYQDIIIEHQKVVKGNQKRLESLRELAGKENLEYPSVTLPPQPHTKEGVDAYNEVIARVRMWVNLNLWQKLKLSRDDAKPLLRLKGFPSFPLVERQANEVDWWDMVCNVKKLINEKKEDGKVFWQNLAGYKRQEALRPYLSSEEDRKKGKKFARYQLGDLLLHLEKKHGEDWGKVYDEAWERIDKKVEGLSKHIKLEEERRSEDAQSKAALTDWLRAKASFVIEGLKEADKDEFCRCELKLQKWYGDLRGKPFAIEAENSILDISGFSKQYNCAFIWQKDGVKKLNLYLIINYFKGGKLRFKKIKPEAFEANRFYTVINKKSGEIVPMEVNFNFDDPNLIILPLAFGKRQGREFIWNDLLSLETGSLKLANGRVIEKTLYNRRTRQDEPALFVALTFERREVLDSSNIKPMNLIGVDRGENIPAVIALTDPEGCPLSRFKDSLGNPTHILRIGESYKEKQRTIQAKKEVEQRRAGGYSRKYASKAKNLADDMVRNTARDLLYYAVTQDAMLIFENLSRGFGRQGKRTFMAERQYTRMEDWLTAKLAYEGLPSKTYLSKTLAQYTSKTCSNCGFTITSADYDRVLEKLKKTATGWMTTINGKELKVEGQITYYNRYKRQNVVKDLSVELDRLSEESVNNDISSWTKGRSGEALSLLKKRFSHRPVQEKFVCLNCGFETHADEQAALNIARSWLFLRSQEYKKYQTNKTTGNTDKRAFVETWQSFYRKKLKEVWKPAV

SEQ ID NO: 32070 - protein, 977 aa, synthetic construct
  REGION 1..977: note = engineered CasX variant
QEIGRINKIRRRLVKDSNTKKAGKTGPMKTLLVRVMTPDLRERLENLRKKPENIPQPISNTSRANLNKLLTDYTEMKKAILHVYWEEFQVDPVGLMSRVAQPASKKIDQNKLKPEMDEKGNLTTAGFACSQCGQPLFVYKLEQVSEKGKAYTNYFGRCNVAEHEKLILLAQLKPEKDSDEAVTYSLGKFGQRALDFYSIHVTKESTHPVKPLAQIAGNRYASPVGKALSDACMGTIASFLSKYQDIIIEHQKVVKGNQKRLESLRELAGKENLEYPSVTLPPQPHTKEGVDAYNEVIARVRMWVNLNLWQKLKLSRDDAKPLLRLKGFPSFPLVERQANEVDWWDMVCNVKKLINEKKEDGKVFWQNLAGYKRQEALRPYLSSEEDRKKGKKFARYQLGDLLLHLEKKHGEDWGKVYDEAWERIDKKVEGLSKHIKLEEERRSEDAQSKAALTDWLRAKASFVIEGLKEADKDEFCRCELKLQKWYGDLRGKPFAIEAENSILDISGFSKQYNCAFIWQKDGVKKLNLYLIINYFKGGKLRFKKIKPEAFEANRFYTVINKKSGEIVPMEVNFNFDDPNLIILPLAFGKRQGREFIWNDLLSLETGSLKLANGRVIEKTLYNRRTRQDEPALFVALTFERREVLDSSNIKPMNLIGVDRGENIPAVIALTDPEGCPLSRFKDSLGNPTHILRIGESYKEKQRTIQAKKEVEQRRAGGYSRKYASKAKNLADDMVRNTARDLLYYAVTQDAMLIFENLSRGFGRQGKRTFMAERQYTRMEDWLTAKLAYEGLPSKTYLSKTLAQYTSKTCSNCGFTITSADYDRVLEKLKKTATGWMTTINGKELKVEGQITYYNRYKRQNVVKDLSVELDRLSEESVNNDISSWTKGRSGEALSLLKKRFSHRPVQEKFVCLNCGFETHADEQAALNIARSWLFLRSQEYKKYQTNKTTGNTDKRAFVETWQSFYRKKLKEVWKPAV

SEQ ID NO: 32071 - protein, 978 aa, synthetic construct
  REGION 1..978: note = engineered CasX variant
QEIGRLNKIRRRLVKDSNTKKAGKTGPMKTLLVRVMTPDLRERLENLRKKPENIPQPISNTSRANLNKLLTDYTEMKKAILHVYWEEFQKDPVGLMSRVAQPASKKIDQNKLKPEMDEKGNLTTAGFACSQCGQPLFVYKLEQVSEKGKAYTNYFGRCNVAEHEKLILLAQLKPEKDSDEAVTYSLGKFGQRALDFYSIHVTKESTHPVKPLAQIAGNRYASYPVGKALSDACMGTIASFLSKYQDIIIEHQKVVKGNQKRLESLRELAGKENLEYPSVTLPPQPHTKEGVDAYNEVIARVRMWVNLNLWQKLKLSRDDAKPLLRLKGFPSFPLVERQANEVDWWDMVCNVKKLINEKKEDGKVFWQNLAGYKRQEALRPYLSSEEDRKKGKKFARYQLGDLLLHLEKKHGEDWGKVYDEAWERIDKKVEGLSKHIKLEEERRSEDAQSKAALTDWLRAKASFVIEGLKEADKDEFCRCELKLQKWYGDLRGKPFAIEAENSILDISGFSKQYNCAFIWQKDGVKKLNLYLIINYFKGGKLRFKKIKPEAFEANRFYTVINKKSGEIVPMEVNFNFDDPNLIILPLAFGKRQGREFIWNDLLSLETGSLKLANGRVIEKTLYNRRTRQDEPALFVALTFERREVLDSSNIKPMNLIGVDRGENIPAVIALTDPEGCPLSRFKDSLGNPTHILRIGESYKEKQRTIQAKKEVEQRRAGGYSRKYASKAKNLADDMVRNTARDLLYYAVTQDAMLIFENLSRGFGRQGKRTFMAERQYTRMEDWLTAKLAYEGLPSKTYLSKTLAQYTSKTCSNCGFTITSADYDRVLEKLKKTATGWMTTINGKELKVEGQITYYNRYKRQNVVKDLSVELDRLSEESVNNDISSWTKGRSGEALSLLKKRFSHRPVQEKFVCLNCGFETHADEQAALNIARSWLFLRSQEYKKYQTNKTTGNTDKRAFVETWQSFYRKKLKEVWKPAV

SEQ ID NO: 32072 - protein, 978 aa, synthetic construct
  REGION 1..978: note = engineered CasX variant
QEIGRLNKIRRRLVKDSNTKKAGKTGPMKTLLVRVMTPDLRERLENLRKKPENIPQPISNTSRANLNKLLTDYTEMKKAILHVYWEEFQKDPVGLMSRVAQPASKKIDQNKLKPEMDEKGNLTTAGFACSQCGQPLFVYKLEQVSEKGKAYTNYFGRCNVAEHEKLILLAQLKPEKDSDEAVTYSLGKFGQRALDFYSIHVTKESTHPVKPLAQIAGNRYASHPVGKALSDACMGTIASFLSKYQDIIIEHQKVVKGNQKRLESLRELAGKENLEYPSVTLPPQPHTKEGVDAYNEVIARVRMWVNLNLWQKLKLSRDDAKPLLRLKGFPSFPLVERQANEVDWWDMVCNVKKLINEKKEDGKVFWQNLAGYKRQEALRPYLSSEEDRKKGKKFARYQLGDLLLHLEKKHGEDWGKVYDEAWERIDKKVEGLSKHIKLEEERRSEDAQSKAALTDWLRAKASFVIEGLKEADKDEFCRCELKLQKWYGDLRGKPFAIEAENSILDISGFSKQYNCAFIWQKDGVKKLNLYLIINYFKGGKLRFKKIKPEAFEANRFYTVINKKSGEIVPMEVNFNFDDPNLIILPLAFGKRQGREFIWNDLLSLETGSLKLANGRVIEKTLYNRRTRQDEPALFVALTFERREVLDSSNIKPMNLIGVDRGENIPAVIALTDPEGCPLSRFKDSLGNPTHILRIGESYKEKQRTIQAKKEVEQRRAGGYSRKYASKAKNLADDMVRNTARDLLYYAVTQDAMLIFENLSRGFGRQGKRTFMAERQYTRMEDWLTAKLAYEGLPSKTYLSKTLAQYTSKTCSNCGFTITSADYDRVLEKLKKTATGWMTTINGKELKVEGQITYYNRYKRQNVVKDLSVELDRLSEESVNNDISSWTKGRSGEALSLLKKRFSHRPVQEKFVCLNCGFETHADEQAALNIARSWLFLRSQEYKKYQTNKTTGNTDKRAFVETWQSFYRKKLKEVWKPAV

SEQ ID NO: 32073 - protein, 978 aa, synthetic construct
  REGION 1..978: note = engineered CasX variant
QEIGRLNKIRRRLVKDSNTKKAGKTGPMKTLLVRVMTPDLRERLENLRKKPENIPQPISNTSRANLNKLLTDYTEMKKAILHVYWEEFQKDPVGLMSRVAQPASKKIDQNKLKPEMDEKGNLTTAGFACSQCGQPLFVYKLEQVSEKGKAYTNYFGRCNVAEHEKLILLAQLKPEKDSDEAVTYSLGKFGQRALDFYSIHVTKESTHPVKPLAQIAGNRYASSPVGKALSDACMGTIASFLSKYQDIIIEHQKVVKGNQKRLESLRELAGKENLEYPSVTLPPQPHTKEGVDAYNEVIARVRMWVNLNLWQKLKLSRDDAKPLLRLKGFPSFPLVERQANEVDWWDMVCNVKKLINEKKEDGKVFWQNLAGYKRQEALRPYLSSEEDRKKGKKFARYQLGDLLLHLEKKHGEDWGKVYDEAWERIDKKVEGLSKHIKLEEERRSEDAQSKAALTDWLRAKASFVIEGLKEADKDEFCRCELKLQKWYGDLRGKPFAIEAENSILDISGFSKQYNCAFIWQKDGVKKLNLYLIINYFKGGKLRFKKIKPEAFEANRFYTVINKKSGEIVPMEVNFNFDDPNLIILPLAFGKRQGREFIWNDLLSLETGSLKLANGRVIEKTLYNRRTRQDEPALFVALTFERREVLDSSNIKPMNLIGVDRGENIPAVIALTDPEGCPLSRFKDSLGNPTHILRIGESYKEKQRTIQAKKEVEQRRAGGYSRKYASKAKNLADDMVRNTARDLLYYAVTQDAMLIFENLSRGFGRQGKRTFMAERQYTRMEDWLTAKLAYEGLPSKTYLSKTLAQYTSKTCSNCGFTITSADYDRVLEKLKKTATGWMTTINGKELKVEGQITYYNRYKRQNVVKDLSVELDRLSEESVNNDISSWTKGRSGEALSLLKKRFSHRPVQEKFVCLNCGFETHADEQAALNIARSWLFLRSQEYKKYQTNKTTGNTDKRAFVETWQSFYRKKLKEVWKPAV

SEQ ID NO: 32074 - protein, 978 aa, synthetic construct
  REGION 1..978: note = engineered CasX variant
QEIGRLNKIRRRLVKDSNTKKAGKTGPMKTLLVRVMTPDLRERLENLRKKPENIPQPISNTSRANLNKLLTDYTEMKKAILHVYWEEFQKDPVGLMSRVAQPASKKIDQNKLKPEMDEKGNLTTAGFACSQCGQPLFVYKLEQVSEKGKAYTNYFGRCNVAEHEKLILLAQLKPEKDSDEAVTYSLGKFGQRALDFYSIHVTKESTHPVKPLAQIAGNRYASTPVGKALSDACMGTIASFLSKYQDIIIEHQKVVKGNQKRLESLRELAGKENLEYPSVTLPPQPHTKEGVDAYNEVIARVRMWVNLNLWQKLKLSRDDAKPLLRLKGFPSFPLVERQANEVDWWDMVCNVKKLINEKKEDGKVFWQNLAGYKRQEALRPYLSSEEDRKKGKKFARYQLGDLLLHLEKKHGEDWGKVYDEAWERIDKKVEGLSKHIKLEEERRSEDAQSKAALTDWLRAKASFVIEGLKEADKDEFCRCELKLQKWYGDLRGKPFAIEAENSILDISGFSKQYNCAFIWQKDGVKKLNLYLIINYFKGGKLRFKKIKPEAFEANRFYTVINKKSGEIVPMEVNFNFDDPNLIILPLAFGKRQGREFIWNDLLSLETGSLKLANGRVIEKTLYNRRTRQDEPALFVALTFERREVLDSSNIKPMNLIGVDRGENIPAVIALTDPEGCPLSRFKDSLGNPTHILRIGESYKEKQRTIQAKKEVEQRRAGGYSRKYASKAKNLADDMVRNTARDLLYYAVTQDAMLIFENLSRGFGRQGKRTFMAERQYTRMEDWLTAKLAYEGLPSKTYLSKTLAQYTSKTCSNCGFTITSADYDRVLEKLKKTATGWMTTINGKELKVEGQITYYNRYKRQNVVKDLSVELDRLSEESVNNDISSWTKGRSGEALSLLKKRFSHRPVQEKFVCLNCGFETHADEQAALNIARSWLFLRSQEYKKYQTNKTTGNTDKRAFVETWQSFYRKKLKEVWKPAV

SEQ ID NO: 32075 - protein, 978 aa, synthetic construct
  REGION 1..978: note = engineered CasX variant
QEIGRLNKIRRRLVKDSNTKKAGKTGPMKTLLVRVMTPDLRERLENLRKKPENIPQPISNTSRANLNKLLTDYTEMKKAILHVYWEEFQKDPVGLMSRVAQPASKKIDQNKLKPEMDEKGNLTTAGFACSQCGQPLFVYKLEQVSEKGKAYTNYFGRCNVAEHEKLILLAQLKPEKDSDEAVTYSLGKFGQRALDFYSIHVTKESTHPVKPLAQIAGNRYASAPVGKALSDACMGTIASFLSKYQDIIIEHQKVVKGNQKRLESLRELAGKENLEYPSVTLPPQPHTKEGVDAYNEVIARVRMWVNLNLWQKLKLSRDDAKPLLRLKGFPSFPLVERQANEVDWWDMVCNVKKLINEKKEDGKVFWQNLAGYKRQEALRPYLSSEEDRKKGKKFARYQLGDLLLHLEKKHGEDWGKVYDEAWERIDKKVEGLSKHIKLEEERRSEDAQSKAALTDWLRAKASFVIEGLKEADKDEFCRCELKLQKWYGDLRGKPFAIEAENSILDISGFSKQYNCAFIWQKDGVKKLNLYLIINYFKGGKLRFKKIKPEAFEANRFYTVINKKSGEIVPMEVNFNFDDPNLIILPLAFGKRQGREFIWNDLLSLETGSLKLANGRVIEKTLYNRRTRQDEPALFVALTFERREVLDSSNIKPMNLIGVDRGENIPAVIALTDPEGCPLSRFKDSLGNPTHILRIGESYKEKQRTIQAKKEVEQRRAGGYSRKYASKAKNLADDMVRNTARDLLYYAVTQDAMLIFENLSRGFGRQGKRTFMAERQYTRMEDWLTAKLAYEGLPSKTYLSKTLAQYTSKTCSNCGFTITSADYDRVLEKLKKTATGWMTTINGKELKVEGQITYYNRYKRQNVVKDLSVELDRLSEESVNNDISSWTKGRSGEALSLLKKRFSHRPVQEKFVCLNCGFETHADEQAALNIARSWLFLRSQEYKKYQTNKTTGNTDKRAFVETWQSFYRKKLKEVWKPAV

SEQ ID NO: 32076 - protein, 978 aa, synthetic construct
  REGION 1..978: note = engineered CasX variant
QEIGRLNKIRRRLVKDSNTKKAGKTGPMKTLLVRVMTPDLRERLENLRKKPENIPQPISNTSRANLNKLLTDYTEMKKAILHVYWEEFQKDPVGLMSRVAQPASKKIDQNKLKPEMDEKGNLTTAGFACSQCGQPLFVYKLEQVSEKGKAYTNYFGRCNVAEHEKLILLAQLKPEKDSDEAVTYSLGKFGQRALDFYSIHVTKESTHPVKPLAQIAGNRYASVPVGKALSDACMGTIASFLSKYQDIIIEHQKVVKGNQKRLESLRELAGKENLEYPSVTLPPQPHTKEGVDAYNEVIARVRMWVNLNLWQKLKLSRDDAKPLLRLKGFPSFPLVERQANEVDWWDMVCNVKKLINEKKEDGKVFWQNLAGYKRQEALRPYLSSEEDRKKGKKFARYQLGDLLLHLEKKHGEDWGKVYDEAWERIDKKVEGLSKHIKLEEERRSEDAQSKAALTDWLRAKASFVIEGLKEADKDEFCRCELKLQKWYGDLRGKPFAIEAENSILDISGFSKQYNCAFIWQKDGVKKLNLYLIINYFKGGKLRFKKIKPEAFEANRFYTVINKKSGEIVPMEVNFNFDDPNLIILPLAFGKRQGREFIWNDLLSLETGSLKLANGRVIEKTLYNRRTRQDEPALFVALTFERREVLDSSNIKPMNLIGVDRGENIPAVIALTDPEGCPLSRFKDSLGNPTHILRIGESYKEKQRTIQAKKEVEQRRAGGYSRKYASKAKNLADDMVRNTARDLLYYAVTQDAMLIFENLSRGFGRQGKRTFMAERQYTRMEDWLTAKLAYEGLPSKTYLSKTLAQYTSKTCSNCGFTITSADYDRVLEKLKKTATGWMTTINGKELKVEGQITYYNRYKRQNVVKDLSVELDRLSEESVNNDISSWTKGRSGEALSLLKKRFSHRPVQEKFVCLNCGFETHADEQAALNIARSWLFLRSQEYKKYQTNKTTGNTDKRAFVETWQSFYRKKLKEVWKPAV

SEQ ID NO: 32077 - protein, 978 aa, synthetic construct
  REGION 1..978: note = engineered CasX variant
QEIGRLNKIRRRLVKDSNTKKAGKTGPMKTLLVRVMTPDLRERLENLRKKPENIPQPISNTSRANLNKLLTDYTEMKKAILHVYWEEFQKDPVGLMSRVAQPASKKIDQNKLKPEMDEKGNLTTAGFACSQCGQPLFVYKLEQVSEKGKAYTNYFGRCNVAEHEKLIKLAQLKPEKDSDEAVTYSLGKFGQRALDFYSIHVTKESTHPVKPLAQIAGNRYASGPVGKALSDACMGTIASFLSKYQDIIIEHQKVVKGNQKRLESLRELAGKENLEYPSVTLPPQPHTKEGVDAYNEVIARVRMWVNLNLWQKLKLSRDDAKPLLRLKGFPSFPLVERQANEVDWWDMVCNVKKLINEKKEDGKVFWQNLAGYKRQEALRPYLSSEEDRKKGKKFARYQLGDLLLHLEKKHGEDWGKVYDEAWERIDKKVEGLSKHIKLEEERRSEDAQSKAALTDWLRAKASFVIEGLKEADKDEFCRCELKLQKWYGDLRGKPFAIEAENSILDISGFSKQYNCAFIWQKDGVKKLNLYLIINYFKGGKLRFKKIKPEAFEANRFYTVINKKSGEIVPMEVNFNFDDPNLIILPLAFGKRQGREFIWNDLLSLETGSLKLANGRVIEKTLYNRRTRQDEPALFVALTFERREVLDSSNIKPMNLIGVDRGENIPAVIALTDPEGCPLSRFKDSLGNPTHILRIGESYKEKQRTIQAKKEVEQRRAGGYSRKYASKAKNLADDMVRNTARDLLYYAVTQDAMLIFENLSRGFGRQGKRTFMAERQYTRMEDWLTAKLAYEGLPSKTYLSKTLAQYTSKTCSNCGFTITSADYDRVLEKLKKTATGWMTTINGKELKVEGQITYYNRYKRQNVVKDLSVELDRLSEESVNNDISSWTKGRSGEALSLLKKRFSHRPVQEKFVCLNCGFETHADEQAALNIARSWLFLRSQEYKKYQTNKTTGNTDKRAFVETWQSFYRKKLKEVWKPAV

SEQ ID NO: 32078 - protein, 977 aa, synthetic construct
  REGION 1..977: note = engineered CasX variant
QEIGRLNKIRRRLVKDSNTKKAGKTGPMKTLLVRVMTPDLRERLENLRKKPENIPQPISNTSRANLNKLLTDYTEMKKAILHVYWEEFQKDPVGLMSRVAQPASKKIDQNKLKPEMDEKGNLTTAGFACSQCGQPLFVYKLEQVSEKGKAYTNYFGRCNVAEHEKLILLAQLKPEKDSDEAVTYSLGKFGQRALDFYSIHVTKESTHPVKPLAQIAGNRYASPVGKALSDACMGTIASFLSKYQDIIIEHQKVVKGNQKRLESLRELAGKENLEYPSVTLPPQPHTKEGVDAYNEVIARVRMWVNLNLWQKLKLSRDDAKPLLRLKGFPSFPLVERQANEVDWWDMVCNVKKLINEKKEDGKVFWQNLAGYKRQEALRPYLSSEEDRKKGKKFARYQLGDLLLHLEKKHGEDWGKVYDEAWERIDKKVEGLSKHIKLEEERRSEDAQSKAALTDWLRAKASFVIEGLKEADKDEFCRCELKLQKWYGDLRGKPFAIEAENSILDISGFSKQYNCAFIWQKDGVKKLNLYLIINYFKGGKLRFKKIKPEAFEANRFYTVINKKSGEIVPMEVNFNFDDPNLIILPLAFGKRQGREFIWNDLLSLETGSLKLANGRVIEKTLYNRRTRQDEPALFVALTFERREVLDSSNIKPMNLIGVDRGENIPAVIALTDPEGCPLSRFKDSLGNPTHILRIGESYKEKQRTIQAKKEVEQRRAGGYSRKYASKAKNLADDMVRNTARDLLYYAVTQDAMLIFENLSRGFGRQGKRTFMAERQYTRMEDWLTAKLAYEGLPSKTYLSKTLAQYTSKTCSNCGFTITSADYDRVLEKLKKTATGWMTTINGKELKVEGQITYYNRYKRQNVVKDLSVELDRLSEESVNNDISSWTKGRSGEALSLLKKRFSHRPVQEKFVCLNCGFETHADEQAALNIARSWLFLRSQEYKKYQTNKTTGNTDKRAFVETWQSFYRKKLKEVWKPAV

SEQ ID NO: 32079 - protein, 978 aa, synthetic construct
  REGION 1..978: note = engineered CasX variant
QEIGRINKIRRRLVKDSNTKKAGKTGPMKTLLVRVMTPDLRERLENLRKKPENIPQPISNTSRANLNKLLTDYTEMKKAILHVYWEEFQKDPVGLMSRVAQPASKKIDQNKLKPEMDEKGNLTTAGFACSQCGQPLFVYKLEQVSEKGKAYTNYVGRCNVAEHEKLILLAQLKPEKDSDEAVTYSLGKFGQRALDFYSIHVTKESTHPVKPLAQIAGNRYASYPVGKALSDACMGTIASFLSKYQDIIIEHQKVVKGNQKRLESLRELAGKENLEYPSVTLPPQPHTKEGVDAYNEVIARVRMWVNLNLWQKLKLSRDDAKPLLRLKGFPSFPLVERQANEVDWWDMVCNVKKLINEKKEDGKVFWQNLAGYKRQEALRPYLSSEEDRKKGKKFARYQLGDLLLHLEKKHGEDWGKVYDEAWERIDKKVEGLSKHIKLEEERRSEDAQSKAALTDWLRAKASFVIEGLKEADKDEFCRCELKLQKWYGDLRGKPFAIEAENSILDISGFSKQYNCAFIWQKDGVKKLNLYLIINYFKGGKLRFKKIKPEAFEANRFYTVINKKSGEIVPMEVNFNFDDPNLIILPLAFGKRQGREFIWNDLLSLETGSLKLANGRVIEKTLYNRRTRQDEPALFVALTFERREVLDSSNIKPMNLIGVDRGENIPAVIALTDPEGCPLSRFKDSLGNPTHILRIGESYKEKQRTIQAKKEVEQRRAGGYSRKYASKAKNLADDMVRNTARDLLYYAVTQDAMLIFENLSRGFGRQGKRTFMAERQYTRMEDWLTAKLAYEGLPSKTYLSKTLAQYTSKTCSNCGFTITSADYDRVLEKLKKTATGWMTTINGKELKVEGQITYYNRYKRQNVVKDLSVELDRLSEESVNNDISSWTKGRSGEALSLLKKRFSHRPVQEKFVCLNCGFETHADEQAALNIARSWLFLRSQEYKKYQTNKTTGNTDKRAFVETWQSFYRKKLKEVWKPAV

SEQ ID NO: 32080 - protein, 978 aa, synthetic construct
  REGION 1..978: note = engineered CasX variant
QEIGRINKIRRRLVKDSNTKKAGKTGPMKTLLVRVMTPDLRERLENLRKKPENIPQPISNTSRANLNKLLTDYTEMKKAILHVYWEEFQKDPVGLMSRVAQPASKKIDQNKLKPEMDEKGNLTTAGFACSQCGQPLFVYKLEQVSEKGKAYTNYVGRCNVAEHEKLILLAQLKPEKDSDEAVTYSLGKFGQRALDFYSIHVTKESTHPVKPLAQIAGNRYASHPVGKALSDACMGTIASFLSKYQDIIIEHQKVVKGNQKRLESLRELAGKENLEYPSVTLPPQPHTKEGVDAYNEVIARVRMWVNLNLWQKLKLSRDDAKPLLRLKGFPSFPLVERQANEVDWWDMVCNVKKLINEKKEDGKVFWQNLAGYKRQEALRPYLSSEEDRKKGKKFARYQLGDLLLHLEKKHGEDWGKVYDEAWERIDKKVEGLSKHIKLEEERRSEDAQSKAALTDWLRAKASFVIEGLKEADKDEFCRCELKLQKWYGDLRGKPFAIEAENSILDISGFSKQYNCAFIWQKDGVKKLNLYLIINYFKGGKLRFKKIKPEAFEANRFYTVINKKSGEIVPMEVNFNFDDPNLIILPLAFGKRQGREFIWNDLLSLETGSLKLANGRVIEKTLYNRRTRQDEPALFVALTFERREVLDSSNIKPMNLIGVDRGENIPAVIALTDPEGCPLSRFKDSLGNPTHILRIGESYKEKQRTIQAKKEVEQRRAGGYSRKYASKAKNLADDMVRNTARDLLYYAVTQDAMLIFENLSRGFGRQGKRTFMAERQYTRMEDWLTAKLAYEGLPSKTYLSKTLAQYTSKTCSNCGFTITSADYDRVLEKLKKTATGWMTTINGKELKVEGQITYYNRYKRQNVVKDLSVELDRLSEESVNNDISSWTKGRSGEALSLLKKRFSHRPVQEKFVCLNCGFETHADEQAALNIARSWLFLRSQEYKKYQTNKTTGNTDKRAFVETWQSFYRKKLKEVWKPAV

SEQ ID NO: 32081 - protein, 978 aa, synthetic construct
  REGION 1..978: note = engineered CasX variant
QEIGRINKIRRRLVKDSNTKKAGKTGPMKTLLVRVMTPDLRERLENLRKKPENIPQPISNTSRANLNKLLTDYTEMKKAILHVYWEEFQKDPVGLMSRVAQPASKKIDQNKLKPEMDEKGNLTTAGFACSQCGQPLFVYKLEQVSEKGKAYTNYVGRCNVAEHEKLILLAQLKPEKDSDEAVTYSLGKFGQRALDFYSIHVTKESTHPVKPLAQIAGNRYASSPVGKALSDACMGTIASFLSKYQDIIIEHQKVVKGNQKRLESLRELAGKENLEYPSVTLPPQPHTKEGVDAYNEVIARVRMWVNLNLWQKLKLSRDDAKPLLRLKGFPSFPLVERQANEVDWWDMVCNVKKLINEKKEDGKVFWQNLAGYKRQEALRPYLSSEEDRKKGKKFARYQLGDLLLHLEKKHGEDWGKVYDEAWERIDKKVEGLSKHIKLEEERRSEDAQSKAALTDWLRAKASFVIEGLKEADKDEFCRCELKLQKWYGDLRGKPFAIEAENSILDISGFSKQYNCAFIWQKDGVKKLNLYLIINYFKGGKLRFKKIKPEAFEANRFYTVINKKSGEIVPMEVNFNFDDPNLIILPLAFGKRQGREFIWNDLLSLETGSLKLANGRVIEKTLYNRRTRQDEPALFVALTFERREVLDSSNIKPMNLIGVDRGENIPAVIALTDPEGCPLSRFKDSLGNPTHILRIGESYKEKQRTIQAKKEVEQRRAGGYSRKYASKAKNLADDMVRNTARDLLYYAVTQDAMLIFENLSRGFGRQGKRTFMAERQYTRMEDWLTAKLAYEGLPSKTYLSKTLAQYTSKTCSNCGFTITSADYDRVLEKLKKTATGWMTTINGKELKVEGQITYYNRYKRQNVVKDLSVELDRLSEESVNNDISSWTKGRSGEALSLLKKRFSHRPVQEKFVCLNCGFETHADEQAALNIARSWLFLRSQEYKKYQTNKTTGNTDKRAFVETWQSFYRKKLKEVWKPAV

SEQ ID NO: 32082 - protein, 978 aa, synthetic construct
  REGION 1..978: note = engineered CasX variant
QEIGRINKIRRRLVKDSNTKKAGKTGPMKTLLVRVMTPDLRERLENLRKKPENIPQPISNTSRANLNKLLTDYTEMKKAILHVYWEEFQKDPVGLMSRVAQPASKKIDQNKLKPEMDEKGNLTTAGFACSQCGQPLFVYKLEQVSEKGKAYTNYVGRCNVAEHEKLILLAQLKPEKDSDEAVTYSLGKFGQRALDFYSIHVTKESTHPVKPLAQIAGNRYASTPVGKALSDACMGTIASFLSKYQDIIIEHQKVVKGNQKRLESLRELAGKENLEYPSVTLPPQPHTKEGVDAYNEVIARVRMWVNLNLWQKLKLSRDDAKPLLRLKGFPSFPLVERQANEVDWWDMVCNVKKLINEKKEDGKVFWQNLAGYKRQEALRPYLSSEEDRKKGKKFARYQLGDLLLHLEKKHGEDWGKVYDEAWERIDKKVEGLSKHIKLEEERRSEDAQSKAALTDWLRAKASFVIEGLKEADKDEFCRCELKLQKWYGDLRGKPFAIEAENSILDISGFSKQYNCAFIWQKDGVKKLNLYLIINYFKGGKLRFKKIKPEAFEANRFYTVINKKSGEIVPMEVNFNFDDPNLIILPLAFGKRQGREFIWNDLLSLETGSLKLANGRVIEKTLYNRRTRQDEPALFVALTFERREVLDSSNIKPMNLIGVDRGENIPAVIALTDPEGCPLSRFKDSLGNPTHILRIGESYKEKQRTIQAKKEVEQRRAGGYSRKYASKAKNLADDMVRNTARDLLYYAVTQDAMLIFENLSRGFGRQGKRTFMAERQYTRMEDWLTAKLAYEGLPSKTYLSKTLAQYTSKTCSNCGFTITSADYDRVLEKLKKTATGWMTTINGKELKVEGQITYYNRYKRQNVVKDLSVELDRLSEESVNNDISSWTKGRSGEALSLLKKRFSHRPVQEKFVCLNCGFETHADEQAALNIARSWLFLRSQEYKKYQTNKTTGNTDKRAFVETWQSFYRKKLKEVWKPAV

SEQ ID NO: 32083 - protein, 978 aa, synthetic construct
  REGION 1..978: note = engineered CasX variant
QEIGRINKIRRRLVKDSNTKKAGKTGPMKTLLVRVMTPDLRERLENLRKKPENIPQPISNTSRANLNKLLTDYTEMKKAILHVYWEEFQKDPVGLMSRVAQPASKKIDQNKLKPEMDEKGNLTTAGFACSQCGQPLFVYKLEQVSEKGKAYTNYVGRCNVAEHEKLILLAQLKPEKDSDEAVTYSLGKFGQRALDFYSIHVTKESTHPVKPLAQIAGNRYASAPVGKALSDACMGTIASFLSKYQDIIIEHQKVVKGNQKRLESLRELAGKENLEYPSVTLPPQPHTKEGVDAYNEVIARVRMWVNLNLWQKLKLSRDDAKPLLRLKGFPSFPLVERQANEVDWWDMVCNVKKLINEKKEDGKVFWQNLAGYKRQEALRPYLSSEEDRKKGKKFARYQLGDLLLHLEKKHGEDWGKVYDEAWERIDKKVEGLSKHIKLEEERRSEDAQSKAALTDWLRAKASFVIEGLKEADKDEFCRCELKLQKWYGDLRGKPFAIEAENSILDISGFSKQYNCAFIWQKDGVKKLNLYLIINYFKGGKLRFKKIKPEAFEANRFYTVINKKSGEIVPMEVNFNFDDPNLIILPLAFGKRQGREFIWNDLLSLETGSLKLANGRVIEKTLYNRRTRQDEPALFVALTFERREVLDSSNIKPMNLIGVDRGENIPAVIALTDPEGCPLSRFKDSLGNPTHILRIGESYKEKQRTIQAKKEVEQRRAGGYSRKYASKAKNLADDMVRNTARDLLYYAVTQDAMLIFENLSRGFGRQGKRTFMAERQYTRMEDWLTAKLAYEGLPSKTYLSKTLAQYTSKTCSNCGFTITSADYDRVLEKLKKTATGWMTTINGKELKVEGQITYYNRYKRQNVVKDLSVELDRLSEESVNNDISSWTKGRSGEALSLLKKRFSHRPVQEKFVCLNCGFETHADEQAALNIARSWLFLRSQEYKKYQTNKTTGNTDKRAFVETWQSFYRKKLKEVWKPAV

SEQ ID NO: 32084 - protein, 978 aa, synthetic construct
  REGION 1..978: note = engineered CasX variant
QEIGRINKIRRRLVKDSNTKKAGKTGPMKTLLVRVMTPDLRERLENLRKKPENIPQPISNTSRANLNKLLTDYTEMKKAILHVYWEEFQKDPVGLMSRVAQPASKKIDQNKLKPEMDEKGNLTTAGFACSQCGQPLFVYKLEQVSEKGKAYTNYVGRCNVAEHEKLILLAQLKPEKDSDEAVTYSLGKFGQRALDFYSIHVTKESTHPVKPLAQIAGNRYASVPVGKALSDACMGTIASFLSKYQDIIIEHQKVVKGNQKRLESLRELAGKENLEYPSVTLPPQPHTKEGVDAYNEVIARVRMWVNLNLWQKLKLSRDDAKPLLRLKGFPSFPLVERQANEVDWWDMVCNVKKLINEKKEDGKVFWQNLAGYKRQEALRPYLSSEEDRKKGKKFARYQLGDLLLHLEKKHGEDWGKVYDEAWERIDKKVEGLSKHIKLEEERRSEDAQSKAALTDWLRAKASFVIEGLKEADKDEFCRCELKLQKWYGDLRGKPFAIEAENSILDISGFSKQYNCAFIWQKDGVKKLNLYLIINYFKGGKLRFKKIKPEAFEANRFYTVINKKSGEIVPMEVNFNFDDPNLIILPLAFGKRQGREFIWNDLLSLETGSLKLANGRVIEKTLYNRRTRQDEPALFVALTFERREVLDSSNIKPMNLIGVDRGENIPAVIALTDPEGCPLSRFKDSLGNPTHILRIGESYKEKQRTIQAKKEVEQRRAGGYSRKYASKAKNLADDMVRNTARDLLYYAVTQDAMLIFENLSRGFGRQGKRTFMAERQYTRMEDWLTAKLAYEGLPSKTYLSKTLAQYTSKTCSNCGFTITSADYDRVLEKLKKTATGWMTTINGKELKVEGQITYYNRYKRQNVVKDLSVELDRLSEESVNNDISSWTKGRSGEALSLLKKRFSHRPVQEKFVCLNCGFETHADEQAALNIARSWLFLRSQEYKKYQTNKTTGNTDKRAFVETWQSFYRKKLKEVWKPAV

SEQ ID NO: 32085 - protein, 978 aa, synthetic construct
  REGION 1..978: note = engineered CasX variant
QEIGRINKIRRRLVKDSNTKKAGKTGPMKTLLVRVMTPDLRERLENLRKKPENIPQPISNTSRANLNKLLTDYTEMKKAILHVYWEEFQKDPVGLMSRVAQPASKKIDQNKLKPEMDEKGNLTTAGFACSQCGQPLFVYKLEQVSEKGKAYTNYVGRCNVAEHEKLIKLAQLKPEKDSDEAVTYSLGKFGQRALDFYSIHVTKESTHPVKPLAQIAGNRYASGPVGKALSDACMGTIASFLSKYQDIIIEHQKVVKGNQKRLESLRELAGKENLEYPSVTLPPQPHTKEGVDAYNEVIARVRMWVNLNLWQKLKLSRDDAKPLLRLKGFPSFPLVERQANEVDWWDMVCNVKKLINEKKEDGKVFWQNLAGYKRQEALRPYLSSEEDRKKGKKFARYQLGDLLLHLEKKHGEDWGKVYDEAWERIDKKVEGLSKHIKLEEERRSEDAQSKAALTDWLRAKASFVIEGLKEADKDEFCRCELKLQKWYGDLRGKPFAIEAENSILDISGFSKQYNCAFIWQKDGVKKLNLYLIINYFKGGKLRFKKIKPEAFEANRFYTVINKKSGEIVPMEVNFNFDDPNLIILPLAFGKRQGREFIWNDLLSLETGSLKLANGRVIEKTLYNRRTRQDEPALFVALTFERREVLDSSNIKPMNLIGVDRGENIPAVIALTDPEGCPLSRFKDSLGNPTHILRIGESYKEKQRTIQAKKEVEQRRAGGYSRKYASKAKNLADDMVRNTARDLLYYAVTQDAMLIFENLSRGFGRQGKRTFMAERQYTRMEDWLTAKLAYEGLPSKTYLSKTLAQYTSKTCSNCGFTITSADYDRVLEKLKKTATGWMTTINGKELKVEGQITYYNRYKRQNVVKDLSVELDRLSEESVNNDISSWTKGRSGEALSLLKKRFSHRPVQEKFVCLNCGFETHADEQAALNIARSWLFLRSQEYKKYQTNKTTGNTDKRAFVETWQSFYRKKLKEVWKPAV

SEQ ID NO: 32086 - protein, 977 aa, synthetic construct
  REGION 1..977: note = engineered CasX variant
QEIGRINKIRRRLVKDSNTKKAGKTGPMKTLLVRVMTPDLRERLENLRKKPENIPQPISNTSRANLNKLLTDYTEMKKAILHVYWEEFQKDPVGLMSRVAQPASKKIDQNKLKPEMDEKGNLTTAGFACSQCGQPLFVYKLEQVSEKGKAYTNYVGRCNVAEHEKLILLAQLKPEKDSDEAVTYSLGKFGQRALDFYSIHVTKESTHPVKPLAQIAGNRYASPVGKALSDACMGTIASFLSKYQDIIIEHQKVVKGNQKRLESLRELAGKENLEYPSVTLPPQPHTKEGVDAYNEVIARVRMWVNLNLWQKLKLSRDDAKPLLRLKGFPSFPLVERQANEVDWWDMVCNVKKLINEKKEDGKVFWQNLAGYKRQEALRPYLSSEEDRKKGKKFARYQLGDLLLHLEKKHGEDWGKVYDEAWERIDKKVEGLSKHIKLEEERRSEDAQSKAALTDWLRAKASFVIEGLKEADKDEFCRCELKLQKWYGDLRGKPFAIEAENSILDISGFSKQYNCAFIWQKDGVKKLNLYLIINYFKGGKLRFKKIKPEAFEANRFYTVINKKSGEIVPMEVNFNFDDPNLIILPLAFGKRQGREFIWNDLLSLETGSLKLANGRVIEKTLYNRRTRQDEPALFVALTFERREVLDSSNIKPMNLIGVDRGENIPAVIALTDPEGCPLSRFKDSLGNPTHILRIGESYKEKQRTIQAKKEVEQRRAGGYSRKYASKAKNLADDMVRNTARDLLYYAVTQDAMLIFENLSRGFGRQGKRTFMAERQYTRMEDWLTAKLAYEGLPSKTYLSKTLAQYTSKTCSNCGFTITSADYDRVLEKLKKTATGWMTTINGKELKVEGQITYYNRYKRQNVVKDLSVELDRLSEESVNNDISSWTKGRSGEALSLLKKRFSHRPVQEKFVCLNCGFETHADEQAALNIARSWLFLRSQEYKKYQTNKTTGNTDKRAFVETWQSFYRKKLKEVWKPAV

SEQ ID NO: 32087 - protein, 978 aa, synthetic construct
  REGION 1..978: note = engineered CasX variant
QEIGRINKIRRRLVKDSNTKKAGKTGPMKTLLVRVMTPDLRERLENLRKKPENIPQPISNTSRANLNKLLTDYTEMKKAILHVYWEEFQKDPVGLMSRVAQPASKKIDQNKLKPEMDEKGNLTTAGFACSQCGQPLFVYKLEQVSEKGKAYTNYFGRCNVAEHEKLILLAQLKPEKDSDEAVTYSLGKFGQRALDFYSIHVTKESTHPVKPLAQIAGNRYASYPVGKALSDACMGTIASFLSKYQDIIIEHQKVVKGNQKRLESLRELAGKENLEYPSVTLPPQPHTKEGVDAYNEVIARVRMWVNLNLWQKLKLSRDDAKPLLRLKGFPSFPLVERQANEVDWWDMVCNVKKLINEKKEDGKVFWQNLAGYKRQEALRPYLSSEEDRKKGKKFARYQLGDLLLHLEKKHGEDWGKVYDEAWERIDKKVEGLSKHIKLEEERRSEDAQSKAALTDWLRAKASFVIEGLKEADKDEFCRCELKLQKWYGDLRGKPFAIEAENSILDISGFSKQYNCAFIWQKDGVKKLNLYLIINYFKGGKLRFKKIKPEAFEANRFYTVINKKSGEIVPMEVNFNFDDPNLIILPLAFGKRQGREFIWNDLLSLETGSLKLANGRVIEKTLYNRRTRQDEPALFVALTFERREVLDSSNIKPMNLIGVDRGENIPAVIALTDPEGCPLSRFKDSLGNPTHILRIGESYKEKQRTIQAKKEVEQRRAGGYSRKYASKAKNLADDMVRNTARDLLYYAVTQDAMLIFENLSRGFGRQGKRTFMAERQYTRMEDWLTAKLAYEGLASKTYLSKTLAQYTSKTCSNCGFTITSADYDRVLEKLKKTATGWMTTINGKELKVEGQITYYNRYKRQNVVKDLSVELDRLSEESVNNDISSWTKGRSGEALSLLKKRFSHRPVQEKFVCLNCGFETHADEQAALNIARSWLFLRSQEYKKYQTNKTTGNTDKRAFVETWQSFYRKKLKEVWKPAV

SEQ ID NO: 32088 - protein, 978 aa, synthetic construct
  REGION 1..978: note = engineered CasX variant
QEIGRINKIRRRLVKDSNTKKAGKTGPMKTLLVRVMTPDLRERLENLRKKPENIPQPISNTSRANLNKLLTDYTEMKKAILHVYWEEFQKDPVGLMSRVAQPASKKIDQNKLKPEMDEKGNLTTAGFACSQCGQPLFVYKLEQVSEKGKAYTNYFGRCNVAEHEKLILLAQLKPEKDSDEAVTYSLGKFGQRALDFYSIHVTKESTHPVKPLAQIAGNRYASHPVGKALSDACMGTIASFLSKYQDIIIEHQKVVKGNQKRLESLRELAGKENLEYPSVTLPPQPHTKEGVDAYNEVIARVRMWVNLNLWQKLKLSRDDAKPLLRLKGFPSFPLVERQANEVDWWDMVCNVKKLINEKKEDGKVFWQNLAGYKRQEALRPYLSSEEDRKKGKKFARYQLGDLLLHLEKKHGEDWGKVYDEAWERIDKKVEGLSKHIKLEEERRSEDAQSKAALTDWLRAKASFVIEGLKEADKDEFCRCELKLQKWYGDLRGKPFAIEAENSILDISGFSKQYNCAFIWQKDGVKKLNLYLIINYFKGGKLRFKKIKPEAFEANRFYTVINKKSGEIVPMEVNFNFDDPNLIILPLAFGKRQGREFIWNDLLSLETGSLKLANGRVIEKTLYNRRTRQDEPALFVALTFERREVLDSSNIKPMNLIGVDRGENIPAVIALTDPEGCPLSRFKDSLGNPTHILRIGESYKEKQRTIQAKKEVEQRRAGGYSRKYASKAKNLADDMVRNTARDLLYYAVTQDAMLIFENLSRGFGRQGKRTFMAERQYTRMEDWLTAKLAYEGLASKTYLSKTLAQYTSKTCSNCGFTITSADYDRVLEKLKKTATGWMTTINGKELKVEGQITYYNRYKRQNVVKDLSVELDRLSEESVNNDISSWTKGRSGEALSLLKKRFSHRPVQEKFVCLNCGFETHADEQAALNIARSWLFLRSQEYKKYQTNKTTGNTDKRAFVETWQSFYRKKLKEVWKPAV

SEQ ID NO: 32089 - protein, 978 aa, synthetic construct
  REGION 1..978: note = engineered CasX variant
QEIGRINKIRRRLVKDSNTKKAGKTGPMKTLLVRVMTPDLRERLENLRKKPENIPQPISNTSRANLNKLLTDYTEMKKAILHVYWEEFQKDPVGLMSRVAQPASKKIDQNKLKPEMDEKGNLTTAGFACSQCGQPLFVYKLEQVSEKGKAYTNYFGRCNVAEHEKLILLAQLKPEKDSDEAVTYSLGKFGQRALDFYSIHVTKESTHPVKPLAQIAGNRYASSPVGKALSDACMGTIASFLSKYQDIIIEHQKVVKGNQKRLESLRELAGKENLEYPSVTLPPQPHTKEGVDAYNEVIARVRMWVNLNLWQKLKLSRDDAKPLLRLKGFPSFPLVERQANEVDWWDMVCNVKKLINEKKEDGKVFWQNLAGYKRQEALRPYLSSEEDRKKGKKFARYQLGDLLLHLEKKHGEDWGKVYDEAWERIDKKVEGLSKHIKLEEERRSEDAQSKAALTDWLRAKASFVIEGLKEADKDEFCRCELKLQKWYGDLRGKPFAIEAENSILDISGFSKQYNCAFIWQKDGVKKLNLYLIINYFKGGKLRFKKIKPEAFEANRFYTVINKKSGEIVPMEVNFNFDDPNLIILPLAFGKRQGREFIWNDLLSLETGSLKLANGRVIEKTLYNRRTRQDEPALFVALTFERREVLDSSNIKPMNLIGVDRGENIPAVIALTDPEGCPLSRFKDSLGNPTHILRIGESYKEKQRTIQAKKEVEQRRAGGYSRKYASKAKNLADDMVRNTARDLLYYAVTQDAMLIFENLSRGFGRQGKRTFMAERQYTRMEDWLTAKLAYEGLASKTYLSKTLAQYTSKTCSNCGFTITSADYDRVLEKLKKTATGWMTTINGKELKVEGQITYYNRYKRQNVVKDLSVELDRLSEESVNNDISSWTKGRSGEALSLLKKRFSHRPVQEKFVCLNCGFETHADEQAALNIARSWLFLRSQEYKKYQTNKTTGNTDKRAFVETWQSFYRKKLKEVWKPAV

SEQ ID NO: 32090 - protein, 978 aa, synthetic construct
  REGION 1..978: note = engineered CasX variant
QEIGRINKIRRRLVKDSNTKKAGKTGPMKTLLVRVMTPDLRERLENLRKKPENIPQPISNTSRANLNKLLTDYTEMKKAILHVYWEEFQKDPVGLMSRVAQPASKKIDQNKLKPEMDEKGNLTTAGFACSQCGQPLFVYKLEQVSEKGKAYTNYFGRCNVAEHEKLILLAQLKPEKDSDEAVTYSLGKFGQRALDFYSIHVTKESTHPVKPLAQIAGNRYASTPVGKALSDACMGTIASFLSKYQDIIIEHQKVVKGNQKRLESLRELAGKENLEYPSVTLPPQPHTKEGVDAYNEVIARVRMWVNLNLWQKLKLSRDDAKPLLRLKGFPSFPLVERQANEVDWWDMVCNVKKLINEKKEDGKVFWQNLAGYKRQEALRPYLSSEEDRKKGKKFARYQLGDLLLHLEKKHGEDWGKVYDEAWERIDKKVEGLSKHIKLEEERRSEDAQSKAALTDWLRAKASFVIEGLKEADKDEFCRCELKLQKWYGDLRGKPFAIEAENSILDISGFSKQYNCAFIWQKDGVKKLNLYLIINYFKGGKLRFKKIKPEAFEANRFYTVINKKSGEIVPMEVNFNFDDPNLIILPLAFGKRQGREFIWNDLLSLETGSLKLANGRVIEKTLYNRRTRQDEPALFVALTFERREVLDSSNIKPMNLIGVDRGENIPAVIALTDPEGCPLSRFKDSLGNPTHILRIGESYKEKQRTIQAKKEVEQRRAGGYSRKYASKAKNLADDMVRNTARDLLYYAVTQDAMLIFENLSRGFGRQGKRTFMAERQYTRMEDWLTAKLAYEGLASKTYLSKTLAQYTSKTCSNCGFTITSADYDRVLEKLKKTATGWMTTINGKELKVEGQITYYNRYKRQNVVKDLSVELDRLSEESVNNDISSWTKGRSGEALSLLKKRFSHRPVQEKFVCLNCGFETHADEQAALNIARSWLFLRSQEYKKYQTNKTTGNTDKRAFVETWQSFYRKKLKEVWKPAV

SEQ ID NO: 32091 - protein, 978 aa, synthetic construct
  REGION 1..978: note = engineered CasX variant
QEIGRINKIRRRLVKDSNTKKAGKTGPMKTLLVRVMTPDLRERLENLRKKPENIPQPISNTSRANLNKLLTDYTEMKKAILHVYWEEFQKDPVGLMSRVAQPASKKIDQNKLKPEMDEKGNLTTAGFACSQCGQPLFVYKLEQVSEKGKAYTNYFGRCNVAEHEKLILLAQLKPEKDSDEAVTYSLGKFGQRALDFYSIHVTKESTHPVKPLAQIAGNRYASAPVGKALSDACMGTIASFLSKYQDIIIEHQKVVKGNQKRLESLRELAGKENLEYPSVTLPPQPHTKEGVDAYNEVIARVRMWVNLNLWQKLKLSRDDAKPLLRLKGFPSFPLVERQANEVDWWDMVCNVKKLINEKKEDGKVFWQNLAGYKRQEALRPYLSSEEDRKKGKKFARYQLGDLLLHLEKKHGEDWGKVYDEAWERIDKKVEGLSKHIKLEEERRSEDAQSKAALTDWLRAKASFVIEGLKEADKDEFCRCELKLQKWYGDLRGKPFAIEAENSILDISGFSKQYNCAFIWQKDGVKKLNLYLIINYFKGGKLRFKKIKPEAFEANRFYTVINKKSGEIVPMEVNFNFDDPNLIILPLAFGKRQGREFIWNDLLSLETGSLKLANGRVIEKTLYNRRTRQDEPALFVALTFERREVLDSSNIKPMNLIGVDRGENIPAVIALTDPEGCPLSRFKDSLGNPTHILRIGESYKEKQRTIQAKKEVEQRRAGGYSRKYASKAKNLADDMVRNTARDLLYYAVTQDAMLIFENLSRGFGRQGKRTFMAERQYTRMEDWLTAKLAYEGLASKTYLSKTLAQYTSKTCSNCGFTITSADYDRVLEKLKKTATGWMTTINGKELKVEGQITYYNRYKRQNVVKDLSVELDRLSEESVNNDISSWTKGRSGEALSLLKKRFSHRPVQEKFVCLNCGFETHADEQAALNIARSWLFLRSQEYKKYQTNKTTGNTDKRAFVETWQSFYRKKLKEVWKPAV

SEQ ID NO: 32092 - protein, 978 aa, synthetic construct
  REGION 1..978: note = engineered CasX variant
QEIGRINKIRRRLVKDSNTKKAGKTGPMKTLLVRVMTPDLRERLENLRKKPENIPQPISNTSRANLNKLLTDYTEMKKAILHVYWEEFQKDPVGLMSRVAQPASKKIDQNKLKPEMDEKGNLTTAGFACSQCGQPLFVYKLEQVSEKGKAYTNYFGRCNVAEHEKLILLAQLKPEKDSDEAVTYSLGKFGQRALDFYSIHVTKESTHPVKPLAQIAGNRYASVPVGKALSDACMGTIASFLSKYQDIIIEHQKVVKGNQKRLESLRELAGKENLEYPSVTLPPQPHTKEGVDAYNEVIARVRMWVNLNLWQKLKLSRDDAKPLLRLKGFPSFPLVERQANEVDWWDMVCNVKKLINEKKEDGKVFWQNLAGYKRQEALRPYLSSEEDRKKGKKFARYQLGDLLLHLEKKHGEDWGKVYDEAWERIDKKVEGLSKHIKLEEERRSEDAQSKAALTDWLRAKASFVIEGLKEADKDEFCRCELKLQKWYGDLRGKPFAIEAENSILDISGFSKQYNCAFIWQKDGVKKLNLYLIINYFKGGKLRFKKIKPEAFEANRFYTVINKKSGEIVPMEVNFNFDDPNLIILPLAFGKRQGREFIWNDLLSLETGSLKLANGRVIEKTLYNRRTRQDEPALFVALTFERREVLDSSNIKPMNLIGVDRGENIPAVIALTDPEGCPLSRFKDSLGNPTHILRIGESYKEKQRTIQAKKEVEQRRAGGYSRKYASKAKNLADDMVRNTARDLLYYAVTQDAMLIFENLSRGFGRQGKRTFMAERQYTRMEDWLTAKLAYEGLASKTYLSKTLAQYTSKTCSNCGFTITSADYDRVLEKLKKTATGWMTTINGKELKVEGQITYYNRYKRQNVVKDLSVELDRLSEESVNNDISSWTKGRSGEALSLLKKRFSHRPVQEKFVCLNCGFETHADEQAALNIARSWLFLRSQEYKKYQTNKTTGNTDKRAFVETWQSFYRKKLKEVWKPAV

SEQ ID NO: 32093 - protein, 978 aa, synthetic construct
  REGION 1..978: note = engineered CasX variant
QEIGRINKIRRRLVKDSNTKKAGKTGPMKTLLVRVMTPDLRERLENLRKKPENIPQPISNTSRANLNKLLTDYTEMKKAILHVYWEEFQKDPVGLMSRVAQPASKKIDQNKLKPEMDEKGNLTTAGFACSQCGQPLFVYKLEQVSEKGKAYTNYFGRCNVAEHEKLIKLAQLKPEKDSDEAVTYSLGKFGQRALDFYSIHVTKESTHPVKPLAQIAGNRYASGPVGKALSDACMGTIASFLSKYQDIIIEHQKVVKGNQKRLESLRELAGKENLEYPSVTLPPQPHTKEGVDAYNEVIARVRMWVNLNLWQKLKLSRDDAKPLLRLKGFPSFPLVERQANEVDWWDMVCNVKKLINEKKEDGKVFWQNLAGYKRQEALRPYLSSEEDRKKGKKFARYQLGDLLLHLEKKHGEDWGKVYDEAWERIDKKVEGLSKHIKLEEERRSEDAQSKAALTDWLRAKASFVIEGLKEADKDEFCRCELKLQKWYGDLRGKPFAIEAENSILDISGFSKQYNCAFIWQKDGVKKLNLYLIINYFKGGKLRFKKIKPEAFEANRFYTVINKKSGEIVPMEVNFNFDDPNLIILPLAFGKRQGREFIWNDLLSLETGSLKLANGRVIEKTLYNRRTRQDEPALFVALTFERREVLDSSNIKPMNLIGVDRGENIPAVIALTDPEGCPLSRFKDSLGNPTHILRIGESYKEKQRTIQAKKEVEQRRAGGYSRKYASKAKNLADDMVRNTARDLLYYAVTQDAMLIFENLSRGFGRQGKRTFMAERQYTRMEDWLTAKLAYEGLASKTYLSKTLAQYTSKTCSNCGFTITSADYDRVLEKLKKTATGWMTTINGKELKVEGQITYYNRYKRQNVVKDLSVELDRLSEESVNNDISSWTKGRSGEALSLLKKRFSHRPVQEKFVCLNCGFETHADEQAALNIARSWLFLRSQEYKKYQTNKTTGNTDKRAFVETWQSFYRKKLKEVWKPAV

SEQ ID NO: 32094 - protein, 977 aa, synthetic construct
  REGION 1..977: note = engineered CasX variant
QEIGRINKIRRRLVKDSNTKKAGKTGPMKTLLVRVMTPDLRERLENLRKKPENIPQPISNTSRANLNKLLTDYTEMKKAILHVYWEEFQKDPVGLMSRVAQPASKKIDQNKLKPEMDEKGNLTTAGFACSQCGQPLFVYKLEQVSEKGKAYTNYFGRCNVAEHEKLILLAQLKPEKDSDEAVTYSLGKFGQRALDFYSIHVTKESTHPVKPLAQIAGNRYASPVGKALSDACMGTIASFLSKYQDIIIEHQKVVKGNQKRLESLRELAGKENLEYPSVTLPPQPHTKEGVDAYNEVIARVRMWVNLNLWQKLKLSRDDAKPLLRLKGFPSFPLVERQANEVDWWDMVCNVKKLINEKKEDGKVFWQNLAGYKRQEALRPYLSSEEDRKKGKKFARYQLGDLLLHLEKKHGEDWGKVYDEAWERIDKKVEGLSKHIKLEEERRSEDAQSKAALTDWLRAKASFVIEGLKEADKDEFCRCELKLQKWYGDLRGKPFAIEAENSILDISGFSKQYNCAFIWQKDGVKKLNLYLIINYFKGGKLRFKKIKPEAFEANRFYTVINKKSGEIVPMEVNFNFDDPNLIILPLAFGKRQGREFIWNDLLSLETGSLKLANGRVIEKTLYNRRTRQDEPALFVALTFERREVLDSSNIKPMNLIGVDRGENIPAVIALTDPEGCPLSRFKDSLGNPTHILRIGESYKEKQRTIQAKKEVEQRRAGGYSRKYASKAKNLADDMVRNTARDLLYYAVTQDAMLIFENLSRGFGRQGKRTFMAERQYTRMEDWLTAKLAYEGLASKTYLSKTLAQYTSKTCSNCGFTITSADYDRVLEKLKKTATGWMTTINGKELKVEGQITYYNRYKRQNVVKDLSVELDRLSEESVNNDISSWTKGRSGEALSLLKKRFSHRPVQEKFVCLNCGFETHADEQAALNIARSWLFLRSQEYKKYQTNKTTGNTDKRAFVETWQSFYRKKLKEVWKPAV

SEQ ID NO: 32095 - protein, 978 aa, synthetic construct
  REGION 1..978: note = engineered CasX variant
QEIGRINKIRRRLVKDSNTKKAGKTGPMKTLLVRVMTPDLRERLENLRKKPENIPQPISNTSRANLNKLLTDYTEMKKAILHVYWEEFQKDPVGLMSRVAQPASKKIDQNKLKPEMDEKGNLTTAGFACSQCGQPLFVYKLEQVSEKGKAYTNYFGRCNVAEHEKLILLAQLKPEKDSDEAVTYSLGKFGQRALDFYSIHVTKESTHPVKPLAQIAGNRYASYPVGKALSDACMGTIASFLSKYQDIIIEHQKVVKGNQKRLESLRELAGKENLEYPSVTLPPQPHTKEGVDAYNEVIARVRMWVNLNLWQKLKLSRDDAKPLLRLKGFPSFPLVERQANEVDWWDMVCNVKKLINEKKEDGKVFWQNLAGYKRQEALRPYLSSEEDRKKGKKFARYQLGDLLLHLEKKHGEDWGKVYDEAWERIDKKVEGLSKHIKLEEERRSEDAQSKAALTDWLRAKASFVIEGLKEADKDEFCRCELKLQKWYGDLRGKPFAIEAENSILDISGFSKQYNCAFIWQKDGVKKLNLYLIINYFKGGKLRFKKIKPEAFEANRFYTVINKKSGEIVPMEVNFNFDDPNLIILPLAFGKRQGREFIWNDLLSLETGSLKLANGRVIEKTLYNRRTRQDEPALFVALTFERREVLDSSNIKPMNLIGVDRGENIPAVIALTDPEGCPLSRFKDSLGNPTHILRIGESYKEKQRTIQAKKEVEQRRAGGYSRKYASKAKNLADDMVRNTARDLLYYAVTQDAMLIFENLSRGFGRQGKRTFMAERQYTRMEDWLTAKLAYEGLPSKVYLSKTLAQYTSKTCSNCGFTITSADYDRVLEKLKKTATGWMTTINGKELKVEGQITYYNRYKRQNVVKDLSVELDRLSEESVNNDISSWTKGRSGEALSLLKKRFSHRPVQEKFVCLNCGFETHADEQAALNIARSWLFLRSQEYKKYQTNKTTGNTDKRAFVETWQSFYRKKLKEVWKPAV

SEQ ID NO: 32096 - protein, 978 aa, synthetic construct
  REGION 1..978: note = engineered CasX variant
QEIGRINKIRRRLVKDSNTKKAGKTGPMKTLLVRVMTPDLRERLENLRKKPENIPQPISNTSRANLNKLLTDYTEMKKAILHVYWEEFQKDPVGLMSRVAQPASKKIDQNKLKPEMDEKGNLTTAGFACSQCGQPLFVYKLEQVSEKGKAYTNYFGRCNVAEHEKLILLAQLKPEKDSDEAVTYSLGKFGQRALDFYSIHVTKESTHPVKPLAQIAGNRYASHPVGKALSDACMGTIASFLSKYQDIIIEHQKVVKGNQKRLESLRELAGKENLEYPSVTLPPQPHTKEGVDAYNEVIARVRMWVNLNLWQKLKLSRDDAKPLLRLKGFPSFPLVERQANEVDWWDMVCNVKKLINEKKEDGKVFWQNLAGYKRQEALRPYLSSEEDRKKGKKFARYQLGDLLLHLEKKHGEDWGKVYDEAWERIDKKVEGLSKHIKLEEERRSEDAQSKAALTDWLRAKASFVIEGLKEADKDEFCRCELKLQKWYGDLRGKPFAIEAENSILDISGFSKQYNCAFIWQKDGVKKLNLYLIINYFKGGKLRFKKIKPEAFEANRFYTVINKKSGEIVPMEVNFNFDDPNLIILPLAFGKRQGREFIWNDLLSLETGSLKLANGRVIEKTLYNRRTRQDEPALFVALTFERREVLDSSNIKPMNLIGVDRGENIPAVIALTDPEGCPLSRFKDSLGNPTHILRIGESYKEKQRTIQAKKEVEQRRAGGYSRKYASKAKNLADDMVRNTARDLLYYAVTQDAMLIFENLSRGFGRQGKRTFMAERQYTRMEDWLTAKLAYEGLPSKVYLSKTLAQYTSKTCSNCGFTITSADYDRVLEKLKKTATGWMTTINGKELKVEGQITYYNRYKRQNVVKDLSVELDRLSEESVNNDISSWTKGRSGEALSLLKKRFSHRPVQEKFVCLNCGFETHADEQAALNIARSWLFLRSQEYKKYQTNKTTGNTDKRAFVETWQSFYRKKLKEVWKPAV

SEQ ID NO: 32097 - protein, 978 aa, synthetic construct
  REGION 1..978: note = engineered CasX variant
QEIGRINKIRRRLVKDSNTKKAGKTGPMKTLLVRVMTPDLRERLENLRKKPENIPQPISNTSRANLNKLLTDYTEMKKAILHVYWEEFQKDPVGLMSRVAQPASKKIDQNKLKPEMDEKGNLTTAGFACSQCGQPLFVYKLEQVSEKGKAYTNYFGRCNVAEHEKLILLAQLKPEKDSDEAVTYSLGKFGQRALDFYSIHVTKESTHPVKPLAQIAGNRYASSPVGKALSDACMGTIASFLSKYQDIIIEHQKVVKGNQKRLESLRELAGKENLEYPSVTLPPQPHTKEGVDAYNEVIARVRMWVNLNLWQKLKLSRDDAKPLLRLKGFPSFPLVERQANEVDWWDMVCNVKKLINEKKEDGKVFWQNLAGYKRQEALRPYLSSEEDRKKGKKFARYQLGDLLLHLEKKHGEDWGKVYDEAWERIDKKVEGLSKHIKLEEERRSEDAQSKAALTDWLRAKASFVIEGLKEADKDEFCRCELKLQKWYGDLRGKPFAIEAENSILDISGFSKQYNCAFIWQKDGVKKLNLYLIINYFKGGKLRFKKIKPEAFEANRFYTVINKKSGEIVPMEVNFNFDDPNLIILPLAFGKRQGREFIWNDLLSLETGSLKLANGRVIEKTLYNRRTRQDEPALFVALTFERREVLDSSNIKPMNLIGVDRGENIPAVIALTDPEGCPLSRFKDSLGNPTHILRIGESYKEKQRTIQAKKEVEQRRAGGYSRKYASKAKNLADDMVRNTARDLLYYAVTQDAMLIFENLSRGFGRQGKRTFMAERQYTRMEDWLTAKLAYEGLPSKVYLSKTLAQYTSKTCSNCGFTITSADYDRVLEKLKKTATGWMTTINGKELKVEGQITYYNRYKRQNVVKDLSVELDRLSEESVNNDISSWTKGRSGEALSLLKKRFSHRPVQEKFVCLNCGFETHADEQAALNIARSWLFLRSQEYKKYQTNKTTGNTDKRAFVETWQSFYRKKLKEVWKPAV

SEQ ID NO: 32098 - protein, 978 aa, synthetic construct
  REGION 1..978: note = engineered CasX variant
QEIGRINKIRRRLVKDSNTKKAGKTGPMKTLLVRVMTPDLRERLENLRKKPENIPQPISNTSRANLNKLLTDYTEMKKAILHVYWEEFQKDPVGLMSRVAQPASKKIDQNKLKPEMDEKGNLTTAGFACSQCGQPLFVYKLEQVSEKGKAYTNYFGRCNVAEHEKLILLAQLKPEKDSDEAVTYSLGKFGQRALDFYSIHVTKESTHPVKPLAQIAGNRYASTPVGKALSDACMGTIASFLSKYQDIIIEHQKVVKGNQKRLESLRELAGKENLEYPSVTLPPQPHTKEGVDAYNEVIARVRMWVNLNLWQKLKLSRDDAKPLLRLKGFPSFPLVERQANEVDWWDMVCNVKKLINEKKEDGKVFWQNLAGYKRQEALRPYLSSEEDRKKGKKFARYQLGDLLLHLEKKHGEDWGKVYDEAWERIDKKVEGLSKHIKLEEERRSEDAQSKAALTDWLRAKASFVIEGLKEADKDEFCRCELKLQKWYGDLRGKPFAIEAENSILDISGFSKQYNCAFIWQKDGVKKLNLYLIINYFKGGKLRFKKIKPEAFEANRFYTVINKKSGEIVPMEVNFNFDDPNLIILPLAFGKRQGREFIWNDLLSLETGSLKLANGRVIEKTLYNRRTRQDEPALFVALTFERREVLDSSNIKPMNLIGVDRGENIPAVIALTDPEGCPLSRFKDSLGNPTHILRIGESYKEKQRTIQAKKEVEQRRAGGYSRKYASKAKNLADDMVRNTARDLLYYAVTQDAMLIFENLSRGFGRQGKRTFMAERQYTRMEDWLTAKLAYEGLPSKVYLSKTLAQYTSKTCSNCGFTITSADYDRVLEKLKKTATGWMTTINGKELKVEGQITYYNRYKRQNVVKDLSVELDRLSEESVNNDISSWTKGRSGEALSLLKKRFSHRPVQEKFVCLNCGFETHADEQAALNIARSWLFLRSQEYKKYQTNKTTGNTDKRAFVETWQSFYRKKLKEVWKPAV

SEQ ID NO: 32099 - protein, 978 aa, synthetic construct
  REGION 1..978: note = engineered CasX variant
QEIGRINKIRRRLVKDSNTKKAGKTGPMKTLLVRVMTPDLRERLENLRKKPENIPQPISNTSRANLNKLLTDYTEMKKAILHVYWEEFQKDPVGLMSRVAQPASKKIDQNKLKPEMDEKGNLTTAGFACSQCGQPLFVYKLEQVSEKGKAYTNYFGRCNVAEHEKLILLAQLKPEKDSDEAVTYSLGKFGQRALDFYSIHVTKESTHPVKPLAQIAGNRYASAPVGKALSDACMGTIASFLSKYQDIIIEHQKVVKGNQKRLESLRELAGKENLEYPSVTLPPQPHTKEGVDAYNEVIARVRMWVNLNLWQKLKLSRDDAKPLLRLKGFPSFPLVERQANEVDWWDMVCNVKKLINEKKEDGKVFWQNLAGYKRQEALRPYLSSEEDRKKGKKFARYQLGDLLLHLEKKHGEDWGKVYDEAWERIDKKVEGLSKHIKLEEERRSEDAQSKAALTDWLRAKASFVIEGLKEADKDEFCRCELKLQKWYGDLRGKPFAIEAENSILDISGFSKQYNCAFIWQKDGVKKLNLYLIINYFKGGKLRFKKIKPEAFEANRFYTVINKKSGEIVPMEVNFNFDDPNLIILPLAFGKRQGREFIWNDLLSLETGSLKLANGRVIEKTLYNRRTRQDEPALFVALTFERREVLDSSNIKPMNLIGVDRGENIPAVIALTDPEGCPLSRFKDSLGNPTHILRIGESYKEKQRTIQAKKEVEQRRAGGYSRKYASKAKNLADDMVRNTARDLLYYAVTQDAMLIFENLSRGFGRQGKRTFMAERQYTRMEDWLTAKLAYEGLPSKVYLSKTLAQYTSKTCSNCGFTITSADYDRVLEKLKKTATGWMTTINGKELKVEGQITYYNRYKRQNVVKDLSVELDRLSEESVNNDISSWTKGRSGEALSLLKKRFSHRPVQEKFVCLNCGFETHADEQAALNIARSWLFLRSQEYKKYQTNKTTGNTDKRAFVETWQSFYRKKLKEVWKPAV

SEQ ID NO: 32100 - protein, 978 aa, synthetic construct
  REGION 1..978: note = engineered CasX variant
QEIGRINKIRRRLVKDSNTKKAGKTGPMKTLLVRVMTPDLRERLENLRKKPENIPQPISNTSRANLNKLLTDYTEMKKAILHVYWEEFQKDPVGLMSRVAQPASKKIDQNKLKPEMDEKGNLTTAGFACSQCGQPLFVYKLEQVSEKGKAYTNYFGRCNVAEHEKLILLAQLKPEKDSDEAVTYSLGKFGQRALDFYSIHVTKESTHPVKPLAQIAGNRYASVPVGKALSDACMGTIASFLSKYQDIIIEHQKVVKGNQKRLESLRELAGKENLEYPSVTLPPQPHTKEGVDAYNEVIARVRMWVNLNLWQKLKLSRDDAKPLLRLKGFPSFPLVERQANEVDWWDMVCNVKKLINEKKEDGKVFWQNLAGYKRQEALRPYLSSEEDRKKGKKFARYQLGDLLLHLEKKHGEDWGKVYDEAWERIDKKVEGLSKHIKLEEERRSEDAQSKAALTDWLRAKASFVIEGLKEADKDEFCRCELKLQKWYGDLRGKPFAIEAENSILDISGFSKQYNCAFIWQKDGVKKLNLYLIINYFKGGKLRFKKIKPEAFEANRFYTVINKKSGEIVPMEVNFNFDDPNLIILPLAFGKRQGREFIWNDLLSLETGSLKLANGRVIEKTLYNRRTRQDEPALFVALTFERREVLDSSNIKPMNLIGVDRGENIPAVIALTDPEGCPLSRFKDSLGNPTHILRIGESYKEKQRTIQAKKEVEQRRAGGYSRKYASKAKNLADDMVRNTARDLLYYAVTQDAMLIFENLSRGFGRQGKRTFMAERQYTRMEDWLTAKLAYEGLPSKVYLSKTLAQYTSKTCSNCGFTITSADYDRVLEKLKKTATGWMTTINGKELKVEGQITYYNRYKRQNVVKDLSVELDRLSEESVNNDISSWTKGRSGEALSLLKKRFSHRPVQEKFVCLNCGFETHADEQAALNIARSWLFLRSQEYKKYQTNKTTGNTDKRAFVETWQSFYRKKLKEVWKPAV

SEQ ID NO: 32101 - protein, 978 aa, synthetic construct
  REGION 1..978: note = engineered CasX variant
QEIGRINKIRRRLVKDSNTKKAGKTGPMKTLLVRVMTPDLRERLENLRKKPENIPQPISNTSRANLNKLLTDYTEMKKAILHVYWEEFQKDPVGLMSRVAQPASKKIDQNKLKPEMDEKGNLTTAGFACSQCGQPLFVYKLEQVSEKGKAYTNYFGRCNVAEHEKLIKLAQLKPEKDSDEAVTYSLGKFGQRALDFYSIHVTKESTHPVKPLAQIAGNRYASGPVGKALSDACMGTIASFLSKYQDIIIEHQKVVKGNQKRLESLRELAGKENLEYPSVTLPPQPHTKEGVDAYNEVIARVRMWVNLNLWQKLKLSRDDAKPLLRLKGFPSFPLVERQANEVDWWDMVCNVKKLINEKKEDGKVFWQNLAGYKRQEALRPYLSSEEDRKKGKKFARYQLGDLLLHLEKKHGEDWGKVYDEAWERIDKKVEGLSKHIKLEEERRSEDAQSKAALTDWLRAKASFVIEGLKEADKDEFCRCELKLQKWYGDLRGKPFAIEAENSILDISGFSKQYNCAFIWQKDGVKKLNLYLIINYFKGGKLRFKKIKPEAFEANRFYTVINKKSGEIVPMEVNFNFDDPNLIILPLAFGKRQGREFIWNDLLSLETGSLKLANGRVIEKTLYNRRTRQDEPALFVALTFERREVLDSSNIKPMNLIGVDRGENIPAVIALTDPEGCPLSRFKDSLGNPTHILRIGESYKEKQRTIQAKKEVEQRRAGGYSRKYASKAKNLADDMVRNTARDLLYYAVTQDAMLIFENLSRGFGRQGKRTFMAERQYTRMEDWLTAKLAYEGLPSKVYLSKTLAQYTSKTCSNCGFTITSADYDRVLEKLKKTATGWMTTINGKELKVEGQITYYNRYKRQNVVKDLSVELDRLSEESVNNDISSWTKGRSGEALSLLKKRFSHRPVQEKFVCLNCGFETHADEQAALNIARSWLFLRSQEYKKYQTNKTTGNTDKRAFVETWQSFYRKKLKEVWKPAV

SEQ ID NO: 32102 - protein, 977 aa, synthetic construct
  REGION 1..977: note = engineered CasX variant
QEIGRINKIRRRLVKDSNTKKAGKTGPMKTLLVRVMTPDLRERLENLRKKPENIPQPISNTSRANLNKLLTDYTEMKKAILHVYWEEFQKDPVGLMSRVAQPASKKIDQNKLKPEMDEKGNLTTAGFACSQCGQPLFVYKLEQVSEKGKAYTNYFGRCNVAEHEKLILLAQLKPEKDSDEAVTYSLGKFGQRALDFYSIHVTKESTHPVKPLAQIAGNRYASPVGKALSDACMGTIASFLSKYQDIIIEHQKVVKGNQKRLESLRELAGKENLEYPSVTLPPQPHTKEGVDAYNEVIARVRMWVNLNLWQKLKLSRDDAKPLLRLKGFPSFPLVERQANEVDWWDMVCNVKKLINEKKEDGKVFWQNLAGYKRQEALRPYLSSEEDRKKGKKFARYQLGDLLLHLEKKHGEDWGKVYDEAWERIDKKVEGLSKHIKLEEERRSEDAQSKAALTDWLRAKASFVIEGLKEADKDEFCRCELKLQKWYGDLRGKPFAIEAENSILDISGFSKQYNCAFIWQKDGVKKLNLYLIINYFKGGKLRFKKIKPEAFEANRFYTVINKKSGEIVPMEVNFNFDDPNLIILPLAFGKRQGREFIWNDLLSLETGSLKLANGRVIEKTLYNRRTRQDEPALFVALTFERREVLDSSNIKPMNLIGVDRGENIPAVIALTDPEGCPLSRFKDSLGNPTHILRIGESYKEKQRTIQAKKEVEQRRAGGYSRKYASKAKNLADDMVRNTARDLLYYAVTQDAMLIFENLSRGFGRQGKRTFMAERQYTRMEDWLTAKLAYEGLPSKVYLSKTLAQYTSKTCSNCGFTITSADYDRVLEKLKKTATGWMTTINGKELKVEGQITYYNRYKRQNVVKDLSVELDRLSEESVNNDISSWTKGRSGEALSLLKKRFSHRPVQEKFVCLNCGFETHADEQAALNIARSWLFLRSQEYKKYQTNKTTGNTDKRAFVETWQSFYRKKLKEVWKPAV

SEQ ID NO: 32103 - protein, 979 aa, synthetic construct
  REGION 1..979: note = engineered CasX variant
QEIGRINKIRRRLVKDSNTKKAGKTGPMKTLLVRVMTPDLRERLENLRKKPENIPQPISNTSRANLNKLLTDYTEMKKAILHVYWEEFQKDPVGLMSRVAQPASKKIDQNKLKPEMDEKGNLTTAGFACSQCGQPLFVYKLEQVSEKGKAYTNYFGRCNVAEHEKLILLAQLKPEKDSDEAVTYSLGKFGQRALDFYSIHVTKESTHPVKPLAQIAGNRYASYPVGKALSDACMGTIASFLSKYQDIIIEHQKVVKGNQKRLESLRELAGKENLEYPSVTLPPQPHTKEGVDAYNEVIARVRMWVNLNLWQKLKLSRDDAKPLLRLKGFPSFPLVERQANEVDWWDMVCNVKKLINEKKEDGKVFWQNLAGYKRQEALRPYLSSEEDRKKGKKFARYQLGDLLLHLEKKHGEDWGKVYDEAWERIDKKVEGLSKHIKLEEERRSEDAQSKAALTDWLRAKASFVIEGLKEADKDEFCRCELKLQKWYGDLRGKPFAIEAENSILDISGFSKQYNCAFIWQKDGVKKLNLYLIINYFKGGKLRFKKIKPEAFEANRFYTVINKKSGEIVPMEVNFNFDDPNLIILPLAFGKRQGREFIWNDLLSLETGSLKLANGRVIEKTLYNRRTRQDEPALFVALTFERREVLDSSNIKPMNLIGVDRGENIPAVIALTDPEGCPLSRFKDSLGNPTHILRIGESYKEKQRTIQAKKEVEQRRAGGYSRKYASKAKNLADDMVRNTARDLLYYAVTQDAMLIFENLSRGFGRQGKRTFMAERQYTRMEDWLTAKLAYEGPLPSKTYLSKTLAQYTSKTCSNCGFTITSADYDRVLEKLKKTATGWMTTINGKELKVEGQITYYNRYKRQNVVKDLSVELDRLSEESVNNDISSWTKGRSGEALSLLKKRFSHRPVQEKFVCLNCGFETHADEQAALNIARSWLFLRSQEYKKYQTNKTTGNTDKRAFVETWQSFYRKKLKEVWKPAV

SEQ ID NO: 32104 - protein, 979 aa, synthetic construct
  REGION 1..979: note = engineered CasX variant
QEIGRINKIRRRLVKDSNTKKAGKTGPMKTLLVRVMTPDLRERLENLRKKPENIPQPISNTSRANLNKLLTDYTEMKKAILHVYWEEFQKDPVGLMSRVAQPASKKIDQNKLKPEMDEKGNLTTAGFACSQCGQPLFVYKLEQVSEKGKAYTNYFGRCNVAEHEKLILLAQLKPEKDSDEAVTYSLGKFGQRALDFYSIHVTKESTHPVKPLAQIAGNRYASHPVGKALSDACMGTIASFLSKYQDIIIEHQKVVKGNQKRLESLRELAGKENLEYPSVTLPPQPHTKEGVDAYNEVIARVRMWVNLNLWQKLKLSRDDAKPLLRLKGFPSFPLVERQANEVDWWDMVCNVKKLINEKKEDGKVFWQNLAGYKRQEALRPYLSSEEDRKKGKKFARYQLGDLLLHLEKKHGEDWGKVYDEAWERIDKKVEGLSKHIKLEEERRSEDAQSKAALTDWLRAKASFVIEGLKEADKDEFCRCELKLQKWYGDLRGKPFAIEAENSILDISGFSKQYNCAFIWQKDGVKKLNLYLIINYFKGGKLRFKKIKPEAFEANRFYTVINKKSGEIVPMEVNFNFDDPNLIILPLAFGKRQGREFIWNDLLSLETGSLKLANGRVIEKTLYNRRTRQDEPALFVALTFERREVLDSSNIKPMNLIGVDRGENIPAVIALTDPEGCPLSRFKDSLGNPTHILRIGESYKEKQRTIQAKKEVEQRRAGGYSRKYASKAKNLADDMVRNTARDLLYYAVTQDAMLIFENLSRGFGRQGKRTFMAERQYTRMEDWLTAKLAYEGPLPSKTYLSKTLAQYTSKTCSNCGFTITSADYDRVLEKLKKTATGWMTTINGKELKVEGQITYYNRYKRQNVVKDLSVELDRLSEESVNNDISSWTKGRSGEALSLLKKRFSHRPVQEKFVCLNCGFETHADEQAALNIARSWLFLRSQEYKKYQTNKTTGNTDKRAFVETWQSFYRKKLKEVWKPAV

SEQ ID NO: 32105 - protein, 979 aa, synthetic construct
  REGION 1..979: note = engineered CasX variant
QEIGRINKIRRRLVKDSNTKKAGKTGPMKTLLVRVMTPDLRERLENLRKKPENIPQPISNTSRANLNKLLTDYTEMKKAILHVYWEEFQKDPVGLMSRVAQPASKKIDQNKLKPEMDEKGNLTTAGFACSQCGQPLFVYKLEQVSEKGKAYTNYFGRCNVAEHEKLILLAQLKPEKDSDEAVTYSLGKFGQRALDFYSIHVTKESTHPVKPLAQIAGNRYASSPVGKALSDACMGTIASFLSKYQDIIIEHQKVVKGNQKRLESLRELAGKENLEYPSVTLPPQPHTKEGVDAYNEVIARVRMWVNLNLWQKLKLSRDDAKPLLRLKGFPSFPLVERQANEVDWWDMVCNVKKLINEKKEDGKVFWQNLAGYKRQEALRPYLSSEEDRKKGKKFARYQLGDLLLHLEKKHGEDWGKVYDEAWERIDKKVEGLSKHIKLEEERRSEDAQSKAALTDWLRAKASFVIEGLKEADKDEFCRCELKLQKWYGDLRGKPFAIEAENSILDISGFSKQYNCAFIWQKDGVKKLNLYLIINYFKGGKLRFKKIKPEAFEANRFYTVINKKSGEIVPMEVNFNFDDPNLIILPLAFGKRQGREFIWNDLLSLETGSLKLANGRVIEKTLYNRRTRQDEPALFVALTFERREVLDSSNIKPMNLIGVDRGENIPAVIALTDPEGCPLSRFKDSLGNPTHILRIGESYKEKQRTIQAKKEVEQRRAGGYSRKYASKAKNLADDMVRNTARDLLYYAVTQDAMLIFENLSRGFGRQGKRTFMAERQYTRMEDWLTAKLAYEGPLPSKTYLSKTLAQYTSKTCSNCGFTITSADYDRVLEKLKKTATGWMTTINGKELKVEGQITYYNRYKRQNVVKDLSVELDRLSEESVNNDISSWTKGRSGEALSLLKKRFSHRPVQEKFVCLNCGFETHADEQAALNIARSWLFLRSQEYKKYQTNKTTGNTDKRAFVETWQSFYRKKLKEVWKPAV

SEQ ID NO: 32106 - protein, 979 aa, synthetic construct
  REGION 1..979: note = engineered CasX variant
QEIGRINKIRRRLVKDSNTKKAGKTGPMKTLLVRVMTPDLRERLENLRKKPENIPQPISNTSRANLNKLLTDYTEMKKAILHVYWEEFQKDPVGLMSRVAQPASKKIDQNKLKPEMDEKGNLTTAGFACSQCGQPLFVYKLEQVSEKGKAYTNYFGRCNVAEHEKLILLAQLKPEKDSDEAVTYSLGKFGQRALDFYSIHVTKESTHPVKPLAQIAGNRYASTPVGKALSDACMGTIASFLSKYQDIIIEHQKVVKGNQKRLESLRELAGKENLEYPSVTLPPQPHTKEGVDAYNEVIARVRMWVNLNLWQKLKLSRDDAKPLLRLKGFPSFPLVERQANEVDWWDMVCNVKKLINEKKEDGKVFWQNLAGYKRQEALRPYLSSEEDRKKGKKFARYQLGDLLLHLEKKHGEDWGKVYDEAWERIDKKVEGLSKHIKLEEERRSEDAQSKAALTDWLRAKASFVIEGLKEADKDEFCRCELKLQKWYGDLRGKPFAIEAENSILDISGFSKQYNCAFIWQKDGVKKLNLYLIINYFKGGKLRFKKIKPEAFEANRFYTVINKKSGEIVPMEVNFNFDDPNLIILPLAFGKRQGREFIWNDLLSLETGSLKLANGRVIEKTLYNRRTRQDEPALFVALTFERREVLDSSNIKPMNLIGVDRGENIPAVIALTDPEGCPLSRFKDSLGNPTHILRIGESYKEKQRTIQAKKEVEQRRAGGYSRKYASKAKNLADDMVRNTARDLLYYAVTQDAMLIFENLSRGFGRQGKRTFMAERQYTRMEDWLTAKLAYEGPLPSKTYLSKTLAQYTSKTCSNCGFTITSADYDRVLEKLKKTATGWMTTINGKELKVEGQITYYNRYKRQNVVKDLSVELDRLSEESVNNDISSWTKGRSGEALSLLKKRFSHRPVQEKFVCLNCGFETHADEQAALNIARSWLFLRSQEYKKYQTNKTTGNTDKRAFVETWQSFYRKKLKEVWKPAV

SEQ ID NO: 32107 - protein, 979 aa, synthetic construct
  REGION 1..979: note = engineered CasX variant
QEIGRINKIRRRLVKDSNTKKAGKTGPMKTLLVRVMTPDLRERLENLRKKPENIPQPISNTSRANLNKLLTDYTEMKKAILHVYWEEFQKDPVGLMSRVAQPASKKIDQNKLKPEMDEKGNLTTAGFACSQCGQPLFVYKLEQVSEKGKAYTNYFGRCNVAEHEKLILLAQLKPEKDSDEAVTYSLGKFGQRALDFYSIHVTKESTHPVKPLAQIAGNRYASAPVGKALSDACMGTIASFLSKYQDIIIEHQKVVKGNQKRLESLRELAGKENLEYPSVTLPPQPHTKEGVDAYNEVIARVRMWVNLNLWQKLKLSRDDAKPLLRLKGFPSFPLVERQANEVDWWDMVCNVKKLINEKKEDGKVFWQNLAGYKRQEALRPYLSSEEDRKKGKKFARYQLGDLLLHLEKKHGEDWGKVYDEAWERIDKKVEGLSKHIKLEEERRSEDAQSKAALTDWLRAKASFVIEGLKEADKDEFCRCELKLQKWYGDLRGKPFAIEAENSILDISGFSKQYNCAFIWQKDGVKKLNLYLIINYFKGGKLRFKKIKPEAFEANRFYTVINKKSGEIVPMEVNFNFDDPNLIILPLAFGKRQGREFIWNDLLSLETGSLKLANGRVIEKTLYNRRTRQDEPALFVALTFERREVLDSSNIKPMNLIGVDRGENIPAVIALTDPEGCPLSRFKDSLGNPTHILRIGESYKEKQRTIQAKKEVEQRRAGGYSRKYASKAKNLADDMVRNTARDLLYYAVTQDAMLIFENLSRGFGRQGKRTFMAERQYTRMEDWLTAKLAYEGPLPSKTYLSKTLAQYTSKTCSNCGFTITSADYDRVLEKLKKTATGWMTTINGKELKVEGQITYYNRYKRQNVVKDLSVELDRLSEESVNNDISSWTKGRSGEALSLLKKRFSHRPVQEKFVCLNCGFETHADEQAALNIARSWLFLRSQEYKKYQTNKTTGNTDKRAFVETWQSFYRKKLKEVWKPAV

SEQ ID NO: 32108 - protein, 979 aa, synthetic construct
  REGION 1..979: note = engineered CasX variant
QEIGRINKIRRRLVKDSNTKKAGKTGPMKTLLVRVMTPDLRERLENLRKKPENIPQPISNTSRANLNKLLTDYTEMKKAILHVYWEEFQKDPVGLMSRVAQPASKKIDQNKLKPEMDEKGNLTTAGFACSQCGQPLFVYKLEQVSEKGKAYTNYFGRCNVAEHEKLILLAQLKPEKDSDEAVTYSLGKFGQRALDFYSIHVTKESTHPVKPLAQIAGNRYASVPVGKALSDACMGTIASFLSKYQDIIIEHQKVVKGNQKRLESLRELAGKENLEYPSVTLPPQPHTKEGVDAYNEVIARVRMWVNLNLWQKLKLSRDDAKPLLRLKGFPSFPLVERQANEVDWWDMVCNVKKLINEKKEDGKVFWQNLAGYKRQEALRPYLSSEEDRKKGKKFARYQLGDLLLHLEKKHGEDWGKVYDEAWERIDKKVEGLSKHIKLEEERRSEDAQSKAALTDWLRAKASFVIEGLKEADKDEFCRCELKLQKWYGDLRGKPFAIEAENSILDISGFSKQYNCAFIWQKDGVKKLNLYLIINYFKGGKLRFKKIKPEAFEANRFYTVINKKSGEIVPMEVNFNFDDPNLIILPLAFGKRQGREFIWNDLLSLETGSLKLANGRVIEKTLYNRRTRQDEPALFVALTFERREVLDSSNIKPMNLIGVDRGENIPAVIALTDPEGCPLSRFKDSLGNPTHILRIGESYKEKQRTIQAKKEVEQRRAGGYSRKYASKAKNLADDMVRNTARDLLYYAVTQDAMLIFENLSRGFGRQGKRTFMAERQYTRMEDWLTAKLAYEGPLPSKTYLSKTLAQYTSKTCSNCGFTITSADYDRVLEKLKKTATGWMTTINGKELKVEGQITYYNRYKRQNVVKDLSVELDRLSEESVNNDISSWTKGRSGEALSLLKKRFSHRPVQEKFVCLNCGFETHADEQAALNIARSWLFLRSQEYKKYQTNKTTGNTDKRAFVETWQSFYRKKLKEVWKPAV

SEQ ID NO: 32109 - protein, 979 aa, synthetic construct
  REGION 1..979: note = engineered CasX variant
QEIGRINKIRRRLVKDSNTKKAGKTGPMKTLLVRVMTPDLRERLENLRKKPENIPQPISNTSRANLNKLLTDYTEMKKAILHVYWEEFQKDPVGLMSRVAQPASKKIDQNKLKPEMDEKGNLTTAGFACSQCGQPLFVYKLEQVSEKGKAYTNYFGRCNVAEHEKLIKLAQLKPEKDSDEAVTYSLGKFGQRALDFYSIHVTKESTHPVKPLAQIAGNRYASGPVGKALSDACMGTIASFLSKYQDIIIEHQKVVKGNQKRLESLRELAGKENLEYPSVTLPPQPHTKEGVDAYNEVIARVRMWVNLNLWQKLKLSRDDAKPLLRLKGFPSFPLVERQANEVDWWDMVCNVKKLINEKKEDGKVFWQNLAGYKRQEALRPYLSSEEDRKKGKKFARYQLGDLLLHLEKKHGEDWGKVYDEAWERIDKKVEGLSKHIKLEEERRSEDAQSKAALTDWLRAKASFVIEGLKEADKDEFCRCELKLQKWYGDLRGKPFAIEAENSILDISGFSKQYNCAFIWQKDGVKKLNLYLIINYFKGGKLRFKKIKPEAFEANRFYTVINKKSGEIVPMEVNFNFDDPNLIILPLAFGKRQGREFIWNDLLSLETGSLKLANGRVIEKTLYNRRTRQDEPALFVALTFERREVLDSSNIKPMNLIGVDRGENIPAVIALTDPEGCPLSRFKDSLGNPTHILRIGESYKEKQRTIQAKKEVEQRRAGGYSRKYASKAKNLADDMVRNTARDLLYYAVTQDAMLIFENLSRGFGRQGKRTFMAERQYTRMEDWLTAKLAYEGPLPSKTYLSKTLAQYTSKTCSNCGFTITSADYDRVLEKLKKTATGWMTTINGKELKVEGQITYYNRYKRQNVVKDLSVELDRLSEESVNNDISSWTKGRSGEALSLLKKRFSHRPVQEKFVCLNCGFETHADEQAALNIARSWLFLRSQEYKKYQTNKTTGNTDKRAFVETWQSFYRKKLKEVWKPAV

SEQ ID NO: 32110 - protein, 978 aa, synthetic construct
  REGION 1..978: note = engineered CasX variant
QEIGRINKIRRRLVKDSNTKKAGKTGPMKTLLVRVMTPDLRERLENLRKKPENIPQPISNTSRANLNKLLTDYTEMKKAILHVYWEEFQKDPVGLMSRVAQPASKKIDQNKLKPEMDEKGNLTTAGFACSQCGQPLFVYKLEQVSEKGKAYTNYFGRCNVAEHEKLILLAQLKPEKDSDEAVTYSLGKFGQRALDFYSIHVTKESTHPVKPLAQIAGNRYASPVGKALSDACMGTIASFLSKYQDIIIEHQKVVKGNQKRLESLRELAGKENLEYPSVTLPPQPHTKEGVDAYNEVIARVRMWVNLNLWQKLKLSRDDAKPLLRLKGFPSFPLVERQANEVDWWDMVCNVKKLINEKKEDGKVFWQNLAGYKRQEALRPYLSSEEDRKKGKKFARYQLGDLLLHLEKKHGEDWGKVYDEAWERIDKKVEGLSKHIKLEEERRSEDAQSKAALTDWLRAKASFVIEGLKEADKDEFCRCELKLQKWYGDLRGKPFAIEAENSILDISGFSKQYNCAFIWQKDGVKKLNLYLIINYFKGGKLRFKKIKPEAFEANRFYTVINKKSGEIVPMEVNFNFDDPNLIILPLAFGKRQGREFIWNDLLSLETGSLKLANGRVIEKTLYNRRTRQDEPALFVALTFERREVLDSSNIKPMNLIGVDRGENIPAVIALTDPEGCPLSRFKDSLGNPTHILRIGESYKEKQRTIQAKKEVEQRRAGGYSRKYASKAKNLADDMVRNTARDLLYYAVTQDAMLIFENLSRGFGRQGKRTFMAERQYTRMEDWLTAKLAYEGPLPSKTYLSKTLAQYTSKTCSNCGFTITSADYDRVLEKLKKTATGWMTTINGKELKVEGQITYYNRYKRQNVVKDLSVELDRLSEESVNNDISSWTKGRSGEALSLLKKRFSHRPVQEKFVCLNCGFETHADEQAALNIARSWLFLRSQEYKKYQTNKTTGNTDKRAFVETWQSFYRKKLKEVWKPAV

SEQ ID NO: 32111 - protein, 979 aa, synthetic construct
  REGION 1..979: note = engineered CasX variant
QEIGRINKIRRRLVKDSNTKKAGKTGPMKTLLVRVMTPDLRERLENLRKKPENIPQPISNTSRANLNKLLTDYTEMKKAILHVYWEEFQKDPVGLMSRVAQPASKKIDQNKLKPEMDEKGNLTTAGFACSQCGQPLFVYKLEQVSEKGKAYTNYFGRCNVAEHEKLILLAQLKPEKDSDEAVTYSLGKFGQRALDFYSIHVTKESTHPVKPLAQIAGNRYASYPVGKALSDACMGTIASFLSKYQDIIIEHQKVVKGNQKRLESLRELAGKENLEYPSVTLPPQPHTKEGVDAYNEVIARVRMWVNLNLWQKLKLSRDDAKPLLRLKGFPSFPLVERQANEVDWWDMVCNVKKLINEKKEDGKVFWQNLAGYKRQEALRPYLSSEEDVRKKGKKFARYQLGDLLLHLEKKHGEDWGKVYDEAWERIDKKVEGLSKHIKLEEERRSEDAQSKAALTDWLRAKASFVIEGLKEADKDEFCRCELKLQKWYGDLRGKPFAIEAENSILDISGFSKQYNCAFIWQKDGVKKLNLYLIINYFKGGKLRFKKIKPEAFEANRFYTVINKKSGEIVPMEVNFNFDDPNLIILPLAFGKRQGREFIWNDLLSLETGSLKLANGRVIEKTLYNRRTRQDEPALFVALTFERREVLDSSNIKPMNLIGVDRGENIPAVIALTDPEGCPLSRFKDSLGNPTHILRIGESYKEKQRTIQAKKEVEQRRAGGYSRKYASKAKNLADDMVRNTARDLLYYAVTQDAMLIFENLSRGFGRQGKRTFMAERQYTRMEDWLTAKLAYEGLPSKTYLSKTLAQYTSKTCSNCGFTITSADYDRVLEKLKKTATGWMTTINGKELKVEGQITYYNRYKRQNVVKDLSVELDRLSEESVNNDISSWTKGRSGEALSLLKKRFSHRPVQEKFVCLNCGFETHADEQAALNIARSWLFLRSQEYKKYQTNKTTGNTDKRAFVETWQSFYRKKLKEVWKPAV

SEQ ID NO: 32112 - protein, 979 aa, synthetic construct
  REGION 1..979: note = engineered CasX variant
QEIGRINKIRRRLVKDSNTKKAGKTGPMKTLLVRVMTPDLRERLENLRKKPENIPQPISNTSRANLNKLLTDYTEMKKAILHVYWEEFQKDPVGLMSRVAQPASKKIDQNKLKPEMDEKGNLTTAGFACSQCGQPLFVYKLEQVSEKGKAYTNYFGRCNVAEHEKLILLAQLKPEKDSDEAVTYSLGKFGQRALDFYSIHVTKESTHPVKPLAQIAGNRYASHPVGKALSDACMGTIASFLSKYQDIIIEHQKVVKGNQKRLESLRELAGKENLEYPSVTLPPQPHTKEGVDAYNEVIARVRMWVNLNLWQKLKLSRDDAKPLLRLKGFPSFPLVERQANEVDWWDMVCNVKKLINEKKEDGKVFWQNLAGYKRQEALRPYLSSEEDVRKKGKKFARYQLGDLLLHLEKKHGEDWGKVYDEAWERIDKKVEGLSKHIKLEEERRSEDAQSKAALTDWLRAKASFVIEGLKEADKDEFCRCELKLQKWYGDLRGKPFAIEAENSILDISGFSKQYNCAFIWQKDGVKKLNLYLIINYFKGGKLRFKKIKPEAFEANRFYTVINKKSGEIVPMEVNFNFDDPNLIILPLAFGKRQGREFIWNDLLSLETGSLKLANGRVIEKTLYNRRTRQDEPALFVALTFERREVLDSSNIKPMNLIGVDRGENIPAVIALTDPEGCPLSRFKDSLGNPTHILRIGESYKEKQRTIQAKKEVEQRRAGGYSRKYASKAKNLADDMVRNTARDLLYYAVTQDAMLIFENLSRGFGRQGKRTFMAERQYTRMEDWLTAKLAYEGLPSKTYLSKTLAQYTSKTCSNCGFTITSADYDRVLEKLKKTATGWMTTINGKELKVEGQITYYNRYKRQNVVKDLSVELDRLSEESVNNDISSWTKGRSGEALSLLKKRFSHRPVQEKFVCLNCGFETHADEQAALNIARSWLFLRSQEYKKYQTNKTTGNTDKRAFVETWQSFYRKKLKEVWKPAV

SEQ ID NO: 32113 - protein, 979 aa, synthetic construct
  REGION 1..979: note = engineered CasX variant
QEIGRINKIRRRLVKDSNTKKAGKTGPMKTLLVRVMTPDLRERLENLRKKPENIPQPISNTSRANLNKLLTDYTEMKKAILHVYWEEFQKDPVGLMSRVAQPASKKIDQNKLKPEMDEKGNLTTAGFACSQCGQPLFVYKLEQVSEKGKAYTNYFGRCNVAEHEKLILLAQLKPEKDSDEAVTYSLGKFGQRALDFYSIHVTKESTHPVKPLAQIAGNRYASSPVGKALSDACMGTIASFLSKYQDIIIEHQKVVKGNQKRLESLRELAGKENLEYPSVTLPPQPHTKEGVDAYNEVIARVRMWVNLNLWQKLKLSRDDAKPLLRLKGFPSFPLVERQANEVDWWDMVCNVKKLINEKKEDGKVFWQNLAGYKRQEALRPYLSSEEDVRKKGKKFARYQLGDLLLHLEKKHGEDWGKVYDEAWERIDKKVEGLSKHIKLEEERRSEDAQSKAALTDWLRAKASFVIEGLKEADKDEFCRCELKLQKWYGDLRGKPFAIEAENSILDISGFSKQYNCAFIWQKDGVKKLNLYLIINYFKGGKLRFKKIKPEAFEANRFYTVINKKSGEIVPMEVNFNFDDPNLIILPLAFGKRQGREFIWNDLLSLETGSLKLANGRVIEKTLYNRRTRQDEPALFVALTFERREVLDSSNIKPMNLIGVDRGENIPAVIALTDPEGCPLSRFKDSLGNPTHILRIGESYKEKQRTIQAKKEVEQRRAGGYSRKYASKAKNLADDMVRNTARDLLYYAVTQDAMLIFENLSRGFGRQGKRTFMAERQYTRMEDWLTAKLAYEGLPSKTYLSKTLAQYTSKTCSNCGFTITSADYDRVLEKLKKTATGWMTTINGKELKVEGQITYYNRYKRQNVVKDLSVELDRLSEESVNNDISSWTKGRSGEALSLLKKRFSHRPVQEKFVCLNCGFETHADEQAALNIARSWLFLRSQEYKKYQTNKTTGNTDKRAFVETWQSFYRKKLKEVWKPAV

SEQ ID NO: 32114 - protein, 979 aa, synthetic construct
  REGION 1..979: note = engineered CasX variant
QEIGRINKIRRRLVKDSNTKKAGKTGPMKTLLVRVMTPDLRERLENLRKKPENIPQPISNTSRANLNKLLTDYTEMKKAILHVYWEEFQKDPVGLMSRVAQPASKKIDQNKLKPEMDEKGNLTTAGFACSQCGQPLFVYKLEQVSEKGKAYTNYFGRCNVAEHEKLILLAQLKPEKDSDEAVTYSLGKFGQRALDFYSIHVTKESTHPVKPLAQIAGNRYASTPVGKALSDACMGTIASFLSKYQDIIIEHQKVVKGNQKRLESLRELAGKENLEYPSVTLPPQPHTKEGVDAYNEVIARVRMWVNLNLWQKLKLSRDDAKPLLRLKGFPSFPLVERQANEVDWWDMVCNVKKLINEKKEDGKVFWQNLAGYKRQEALRPYLSSEEDVRKKGKKFARYQLGDLLLHLEKKHGEDWGKVYDEAWERIDKKVEGLSKHIKLEEERRSEDAQSKAALTDWLRAKASFVIEGLKEADKDEFCRCELKLQKWYGDLRGKPFAIEAENSILDISGFSKQYNCAFIWQKDGVKKLNLYLIINYFKGGKLRFKKIKPEAFEANRFYTVINKKSGEIVPMEVNFNFDDPNLIILPLAFGKRQGREFIWNDLLSLETGSLKLANGRVIEKTLYNRRTRQDEPALFVALTFERREVLDSSNIKPMNLIGVDRGENIPAVIALTDPEGCPLSRFKDSLGNPTHILRIGESYKEKQRTIQAKKEVEQRRAGGYSRKYASKAKNLADDMVRNTARDLLYYAVTQDAMLIFENLSRGFGRQGKRTFMAERQYTRMEDWLTAKLAYEGLPSKTYLSKTLAQYTSKTCSNCGFTITSADYDRVLEKLKKTATGWMTTINGKELKVEGQITYYNRYKRQNVVKDLSVELDRLSEESVNNDISSWTKGRSGEALSLLKKRFSHRPVQEKFVCLNCGFETHADEQAALNIARSWLFLRSQEYKKYQTNKTTGNTDKRAFVETWQSFYRKKLKEVWKPAV

SEQ ID NO: 32115 - protein, 979 aa, synthetic construct
  REGION 1..979: note = engineered CasX variant
QEIGRINKIRRRLVKDSNTKKAGKTGPMKTLLVRVMTPDLRERLENLRKKPENIPQPISNTSRANLNKLLTDYTEMKKAILHVYWEEFQKDPVGLMSRVAQPASKKIDQNKLKPEMDEKGNLTTAGFACSQCGQPLFVYKLEQVSEKGKAYTNYFGRCNVAEHEKLILLAQLKPEKDSDEAVTYSLGKFGQRALDFYSIHVTKESTHPVKPLAQIAGNRYASAPVGKALSDACMGTIASFLSKYQDIIIEHQKVVKGNQKRLESLRELAGKENLEYPSVTLPPQPHTKEGVDAYNEVIARVRMWVNLNLWQKLKLSRDDAKPLLRLKGFPSFPLVERQANEVDWWDMVCNVKKLINEKKEDGKVFWQNLAGYKRQEALRPYLSSEEDVRKKGKKFARYQLGDLLLHLEKKHGEDWGKVYDEAWERIDKKVEGLSKHIKLEEERRSEDAQSKAALTDWLRAKASFVIEGLKEADKDEFCRCELKLQKWYGDLRGKPFAIEAENSILDISGFSKQYNCAFIWQKDGVKKLNLYLIINYFKGGKLRFKKIKPEAFEANRFYTVINKKSGEIVPMEVNFNFDDPNLIILPLAFGKRQGREFIWNDLLSLETGSLKLANGRVIEKTLYNRRTRQDEPALFVALTFERREVLDSSNIKPMNLIGVDRGENIPAVIALTDPEGCPLSRFKDSLGNPTHILRIGESYKEKQRTIQAKKEVEQRRAGGYSRKYASKAKNLADDMVRNTARDLLYYAVTQDAMLIFENLSRGFGRQGKRTFMAERQYTRMEDWLTAKLAYEGLPSKTYLSKTLAQYTSKTCSNCGFTITSADYDRVLEKLKKTATGWMTTINGKELKVEGQITYYNRYKRQNVVKDLSVELDRLSEESVNNDISSWTKGRSGEALSLLKKRFSHRPVQEKFVCLNCGFETHADEQAALNIARSWLFLRSQEYKKYQTNKTTGNTDKRAFVETWQSFYRKKLKEVWKPAV

SEQ ID NO: 32116 - protein, 979 aa, synthetic construct
  REGION 1..979: note = engineered CasX variant
QEIGRINKIRRRLVKDSNTKKAGKTGPMKTLLVRVMTPDLRERLENLRKKPENIPQPISNTSRANLNKLLTDYTEMKKAILHVYWEEFQKDPVGLMSRVAQPASKKIDQNKLKPEMDEKGNLTTAGFACSQCGQPLFVYKLEQVSEKGKAYTNYFGRCNVAEHEKLILLAQLKPEKDSDEAVTYSLGKFGQRALDFYSIHVTKESTHPVKPLAQIAGNRYASVPVGKALSDACMGTIASFLSKYQDIIIEHQKVVKGNQKRLESLRELAGKENLEYPSVTLPPQPHTKEGVDAYNEVIARVRMWVNLNLWQKLKLSRDDAKPLLRLKGFPSFPLVERQANEVDWWDMVCNVKKLINEKKEDGKVFWQNLAGYKRQEALRPYLSSEEDVRKKGKKFARYQLGDLLLHLEKKHGEDWGKVYDEAWERIDKKVEGLSKHIKLEEERRSEDAQSKAALTDWLRAKASFVIEGLKEADKDEFCRCELKLQKWYGDLRGKPFAIEAENSILDISGFSKQYNCAFIWQKDGVKKLNLYLIINYFKGGKLRFKKIKPEAFEANRFYTVINKKSGEIVPMEVNFNFDDPNLIILPLAFGKRQGREFIWNDLLSLETGSLKLANGRVIEKTLYNRRTRQDEPALFVALTFERREVLDSSNIKPMNLIGVDRGENIPAVIALTDPEGCPLSRFKDSLGNPTHILRIGESYKEKQRTIQAKKEVEQRRAGGYSRKYASKAKNLADDMVRNTARDLLYYAVTQDAMLIFENLSRGFGRQGKRTFMAERQYTRMEDWLTAKLAYEGLPSKTYLSKTLAQYTSKTCSNCGFTITSADYDRVLEKLKKTATGWMTTINGKELKVEGQITYYNRYKRQNVVKDLSVELDRLSEESVNNDISSWTKGRSGEALSLLKKRFSHRPVQEKFVCLNCGFETHADEQAALNIARSWLFLRSQEYKKYQTNKTTGNTDKRAFVETWQSFYRKKLKEVWKPAV

SEQ ID NO: 32117 - protein, 979 aa, synthetic construct
  REGION 1..979: note = engineered CasX variant
QEIGRINKIRRRLVKDSNTKKAGKTGPMKTLLVRVMTPDLRERLENLRKKPENIPQPISNTSRANLNKLLTDYTEMKKAILHVYWEEFQKDPVGLMSRVAQPASKKIDQNKLKPEMDEKGNLTTAGFACSQCGQPLFVYKLEQVSEKGKAYTNYFGRCNVAEHEKLIKLAQLKPEKDSDEAVTYSLGKFGQRALDFYSIHVTKESTHPVKPLAQIAGNRYASGPVGKALSDACMGTIASFLSKYQDIIIEHQKVVKGNQKRLESLRELAGKENLEYPSVTLPPQPHTKEGVDAYNEVIARVRMWVNLNLWQKLKLSRDDAKPLLRLKGFPSFPLVERQANEVDWWDMVCNVKKLINEKKEDGKVFWQNLAGYKRQEALRPYLSSEEDVRKKGKKFARYQLGDLLLHLEKKHGEDWGKVYDEAWERIDKKVEGLSKHIKLEEERRSEDAQSKAALTDWLRAKASFVIEGLKEADKDEFCRCELKLQKWYGDLRGKPFAIEAENSILDISGFSKQYNCAFIWQKDGVKKLNLYLIINYFKGGKLRFKKIKPEAFEANRFYTVINKKSGEIVPMEVNFNFDDPNLIILPLAFGKRQGREFIWNDLLSLETGSLKLANGRVIEKTLYNRRTRQDEPALFVALTFERREVLDSSNIKPMNLIGVDRGENIPAVIALTDPEGCPLSRFKDSLGNPTHILRIGESYKEKQRTIQAKKEVEQRRAGGYSRKYASKAKNLADDMVRNTARDLLYYAVTQDAMLIFENLSRGFGRQGKRTFMAERQYTRMEDWLTAKLAYEGLPSKTYLSKTLAQYTSKTCSNCGFTITSADYDRVLEKLKKTATGWMTTINGKELKVEGQITYYNRYKRQNVVKDLSVELDRLSEESVNNDISSWTKGRSGEALSLLKKRFSHRPVQEKFVCLNCGFETHADEQAALNIARSWLFLRSQEYKKYQTNKTTGNTDKRAFVETWQSFYRKKLKEVWKPAV

SEQ ID NO: 32118 - protein, 978 aa, synthetic construct
  REGION 1..978: note = engineered CasX variant
QEIGRINKIRRRLVKDSNTKKAGKTGPMKTLLVRVMTPDLRERLENLRKKPENIPQPISNTSRANLNKLLTDYTEMKKAILHVYWEEFQKDPVGLMSRVAQPASKKIDQNKLKPEMDEKGNLTTAGFACSQCGQPLFVYKLEQVSEKGKAYTNYFGRCNVAEHEKLILLAQLKPEKDSDEAVTYSLGKFGQRALDFYSIHVTKESTHPVKPLAQIAGNRYASPVGKALSDACMGTIASFLSKYQDIIIEHQKVVKGNQKRLESLRELAGKENLEYPSVTLPPQPHTKEGVDAYNEVIARVRMWVNLNLWQKLKLSRDDAKPLLRLKGFPSFPLVERQANEVDWWDMVCNVKKLINEKKEDGKVFWQNLAGYKRQEALRPYLSSEEDVRKKGKKFARYQLGDLLLHLEKKHGEDWGKVYDEAWERIDKKVEGLSKHIKLEEERRSEDAQSKAALTDWLRAKASFVIEGLKEADKDEFCRCELKLQKWYGDLRGKPFAIEAENSILDISGFSKQYNCAFIWQKDGVKKLNLYLIINYFKGGKLRFKKIKPEAFEANRFYTVINKKSGEIVPMEVNFNFDDPNLIILPLAFGKRQGREFIWNDLLSLETGSLKLANGRVIEKTLYNRRTRQDEPALFVALTFERREVLDSSNIKPMNLIGVDRGENIPAVIALTDPEGCPLSRFKDSLGNPTHILRIGESYKEKQRTIQAKKEVEQRRAGGYSRKYASKAKNLADDMVRNTARDLLYYAVTQDAMLIFENLSRGFGRQGKRTFMAERQYTRMEDWLTAKLAYEGLPSKTYLSKTLAQYTSKTCSNCGFTITSADYDRVLEKLKKTATGWMTTINGKELKVEGQITYYNRYKRQNVVKDLSVELDRLSEESVNNDISSWTKGRSGEALSLLKKRFSHRPVQEKFVCLNCGFETHADEQAALNIARSWLFLRSQEYKKYQTNKTTGNTDKRAFVETWQSFYRKKLKEVWKPAV

SEQ ID NO: 32119 - protein, 978 aa, synthetic construct
  REGION 1..978: note = engineered CasX variant
QEIGRINKIRRRLVKDSNTKKAGKTGPMKTLLVRVMTPDLRERLENLRKKPENIPQPISNTSRANLNKLLTDYTEMKKAILHVYWEEFQKDPVGLMSRVAQPASKKIDQNKLKPEMDEKGNLTTAGFACSQCGQPLFVYKLEQVSEKGKAYTNYFGRCNVAEHEKLILLAQLKPEKDSDEAVTYSLGKFGQRALDFYSIHVTKESTHPVKPLAQIAGNRYASYPVGKALSDACMGTIASFLSKYQDIIIEHQKVVKGNQKRLESLRELAGKENLEYPSVTLPPQPHTKEGVDAYNEVIARVRMWVNLNLWQKLKLSRDDAKPLLRLKGFPSFPLVERQANEVDWWDMVCNVKKLINEKKEDGKVFWQNLAGYKRQEALRPYLSSEEDRKKGKKFARYQLGDLLLHLEKKHGEDWGKVYDEAWERIDKKVEGLSKHIKLEEERRSEDAQSKAALTDWLRAKASFVIEGLKEADKDEFCRCELKLQKWYGDLRGKPFAIEAENSILDISGFSKQYNCAFIWQKDGVKKLNLYLIINYFKGGKLRFKKIKPEAFEANRFYTVINKKSGEIVPMEVNFNFDDPNLIILPLAFGKRQGREFIWNDLLSLETGSLKLANGRVIEKTLYNRRTRQDEPALFVALTFERREVLDSSNIKPMNLIGVDRGENIPAVIALTDPEGCPLSRFKDSLGNPTHILRIGESYKEKQRTIQAKKEVEQRRAGGYSRKYASKAKNLADDMVRNTARDLLYYAVTQDAMLIFENLSRGFGRQGKRTFMAERQYTRMEDWLTAKLAYEGLPSKTYLSKTLAQYTSKTCSNCGFTITSADYDRMLEKLKKTATGWMTTINGKELKVEGQITYYNRYKRQNVVKDLSVELDRLSEESVNNDISSWTKGRSGEALSLLKKRFSHRPVQEKFVCLNCGFETHADEQAALNIARSWLFLRSQEYKKYQTNKTTGNTDKRAFVETWQSFYRKKLKEVWKPAV

SEQ ID NO: 32120 - protein, 978 aa, synthetic construct
  REGION 1..978: note = engineered CasX variant
QEIGRINKIRRRLVKDSNTKKAGKTGPMKTLLVRVMTPDLRERLENLRKKPENIPQPISNTSRANLNKLLTDYTEMKKAILHVYWEEFQKDPVGLMSRVAQPASKKIDQNKLKPEMDEKGNLTTAGFACSQCGQPLFVYKLEQVSEKGKAYTNYFGRCNVAEHEKLILLAQLKPEKDSDEAVTYSLGKFGQRALDFYSIHVTKESTHPVKPLAQIAGNRYASHPVGKALSDACMGTIASFLSKYQDIIIEHQKVVKGNQKRLESLRELAGKENLEYPSVTLPPQPHTKEGVDAYNEVIARVRMWVNLNLWQKLKLSRDDAKPLLRLKGFPSFPLVERQANEVDWWDMVCNVKKLINEKKEDGKVFWQNLAGYKRQEALRPYLSSEEDRKKGKKFARYQLGDLLLHLEKKHGEDWGKVYDEAWERIDKKVEGLSKHIKLEEERRSEDAQSKAALTDWLRAKASFVIEGLKEADKDEFCRCELKLQKWYGDLRGKPFAIEAENSILDISGFSKQYNCAFIWQKDGVKKLNLYLIINYFKGGKLRFKKIKPEAFEANRFYTVINKKSGEIVPMEVNFNFDDPNLIILPLAFGKRQGREFIWNDLLSLETGSLKLANGRVIEKTLYNRRTRQDEPALFVALTFERREVLDSSNIKPMNLIGVDRGENIPAVIALTDPEGCPLSRFKDSLGNPTHILRIGESYKEKQRTIQAKKEVEQRRAGGYSRKYASKAKNLADDMVRNTARDLLYYAVTQDAMLIFENLSRGFGRQGKRTFMAERQYTRMEDWLTAKLAYEGLPSKTYLSKTLAQYTSKTCSNCGFTITSADYDRMLEKLKKTATGWMTTINGKELKVEGQITYYNRYKRQNVVKDLSVELDRLSEESVNNDISSWTKGRSGEALSLLKKRFSHRPVQEKFVCLNCGFETHADEQAALNIARSWLFLRSQEYKKYQTNKTTGNTDKRAFVETWQSFYRKKLKEVWKPAV

SEQ ID NO: 32121 - protein, 978 aa, synthetic construct
  REGION 1..978: note = engineered CasX variant
QEIGRINKIRRRLVKDSNTKKAGKTGPMKTLLVRVMTPDLRERLENLRKKPENIPQPISNTSRANLNKLLTDYTEMKKAILHVYWEEFQKDPVGLMSRVAQPASKKIDQNKLKPEMDEKGNLTTAGFACSQCGQPLFVYKLEQVSEKGKAYTNYFGRCNVAEHEKLILLAQLKPEKDSDEAVTYSLGKFGQRALDFYSIHVTKESTHPVKPLAQIAGNRYASSPVGKALSDACMGTIASFLSKYQDIIIEHQKVVKGNQKRLESLRELAGKENLEYPSVTLPPQPHTKEGVDAYNEVIARVRMWVNLNLWQKLKLSRDDAKPLLRLKGFPSFPLVERQANEVDWWDMVCNVKKLINEKKEDGKVFWQNLAGYKRQEALRPYLSSEEDRKKGKKFARYQLGDLLLHLEKKHGEDWGKVYDEAWERIDKKVEGLSKHIKLEEERRSEDAQSKAALTDWLRAKASFVIEGLKEADKDEFCRCELKLQKWYGDLRGKPFAIEAENSILDISGFSKQYNCAFIWQKDGVKKLNLYLIINYFKGGKLRFKKIKPEAFEANRFYTVINKKSGEIVPMEVNFNFDDPNLIILPLAFGKRQGREFIWNDLLSLETGSLKLANGRVIEKTLYNRRTRQDEPALFVALTFERREVLDSSNIKPMNLIGVDRGENIPAVIALTDPEGCPLSRFKDSLGNPTHILRIGESYKEKQRTIQAKKEVEQRRAGGYSRKYASKAKNLADDMVRNTARDLLYYAVTQDAMLIFENLSRGFGRQGKRTFMAERQYTRMEDWLTAKLAYEGLPSKTYLSKTLAQYTSKTCSNCGFTITSADYDRMLEKLKKTATGWMTTINGKELKVEGQITYYNRYKRQNVVKDLSVELDRLSEESVNNDISSWTKGRSGEALSLLKKRFSHRPVQEKFVCLNCGFETHADEQAALNIARSWLFLRSQEYKKYQTNKTTGNTDKRAFVETWQSFYRKKLKEVWKPAV

SEQ ID NO: 32122 - protein, 978 aa, synthetic construct
  REGION 1..978: note = engineered CasX variant
QEIGRINKIRRRLVKDSNTKKAGKTGPMKTLLVRVMTPDLRERLENLRKKPENIPQPISNTSRANLNKLLTDYTEMKKAILHVYWEEFQKDPVGLMSRVAQPASKKIDQNKLKPEMDEKGNLTTAGFACSQCGQPLFVYKLEQVSEKGKAYTNYFGRCNVAEHEKLILLAQLKPEKDSDEAVTYSLGKFGQRALDFYSIHVTKESTHPVKPLAQIAGNRYASTPVGKALSDACMGTIASFLSKYQDIIIEHQKVVKGNQKRLESLRELAGKENLEYPSVTLPPQPHTKEGVDAYNEVIARVRMWVNLNLWQKLKLSRDDAKPLLRLKGFPSFPLVERQANEVDWWDMVCNVKKLINEKKEDGKVFWQNLAGYKRQEALRPYLSSEEDRKKGKKFARYQLGDLLLHLEKKHGEDWGKVYDEAWERIDKKVEGLSKHIKLEEERRSEDAQSKAALTDWLRAKASFVIEGLKEADKDEFCRCELKLQKWYGDLRGKPFAIEAENSILDISGFSKQYNCAFIWQKDGVKKLNLYLIINYFKGGKLRFKKIKPEAFEANRFYTVINKKSGEIVPMEVNFNFDDPNLIILPLAFGKRQGREFIWNDLLSLETGSLKLANGRVIEKTLYNRRTRQDEPALFVALTFERREVLDSSNIKPMNLIGVDRGENIPAVIALTDPEGCPLSRFKDSLGNPTHILRIGESYKEKQRTIQAKKEVEQRRAGGYSRKYASKAKNLADDMVRNTARDLLYYAVTQDAMLIFENLSRGFGRQGKRTFMAERQYTRMEDWLTAKLAYEGLPSKTYLSKTLAQYTSKTCSNCGFTITSADYDRMLEKLKKTATGWMTTINGKELKVEGQITYYNRYKRQNVVKDLSVELDRLSEESVNNDISSWTKGRSGEALSLLKKRFSHRPVQEKFVCLNCGFETHADEQAALNIARSWLFLRSQEYKKYQTNKTTGNTDKRAFVETWQSFYRKKLKEVWKPAV

SEQ ID NO: 32123 - protein, 978 aa, synthetic construct
  REGION 1..978: note = engineered CasX variant
QEIGRINKIRRRLVKDSNTKKAGKTGPMKTLLVRVMTPDLRERLENLRKKPENIPQPISNTSRANLNKLLTDYTEMKKAILHVYWEEFQKDPVGLMSRVAQPASKKIDQNKLKPEMDEKGNLTTAGFACSQCGQPLFVYKLEQVSEKGKAYTNYFGRCNVAEHEKLILLAQLKPEKDSDEAVTYSLGKFGQRALDFYSIHVTKESTHPVKPLAQIAGNRYASAPVGKALSDACMGTIASFLSKYQDIIIEHQKVVKGNQKRLESLRELAGKENLEYPSVTLPPQPHTKEGVDAYNEVIARVRMWVNLNLWQKLKLSRDDAKPLLRLKGFPSFPLVERQANEVDWWDMVCNVKKLINEKKEDGKVFWQNLAGYKRQEALRPYLSSEEDRKKGKKFARYQLGDLLLHLEKKHGEDWGKVYDEAWERIDKKVEGLSKHIKLEEERRSEDAQSKAALTDWLRAKASFVIEGLKEADKDEFCRCELKLQKWYGDLRGKPFAIEAENSILDISGFSKQYNCAFIWQKDGVKKLNLYLIINYFKGGKLRFKKIKPEAFEANRFYTVINKKSGEIVPMEVNFNFDDPNLIILPLAFGKRQGREFIWNDLLSLETGSLKLANGRVIEKTLYNRRTRQDEPALFVALTFERREVLDSSNIKPMNLIGVDRGENIPAVIALTDPEGCPLSRFKDSLGNPTHILRIGESYKEKQRTIQAKKEVEQRRAGGYSRKYASKAKNLADDMVRNTARDLLYYAVTQDAMLIFENLSRGFGRQGKRTFMAERQYTRMEDWLTAKLAYEGLPSKTYLSKTLAQYTSKTCSNCGFTITSADYDRMLEKLKKTATGWMTTINGKELKVEGQITYYNRYKRQNVVKDLSVELDRLSEESVNNDISSWTKGRSGEALSLLKKRFSHRPVQEKFVCLNCGFETHADEQAALNIARSWLFLRSQEYKKYQTNKTTGNTDKRAFVETWQSFYRKKLKEVWKPAV

SEQ ID NO: 32124 - protein, 978 aa, synthetic construct
  REGION 1..978: note = engineered CasX variant
QEIGRINKIRRRLVKDSNTKKAGKTGPMKTLLVRVMTPDLRERLENLRKKPENIPQPISNTSRANLNKLLTDYTEMKKAILHVYWEEFQKDPVGLMSRVAQPASKKIDQNKLKPEMDEKGNLTTAGFACSQCGQPLFVYKLEQVSEKGKAYTNYFGRCNVAEHEKLILLAQLKPEKDSDEAVTYSLGKFGQRALDFYSIHVTKESTHPVKPLAQIAGNRYASVPVGKALSDACMGTIASFLSKYQDIIIEHQKVVKGNQKRLESLRELAGKENLEYPSVTLPPQPHTKEGVDAYNEVIARVRMWVNLNLWQKLKLSRDDAKPLLRLKGFPSFPLVERQANEVDWWDMVCNVKKLINEKKEDGKVFWQNLAGYKRQEALRPYLSSEEDRKKGKKFARYQLGDLLLHLEKKHGEDWGKVYDEAWERIDKKVEGLSKHIKLEEERRSEDAQSKAALTDWLRAKASFVIEGLKEADKDEFCRCELKLQKWYGDLRGKPFAIEAENSILDISGFSKQYNCAFIWQKDGVKKLNLYLIINYFKGGKLRFKKIKPEAFEANRFYTVINKKSGEIVPMEVNFNFDDPNLIILPLAFGKRQGREFIWNDLLSLETGSLKLANGRVIEKTLYNRRTRQDEPALFVALTFERREVLDSSNIKPMNLIGVDRGENIPAVIALTDPEGCPLSRFKDSLGNPTHILRIGESYKEKQRTIQAKKEVEQRRAGGYSRKYASKAKNLADDMVRNTARDLLYYAVTQDAMLIFENLSRGFGRQGKRTFMAERQYTRMEDWLTAKLAYEGLPSKTYLSKTLAQYTSKTCSNCGFTITSADYDRMLEKLKKTATGWMTTINGKELKVEGQITYYNRYKRQNVVKDLSVELDRLSEESVNNDISSWTKGRSGEALSLLKKRFSHRPVQEKFVCLNCGFETHADEQAALNIARSWLFLRSQEYKKYQTNKTTGNTDKRAFVETWQSFYRKKLKEVWKPAV

SEQ ID NO: 32125 - protein, 978 aa, synthetic construct
  REGION 1..978: note = engineered CasX variant
QEIGRINKIRRRLVKDSNTKKAGKTGPMKTLLVRVMTPDLRERLENLRKKPENIPQPISNTSRANLNKLLTDYTEMKKAILHVYWEEFQKDPVGLMSRVAQPASKKIDQNKLKPEMDEKGNLTTAGFACSQCGQPLFVYKLEQVSEKGKAYTNYFGRCNVAEHEKLIKLAQLKPEKDSDEAVTYSLGKFGQRALDFYSIHVTKESTHPVKPLAQIAGNRYASGPVGKALSDACMGTIASFLSKYQDIIIEHQKVVKGNQKRLESLRELAGKENLEYPSVTLPPQPHTKEGVDAYNEVIARVRMWVNLNLWQKLKLSRDDAKPLLRLKGFPSFPLVERQANEVDWWDMVCNVKKLINEKKEDGKVFWQNLAGYKRQEALRPYLSSEEDRKKGKKFARYQLGDLLLHLEKKHGEDWGKVYDEAWERIDKKVEGLSKHIKLEEERRSEDAQSKAALTDWLRAKASFVIEGLKEADKDEFCRCELKLQKWYGDLRGKPFAIEAENSILDISGFSKQYNCAFIWQKDGVKKLNLYLIINYFKGGKLRFKKIKPEAFEANRFYTVINKKSGEIVPMEVNFNFDDPNLIILPLAFGKRQGREFIWNDLLSLETGSLKLANGRVIEKTLYNRRTRQDEPALFVALTFERREVLDSSNIKPMNLIGVDRGENIPAVIALTDPEGCPLSRFKDSLGNPTHILRIGESYKEKQRTIQAKKEVEQRRAGGYSRKYASKAKNLADDMVRNTARDLLYYAVTQDAMLIFENLSRGFGRQGKRTFMAERQYTRMEDWLTAKLAYEGLPSKTYLSKTLAQYTSKTCSNCGFTITSADYDRMLEKLKKTATGWMTTINGKELKVEGQITYYNRYKRQNVVKDLSVELDRLSEESVNNDISSWTKGRSGEALSLLKKRFSHRPVQEKFVCLNCGFETHADEQAALNIARSWLFLRSQEYKKYQTNKTTGNTDKRAFVETWQSFYRKKLKEVWKPAV

SEQ ID NO: 32126 - protein, 977 aa, synthetic construct
  REGION 1..977: note = engineered CasX variant
QEIGRINKIRRRLVKDSNTKKAGKTGPMKTLLVRVMTPDLRERLENLRKKPENIPQPISNTSRANLNKLLTDYTEMKKAILHVYWEEFQKDPVGLMSRVAQPASKKIDQNKLKPEMDEKGNLTTAGFACSQCGQPLFVYKLEQVSEKGKAYTNYFGRCNVAEHEKLILLAQLKPEKDSDEAVTYSLGKFGQRALDFYSIHVTKESTHPVKPLAQIAGNRYASPVGKALSDACMGTIASFLSKYQDIIIEHQKVVKGNQKRLESLRELAGKENLEYPSVTLPPQPHTKEGVDAYNEVIARVRMWVNLNLWQKLKLSRDDAKPLLRLKGFPSFPLVERQANEVDWWDMVCNVKKLINEKKEDGKVFWQNLAGYKRQEALRPYLSSEEDRKKGKKFARYQLGDLLLHLEKKHGEDWGKVYDEAWERIDKKVEGLSKHIKLEEERRSEDAQSKAALTDWLRAKASFVIEGLKEADKDEFCRCELKLQKWYGDLRGKPFAIEAENSILDISGFSKQYNCAFIWQKDGVKKLNLYLIINYFKGGKLRFKKIKPEAFEANRFYTVINKKSGEIVPMEVNFNFDDPNLIILPLAFGKRQGREFIWNDLLSLETGSLKLANGRVIEKTLYNRRTRQDEPALFVALTFERREVLDSSNIKPMNLIGVDRGENIPAVIALTDPEGCPLSRFKDSLGNPTHILRIGESYKEKQRTIQAKKEVEQRRAGGYSRKYASKAKNLADDMVRNTARDLLYYAVTQDAMLIFENLSRGFGRQGKRTFMAERQYTRMEDWLTAKLAYEGLPSKTYLSKTLAQYTSKTCSNCGFTITSADYDRMLEKLKKTATGWMTTINGKELKVEGQITYYNRYKRQNVVKDLSVELDRLSEESVNNDISSWTKGRSGEALSLLKKRFSHRPVQEKFVCLNCGFETHADEQAALNIARSWLFLRSQEYKKYQTNKTTGNTDKRAFVETWQSFYRKKLKEVWKPAV

SEQ ID NO: 32127 - protein, 978 aa, synthetic construct
  REGION 1..978: note = engineered CasX variant
QEIGRINKIRRRLVKDSNTKKAGKTGPMKTLLVRVMTPDLRERLENLRKKPENIPQPISNTSRANLNKLLTDYTEMKKAILHVYWEEFQKDPVGLMSRVAQPASKKIDQNKLKPEMDEKGNLTTAGFACSQCGQPLFVYKLEQVSEKGKAYTNYFGRCNVAEHEKLILLAQLKPEKDSDEAVTYSLGKFGQRALDFYSIHVTKESTHPVKPLAQIAGNRYASYPVGKALSDACMGTIASFLSKYQDIIIEHQKVVKGNQKRLESLRELAGKENLEYPSVTLPPQPHTKEGVDAYNEVIARVRMWVNLNLWQKLKLSRDDAKPLLRLKGFPSFPLVERQANEVDWWDMVCNVKKLINEKKEDGKVFWQNLAGYKRQEALRPYLSSEEDRKKGKKFARYQLGDLLLHLEKKHGEDWGKVYDEAWERIDKKVEGLSKHIKLEEERRSEDAQSKAALTDWLRAKASFVIEGLKEADKDEFCRCELKLQKWYGDLRGKPFAIEAENSILDISGFSKQYNCAFIWQKDGVKKLNLYLIINYFKGGKLRFKKIKPEAFEANRFYTVINKKSGEIVPMEVNFNFDDPNLIILPLAFGKRQGREFIWNDLLSLETGSLKLANGRVIEKTLYNRRTRQDEPALFVALTFERREVLDSSNIKPMNLIGVDRGENIPAVIALTDPEGCPLSRFKDSLGNPTHILRIGESYKEKQRTIQAKKEVEQRRAGGYSRKYASKAKNLADDMVRNTARDLLYYAVTQDAMLIFENLSRGFGRQGKRTFMAERQYTRMEDWLTAKLAYEGLPSKTYLSKTLAQYTSKTCSNCGFTITSADYDRVLEKLKKTATGWMTTINGKELKVEGQITYYNRYKRQNVVKDLSVELDRLSEESVNNDISSWTKGRQGEALSLLKKRFSHRPVQEKFVCLNCGFETHADEQAALNIARSWLFLRSQEYKKYQTNKTTGNTDKRAFVETWQSFYRKKLKEVWKPAV

SEQ ID NO: 32128 - protein, 978 aa, synthetic construct
  REGION 1..978: note = engineered CasX variant
QEIGRINKIRRRLVKDSNTKKAGKTGPMKTLLVRVMTPDLRERLENLRKKPENIPQPISNTSRANLNKLLTDYTEMKKAILHVYWEEFQKDPVGLMSRVAQPASKKIDQNKLKPEMDEKGNLTTAGFACSQCGQPLFVYKLEQVSEKGKAYTNYFGRCNVAEHEKLILLAQLKPEKDSDEAVTYSLGKFGQRALDFYSIHVTKESTHPVKPLAQIAGNRYASHPVGKALSDACMGTIASFLSKYQDIIIEHQKVVKGNQKRLESLRELAGKENLEYPSVTLPPQPHTKEGVDAYNEVIARVRMWVNLNLWQKLKLSRDDAKPLLRLKGFPSFPLVERQANEVDWWDMVCNVKKLINEKKEDGKVFWQNLAGYKRQEALRPYLSSEEDRKKGKKFARYQLGDLLLHLEKKHGEDWGKVYDEAWERIDKKVEGLSKHIKLEEERRSEDAQSKAALTDWLRAKASFVIEGLKEADKDEFCRCELKLQKWYGDLRGKPFAIEAENSILDISGFSKQYNCAFIWQKDGVKKLNLYLIINYFKGGKLRFKKIKPEAFEANRFYTVINKKSGEIVPMEVNFNFDDPNLIILPLAFGKRQGREFIWNDLLSLETGSLKLANGRVIEKTLYNRRTRQDEPALFVALTFERREVLDSSNIKPMNLIGVDRGENIPAVIALTDPEGCPLSRFKDSLGNPTHILRIGESYKEKQRTIQAKKEVEQRRAGGYSRKYASKAKNLADDMVRNTARDLLYYAVTQDAMLIFENLSRGFGRQGKRTFMAERQYTRMEDWLTAKLAYEGLPSKTYLSKTLAQYTSKTCSNCGFTITSADYDRVLEKLKKTATGWMTTINGKELKVEGQITYYNRYKRQNVVKDLSVELDRLSEESVNNDISSWTKGRQGEALSLLKKRFSHRPVQEKFVCLNCGFETHADEQAALNIARSWLFLRSQEYKKYQTNKTTGNTDKRAFVETWQSFYRKKLKEVWKPAV

SEQ ID NO: 32129 - protein, 978 aa, synthetic construct
  REGION 1..978: note = engineered CasX variant
QEIGRINKIRRRLVKDSNTKKAGKTGPMKTLLVRVMTPDLRERLENLRKKPENIPQPISNTSRANLNKLLTDYTEMKKAILHVYWEEFQKDPVGLMSRVAQPASKKIDQNKLKPEMDEKGNLTTAGFACSQCGQPLFVYKLEQVSEKGKAYTNYFGRCNVAEHEKLILLAQLKPEKDSDEAVTYSLGKFGQRALDFYSIHVTKESTHPVKPLAQIAGNRYASSPVGKALSDACMGTIASFLSKYQDIIIEHQKVVKGNQKRLESLRELAGKENLEYPSVTLPPQPHTKEGVDAYNEVIARVRMWVNLNLWQKLKLSRDDAKPLLRLKGFPSFPLVERQANEVDWWDMVCNVKKLINEKKEDGKVFWQNLAGYKRQEALRPYLSSEEDRKKGKKFARYQLGDLLLHLEKKHGEDWGKVYDEAWERIDKKVEGLSKHIKLEEERRSEDAQSKAALTDWLRAKASFVIEGLKEADKDEFCRCELKLQKWYGDLRGKPFAIEAENSILDISGFSKQYNCAFIWQKDGVKKLNLYLIINYFKGGKLRFKKIKPEAFEANRFYTVINKKSGEIVPMEVNFNFDDPNLIILPLAFGKRQGREFIWNDLLSLETGSLKLANGRVIEKTLYNRRTRQDEPALFVALTFERREVLDSSNIKPMNLIGVDRGENIPAVIALTDPEGCPLSRFKDSLGNPTHILRIGESYKEKQRTIQAKKEVEQRRAGGYSRKYASKAKNLADDMVRNTARDLLYYAVTQDAMLIFENLSRGFGRQGKRTFMAERQYTRMEDWLTAKLAYEGLPSKTYLSKTLAQYTSKTCSNCGFTITSADYDRVLEKLKKTATGWMTTINGKELKVEGQITYYNRYKRQNVVKDLSVELDRLSEESVNNDISSWTKGRQGEALSLLKKRFSHRPVQEKFVCLNCGFETHADEQAALNIARSWLFLRSQEYKKYQTNKTTGNTDKRAFVETWQSFYRKKLKEVWKPAV

SEQ ID NO: 32130 - protein, 978 aa, synthetic construct
  REGION 1..978: note = engineered CasX variant
QEIGRINKIRRRLVKDSNTKKAGKTGPMKTLLVRVMTPDLRERLENLRKKPENIPQPISNTSRANLNKLLTDYTEMKKAILHVYWEEFQKDPVGLMSRVAQPASKKIDQNKLKPEMDEKGNLTTAGFACSQCGQPLFVYKLEQVSEKGKAYTNYFGRCNVAEHEKLILLAQLKPEKDSDEAVTYSLGKFGQRALDFYSIHVTKESTHPVKPLAQIAGNRYASTPVGKALSDACMGTIASFLSKYQDIIIEHQKVVKGNQKRLESLRELAGKENLEYPSVTLPPQPHTKEGVDAYNEVIARVRMWVNLNLWQKLKLSRDDAKPLLRLKGFPSFPLVERQANEVDWWDMVCNVKKLINEKKEDGKVFWQNLAGYKRQEALRPYLSSEEDRKKGKKFARYQLGDLLLHLEKKHGEDWGKVYDEAWERIDKKVEGLSKHIKLEEERRSEDAQSKAALTDWLRAKASFVIEGLKEADKDEFCRCELKLQKWYGDLRGKPFAIEAENSILDISGFSKQYNCAFIWQKDGVKKLNLYLIINYFKGGKLRFKKIKPEAFEANRFYTVINKKSGEIVPMEVNFNFDDPNLIILPLAFGKRQGREFIWNDLLSLETGSLKLANGRVIEKTLYNRRTRQDEPALFVALTFERREVLDSSNIKPMNLIGVDRGENIPAVIALTDPEGCPLSRFKDSLGNPTHILRIGESYKEKQRTIQAKKEVEQRRAGGYSRKYASKAKNLADDMVRNTARDLLYYAVTQDAMLIFENLSRGFGRQGKRTFMAERQYTRMEDWLTAKLAYEGLPSKTYLSKTLAQYTSKTCSNCGFTITSADYDRVLEKLKKTATGWMTTINGKELKVEGQITYYNRYKRQNVVKDLSVELDRLSEESVNNDISSWTKGRQGEALSLLKKRFSHRPVQEKFVCLNCGFETHADEQAALNIARSWLFLRSQEYKKYQTNKTTGNTDKRAFVETWQSFYRKKLKEVWKPAV

SEQ ID NO: 32131 - protein, 978 aa, synthetic construct
  REGION 1..978: note = engineered CasX variant
QEIGRINKIRRRLVKDSNTKKAGKTGPMKTLLVRVMTPDLRERLENLRKKPENIPQPISNTSRANLNKLLTDYTEMKKAILHVYWEEFQKDPVGLMSRVAQPASKKIDQNKLKPEMDEKGNLTTAGFACSQCGQPLFVYKLEQVSEKGKAYTNYFGRCNVAEHEKLILLAQLKPEKDSDEAVTYSLGKFGQRALDFYSIHVTKESTHPVKPLAQIAGNRYASAPVGKALSDACMGTIASFLSKYQDIIIEHQKVVKGNQKRLESLRELAGKENLEYPSVTLPPQPHTKEGVDAYNEVIARVRMWVNLNLWQKLKLSRDDAKPLLRLKGFPSFPLVERQANEVDWWDMVCNVKKLINEKKEDGKVFWQNLAGYKRQEALRPYLSSEEDRKKGKKFARYQLGDLLLHLEKKHGEDWGKVYDEAWERIDKKVEGLSKHIKLEEERRSEDAQSKAALTDWLRAKASFVIEGLKEADKDEFCRCELKLQKWYGDLRGKPFAIEAENSILDISGFSKQYNCAFIWQKDGVKKLNLYLIINYFKGGKLRFKKIKPEAFEANRFYTVINKKSGEIVPMEVNFNFDDPNLIILPLAFGKRQGREFIWNDLLSLETGSLKLANGRVIEKTLYNRRTRQDEPALFVALTFERREVLDSSNIKPMNLIGVDRGENIPAVIALTDPEGCPLSRFKDSLGNPTHILRIGESYKEKQRTIQAKKEVEQRRAGGYSRKYASKAKNLADDMVRNTARDLLYYAVTQDAMLIFENLSRGFGRQGKRTFMAERQYTRMEDWLTAKLAYEGLPSKTYLSKTLAQYTSKTCSNCGFTITSADYDRVLEKLKKTATGWMTTINGKELKVEGQITYYNRYKRQNVVKDLSVELDRLSEESVNNDISSWTKGRQGEALSLLKKRFSHRPVQEKFVCLNCGFETHADEQAALNIARSWLFLRSQEYKKYQTNKTTGNTDKRAFVETWQSFYRKKLKEVWKPAV

SEQ ID NO: 32132 - protein, 978 aa, synthetic construct
  REGION 1..978: note = engineered CasX variant
QEIGRINKIRRRLVKDSNTKKAGKTGPMKTLLVRVMTPDLRERLENLRKKPENIPQPISNTSRANLNKLLTDYTEMKKAILHVYWEEFQKDPVGLMSRVAQPASKKIDQNKLKPEMDEKGNLTTAGFACSQCGQPLFVYKLEQVSEKGKAYTNYFGRCNVAEHEKLILLAQLKPEKDSDEAVTYSLGKFGQRALDFYSIHVTKESTHPVKPLAQIAGNRYASVPVGKALSDACMGTIASFLSKYQDIIIEHQKVVKGNQKRLESLRELAGKENLEYPSVTLPPQPHTKEGVDAYNEVIARVRMWVNLNLWQKLKLSRDDAKPLLRLKGFPSFPLVERQANEVDWWDMVCNVKKLINEKKEDGKVFWQNLAGYKRQEALRPYLSSEEDRKKGKKFARYQLGDLLLHLEKKHGEDWGKVYDEAWERIDKKVEGLSKHIKLEEERRSEDAQSKAALTDWLRAKASFVIEGLKEADKDEFCRCELKLQKWYGDLRGKPFAIEAENSILDISGFSKQYNCAFIWQKDGVKKLNLYLIINYFKGGKLRFKKIKPEAFEANRFYTVINKKSGEIVPMEVNFNFDDPNLIILPLAFGKRQGREFIWNDLLSLETGSLKLANGRVIEKTLYNRRTRQDEPALFVALTFERREVLDSSNIKPMNLIGVDRGENIPAVIALTDPEGCPLSRFKDSLGNPTHILRIGESYKEKQRTIQAKKEVEQRRAGGYSRKYASKAKNLADDMVRNTARDLLYYAVTQDAMLIFENLSRGFGRQGKRTFMAERQYTRMEDWLTAKLAYEGLPSKTYLSKTLAQYTSKTCSNCGFTITSADYDRVLEKLKKTATGWMTTINGKELKVEGQITYYNRYKRQNVVKDLSVELDRLSEESVNNDISSWTKGRQGEALSLLKKRFSHRPVQEKFVCLNCGFETHADEQAALNIARSWLFLRSQEYKKYQTNKTTGNTDKRAFVETWQSFYRKKLKEVWKPAV

SEQ ID NO: 32133 - protein, 978 aa, synthetic construct
  REGION 1..978: note = engineered CasX variant
QEIGRINKIRRRLVKDSNTKKAGKTGPMKTLLVRVMTPDLRERLENLRKKPENIPQPISNTSRANLNKLLTDYTEMKKAILHVYWEEFQKDPVGLMSRVAQPASKKIDQNKLKPEMDEKGNLTTAGFACSQCGQPLFVYKLEQVSEKGKAYTNYFGRCNVAEHEKLIKLAQLKPEKDSDEAVTYSLGKFGQRALDFYSIHVTKESTHPVKPLAQIAGNRYASGPVGKALSDACMGTIASFLSKYQDIIIEHQKVVKGNQKRLESLRELAGKENLEYPSVTLPPQPHTKEGVDAYNEVIARVRMWVNLNLWQKLKLSRDDAKPLLRLKGFPSFPLVERQANEVDWWDMVCNVKKLINEKKEDGKVFWQNLAGYKRQEALRPYLSSEEDRKKGKKFARYQLGDLLLHLEKKHGEDWGKVYDEAWERIDKKVEGLSKHIKLEEERRSEDAQSKAALTDWLRAKASFVIEGLKEADKDEFCRCELKLQKWYGDLRGKPFAIEAENSILDISGFSKQYNCAFIWQKDGVKKLNLYLIINYFKGGKLRFKKIKPEAFEANRFYTVINKKSGEIVPMEVNFNFDDPNLIILPLAFGKRQGREFIWNDLLSLETGSLKLANGRVIEKTLYNRRTRQDEPALFVALTFERREVLDSSNIKPMNLIGVDRGENIPAVIALTDPEGCPLSRFKDSLGNPTHILRIGESYKEKQRTIQAKKEVEQRRAGGYSRKYASKAKNLADDMVRNTARDLLYYAVTQDAMLIFENLSRGFGRQGKRTFMAERQYTRMEDWLTAKLAYEGLPSKTYLSKTLAQYTSKTCSNCGFTITSADYDRVLEKLKKTATGWMTTINGKELKVEGQITYYNRYKRQNVVKDLSVELDRLSEESVNNDISSWTKGRQGEALSLLKKRFSHRPVQEKFVCLNCGFETHADEQAALNIARSWLFLRSQEYKKYQTNKTTGNTDKRAFVETWQSFYRKKLKEVWKPAV

SEQ ID NO: 32134 - protein, 977 aa, synthetic construct
  REGION 1..977: note = engineered CasX variant
QEIGRINKIRRRLVKDSNTKKAGKTGPMKTLLVRVMTPDLRERLENLRKKPENIPQPISNTSRANLNKLLTDYTEMKKAILHVYWEEFQKDPVGLMSRVAQPASKKIDQNKLKPEMDEKGNLTTAGFACSQCGQPLFVYKLEQVSEKGKAYTNYFGRCNVAEHEKLILLAQLKPEKDSDEAVTYSLGKFGQRALDFYSIHVTKESTHPVKPLAQIAGNRYASPVGKALSDACMGTIASFLSKYQDIIIEHQKVVKGNQKRLESLRELAGKENLEYPSVTLPPQPHTKEGVDAYNEVIARVRMWVNLNLWQKLKLSRDDAKPLLRLKGFPSFPLVERQANEVDWWDMVCNVKKLINEKKEDGKVFWQNLAGYKRQEALRPYLSSEEDRKKGKKFARYQLGDLLLHLEKKHGEDWGKVYDEAWERIDKKVEGLSKHIKLEEERRSEDAQSKAALTDWLRAKASFVIEGLKEADKDEFCRCELKLQKWYGDLRGKPFAIEAENSILDISGFSKQYNCAFIWQKDGVKKLNLYLIINYFKGGKLRFKKIKPEAFEANRFYTVINKKSGEIVPMEVNFNFDDPNLIILPLAFGKRQGREFIWNDLLSLETGSLKLANGRVIEKTLYNRRTRQDEPALFVALTFERREVLDSSNIKPMNLIGVDRGENIPAVIALTDPEGCPLSRFKDSLGNPTHILRIGESYKEKQRTIQAKKEVEQRRAGGYSRKYASKAKNLADDMVRNTARDLLYYAVTQDAMLIFENLSRGFGRQGKRTFMAERQYTRMEDWLTAKLAYEGLPSKTYLSKTLAQYTSKTCSNCGFTITSADYDRVLEKLKKTATGWMTTINGKELKVEGQITYYNRYKRQNVVKDLSVELDRLSEESVNNDISSWTKGRQGEALSLLKKRFSHRPVQEKFVCLNCGFETHADEQAALNIARSWLFLRSQEYKKYQTNKTTGNTDKRAFVETWQSFYRKKLKEVWKPAV

SEQ ID NO: 32135 - protein, 978 aa, synthetic construct
  REGION 1..978: note = engineered CasX variant
QEIGRINKIRRRLVKDSNTKKAGKTGPMKTLLVRVMTPDLRERLENLRKKPENIPQPISNTSRANLNKLLTDYTEMKKAILHVYWEEFQKDPVGLMSRVAQPASKKIDQNKLKPEMDEKGNLTTAGFACSQCGQPLFVYKLEQVSEKGKAYTNYFGRCNVAEHEKLILLAQLKPEKDSDEAVTYSLGKFGQRALDFYSIHVTKESTHPVKPLAQIAGNRYASYPVGKALSDACMGTIASFLSKYQDIIIEHQKVVKGNQKRLESLRELAGKENLEYPSVTLPPQPHTKEGVDAYNEVIARVRMWVNLNLWQKLKLSRDDAKPLLRLKGFPSFPLVERQANEVDWWDMVCNVKKLINEKKEDGKVFWQNLAGYKRQEALRPYLSSEEDRKKGKKFARYQLGDLLLHLEKKHGEDWGKVYDEAWERIDKKVEGLSKHIKLEEERRSEDAQSKAALTDWLRAKASFVIEGLKEADKDEFCRCELKLQKWYGDLRGKPFAIEAENSILDISGFSKQYNCAFIWQKDGVKKLNLYLIINYFKGGKLRFKKIKPEAFEANRFYTVINKKSGEIVPMEVNFNFDDPNLIILPLAFGKRQGREFIWNDLLSLETGSLKLANGRVIEKTLYNRRTRQDEPALFVALTFERREVLDSSNIKPMNLIGVDRGENIPAVIALTDPEGCPLSRFKDSLGNPTHILRIGESYKEKQRTIQAKKEVEQRRAGGYSRKYASKAKNLADDMVRNTARDLLYYAVTQDAMLIFENLSRGFGRQGKRTFMAERQYTRMEDWLTAKLAYEGLPSKTYLSKTLAQYTSKTCSNCGFTITSADYDRVLEKLKKTATGWMTTINGKELKVEGQITYYNRYKRQNVVKDLSVELDRLSEESVNNDISSWTKGRSGEALSLLKKRFSHRPVQEKFVCLNCEFETHADEQAALNIARSWLFLRSQEYKKYQTNKTTGNTDKRAFVETWQSFYRKKLKEVWKPAV

SEQ ID NO: 32136 - protein, 978 aa, synthetic construct
  REGION 1..978: note = engineered CasX variant
QEIGRINKIRRRLVKDSNTKKAGKTGPMKTLLVRVMTPDLRERLENLRKKPENIPQPISNTSRANLNKLLTDYTEMKKAILHVYWEEFQKDPVGLMSRVAQPASKKIDQNKLKPEMDEKGNLTTAGFACSQCGQPLFVYKLEQVSEKGKAYTNYFGRCNVAEHEKLILLAQLKPEKDSDEAVTYSLGKFGQRALDFYSIHVTKESTHPVKPLAQIAGNRYASHPVGKALSDACMGTIASFLSKYQDIIIEHQKVVKGNQKRLESLRELAGKENLEYPSVTLPPQPHTKEGVDAYNEVIARVRMWVNLNLWQKLKLSRDDAKPLLRLKGFPSFPLVERQANEVDWWDMVCNVKKLINEKKEDGKVFWQNLAGYKRQEALRPYLSSEEDRKKGKKFARYQLGDLLLHLEKKHGEDWGKVYDEAWERIDKKVEGLSKHIKLEEERRSEDAQSKAALTDWLRAKASFVIEGLKEADKDEFCRCELKLQKWYGDLRGKPFAIEAENSILDISGFSKQYNCAFIWQKDGVKKLNLYLIINYFKGGKLRFKKIKPEAFEANRFYTVINKKSGEIVPMEVNFNFDDPNLIILPLAFGKRQGREFIWNDLLSLETGSLKLANGRVIEKTLYNRRTRQDEPALFVALTFERREVLDSSNIKPMNLIGVDRGENIPAVIALTDPEGCPLSRFKDSLGNPTHILRIGESYKEKQRTIQAKKEVEQRRAGGYSRKYASKAKNLADDMVRNTARDLLYYAVTQDAMLIFENLSRGFGRQGKRTFMAERQYTRMEDWLTAKLAYEGLPSKTYLSKTLAQYTSKTCSNCGFTITSADYDRVLEKLKKTATGWMTTINGKELKVEGQITYYNRYKRQNVVKDLSVELDRLSEESVNNDISSWTKGRSGEALSLLKKRFSHRPVQEKFVCLNCEFETHADEQAALNIARSWLFLRSQEYKKYQTNKTTGNTDKRAFVETWQSFYRKKLKEVWKPAV

SEQ ID NO: 32137 - protein, 978 aa, synthetic construct
  REGION 1..978: note = engineered CasX variant
QEIGRINKIRRRLVKDSNTKKAGKTGPMKTLLVRVMTPDLRERLENLRKKPENIPQPISNTSRANLNKLLTDYTEMKKAILHVYWEEFQKDPVGLMSRVAQPASKKIDQNKLKPEMDEKGNLTTAGFACSQCGQPLFVYKLEQVSEKGKAYTNYFGRCNVAEHEKLILLAQLKPEKDSDEAVTYSLGKFGQRALDFYSIHVTKESTHPVKPLAQIAGNRYASSPVGKALSDACMGTIASFLSKYQDIIIEHQKVVKGNQKRLESLRELAGKENLEYPSVTLPPQPHTKEGVDAYNEVIARVRMWVNLNLWQKLKLSRDDAKPLLRLKGFPSFPLVERQANEVDWWDMVCNVKKLINEKKEDGKVFWQNLAGYKRQEALRPYLSSEEDRKKGKKFARYQLGDLLLHLEKKHGEDWGKVYDEAWERIDKKVEGLSKHIKLEEERRSEDAQSKAALTDWLRAKASFVIEGLKEADKDEFCRCELKLQKWYGDLRGKPFAIEAENSILDISGFSKQYNCAFIWQKDGVKKLNLYLIINYFKGGKLRFKKIKPEAFEANRFYTVINKKSGEIVPMEVNFNFDDPNLIILPLAFGKRQGREFIWNDLLSLETGSLKLANGRVIEKTLYNRRTRQDEPALFVALTFERREVLDSSNIKPMNLIGVDRGENIPAVIALTDPEGCPLSRFKDSLGNPTHILRIGESYKEKQRTIQAKKEVEQRRAGGYSRKYASKAKNLADDMVRNTARDLLYYAVTQDAMLIFENLSRGFGRQGKRTFMAERQYTRMEDWLTAKLAYEGLPSKTYLSKTLAQYTSKTCSNCGFTITSADYDRVLEKLKKTATGWMTTINGKELKVEGQITYYNRYKRQNVVKDLSVELDRLSEESVNNDISSWTKGRSGEALSLLKKRFSHRPVQEKFVCLNCEFETHADEQAALNIARSWLFLRSQEYKKYQTNKTTGNTDKRAFVETWQSFYRKKLKEVWKPAV

SEQ ID NO: 32138 - protein, 978 aa, synthetic construct
  REGION 1..978: note = engineered CasX variant
QEIGRINKIRRRLVKDSNTKKAGKTGPMKTLLVRVMTPDLRERLENLRKKPENIPQPISNTSRANLNKLLTDYTEMKKAILHVYWEEFQKDPVGLMSRVAQPASKKIDQNKLKPEMDEKGNLTTAGFACSQCGQPLFVYKLEQVSEKGKAYTNYFGRCNVAEHEKLILLAQLKPEKDSDEAVTYSLGKFGQRALDFYSIHVTKESTHPVKPLAQIAGNRYASTPVGKALSDACMGTIASFLSKYQDIIIEHQKVVKGNQKRLESLRELAGKENLEYPSVTLPPQPHTKEGVDAYNEVIARVRMWVNLNLWQKLKLSRDDAKPLLRLKGFPSFPLVERQANEVDWWDMVCNVKKLINEKKEDGKVFWQNLAGYKRQEALRPYLSSEEDRKKGKKFARYQLGDLLLHLEKKHGEDWGKVYDEAWERIDKKVEGLSKHIKLEEERRSEDAQSKAALTDWLRAKASFVIEGLKEADKDEFCRCELKLQKWYGDLRGKPFAIEAENSILDISGFSKQYNCAFIWQKDGVKKLNLYLIINYFKGGKLRFKKIKPEAFEANRFYTVINKKSGEIVPMEVNFNFDDPNLIILPLAFGKRQGREFIWNDLLSLETGSLKLANGRVIEKTLYNRRTRQDEPALFVALTFERREVLDSSNIKPMNLIGVDRGENIPAVIALTDPEGCPLSRFKDSLGNPTHILRIGESYKEKQRTIQAKKEVEQRRAGGYSRKYASKAKNLADDMVRNTARDLLYYAVTQDAMLIFENLSRGFGRQGKRTFMAERQYTRMEDWLTAKLAYEGLPSKTYLSKTLAQYTSKTCSNCGFTITSADYDRVLEKLKKTATGWMTTINGKELKVEGQITYYNRYKRQNVVKDLSVELDRLSEESVNNDISSWTKGRSGEALSLLKKRFSHRPVQEKFVCLNCEFETHADEQAALNIARSWLFLRSQEYKKYQTNKTTGNTDKRAFVETWQSFYRKKLKEVWKPAV

SEQ ID NO: 32139 - protein, 978 aa, synthetic construct
  REGION 1..978: note = engineered CasX variant
QEIGRINKIRRRLVKDSNTKKAGKTGPMKTLLVRVMTPDLRERLENLRKKPENIPQPISNTSRANLNKLLTDYTEMKKAILHVYWEEFQKDPVGLMSRVAQPASKKIDQNKLKPEMDEKGNLTTAGFACSQCGQPLFVYKLEQVSEKGKAYTNYFGRCNVAEHEKLILLAQLKPEKDSDEAVTYSLGKFGQRALDFYSIHVTKESTHPVKPLAQIAGNRYASAPVGKALSDACMGTIASFLSKYQDIIIEHQKVVKGNQKRLESLRELAGKENLEYPSVTLPPQPHTKEGVDAYNEVIARVRMWVNLNLWQKLKLSRDDAKPLLRLKGFPSFPLVERQANEVDWWDMVCNVKKLINEKKEDGKVFWQNLAGYKRQEALRPYLSSEEDRKKGKKFARYQLGDLLLHLEKKHGEDWGKVYDEAWERIDKKVEGLSKHIKLEEERRSEDAQSKAALTDWLRAKASFVIEGLKEADKDEFCRCELKLQKWYGDLRGKPFAIEAENSILDISGFSKQYNCAFIWQKDGVKKLNLYLIINYFKGGKLRFKKIKPEAFEANRFYTVINKKSGEIVPMEVNFNFDDPNLIILPLAFGKRQGREFIWNDLLSLETGSLKLANGRVIEKTLYNRRTRQDEPALFVALTFERREVLDSSNIKPMNLIGVDRGENIPAVIALTDPEGCPLSRFKDSLGNPTHILRIGESYKEKQRTIQAKKEVEQRRAGGYSRKYASKAKNLADDMVRNTARDLLYYAVTQDAMLIFENLSRGFGRQGKRTFMAERQYTRMEDWLTAKLAYEGLPSKTYLSKTLAQYTSKTCSNCGFTITSADYDRVLEKLKKTATGWMTTINGKELKVEGQITYYNRYKRQNVVKDLSVELDRLSEESVNNDISSWTKGRSGEALSLLKKRFSHRPVQEKFVCLNCEFETHADEQAALNIARSWLFLRSQEYKKYQTNKTTGNTDKRAFVETWQSFYRKKLKEVWKPAV

SEQ ID NO: 32140 - protein, 978 aa, synthetic construct
  REGION 1..978: note = engineered CasX variant
QEIGRINKIRRRLVKDSNTKKAGKTGPMKTLLVRVMTPDLRERLENLRKKPENIPQPISNTSRANLNKLLTDYTEMKKAILHVYWEEFQKDPVGLMSRVAQPASKKIDQNKLKPEMDEKGNLTTAGFACSQCGQPLFVYKLEQVSEKGKAYTNYFGRCNVAEHEKLILLAQLKPEKDSDEAVTYSLGKFGQRALDFYSIHVTKESTHPVKPLAQIAGNRYASVPVGKALSDACMGTIASFLSKYQDIIIEHQKVVKGNQKRLESLRELAGKENLEYPSVTLPPQPHTKEGVDAYNEVIARVRMWVNLNLWQKLKLSRDDAKPLLRLKGFPSFPLVERQANEVDWWDMVCNVKKLINEKKEDGKVFWQNLAGYKRQEALRPYLSSEEDRKKGKKFARYQLGDLLLHLEKKHGEDWGKVYDEAWERIDKKVEGLSKHIKLEEERRSEDAQSKAALTDWLRAKASFVIEGLKEADKDEFCRCELKLQKWYGDLRGKPFAIEAENSILDISGFSKQYNCAFIWQKDGVKKLNLYLIINYFKGGKLRFKKIKPEAFEANRFYTVINKKSGEIVPMEVNFNFDDPNLIILPLAFGKRQGREFIWNDLLSLETGSLKLANGRVIEKTLYNRRTRQDEPALFVALTFERREVLDSSNIKPMNLIGVDRGENIPAVIALTDPEGCPLSRFKDSLGNPTHILRIGESYKEKQRTIQAKKEVEQRRAGGYSRKYASKAKNLADDMVRNTARDLLYYAVTQDAMLIFENLSRGFGRQGKRTFMAERQYTRMEDWLTAKLAYEGLPSKTYLSKTLAQYTSKTCSNCGFTITSADYDRVLEKLKKTATGWMTTINGKELKVEGQITYYNRYKRQNVVKDLSVELDRLSEESVNNDISSWTKGRSGEALSLLKKRFSHRPVQEKFVCLNCEFETHADEQAALNIARSWLFLRSQEYKKYQTNKTTGNTDKRAFVETWQSFYRKKLKEVWKPAV

SEQ ID NO: 32141 - protein, 978 aa, synthetic construct
  REGION 1..978: note = engineered CasX variant
QEIGRINKIRRRLVKDSNTKKAGKTGPMKTLLVRVMTPDLRERLENLRKKPENIPQPISNTSRANLNKLLTDYTEMKKAILHVYWEEFQKDPVGLMSRVAQPASKKIDQNKLKPEMDEKGNLTTAGFACSQCGQPLFVYKLEQVSEKGKAYTNYFGRCNVAEHEKLIKLAQLKPEKDSDEAVTYSLGKFGQRALDFYSIHVTKESTHPVKPLAQIAGNRYASGPVGKALSDACMGTIASFLSKYQDIIIEHQKVVKGNQKRLESLRELAGKENLEYPSVTLPPQPHTKEGVDAYNEVIARVRMWVNLNLWQKLKLSRDDAKPLLRLKGFPSFPLVERQANEVDWWDMVCNVKKLINEKKEDGKVFWQNLAGYKRQEALRPYLSSEEDRKKGKKFARYQLGDLLLHLEKKHGEDWGKVYDEAWERIDKKVEGLSKHIKLEEERRSEDAQSKAALTDWLRAKASFVIEGLKEADKDEFCRCELKLQKWYGDLRGKPFAIEAENSILDISGFSKQYNCAFIWQKDGVKKLNLYLIINYFKGGKLRFKKIKPEAFEANRFYTVINKKSGEIVPMEVNFNFDDPNLIILPLAFGKRQGREFIWNDLLSLETGSLKLANGRVIEKTLYNRRTRQDEPALFVALTFERREVLDSSNIKPMNLIGVDRGENIPAVIALTDPEGCPLSRFKDSLGNPTHILRIGESYKEKQRTIQAKKEVEQRRAGGYSRKYASKAKNLADDMVRNTARDLLYYAVTQDAMLIFENLSRGFGRQGKRTFMAERQYTRMEDWLTAKLAYEGLPSKTYLSKTLAQYTSKTCSNCGFTITSADYDRVLEKLKKTATGWMTTINGKELKVEGQITYYNRYKRQNVVKDLSVELDRLSEESVNNDISSWTKGRSGEALSLLKKRFSHRPVQEKFVCLNCEFETHADEQAALNIARSWLFLRSQEYKKYQTNKTTGNTDKRAFVETWQSFYRKKLKEVWKPAV

SEQ ID NO: 32142 - protein, 977 aa, synthetic construct
  REGION 1..977: note = engineered CasX variant
QEIGRINKIRRRLVKDSNTKKAGKTGPMKTLLVRVMTPDLRERLENLRKKPENIPQPISNTSRANLNKLLTDYTEMKKAILHVYWEEFQKDPVGLMSRVAQPASKKIDQNKLKPEMDEKGNLTTAGFACSQCGQPLFVYKLEQVSEKGKAYTNYFGRCNVAEHEKLILLAQLKPEKDSDEAVTYSLGKFGQRALDFYSIHVTKESTHPVKPLAQIAGNRYASPVGKALSDACMGTIASFLSKYQDIIIEHQKVVKGNQKRLESLRELAGKENLEYPSVTLPPQPHTKEGVDAYNEVIARVRMWVNLNLWQKLKLSRDDAKPLLRLKGFPSFPLVERQANEVDWWDMVCNVKKLINEKKEDGKVFWQNLAGYKRQEALRPYLSSEEDRKKGKKFARYQLGDLLLHLEKKHGEDWGKVYDEAWERIDKKVEGLSKHIKLEEERRSEDAQSKAALTDWLRAKASFVIEGLKEADKDEFCRCELKLQKWYGDLRGKPFAIEAENSILDISGFSKQYNCAFIWQKDGVKKLNLYLIINYFKGGKLRFKKIKPEAFEANRFYTVINKKSGEIVPMEVNFNFDDPNLIILPLAFGKRQGREFIWNDLLSLETGSLKLANGRVIEKTLYNRRTRQDEPALFVALTFERREVLDSSNIKPMNLIGVDRGENIPAVIALTDPEGCPLSRFKDSLGNPTHILRIGESYKEKQRTIQAKKEVEQRRAGGYSRKYASKAKNLADDMVRNTARDLLYYAVTQDAMLIFENLSRGFGRQGKRTFMAERQYTRMEDWLTAKLAYEGLPSKTYLSKTLAQYTSKTCSNCGFTITSADYDRVLEKLKKTATGWMTTINGKELKVEGQITYYNRYKRQNVVKDLSVELDRLSEESVNNDISSWTKGRSGEALSLLKKRFSHRPVQEKFVCLNCEFETHADEQAALNIARSWLFLRSQEYKKYQTNKTTGNTDKRAFVETWQSFYRKKLKEVWKPAV

SEQ ID NO: 32143 - protein, 979 aa, synthetic construct
  REGION 1..979: note = engineered CasX variant
QEIGRINKIRRRLVKDSNTKKAGKTGPMKTLLVRVMTPDLRERLENLRKKPENIPQPISNTSRANLNKLLTDYTEMKKAILHVYWEEFQKDPVGLMSRVAQPASKKIDQNKLKPEMDEKGNLTTAGFACSQCGQPLFVYKLEQVSEKGKAYTNYFGRCNVAEHEKLILLAQLKPEKDSDEAVTYSLGKFGQRALDFYSIHVTKESTHPVKPLAQIAGNRYASYPVGKALSDACMGTIASFLSKYQDIIIEHQKVVKGNQKRLESLRELAGKENLEYPSVTLPPQPHTKEGVDAYNEVIARVRMWVNLNLWQKLKLSRDDAKPLLRLKGFPSFPLVERQANEVDWWDMVCNVKKLINEKKEDGKVFWQNLAGYKRQEALRPYLSSEEDRKKGKKFARYQLGDLLLHLEKKHGEDWGKVYDEAWERIDKKVEGLSKHIKLEEERRSEDAQSKAALTDWLRAKASFVIEGLKEADKDEFCRCELKLQKWYGDLRGKPFAIEAENSILDISGFSKQYNCAFIWQKDGVKKLNLYLIINYFKGGKLRFKKIKPEAFEANRFYTVINKKSGEIVPMEVNFNFDDPNLIILPLAFGKRQGREFIWNDLLSLETGSLKLANGRVIEKTLYNRRTRQDEPALFVALTFERREVLDSSNIKPMNLIGVDRGENIPAVIALTDPEGCPLSRFKDSLGNPTHILRIGESYKEKQRTIQAKKEVEQRRAGGYSRKYASKAKNLADDMVRNTARDLLYYAVTQDAMLIFENLSRGFGRQGKRTFMAERQYTRMEDWLTAKLAYEGLPSKTYLSKTLAQYTSKTCSNCGFTITSADYDRVLEKLKKTATGWMTTINGKELKVEGQITYYNRYKRQNVVKDLSVELDRLSEESVNNDISSWTKGRSGEALSLLKKRFSHRPVQEKFVCLNCGFETHADEQAALNIARSWLFLRSQEYKKYQTNKTSTGNTDKRAFVETWQSFYRKKLKEVWKPAV

SEQ ID NO: 32144 - protein, 979 aa, synthetic construct
  REGION 1..979: note = engineered CasX variant
QEIGRINKIRRRLVKDSNTKKAGKTGPMKTLLVRVMTPDLRERLENLRKKPENIPQPISNTSRANLNKLLTDYTEMKKAILHVYWEEFQKDPVGLMSRVAQPASKKIDQNKLKPEMDEKGNLTTAGFACSQCGQPLFVYKLEQVSEKGKAYTNYFGRCNVAEHEKLILLAQLKPEKDSDEAVTYSLGKFGQRALDFYSIHVTKESTHPVKPLAQIAGNRYASHPVGKALSDACMGTIASFLSKYQDIIIEHQKVVKGNQKRLESLRELAGKENLEYPSVTLPPQPHTKEGVDAYNEVIARVRMWVNLNLWQKLKLSRDDAKPLLRLKGFPSFPLVERQANEVDWWDMVCNVKKLINEKKEDGKVFWQNLAGYKRQEALRPYLSSEEDRKKGKKFARYQLGDLLLHLEKKHGEDWGKVYDEAWERIDKKVEGLSKHIKLEEERRSEDAQSKAALTDWLRAKASFVIEGLKEADKDEFCRCELKLQKWYGDLRGKPFAIEAENSILDISGFSKQYNCAFIWQKDGVKKLNLYLIINYFKGGKLRFKKIKPEAFEANRFYTVINKKSGEIVPMEVNFNFDDPNLIILPLAFGKRQGREFIWNDLLSLETGSLKLANGRVIEKTLYNRRTRQDEPALFVALTFERREVLDSSNIKPMNLIGVDRGENIPAVIALTDPEGCPLSRFKDSLGNPTHILRIGESYKEKQRTIQAKKEVEQRRAGGYSRKYASKAKNLADDMVRNTARDLLYYAVTQDAMLIFENLSRGFGRQGKRTFMAERQYTRMEDWLTAKLAYEGLPSKTYLSKTLAQYTSKTCSNCGFTITSADYDRVLEKLKKTATGWMTTINGKELKVEGQITYYNRYKRQNVVKDLSVELDRLSEESVNNDISSWTKGRSGEALSLLKKRFSHRPVQEKFVCLNCGFETHADEQAALNIARSWLFLRSQEYKKYQTNKTSTGNTDKRAFVETWQSFYRKKLKEVWKPAV

SEQ ID NO: 32145 - protein, 979 aa, synthetic construct
  REGION 1..979: note = engineered CasX variant
QEIGRINKIRRRLVKDSNTKKAGKTGPMKTLLVRVMTPDLRERLENLRKKPENIPQPISNTSRANLNKLLTDYTEMKKAILHVYWEEFQKDPVGLMSRVAQPASKKIDQNKLKPEMDEKGNLTTAGFACSQCGQPLFVYKLEQVSEKGKAYTNYFGRCNVAEHEKLILLAQLKPEKDSDEAVTYSLGKFGQRALDFYSIHVTKESTHPVKPLAQIAGNRYASSPVGKALSDACMGTIASFLSKYQDIIIEHQKVVKGNQKRLESLRELAGKENLEYPSVTLPPQPHTKEGVDAYNEVIARVRMWVNLNLWQKLKLSRDDAKPLLRLKGFPSFPLVERQANEVDWWDMVCNVKKLINEKKEDGKVFWQNLAGYKRQEALRPYLSSEEDRKKGKKFARYQLGDLLLHLEKKHGEDWGKVYDEAWERIDKKVEGLSKHIKLEEERRSEDAQSKAALTDWLRAKASFVIEGLKEADKDEFCRCELKLQKWYGDLRGKPFAIEAENSILDISGFSKQYNCAFIWQKDGVKKLNLYLIINYFKGGKLRFKKIKPEAFEANRFYTVINKKSGEIVPMEVNFNFDDPNLIILPLAFGKRQGREFIWNDLLSLETGSLKLANGRVIEKTLYNRRTRQDEPALFVALTFERREVLDSSNIKPMNLIGVDRGENIPAVIALTDPEGCPLSRFKDSLGNPTHILRIGESYKEKQRTIQAKKEVEQRRAGGYSRKYASKAKNLADDMVRNTARDLLYYAVTQDAMLIFENLSRGFGRQGKRTFMAERQYTRMEDWLTAKLAYEGLPSKTYLSKTLAQYTSKTCSNCGFTITSADYDRVLEKLKKTATGWMTTINGKELKVEGQITYYNRYKRQNVVKDLSVELDRLSEESVNNDISSWTKGRSGEALSLLKKRFSHRPVQEKFVCLNCGFETHADEQAALNIARSWLFLRSQEYKKYQTNKTSTGNTDKRAFVETWQSFYRKKLKEVWKPAV

SEQ ID NO: 32146 - protein, 979 aa, synthetic construct
  REGION 1..979: note = engineered CasX variant
QEIGRINKIRRRLVKDSNTKKAGKTGPMKTLLVRVMTPDLRERLENLRKKPENIPQPISNTSRANLNKLLTDYTEMKKAILHVYWEEFQKDPVGLMSRVAQPASKKIDQNKLKPEMDEKGNLTTAGFACSQCGQPLFVYKLEQVSEKGKAYTNYFGRCNVAEHEKLILLAQLKPEKDSDEAVTYSLGKFGQRALDFYSIHVTKESTHPVKPLAQIAGNRYASTPVGKALSDACMGTIASFLSKYQDIIIEHQKVVKGNQKRLESLRELAGKENLEYPSVTLPPQPHTKEGVDAYNEVIARVRMWVNLNLWQKLKLSRDDAKPLLRLKGFPSFPLVERQANEVDWWDMVCNVKKLINEKKEDGKVFWQNLAGYKRQEALRPYLSSEEDRKKGKKFARYQLGDLLLHLEKKHGEDWGKVYDEAWERIDKKVEGLSKHIKLEEERRSEDAQSKAALTDWLRAKASFVIEGLKEADKDEFCRCELKLQKWYGDLRGKPFAIEAENSILDISGFSKQYNCAFIWQKDGVKKLNLYLIINYFKGGKLRFKKIKPEAFEANRFYTVINKKSGEIVPMEVNFNFDDPNLIILPLAFGKRQGREFIWNDLLSLETGSLKLANGRVIEKTLYNRRTRQDEPALFVALTFERREVLDSSNIKPMNLIGVDRGENIPAVIALTDPEGCPLSRFKDSLGNPTHILRIGESYKEKQRTIQAKKEVEQRRAGGYSRKYASKAKNLADDMVRNTARDLLYYAVTQDAMLIFENLSRGFGRQGKRTFMAERQYTRMEDWLTAKLAYEGLPSKTYLSKTLAQYTSKTCSNCGFTITSADYDRVLEKLKKTATGWMTTINGKELKVEGQITYYNRYKRQNVVKDLSVELDRLSEESVNNDISSWTKGRSGEALSLLKKRFSHRPVQEKFVCLNCGFETHADEQAALNIARSWLFLRSQEYKKYQTNKTSTGNTDKRAFVETWQSFYRKKLKEVWKPAV

SEQ ID NO: 32147 - protein, 979 aa, synthetic construct
  REGION 1..979: note = engineered CasX variant
QEIGRINKIRRRLVKDSNTKKAGKTGPMKTLLVRVMTPDLRERLENLRKKPENIPQPISNTSRANLNKLLTDYTEMKKAILHVYWEEFQKDPVGLMSRVAQPASKKIDQNKLKPEMDEKGNLTTAGFACSQCGQPLFVYKLEQVSEKGKAYTNYFGRCNVAEHEKLILLAQLKPEKDSDEAVTYSLGKFGQRALDFYSIHVTKESTHPVKPLAQIAGNRYASAPVGKALSDACMGTIASFLSKYQDIIIEHQKVVKGNQKRLESLRELAGKENLEYPSVTLPPQPHTKEGVDAYNEVIARVRMWVNLNLWQKLKLSRDDAKPLLRLKGFPSFPLVERQANEVDWWDMVCNVKKLINEKKEDGKVFWQNLAGYKRQEALRPYLSSEEDRKKGKKFARYQLGDLLLHLEKKHGEDWGKVYDEAWERIDKKVEGLSKHIKLEEERRSEDAQSKAALTDWLRAKASFVIEGLKEADKDEFCRCELKLQKWYGDLRGKPFAIEAENSILDISGFSKQYNCAFIWQKDGVKKLNLYLIINYFKGGKLRFKKIKPEAFEANRFYTVINKKSGEIVPMEVNFNFDDPNLIILPLAFGKRQGREFIWNDLLSLETGSLKLANGRVIEKTLYNRRTRQDEPALFVALTFERREVLDSSNIKPMNLIGVDRGENIPAVIALTDPEGCPLSRFKDSLGNPTHILRIGESYKEKQRTIQAKKEVEQRRAGGYSRKYASKAKNLADDMVRNTARDLLYYAVTQDAMLIFENLSRGFGRQGKRTFMAERQYTRMEDWLTAKLAYEGLPSKTYLSKTLAQYTSKTCSNCGFTITSADYDRVLEKLKKTATGWMTTINGKELKVEGQITYYNRYKRQNVVKDLSVELDRLSEESVNNDISSWTKGRSGEALSLLKKRFSHRPVQEKFVCLNCGFETHADEQAALNIARSWLFLRSQEYKKYQTNKTSTGNTDKRAFVETWQSFYRKKLKEVWKPAV

SEQ ID NO: 32148 - protein, 979 aa, synthetic construct
  REGION 1..979: note = engineered CasX variant
QEIGRINKIRRRLVKDSNTKKAGKTGPMKTLLVRVMTPDLRERLENLRKKPENIPQPISNTSRANLNKLLTDYTEMKKAILHVYWEEFQKDPVGLMSRVAQPASKKIDQNKLKPEMDEKGNLTTAGFACSQCGQPLFVYKLEQVSEKGKAYTNYFGRCNVAEHEKLILLAQLKPEKDSDEAVTYSLGKFGQRALDFYSIHVTKESTHPVKPLAQIAGNRYASVPVGKALSDACMGTIASFLSKYQDIIIEHQKVVKGNQKRLESLRELAGKENLEYPSVTLPPQPHTKEGVDAYNEVIARVRMWVNLNLWQKLKLSRDDAKPLLRLKGFPSFPLVERQANEVDWWDMVCNVKKLINEKKEDGKVFWQNLAGYKRQEALRPYLSSEEDRKKGKKFARYQLGDLLLHLEKKHGEDWGKVYDEAWERIDKKVEGLSKHIKLEEERRSEDAQSKAALTDWLRAKASFVIEGLKEADKDEFCRCELKLQKWYGDLRGKPFAIEAENSILDISGFSKQYNCAFIWQKDGVKKLNLYLIINYFKGGKLRFKKIKPEAFEANRFYTVINKKSGEIVPMEVNFNFDDPNLIILPLAFGKRQGREFIWNDLLSLETGSLKLANGRVIEKTLYNRRTRQDEPALFVALTFERREVLDSSNIKPMNLIGVDRGENIPAVIALTDPEGCPLSRFKDSLGNPTHILRIGESYKEKQRTIQAKKEVEQRRAGGYSRKYASKAKNLADDMVRNTARDLLYYAVTQDAMLIFENLSRGFGRQGKRTFMAERQYTRMEDWLTAKLAYEGLPSKTYLSKTLAQYTSKTCSNCGFTITSADYDRVLEKLKKTATGWMTTINGKELKVEGQITYYNRYKRQNVVKDLSVELDRLSEESVNNDISSWTKGRSGEALSLLKKRFSHRPVQEKFVCLNCGFETHADEQAALNIARSWLFLRSQEYKKYQTNKTSTGNTDKRAFVETWQSFYRKKLKEVWKPAV

SEQ ID NO: 32149 - protein, 979 aa, synthetic construct
  REGION 1..979: note = engineered CasX variant
QEIGRINKIRRRLVKDSNTKKAGKTGPMKTLLVRVMTPDLRERLENLRKKPENIPQPISNTSRANLNKLLTDYTEMKKAILHVYWEEFQKDPVGLMSRVAQPASKKIDQNKLKPEMDEKGNLTTAGFACSQCGQPLFVYKLEQVSEKGKAYTNYFGRCNVAEHEKLIKLAQLKPEKDSDEAVTYSLGKFGQRALDFYSIHVTKESTHPVKPLAQIAGNRYASGPVGKALSDACMGTIASFLSKYQDIIIEHQKVVKGNQKRLESLRELAGKENLEYPSVTLPPQPHTKEGVDAYNEVIARVRMWVNLNLWQKLKLSRDDAKPLLRLKGFPSFPLVERQANEVDWWDMVCNVKKLINEKKEDGKVFWQNLAGYKRQEALRPYLSSEEDRKKGKKFARYQLGDLLLHLEKKHGEDWGKVYDEAWERIDKKVEGLSKHIKLEEERRSEDAQSKAALTDWLRAKASFVIEGLKEADKDEFCRCELKLQKWYGDLRGKPFAIEAENSILDISGFSKQYNCAFIWQKDGVKKLNLYLIINYFKGGKLRFKKIKPEAFEANRFYTVINKKSGEIVPMEVNFNFDDPNLIILPLAFGKRQGREFIWNDLLSLETGSLKLANGRVIEKTLYNRRTRQDEPALFVALTFERREVLDSSNIKPMNLIGVDRGENIPAVIALTDPEGCPLSRFKDSLGNPTHILRIGESYKEKQRTIQAKKEVEQRRAGGYSRKYASKAKNLADDMVRNTARDLLYYAVTQDAMLIFENLSRGFGRQGKRTFMAERQYTRMEDWLTAKLAYEGLPSKTYLSKTLAQYTSKTCSNCGFTITSADYDRVLEKLKKTATGWMTTINGKELKVEGQITYYNRYKRQNVVKDLSVELDRLSEESVNNDISSWTKGRSGEALSLLKKRFSHRPVQEKFVCLNCGFETHADEQAALNIARSWLFLRSQEYKKYQTNKTSTGNTDKRAFVETWQSFYRKKLKEVWKPAV

SEQ ID NO: 32150 - protein, 978 aa, synthetic construct
  REGION 1..978: note = engineered CasX variant
QEIGRINKIRRRLVKDSNTKKAGKTGPMKTLLVRVMTPDLRERLENLRKKPENIPQPISNTSRANLNKLLTDYTEMKKAILHVYWEEFQKDPVGLMSRVAQPASKKIDQNKLKPEMDEKGNLTTAGFACSQCGQPLFVYKLEQVSEKGKAYTNYFGRCNVAEHEKLILLAQLKPEKDSDEAVTYSLGKFGQRALDFYSIHVTKESTHPVKPLAQIAGNRYASPVGKALSDACMGTIASFLSKYQDIIIEHQKVVKGNQKRLESLRELAGKENLEYPSVTLPPQPHTKEGVDAYNEVIARVRMWVNLNLWQKLKLSRDDAKPLLRLKGFPSFPLVERQANEVDWWDMVCNVKKLINEKKEDGKVFWQNLAGYKRQEALRPYLSSEEDRKKGKKFARYQLGDLLLHLEKKHGEDWGKVYDEAWERIDKKVEGLSKHIKLEEERRSEDAQSKAALTDWLRAKASFVIEGLKEADKDEFCRCELKLQKWYGDLRGKPFAIEAENSILDISGFSKQYNCAFIWQKDGVKKLNLYLIINYFKGGKLRFKKIKPEAFEANRFYTVINKKSGEIVPMEVNFNFDDPNLIILPLAFGKRQGREFIWNDLLSLETGSLKLANGRVIEKTLYNRRTRQDEPALFVALTFERREVLDSSNIKPMNLIGVDRGENIPAVIALTDPEGCPLSRFKDSLGNPTHILRIGESYKEKQRTIQAKKEVEQRRAGGYSRKYASKAKNLADDMVRNTARDLLYYAVTQDAMLIFENLSRGFGRQGKRTFMAERQYTRMEDWLTAKLAYEGLPSKTYLSKTLAQYTSKTCSNCGFTITSADYDRVLEKLKKTATGWMTTINGKELKVEGQITYYNRYKRQNVVKDLSVELDRLSEESVNNDISSWTKGRSGEALSLLKKRFSHRPVQEKFVCLNCGFETHADEQAALNIARSWLFLRSQEYKKYQTNKTSTGNTDKRAFVETWQSFYRKKLKEVWKPAV

SEQ ID NO: 32151 - protein, 979 aa, synthetic construct
  REGION 1..979: note = engineered CasX variant
QEIGRINKIRRRLVKDSNTKKAGKTGPMKTLLVRVMTPDLRERLENLRKKPENIPQPISNTSRANLNKLLTDYTEMKKAILHVYWEEFQKDPVGLMSRVAQPASKKIDQNKLKPEMDEKGNLTTAGFACSQCGQPLFVYKLEQVSEKGKAYTNYFGRCNVAEHEKLILLAQLKPEKDSDEAVTYSLGKFGQRALDFYSIHVTKESTHPVKPLAQIAGNRYASYPVGKALSDACMGTIASFLSKYQDIIIEHQKVVKGNQKRLESLRELAGKENLEYPSVTLPPQPHTKEGVDAYNEVIARVRMWVNLNLWQKLKLSRDDAKPLLRLKGFPSFPLVERQANEVDWWDMVCNVKKLINEKKEDGKVFWQNLAGYKRQEALRPYLSSEEDRKKGKKFARYQLGDLLLHLEKKHGEDWGKVYDEAWERIDKKVEGLSKHIKLEEERRSEDAQSKAALTDWLRAKASFVIEGLKEADKDEFCRCELKLQKWYGDLRGKPFAIEAENSILDISGFSKQYNCAFIWQKDGVKKLNLYLIINYFKGGKLRFKKIKPEAFEANRFYTVINKKSGEIVPMEVNFNFDDPNLIILPLAFGKRQGREFIWNDLLSLETGSLKLANGRVIEKTLYNRRTRQDEPALFVALTFERREVLDSSNIKPMNLIGVDRGENIPAVIALTDPEGCPLSRFKDSLGNPTHILRIGESYKEKQRTIQAKKEVEQRRAGGYSRKYASKAKNLADDMVRNTARDLLYYAVTQDAMLIFENLSRGFGRQGKRTFMAERQYTRMEDWLTAKLAYEGLPSKTYLSKTLAQYTSKTCSNCGFTITSADYDRVLEKLKKTATGWMTTINGKELKVEGQITYYNRYKRQNVVKDLSVELDRLSEESVNNDISSWTKGRSGEALSLLKKRFSHRPVQEKFVCLNCGFETHADEQAALNIARSWLFLRSQEYKKYQTNKTTGKNTDKRAFVETWQSFYRKKLKEVWKPAV

SEQ ID NO: 32152 - protein, 979 aa, synthetic construct
  REGION 1..979: note = engineered CasX variant
QEIGRINKIRRRLVKDSNTKKAGKTGPMKTLLVRVMTPDLRERLENLRKKPENIPQPISNTSRANLNKLLTDYTEMKKAILHVYWEEFQKDPVGLMSRVAQPASKKIDQNKLKPEMDEKGNLTTAGFACSQCGQPLFVYKLEQVSEKGKAYTNYFGRCNVAEHEKLILLAQLKPEKDSDEAVTYSLGKFGQRALDFYSIHVTKESTHPVKPLAQIAGNRYASHPVGKALSDACMGTIASFLSKYQDIIIEHQKVVKGNQKRLESLRELAGKENLEYPSVTLPPQPHTKEGVDAYNEVIARVRMWVNLNLWQKLKLSRDDAKPLLRLKGFPSFPLVERQANEVDWWDMVCNVKKLINEKKEDGKVFWQNLAGYKRQEALRPYLSSEEDRKKGKKFARYQLGDLLLHLEKKHGEDWGKVYDEAWERIDKKVEGLSKHIKLEEERRSEDAQSKAALTDWLRAKASFVIEGLKEADKDEFCRCELKLQKWYGDLRGKPFAIEAENSILDISGFSKQYNCAFIWQKDGVKKLNLYLIINYFKGGKLRFKKIKPEAFEANRFYTVINKKSGEIVPMEVNFNFDDPNLIILPLAFGKRQGREFIWNDLLSLETGSLKLANGRVIEKTLYNRRTRQDEPALFVALTFERREVLDSSNIKPMNLIGVDRGENIPAVIALTDPEGCPLSRFKDSLGNPTHILRIGESYKEKQRTIQAKKEVEQRRAGGYSRKYASKAKNLADDMVRNTARDLLYYAVTQDAMLIFENLSRGFGRQGKRTFMAERQYTRMEDWLTAKLAYEGLPSKTYLSKTLAQYTSKTCSNCGFTITSADYDRVLEKLKKTATGWMTTINGKELKVEGQITYYNRYKRQNVVKDLSVELDRLSEESVNNDISSWTKGRSGEALSLLKKRFSHRPVQEKFVCLNCGFETHADEQAALNIARSWLFLRSQEYKKYQTNKTTGKNTDKRAFVETWQSFYRKKLKEVWKPAV

SEQ ID NO: 32153 - protein, 979 aa, synthetic construct
  REGION 1..979: note = engineered CasX variant
QEIGRINKIRRRLVKDSNTKKAGKTGPMKTLLVRVMTPDLRERLENLRKKPENIPQPISNTSRANLNKLLTDYTEMKKAILHVYWEEFQKDPVGLMSRVAQPASKKIDQNKLKPEMDEKGNLTTAGFACSQCGQPLFVYKLEQVSEKGKAYTNYFGRCNVAEHEKLILLAQLKPEKDSDEAVTYSLGKFGQRALDFYSIHVTKESTHPVKPLAQIAGNRYASSPVGKALSDACMGTIASFLSKYQDIIIEHQKVVKGNQKRLESLRELAGKENLEYPSVTLPPQPHTKEGVDAYNEVIARVRMWVNLNLWQKLKLSRDDAKPLLRLKGFPSFPLVERQANEVDWWDMVCNVKKLINEKKEDGKVFWQNLAGYKRQEALRPYLSSEEDRKKGKKFARYQLGDLLLHLEKKHGEDWGKVYDEAWERIDKKVEGLSKHIKLEEERRSEDAQSKAALTDWLRAKASFVIEGLKEADKDEFCRCELKLQKWYGDLRGKPFAIEAENSILDISGFSKQYNCAFIWQKDGVKKLNLYLIINYFKGGKLRFKKIKPEAFEANRFYTVINKKSGEIVPMEVNFNFDDPNLIILPLAFGKRQGREFIWNDLLSLETGSLKLANGRVIEKTLYNRRTRQDEPALFVALTFERREVLDSSNIKPMNLIGVDRGENIPAVIALTDPEGCPLSRFKDSLGNPTHILRIGESYKEKQRTIQAKKEVEQRRAGGYSRKYASKAKNLADDMVRNTARDLLYYAVTQDAMLIFENLSRGFGRQGKRTFMAERQYTRMEDWLTAKLAYEGLPSKTYLSKTLAQYTSKTCSNCGFTITSADYDRVLEKLKKTATGWMTTINGKELKVEGQITYYNRYKRQNVVKDLSVELDRLSEESVNNDISSWTKGRSGEALSLLKKRFSHRPVQEKFVCLNCGFETHADEQAALNIARSWLFLRSQEYKKYQTNKTTGKNTDKRAFVETWQSFYRKKLKEVWKPAV

SEQ ID NO: 32154 - protein, 979 aa, synthetic construct
  REGION 1..979: note = engineered CasX variant
QEIGRINKIRRRLVKDSNTKKAGKTGPMKTLLVRVMTPDLRERLENLRKKPENIPQPISNTSRANLNKLLTDYTEMKKAILHVYWEEFQKDPVGLMSRVAQPASKKIDQNKLKPEMDEKGNLTTAGFACSQCGQPLFVYKLEQVSEKGKAYTNYFGRCNVAEHEKLILLAQLKPEKDSDEAVTYSLGKFGQRALDFYSIHVTKESTHPVKPLAQIAGNRYASTPVGKALSDACMGTIASFLSKYQDIIIEHQKVVKGNQKRLESLRELAGKENLEYPSVTLPPQPHTKEGVDAYNEVIARVRMWVNLNLWQKLKLSRDDAKPLLRLKGFPSFPLVERQANEVDWWDMVCNVKKLINEKKEDGKVFWQNLAGYKRQEALRPYLSSEEDRKKGKKFARYQLGDLLLHLEKKHGEDWGKVYDEAWERIDKKVEGLSKHIKLEEERRSEDAQSKAALTDWLRAKASFVIEGLKEADKDEFCRCELKLQKWYGDLRGKPFAIEAENSILDISGFSKQYNCAFIWQKDGVKKLNLYLIINYFKGGKLRFKKIKPEAFEANRFYTVINKKSGEIVPMEVNFNFDDPNLIILPLAFGKRQGREFIWNDLLSLETGSLKLANGRVIEKTLYNRRTRQDEPALFVALTFERREVLDSSNIKPMNLIGVDRGENIPAVIALTDPEGCPLSRFKDSLGNPTHILRIGESYKEKQRTIQAKKEVEQRRAGGYSRKYASKAKNLADDMVRNTARDLLYYAVTQDAMLIFENLSRGFGRQGKRTFMAERQYTRMEDWLTAKLAYEGLPSKTYLSKTLAQYTSKTCSNCGFTITSADYDRVLEKLKKTATGWMTTINGKELKVEGQITYYNRYKRQNVVKDLSVELDRLSEESVNNDISSWTKGRSGEALSLLKKRFSHRPVQEKFVCLNCGFETHADEQAALNIARSWLFLRSQEYKKYQTNKTTGKNTDKRAFVETWQSFYRKKLKEVWKPAV

SEQ ID NO: 32155 - protein, 979 aa, synthetic construct
  REGION 1..979: note = engineered CasX variant
QEIGRINKIRRRLVKDSNTKKAGKTGPMKTLLVRVMTPDLRERLENLRKKPENIPQPISNTSRANLNKLLTDYTEMKKAILHVYWEEFQKDPVGLMSRVAQPASKKIDQNKLKPEMDEKGNLTTAGFACSQCGQPLFVYKLEQVSEKGKAYTNYFGRCNVAEHEKLILLAQLKPEKDSDEAVTYSLGKFGQRALDFYSIHVTKESTHPVKPLAQIAGNRYASAPVGKALSDACMGTIASFLSKYQDIIIEHQKVVKGNQKRLESLRELAGKENLEYPSVTLPPQPHTKEGVDAYNEVIARVRMWVNLNLWQKLKLSRDDAKPLLRLKGFPSFPLVERQANEVDWWDMVCNVKKLINEKKEDGKVFWQNLAGYKRQEALRPYLSSEEDRKKGKKFARYQLGDLLLHLEKKHGEDWGKVYDEAWERIDKKVEGLSKHIKLEEERRSEDAQSKAALTDWLRAKASFVIEGLKEADKDEFCRCELKLQKWYGDLRGKPFAIEAENSILDISGFSKQYNCAFIWQKDGVKKLNLYLIINYFKGGKLRFKKIKPEAFEANRFYTVINKKSGEIVPMEVNFNFDDPNLIILPLAFGKRQGREFIWNDLLSLETGSLKLANGRVIEKTLYNRRTRQDEPALFVALTFERREVLDSSNIKPMNLIGVDRGENIPAVIALTDPEGCPLSRFKDSLGNPTHILRIGESYKEKQRTIQAKKEVEQRRAGGYSRKYASKAKNLADDMVRNTARDLLYYAVTQDAMLIFENLSRGFGRQGKRTFMAERQYTRMEDWLTAKLAYEGLPSKTYLSKTLAQYTSKTCSNCGFTITSADYDRVLEKLKKTATGWMTTINGKELKVEGQITYYNRYKRQNVVKDLSVELDRLSEESVNNDISSWTKGRSGEALSLLKKRFSHRPVQEKFVCLNCGFETHADEQAALNIARSWLFLRSQEYKKYQTNKTTGKNTDKRAFVETWQSFYRKKLKEVWKPAV

SEQ ID NO: 32156 - protein, 979 aa, synthetic construct
  REGION 1..979: note = engineered CasX variant
QEIGRINKIRRRLVKDSNTKKAGKTGPMKTLLVRVMTPDLRERLENLRKKPENIPQPISNTSRANLNKLLTDYTEMKKAILHVYWEEFQKDPVGLMSRVAQPASKKIDQNKLKPEMDEKGNLTTAGFACSQCGQPLFVYKLEQVSEKGKAYTNYFGRCNVAEHEKLILLAQLKPEKDSDEAVTYSLGKFGQRALDFYSIHVTKESTHPVKPLAQIAGNRYASVPVGKALSDACMGTIASFLSKYQDIIIEHQKVVKGNQKRLESLRELAGKENLEYPSVTLPPQPHTKEGVDAYNEVIARVRMWVNLNLWQKLKLSRDDAKPLLRLKGFPSFPLVERQANEVDWWDMVCNVKKLINEKKEDGKVFWQNLAGYKRQEALRPYLSSEEDRKKGKKFARYQLGDLLLHLEKKHGEDWGKVYDEAWERIDKKVEGLSKHIKLEEERRSEDAQSKAALTDWLRAKASFVIEGLKEADKDEFCRCELKLQKWYGDLRGKPFAIEAENSILDISGFSKQYNCAFIWQKDGVKKLNLYLIINYFKGGKLRFKKIKPEAFEANRFYTVINKKSGEIVPMEVNFNFDDPNLIILPLAFGKRQGREFIWNDLLSLETGSLKLANGRVIEKTLYNRRTRQDEPALFVALTFERREVLDSSNIKPMNLIGVDRGENIPAVIALTDPEGCPLSRFKDSLGNPTHILRIGESYKEKQRTIQAKKEVEQRRAGGYSRKYASKAKNLADDMVRNTARDLLYYAVTQDAMLIFENLSRGFGRQGKRTFMAERQYTRMEDWLTAKLAYEGLPSKTYLSKTLAQYTSKTCSNCGFTITSADYDRVLEKLKKTATGWMTTINGKELKVEGQITYYNRYKRQNVVKDLSVELDRLSEESVNNDISSWTKGRSGEALSLLKKRFSHRPVQEKFVCLNCGFETHADEQAALNIARSWLFLRSQEYKKYQTNKTTGKNTDKRAFVETWQSFYRKKLKEVWKPAV

SEQ ID NO: 32157 - protein, 979 aa, synthetic construct
  REGION 1..979: note = engineered CasX variant
QEIGRINKIRRRLVKDSNTKKAGKTGPMKTLLVRVMTPDLRERLENLRKKPENIPQPISNTSRANLNKLLTDYTEMKKAILHVYWEEFQKDPVGLMSRVAQPASKKIDQNKLKPEMDEKGNLTTAGFACSQCGQPLFVYKLEQVSEKGKAYTNYFGRCNVAEHEKLIKLAQLKPEKDSDEAVTYSLGKFGQRALDFYSIHVTKESTHPVKPLAQIAGNRYASGPVGKALSDACMGTIASFLSKYQDIIIEHQKVVKGNQKRLESLRELAGKENLEYPSVTLPPQPHTKEGVDAYNEVIARVRMWVNLNLWQKLKLSRDDAKPLLRLKGFPSFPLVERQANEVDWWDMVCNVKKLINEKKEDGKVFWQNLAGYKRQEALRPYLSSEEDRKKGKKFARYQLGDLLLHLEKKHGEDWGKVYDEAWERIDKKVEGLSKHIKLEEERRSEDAQSKAALTDWLRAKASFVIEGLKEADKDEFCRCELKLQKWYGDLRGKPFAIEAENSILDISGFSKQYNCAFIWQKDGVKKLNLYLIINYFKGGKLRFKKIKPEAFEANRFYTVINKKSGEIVPMEVNFNFDDPNLIILPLAFGKRQGREFIWNDLLSLETGSLKLANGRVIEKTLYNRRTRQDEPALFVALTFERREVLDSSNIKPMNLIGVDRGENIPAVIALTDPEGCPLSRFKDSLGNPTHILRIGESYKEKQRTIQAKKEVEQRRAGGYSRKYASKAKNLADDMVRNTARDLLYYAVTQDAMLIFENLSRGFGRQGKRTFMAERQYTRMEDWLTAKLAYEGLPSKTYLSKTLAQYTSKTCSNCGFTITSADYDRVLEKLKKTATGWMTTINGKELKVEGQITYYNRYKRQNVVKDLSVELDRLSEESVNNDISSWTKGRSGEALSLLKKRFSHRPVQEKFVCLNCGFETHADEQAALNIARSWLFLRSQEYKKYQTNKTTGKNTDKRAFVETWQSFYRKKLKEVWKPAV

SEQ ID NO: 32158 - protein, 978 aa, synthetic construct
  REGION 1..978: note = engineered CasX variant
QEIGRINKIRRRLVKDSNTKKAGKTGPMKTLLVRVMTPDLRERLENLRKKPENIPQPISNTSRANLNKLLTDYTEMKKAILHVYWEEFQKDPVGLMSRVAQPASKKIDQNKLKPEMDEKGNLTTAGFACSQCGQPLFVYKLEQVSEKGKAYTNYFGRCNVAEHEKLILLAQLKPEKDSDEAVTYSLGKFGQRALDFYSIHVTKESTHPVKPLAQIAGNRYASPVGKALSDACMGTIASFLSKYQDIIIEHQKVVKGNQKRLESLRELAGKENLEYPSVTLPPQPHTKEGVDAYNEVIARVRMWVNLNLWQKLKLSRDDAKPLLRLKGFPSFPLVERQANEVDWWDMVCNVKKLINEKKEDGKVFWQNLAGYKRQEALRPYLSSEEDRKKGKKFARYQLGDLLLHLEKKHGEDWGKVYDEAWERIDKKVEGLSKHIKLEEERRSEDAQSKAALTDWLRAKASFVIEGLKEADKDEFCRCELKLQKWYGDLRGKPFAIEAENSILDISGFSKQYNCAFIWQKDGVKKLNLYLIINYFKGGKLRFKKIKPEAFEANRFYTVINKKSGEIVPMEVNFNFDDPNLIILPLAFGKRQGREFIWNDLLSLETGSLKLANGRVIEKTLYNRRTRQDEPALFVALTFERREVLDSSNIKPMNLIGVDRGENIPAVIALTDPEGCPLSRFKDSLGNPTHILRIGESYKEKQRTIQAKKEVEQRRAGGYSRKYASKAKNLADDMVRNTARDLLYYAVTQDAMLIFENLSRGFGRQGKRTFMAERQYTRMEDWLTAKLAYEGLPSKTYLSKTLAQYTSKTCSNCGFTITSADYDRVLEKLKKTATGWMTTINGKELKVEGQITYYNRYKRQNVVKDLSVELDRLSEESVNNDISSWTKGRSGEALSLLKKRFSHRPVQEKFVCLNCGFETHADEQAALNIARSWLFLRSQEYKKYQTNKTTGKNTDKRAFVETWQSFYRKKLKEVWKPAV

SEQ ID NO: 32159 - protein, 978 aa, synthetic construct
  REGION 1..978: note = engineered CasX variant
QEIGRINKIRRRLVKDSNTKKAGKTGPMKTLLVRVMTPDLRERLENLRKKPENIPQPISNTSRANLNKLLTDYTEMKKAILHVYWEEFQKDPVGLMSRVAQPASKKIDQNKLKPEMDEKGNLTTAGFACSQCGQPLFVYKLEQVSEKGKAYTNYFGRCNVAEHEKLILLAQLKPEKDSDEAVTYSLGKFGQRALDFYSIHVTKESTHPVKPLAQIAGNRYASYPVGKALSDACMGTIASFLSKYQDIIIEHQKVVKGNQKRLESLRELAGKENLEYPSVTLPPQPHTKEGVDAYNEVIARVRMWVNLNLWQKLKLSRDDAKPLLRLKKFPSFPLVERQANEVDWWDMVCNVKKLINEKKEDGKVFWQNLAGYKRQEALRPYLSSEEDRKKGKKFARYQLGDLLLHLEKKHGEDWGKVYDEAWERIDKKVEGLSKHIKLEEERRSEDAQSKAALTDWLRAKASFVIEGLKEADKDEFCRCELKLQKWYGDLRGKPFAIEAENSILDISGFSKQYNCAFIWQKDGVKKLNLYLIINYFKGGKLRFKKIKPEAFEANRFYTVINKKSGEIVPMEVNFNFDDPNLIILPLAFGKRQGREFIWNDLLSLETGSLKLANGRVIEKTLYNRRTRQDEPALFVALTFERREVLDSSNIKPMNLIGVDRGENIPAVIALTDPEGCPLSRFKDSLGNPTHILRIGESYKEKQRTIQAKKEVEQRRAGGYSRKYASKAKNLADDMVRNTARDLLYYAVTQDAMLIFENLSRGFGRQGKRTFMAERQYTRMEDWLTAKLAYEGLPSKTYLSKTLAQYTSKTCSNCGFTITSADYDRVLEKLKKTATGWMTTINGKELKVEGQITYYNRYKRQNVVKDLSVELDRLSEESVNNDISSWTKGRSGEALSLLKKRFSHRPVQEKFVCLNCGFETHADEQAALNIARSWLFLRSQEYKKYQTNKTTGNTDKRAFVETWQSFYRKKLKEVWKPAV

SEQ ID NO: 32160 - protein, 978 aa, synthetic construct
  REGION 1..978: note = engineered CasX variant
QEIGRINKIRRRLVKDSNTKKAGKTGPMKTLLVRVMTPDLRERLENLRKKPENIPQPISNTSRANLNKLLTDYTEMKKAILHVYWEEFQKDPVGLMSRVAQPASKKIDQNKLKPEMDEKGNLTTAGFACSQCGQPLFVYKLEQVSEKGKAYTNYFGRCNVAEHEKLILLAQLKPEKDSDEAVTYSLGKFGQRALDFYSIHVTKESTHPVKPLAQIAGNRYASHPVGKALSDACMGTIASFLSKYQDIIIEHQKVVKGNQKRLESLRELAGKENLEYPSVTLPPQPHTKEGVDAYNEVIARVRMWVNLNLWQKLKLSRDDAKPLLRLKKFPSFPLVERQANEVDWWDMVCNVKKLINEKKEDGKVFWQNLAGYKRQEALRPYLSSEEDRKKGKKFARYQLGDLLLHLEKKHGEDWGKVYDEAWERIDKKVEGLSKHIKLEEERRSEDAQSKAALTDWLRAKASFVIEGLKEADKDEFCRCELKLQKWYGDLRGKPFAIEAENSILDISGFSKQYNCAFIWQKDGVKKLNLYLIINYFKGGKLRFKKIKPEAFEANRFYTVINKKSGEIVPMEVNFNFDDPNLIILPLAFGKRQGREFIWNDLLSLETGSLKLANGRVIEKTLYNRRTRQDEPALFVALTFERREVLDSSNIKPMNLIGVDRGENIPAVIALTDPEGCPLSRFKDSLGNPTHILRIGESYKEKQRTIQAKKEVEQRRAGGYSRKYASKAKNLADDMVRNTARDLLYYAVTQDAMLIFENLSRGFGRQGKRTFMAERQYTRMEDWLTAKLAYEGLPSKTYLSKTLAQYTSKTCSNCGFTITSADYDRVLEKLKKTATGWMTTINGKELKVEGQITYYNRYKRQNVVKDLSVELDRLSEESVNNDISSWTKGRSGEALSLLKKRFSHRPVQEKFVCLNCGFETHADEQAALNIARSWLFLRSQEYKKYQTNKTTGNTDKRAFVETWQSFYRKKLKEVWKPAV

SEQ ID NO: 32161 - protein, 978 aa, synthetic construct
  REGION 1..978: note = engineered CasX variant
QEIGRINKIRRRLVKDSNTKKAGKTGPMKTLLVRVMTPDLRERLENLRKKPENIPQPISNTSRANLNKLLTDYTEMKKAILHVYWEEFQKDPVGLMSRVAQPASKKIDQNKLKPEMDEKGNLTTAGFACSQCGQPLFVYKLEQVSEKGKAYTNYFGRCNVAEHEKLILLAQLKPEKDSDEAVTYSLGKFGQRALDFYSIHVTKESTHPVKPLAQIAGNRYASSPVGKALSDACMGTIASFLSKYQDIIIEHQKVVKGNQKRLESLRELAGKENLEYPSVTLPPQPHTKEGVDAYNEVIARVRMWVNLNLWQKLKLSRDDAKPLLRLKKFPSFPLVERQANEVDWWDMVCNVKKLINEKKEDGKVFWQNLAGYKRQEALRPYLSSEEDRKKGKKFARYQLGDLLLHLEKKHGEDWGKVYDEAWERIDKKVEGLSKHIKLEEERRSEDAQSKAALTDWLRAKASFVIEGLKEADKDEFCRCELKLQKWYGDLRGKPFAIEAENSILDISGFSKQYNCAFIWQKDGVKKLNLYLIINYFKGGKLRFKKIKPEAFEANRFYTVINKKSGEIVPMEVNFNFDDPNLIILPLAFGKRQGREFIWNDLLSLETGSLKLANGRVIEKTLYNRRTRQDEPALFVALTFERREVLDSSNIKPMNLIGVDRGENIPAVIALTDPEGCPLSRFKDSLGNPTHILRIGESYKEKQRTIQAKKEVEQRRAGGYSRKYASKAKNLADDMVRNTARDLLYYAVTQDAMLIFENLSRGFGRQGKRTFMAERQYTRMEDWLTAKLAYEGLPSKTYLSKTLAQYTSKTCSNCGFTITSADYDRVLEKLKKTATGWMTTINGKELKVEGQITYYNRYKRQNVVKDLSVELDRLSEESVNNDISSWTKGRSGEALSLLKKRFSHRPVQEKFVCLNCGFETHADEQAALNIARSWLFLRSQEYKKYQTNKTTGNTDKRAFVETWQSFYRKKLKEVWKPAV

SEQ ID NO: 32162 - protein, 978 aa, synthetic construct
  REGION 1..978: note = engineered CasX variant
QEIGRINKIRRRLVKDSNTKKAGKTGPMKTLLVRVMTPDLRERLENLRKKPENIPQPISNTSRANLNKLLTDYTEMKKAILHVYWEEFQKDPVGLMSRVAQPASKKIDQNKLKPEMDEKGNLTTAGFACSQCGQPLFVYKLEQVSEKGKAYTNYFGRCNVAEHEKLILLAQLKPEKDSDEAVTYSLGKFGQRALDFYSIHVTKESTHPVKPLAQIAGNRYASTPVGKALSDACMGTIASFLSKYQDIIIEHQKVVKGNQKRLESLRELAGKENLEYPSVTLPPQPHTKEGVDAYNEVIARVRMWVNLNLWQKLKLSRDDAKPLLRLKKFPSFPLVERQANEVDWWDMVCNVKKLINEKKEDGKVFWQNLAGYKRQEALRPYLSSEEDRKKGKKFARYQLGDLLLHLEKKHGEDWGKVYDEAWERIDKKVEGLSKHIKLEEERRSEDAQSKAALTDWLRAKASFVIEGLKEADKDEFCRCELKLQKWYGDLRGKPFAIEAENSILDISGFSKQYNCAFIWQKDGVKKLNLYLIINYFKGGKLRFKKIKPEAFEANRFYTVINKKSGEIVPMEVNFNFDDPNLIILPLAFGKRQGREFIWNDLLSLETGSLKLANGRVIEKTLYNRRTRQDEPALFVALTFERREVLDSSNIKPMNLIGVDRGENIPAVIALTDPEGCPLSRFKDSLGNPTHILRIGESYKEKQRTIQAKKEVEQRRAGGYSRKYASKAKNLADDMVRNTARDLLYYAVTQDAMLIFENLSRGFGRQGKRTFMAERQYTRMEDWLTAKLAYEGLPSKTYLSKTLAQYTSKTCSNCGFTITSADYDRVLEKLKKTATGWMTTINGKELKVEGQITYYNRYKRQNVVKDLSVELDRLSEESVNNDISSWTKGRSGEALSLLKKRFSHRPVQEKFVCLNCGFETHADEQAALNIARSWLFLRSQEYKKYQTNKTTGNTDKRAFVETWQSFYRKKLKEVWKPAV

SEQ ID NO: 32163 - protein, 978 aa, synthetic construct
  REGION 1..978: note = engineered CasX variant
QEIGRINKIRRRLVKDSNTKKAGKTGPMKTLLVRVMTPDLRERLENLRKKPENIPQPISNTSRANLNKLLTDYTEMKKAILHVYWEEFQKDPVGLMSRVAQPASKKIDQNKLKPEMDEKGNLTTAGFACSQCGQPLFVYKLEQVSEKGKAYTNYFGRCNVAEHEKLILLAQLKPEKDSDEAVTYSLGKFGQRALDFYSIHVTKESTHPVKPLAQIAGNRYASAPVGKALSDACMGTIASFLSKYQDIIIEHQKVVKGNQKRLESLRELAGKENLEYPSVTLPPQPHTKEGVDAYNEVIARVRMWVNLNLWQKLKLSRDDAKPLLRLKKFPSFPLVERQANEVDWWDMVCNVKKLINEKKEDGKVFWQNLAGYKRQEALRPYLSSEEDRKKGKKFARYQLGDLLLHLEKKHGEDWGKVYDEAWERIDKKVEGLSKHIKLEEERRSEDAQSKAALTDWLRAKASFVIEGLKEADKDEFCRCELKLQKWYGDLRGKPFAIEAENSILDISGFSKQYNCAFIWQKDGVKKLNLYLIINYFKGGKLRFKKIKPEAFEANRFYTVINKKSGEIVPMEVNFNFDDPNLIILPLAFGKRQGREFIWNDLLSLETGSLKLANGRVIEKTLYNRRTRQDEPALFVALTFERREVLDSSNIKPMNLIGVDRGENIPAVIALTDPEGCPLSRFKDSLGNPTHILRIGESYKEKQRTIQAKKEVEQRRAGGYSRKYASKAKNLADDMVRNTARDLLYYAVTQDAMLIFENLSRGFGRQGKRTFMAERQYTRMEDWLTAKLAYEGLPSKTYLSKTLAQYTSKTCSNCGFTITSADYDRVLEKLKKTATGWMTTINGKELKVEGQITYYNRYKRQNVVKDLSVELDRLSEESVNNDISSWTKGRSGEALSLLKKRFSHRPVQEKFVCLNCGFETHADEQAALNIARSWLFLRSQEYKKYQTNKTTGNTDKRAFVETWQSFYRKKLKEVWKPAV

SEQ ID NO: 32164 - protein, 978 aa, synthetic construct
  REGION 1..978: note = engineered CasX variant
QEIGRINKIRRRLVKDSNTKKAGKTGPMKTLLVRVMTPDLRERLENLRKKPENIPQPISNTSRANLNKLLTDYTEMKKAILHVYWEEFQKDPVGLMSRVAQPASKKIDQNKLKPEMDEKGNLTTAGFACSQCGQPLFVYKLEQVSEKGKAYTNYFGRCNVAEHEKLILLAQLKPEKDSDEAVTYSLGKFGQRALDFYSIHVTKESTHPVKPLAQIAGNRYASVPVGKALSDACMGTIASFLSKYQDIIIEHQKVVKGNQKRLESLRELAGKENLEYPSVTLPPQPHTKEGVDAYNEVIARVRMWVNLNLWQKLKLSRDDAKPLLRLKKFPSFPLVERQANEVDWWDMVCNVKKLINEKKEDGKVFWQNLAGYKRQEALRPYLSSEEDRKKGKKFARYQLGDLLLHLEKKHGEDWGKVYDEAWERIDKKVEGLSKHIKLEEERRSEDAQSKAALTDWLRAKASFVIEGLKEADKDEFCRCELKLQKWYGDLRGKPFAIEAENSILDISGFSKQYNCAFIWQKDGVKKLNLYLIINYFKGGKLRFKKIKPEAFEANRFYTVINKKSGEIVPMEVNFNFDDPNLIILPLAFGKRQGREFIWNDLLSLETGSLKLANGRVIEKTLYNRRTRQDEPALFVALTFERREVLDSSNIKPMNLIGVDRGENIPAVIALTDPEGCPLSRFKDSLGNPTHILRIGESYKEKQRTIQAKKEVEQRRAGGYSRKYASKAKNLADDMVRNTARDLLYYAVTQDAMLIFENLSRGFGRQGKRTFMAERQYTRMEDWLTAKLAYEGLPSKTYLSKTLAQYTSKTCSNCGFTITSADYDRVLEKLKKTATGWMTTINGKELKVEGQITYYNRYKRQNVVKDLSVELDRLSEESVNNDISSWTKGRSGEALSLLKKRFSHRPVQEKFVCLNCGFETHADEQAALNIARSWLFLRSQEYKKYQTNKTTGNTDKRAFVETWQSFYRKKLKEVWKPAV

SEQ ID NO: 32165 - protein, 978 aa, synthetic construct
  REGION 1..978: note = engineered CasX variant
QEIGRINKIRRRLVKDSNTKKAGKTGPMKTLLVRVMTPDLRERLENLRKKPENIPQPISNTSRANLNKLLTDYTEMKKAILHVYWEEFQKDPVGLMSRVAQPASKKIDQNKLKPEMDEKGNLTTAGFACSQCGQPLFVYKLEQVSEKGKAYTNYFGRCNVAEHEKLIKLAQLKPEKDSDEAVTYSLGKFGQRALDFYSIHVTKESTHPVKPLAQIAGNRYASGPVGKALSDACMGTIASFLSKYQDIIIEHQKVVKGNQKRLESLRELAGKENLEYPSVTLPPQPHTKEGVDAYNEVIARVRMWVNLNLWQKLKLSRDDAKPLLRLKKFPSFPLVERQANEVDWWDMVCNVKKLINEKKEDGKVFWQNLAGYKRQEALRPYLSSEEDRKKGKKFARYQLGDLLLHLEKKHGEDWGKVYDEAWERIDKKVEGLSKHIKLEEERRSEDAQSKAALTDWLRAKASFVIEGLKEADKDEFCRCELKLQKWYGDLRGKPFAIEAENSILDISGFSKQYNCAFIWQKDGVKKLNLYLIINYFKGGKLRFKKIKPEAFEANRFYTVINKKSGEIVPMEVNFNFDDPNLIILPLAFGKRQGREFIWNDLLSLETGSLKLANGRVIEKTLYNRRTRQDEPALFVALTFERREVLDSSNIKPMNLIGVDRGENIPAVIALTDPEGCPLSRFKDSLGNPTHILRIGESYKEKQRTIQAKKEVEQRRAGGYSRKYASKAKNLADDMVRNTARDLLYYAVTQDAMLIFENLSRGFGRQGKRTFMAERQYTRMEDWLTAKLAYEGLPSKTYLSKTLAQYTSKTCSNCGFTITSADYDRVLEKLKKTATGWMTTINGKELKVEGQITYYNRYKRQNVVKDLSVELDRLSEESVNNDISSWTKGRSGEALSLLKKRFSHRPVQEKFVCLNCGFETHADEQAALNIARSWLFLRSQEYKKYQTNKTTGNTDKRAFVETWQSFYRKKLKEVWKPAV

SEQ ID NO: 32166 - protein, 977 aa, synthetic construct
  REGION 1..977: note = engineered CasX variant
QEIGRINKIRRRLVKDSNTKKAGKTGPMKTLLVRVMTPDLRERLENLRKKPENIPQPISNTSRANLNKLLTDYTEMKKAILHVYWEEFQKDPVGLMSRVAQPASKKIDQNKLKPEMDEKGNLTTAGFACSQCGQPLFVYKLEQVSEKGKAYTNYFGRCNVAEHEKLILLAQLKPEKDSDEAVTYSLGKFGQRALDFYSIHVTKESTHPVKPLAQIAGNRYASPVGKALSDACMGTIASFLSKYQDIIIEHQKVVKGNQKRLESLRELAGKENLEYPSVTLPPQPHTKEGVDAYNEVIARVRMWVNLNLWQKLKLSRDDAKPLLRLKKFPSFPLVERQANEVDWWDMVCNVKKLINEKKEDGKVFWQNLAGYKRQEALRPYLSSEEDRKKGKKFARYQLGDLLLHLEKKHGEDWGKVYDEAWERIDKKVEGLSKHIKLEEERRSEDAQSKAALTDWLRAKASFVIEGLKEADKDEFCRCELKLQKWYGDLRGKPFAIEAENSILDISGFSKQYNCAFIWQKDGVKKLNLYLIINYFKGGKLRFKKIKPEAFEANRFYTVINKKSGEIVPMEVNFNFDDPNLIILPLAFGKRQGREFIWNDLLSLETGSLKLANGRVIEKTLYNRRTRQDEPALFVALTFERREVLDSSNIKPMNLIGVDRGENIPAVIALTDPEGCPLSRFKDSLGNPTHILRIGESYKEKQRTIQAKKEVEQRRAGGYSRKYASKAKNLADDMVRNTARDLLYYAVTQDAMLIFENLSRGFGRQGKRTFMAERQYTRMEDWLTAKLAYEGLPSKTYLSKTLAQYTSKTCSNCGFTITSADYDRVLEKLKKTATGWMTTINGKELKVEGQITYYNRYKRQNVVKDLSVELDRLSEESVNNDISSWTKGRSGEALSLLKKRFSHRPVQEKFVCLNCGFETHADEQAALNIARSWLFLRSQEYKKYQTNKTTGNTDKRAFVETWQSFYRKKLKEVWKPAV

SEQ ID NO: 32167 - protein, 978 aa, synthetic construct
  REGION 1..978: note = engineered CasX variant
QEIGRINKIRRRLVKDSNTKKAGKTGPMKTLLVRVMTPDLRERLENLRKKPENIPQPISNTSRANLNKLLTDYTEMKKAILHVYWEEFQKDPVGLMSRVAQPASKKIDQNKLKPEMDEKGNLTTAGFACSQCGQPLFVYKLEQVSEKGKAYTNYFGRCNVAEHEKLILLAQLKPEKDSDEAVTYSLGKFGQRALDFYSIHVTKESTHPVKPLAQIAGNRYASYPVGKALSDACMGTIASFLSKYQDIIIEHQKVVKGNQKRLESLRELAGKENLEYPSVTLPPQPHTKEGVDAYNEVIARVRMWVNLNLWQKLKLSRDDAKPLLRLKGFPSFPLVERQANEVDWWDMVCNVKKLINEKKEDGKVFWQNLAGYKRQEALRPYLSSEEDRKKGKKFARYQLGDLLLHLEKKHGEDWGKVYDEAWERIDKKVEGLSKHIKLEEERRSEDAQSKAALTDWLRAKASFVIEGLKEADKDEFCRCELKLQKWYGDLRGKPFAIEAENSILDISGFSKQYNCAFIWQKDGVKKLNLYLIINYFKGGKLRFKKIKPEAFEANRFYTVINKKSGEIVPMEVNFNFDDPNLIILPLAFGKRQGREFIWNDLLSLETGSLKLANGRVIEKTLYNRRTRQDEPALFVALTFERREVLDSSNIKPMNLIGVDRGENIPAVIALTDPEGCPLSRFKDSLGNPTHILRIGERYKEKQRTIQAKKEVEQRRAGGYSRKYASKAKNLADDMVRNTARDLLYYAVTQDAMLIFENLSRGFGRQGKRTFMAERQYTRMEDWLTAKLAYEGLPSKTYLSKTLAQYTSKTCSNCGFTITSADYDRVLEKLKKTATGWMTTINGKELKVEGQITYYNRYKRQNVVKDLSVELDRLSEESVNNDISSWTKGRSGEALSLLKKRFSHRPVQEKFVCLNCGFETHADEQAALNIARSWLFLRSQEYKKYQTNKTTGNTDKRAFVETWQSFYRKKLKEVWKPAV

SEQ ID NO: 32168 - protein, 978 aa, synthetic construct
  REGION 1..978: note = engineered CasX variant
QEIGRINKIRRRLVKDSNTKKAGKTGPMKTLLVRVMTPDLRERLENLRKKPENIPQPISNTSRANLNKLLTDYTEMKKAILHVYWEEFQKDPVGLMSRVAQPASKKIDQNKLKPEMDEKGNLTTAGFACSQCGQPLFVYKLEQVSEKGKAYTNYFGRCNVAEHEKLILLAQLKPEKDSDEAVTYSLGKFGQRALDFYSIHVTKESTHPVKPLAQIAGNRYASHPVGKALSDACMGTIASFLSKYQDIIIEHQKVVKGNQKRLESLRELAGKENLEYPSVTLPPQPHTKEGVDAYNEVIARVRMWVNLNLWQKLKLSRDDAKPLLRLKGFPSFPLVERQANEVDWWDMVCNVKKLINEKKEDGKVFWQNLAGYKRQEALRPYLSSEEDRKKGKKFARYQLGDLLLHLEKKHGEDWGKVYDEAWERIDKKVEGLSKHIKLEEERRSEDAQSKAALTDWLRAKASFVIEGLKEADKDEFCRCELKLQKWYGDLRGKPFAIEAENSILDISGFSKQYNCAFIWQKDGVKKLNLYLIINYFKGGKLRFKKIKPEAFEANRFYTVINKKSGEIVPMEVNFNFDDPNLIILPLAFGKRQGREFIWNDLLSLETGSLKLANGRVIEKTLYNRRTRQDEPALFVALTFERREVLDSSNIKPMNLIGVDRGENIPAVIALTDPEGCPLSRFKDSLGNPTHILRIGERYKEKQRTIQAKKEVEQRRAGGYSRKYASKAKNLADDMVRNTARDLLYYAVTQDAMLIFENLSRGFGRQGKRTFMAERQYTRMEDWLTAKLAYEGLPSKTYLSKTLAQYTSKTCSNCGFTITSADYDRVLEKLKKTATGWMTTINGKELKVEGQITYYNRYKRQNVVKDLSVELDRLSEESVNNDISSWTKGRSGEALSLLKKRFSHRPVQEKFVCLNCGFETHADEQAALNIARSWLFLRSQEYKKYQTNKTTGNTDKRAFVETWQSFYRKKLKEVWKPAV

SEQ ID NO: 32169 - protein, 978 aa, synthetic construct
  REGION 1..978: note = engineered CasX variant
QEIGRINKIRRRLVKDSNTKKAGKTGPMKTLLVRVMTPDLRERLENLRKKPENIPQPISNTSRANLNKLLTDYTEMKKAILHVYWEEFQKDPVGLMSRVAQPASKKIDQNKLKPEMDEKGNLTTAGFACSQCGQPLFVYKLEQVSEKGKAYTNYFGRCNVAEHEKLILLAQLKPEKDSDEAVTYSLGKFGQRALDFYSIHVTKESTHPVKPLAQIAGNRYASSPVGKALSDACMGTIASFLSKYQDIIIEHQKVVKGNQKRLESLRELAGKENLEYPSVTLPPQPHTKEGVDAYNEVIARVRMWVNLNLWQKLKLSRDDAKPLLRLKGFPSFPLVERQANEVDWWDMVCNVKKLINEKKEDGKVFWQNLAGYKRQEALRPYLSSEEDRKKGKKFARYQLGDLLLHLEKKHGEDWGKVYDEAWERIDKKVEGLSKHIKLEEERRSEDAQSKAALTDWLRAKASFVIEGLKEADKDEFCRCELKLQKWYGDLRGKPFAIEAENSILDISGFSKQYNCAFIWQKDGVKKLNLYLIINYFKGGKLRFKKIKPEAFEANRFYTVINKKSGEIVPMEVNFNFDDPNLIILPLAFGKRQGREFIWNDLLSLETGSLKLANGRVIEKTLYNRRTRQDEPALFVALTFERREVLDSSNIKPMNLIGVDRGENIPAVIALTDPEGCPLSRFKDSLGNPTHILRIGERYKEKQRTIQAKKEVEQRRAGGYSRKYASKAKNLADDMVRNTARDLLYYAVTQDAMLIFENLSRGFGRQGKRTFMAERQYTRMEDWLTAKLAYEGLPSKTYLSKTLAQYTSKTCSNCGFTITSADYDRVLEKLKKTATGWMTTINGKELKVEGQITYYNRYKRQNVVKDLSVELDRLSEESVNNDISSWTKGRSGEALSLLKKRFSHRPVQEKFVCLNCGFETHADEQAALNIARSWLFLRSQEYKKYQTNKTTGNTDKRAFVETWQSFYRKKLKEVWKPAV

SEQ ID NO: 32170 - protein, 978 aa, synthetic construct
  REGION 1..978: note = engineered CasX variant
QEIGRINKIRRRLVKDSNTKKAGKTGPMKTLLVRVMTPDLRERLENLRKKPENIPQPISNTSRANLNKLLTDYTEMKKAILHVYWEEFQKDPVGLMSRVAQPASKKIDQNKLKPEMDEKGNLTTAGFACSQCGQPLFVYKLEQVSEKGKAYTNYFGRCNVAEHEKLILLAQLKPEKDSDEAVTYSLGKFGQRALDFYSIHVTKESTHPVKPLAQIAGNRYASTPVGKALSDACMGTIASFLSKYQDIIIEHQKVVKGNQKRLESLRELAGKENLEYPSVTLPPQPHTKEGVDAYNEVIARVRMWVNLNLWQKLKLSRDDAKPLLRLKGFPSFPLVERQANEVDWWDMVCNVKKLINEKKEDGKVFWQNLAGYKRQEALRPYLSSEEDRKKGKKFARYQLGDLLLHLEKKHGEDWGKVYDEAWERIDKKVEGLSKHIKLEEERRSEDAQSKAALTDWLRAKASFVIEGLKEADKDEFCRCELKLQKWYGDLRGKPFAIEAENSILDISGFSKQYNCAFIWQKDGVKKLNLYLIINYFKGGKLRFKKIKPEAFEANRFYTVINKKSGEIVPMEVNFNFDDPNLIILPLAFGKRQGREFIWNDLLSLETGSLKLANGRVIEKTLYNRRTRQDEPALFVALTFERREVLDSSNIKPMNLIGVDRGENIPAVIALTDPEGCPLSRFKDSLGNPTHILRIGERYKEKQRTIQAKKEVEQRRAGGYSRKYASKAKNLADDMVRNTARDLLYYAVTQDAMLIFENLSRGFGRQGKRTFMAERQYTRMEDWLTAKLAYEGLPSKTYLSKTLAQYTSKTCSNCGFTITSADYDRVLEKLKKTATGWMTTINGKELKVEGQITYYNRYKRQNVVKDLSVELDRLSEESVNNDISSWTKGRSGEALSLLKKRFSHRPVQEKFVCLNCGFETHADEQAALNIARSWLFLRSQEYKKYQTNKTTGNTDKRAFVETWQSFYRKKLKEVWKPAV

SEQ ID NO: 32171 - protein, 978 aa, synthetic construct
  REGION 1..978: note = engineered CasX variant
QEIGRINKIRRRLVKDSNTKKAGKTGPMKTLLVRVMTPDLRERLENLRKKPENIPQPISNTSRANLNKLLTDYTEMKKAILHVYWEEFQKDPVGLMSRVAQPASKKIDQNKLKPEMDEKGNLTTAGFACSQCGQPLFVYKLEQVSEKGKAYTNYFGRCNVAEHEKLILLAQLKPEKDSDEAVTYSLGKFGQRALDFYSIHVTKESTHPVKPLAQIAGNRYASAPVGKALSDACMGTIASFLSKYQDIIIEHQKVVKGNQKRLESLRELAGKENLEYPSVTLPPQPHTKEGVDAYNEVIARVRMWVNLNLWQKLKLSRDDAKPLLRLKGFPSFPLVERQANEVDWWDMVCNVKKLINEKKEDGKVFWQNLAGYKRQEALRPYLSSEEDRKKGKKFARYQLGDLLLHLEKKHGEDWGKVYDEAWERIDKKVEGLSKHIKLEEERRSEDAQSKAALTDWLRAKASFVIEGLKEADKDEFCRCELKLQKWYGDLRGKPFAIEAENSILDISGFSKQYNCAFIWQKDGVKKLNLYLIINYFKGGKLRFKKIKPEAFEANRFYTVINKKSGEIVPMEVNFNFDDPNLIILPLAFGKRQGREFIWNDLLSLETGSLKLANGRVIEKTLYNRRTRQDEPALFVALTFERREVLDSSNIKPMNLIGVDRGENIPAVIALTDPEGCPLSRFKDSLGNPTHILRIGERYKEKQRTIQAKKEVEQRRAGGYSRKYASKAKNLADDMVRNTARDLLYYAVTQDAMLIFENLSRGFGRQGKRTFMAERQYTRMEDWLTAKLAYEGLPSKTYLSKTLAQYTSKTCSNCGFTITSADYDRVLEKLKKTATGWMTTINGKELKVEGQITYYNRYKRQNVVKDLSVELDRLSEESVNNDISSWTKGRSGEALSLLKKRFSHRPVQEKFVCLNCGFETHADEQAALNIARSWLFLRSQEYKKYQTNKTTGNTDKRAFVETWQSFYRKKLKEVWKPAV

SEQ ID NO: 32172 - protein, 978 aa, synthetic construct
  REGION 1..978: note = engineered CasX variant
QEIGRINKIRRRLVKDSNTKKAGKTGPMKTLLVRVMTPDLRERLENLRKKPENIPQPISNTSRANLNKLLTDYTEMKKAILHVYWEEFQKDPVGLMSRVAQPASKKIDQNKLKPEMDEKGNLTTAGFACSQCGQPLFVYKLEQVSEKGKAYTNYFGRCNVAEHEKLILLAQLKPEKDSDEAVTYSLGKFGQRALDFYSIHVTKESTHPVKPLAQIAGNRYASVPVGKALSDACMGTIASFLSKYQDIIIEHQKVVKGNQKRLESLRELAGKENLEYPSVTLPPQPHTKEGVDAYNEVIARVRMWVNLNLWQKLKLSRDDAKPLLRLKGFPSFPLVERQANEVDWWDMVCNVKKLINEKKEDGKVFWQNLAGYKRQEALRPYLSSEEDRKKGKKFARYQLGDLLLHLEKKHGEDWGKVYDEAWERIDKKVEGLSKHIKLEEERRSEDAQSKAALTDWLRAKASFVIEGLKEADKDEFCRCELKLQKWYGDLRGKPFAIEAENSILDISGFSKQYNCAFIWQKDGVKKLNLYLIINYFKGGKLRFKKIKPEAFEANRFYTVINKKSGEIVPMEVNFNFDDPNLIILPLAFGKRQGREFIWNDLLSLETGSLKLANGRVIEKTLYNRRTRQDEPALFVALTFERREVLDSSNIKPMNLIGVDRGENIPAVIALTDPEGCPLSRFKDSLGNPTHILRIGERYKEKQRTIQAKKEVEQRRAGGYSRKYASKAKNLADDMVRNTARDLLYYAVTQDAMLIFENLSRGFGRQGKRTFMAERQYTRMEDWLTAKLAYEGLPSKTYLSKTLAQYTSKTCSNCGFTITSADYDRVLEKLKKTATGWMTTINGKELKVEGQITYYNRYKRQNVVKDLSVELDRLSEESVNNDISSWTKGRSGEALSLLKKRFSHRPVQEKFVCLNCGFETHADEQAALNIARSWLFLRSQEYKKYQTNKTTGNTDKRAFVETWQSFYRKKLKEVWKPAV

SEQ ID NO: 32173 - protein, 978 aa, synthetic construct
  REGION 1..978: note = engineered CasX variant
QEIGRINKIRRRLVKDSNTKKAGKTGPMKTLLVRVMTPDLRERLENLRKKPENIPQPISNTSRANLNKLLTDYTEMKKAILHVYWEEFQKDPVGLMSRVAQPASKKIDQNKLKPEMDEKGNLTTAGFACSQCGQPLFVYKLEQVSEKGKAYTNYFGRCNVAEHEKLIKLAQLKPEKDSDEAVTYSLGKFGQRALDFYSIHVTKESTHPVKPLAQIAGNRYASGPVGKALSDACMGTIASFLSKYQDIIIEHQKVVKGNQKRLESLRELAGKENLEYPSVTLPPQPHTKEGVDAYNEVIARVRMWVNLNLWQKLKLSRDDAKPLLRLKGFPSFPLVERQANEVDWWDMVCNVKKLINEKKEDGKVFWQNLAGYKRQEALRPYLSSEEDRKKGKKFARYQLGDLLLHLEKKHGEDWGKVYDEAWERIDKKVEGLSKHIKLEEERRSEDAQSKAALTDWLRAKASFVIEGLKEADKDEFCRCELKLQKWYGDLRGKPFAIEAENSILDISGFSKQYNCAFIWQKDGVKKLNLYLIINYFKGGKLRFKKIKPEAFEANRFYTVINKKSGEIVPMEVNFNFDDPNLIILPLAFGKRQGREFIWNDLLSLETGSLKLANGRVIEKTLYNRRTRQDEPALFVALTFERREVLDSSNIKPMNLIGVDRGENIPAVIALTDPEGCPLSRFKDSLGNPTHILRIGERYKEKQRTIQAKKEVEQRRAGGYSRKYASKAKNLADDMVRNTARDLLYYAVTQDAMLIFENLSRGFGRQGKRTFMAERQYTRMEDWLTAKLAYEGLPSKTYLSKTLAQYTSKTCSNCGFTITSADYDRVLEKLKKTATGWMTTINGKELKVEGQITYYNRYKRQNVVKDLSVELDRLSEESVNNDISSWTKGRSGEALSLLKKRFSHRPVQEKFVCLNCGFETHADEQAALNIARSWLFLRSQEYKKYQTNKTTGNTDKRAFVETWQSFYRKKLKEVWKPAV

SEQ ID NO: 32174 - protein, 977 aa, synthetic construct
  REGION 1..977: note = engineered CasX variant
QEIGRINKIRRRLVKDSNTKKAGKTGPMKTLLVRVMTPDLRERLENLRKKPENIPQPISNTSRANLNKLLTDYTEMKKAILHVYWEEFQKDPVGLMSRVAQPASKKIDQNKLKPEMDEKGNLTTAGFACSQCGQPLFVYKLEQVSEKGKAYTNYFGRCNVAEHEKLILLAQLKPEKDSDEAVTYSLGKFGQRALDFYSIHVTKESTHPVKPLAQIAGNRYASPVGKALSDACMGTIASFLSKYQDIIIEHQKVVKGNQKRLESLRELAGKENLEYPSVTLPPQPHTKEGVDAYNEVIARVRMWVNLNLWQKLKLSRDDAKPLLRLKGFPSFPLVERQANEVDWWDMVCNVKKLINEKKEDGKVFWQNLAGYKRQEALRPYLSSEEDRKKGKKFARYQLGDLLLHLEKKHGEDWGKVYDEAWERIDKKVEGLSKHIKLEEERRSEDAQSKAALTDWLRAKASFVIEGLKEADKDEFCRCELKLQKWYGDLRGKPFAIEAENSILDISGFSKQYNCAFIWQKDGVKKLNLYLIINYFKGGKLRFKKIKPEAFEANRFYTVINKKSGEIVPMEVNFNFDDPNLIILPLAFGKRQGREFIWNDLLSLETGSLKLANGRVIEKTLYNRRTRQDEPALFVALTFERREVLDSSNIKPMNLIGVDRGENIPAVIALTDPEGCPLSRFKDSLGNPTHILRIGERYKEKQRTIQAKKEVEQRRAGGYSRKYASKAKNLADDMVRNTARDLLYYAVTQDAMLIFENLSRGFGRQGKRTFMAERQYTRMEDWLTAKLAYEGLPSKTYLSKTLAQYTSKTCSNCGFTITSADYDRVLEKLKKTATGWMTTINGKELKVEGQITYYNRYKRQNVVKDLSVELDRLSEESVNNDISSWTKGRSGEALSLLKKRFSHRPVQEKFVCLNCGFETHADEQAALNIARSWLFLRSQEYKKYQTNKTTGNTDKRAFVETWQSFYRKKLKEVWKPAV

SEQ ID NO: 32175 - protein, 978 aa, synthetic construct
  REGION 1..978: note = engineered CasX variant
QEIGRINKIRRRLVKDSNTKKAGKTGPMKTLLVRVMTPDLRERLENLRKKPENIPQPISNTSRANLNKLLTDYTEMKKAILHVYWEEFQKDPVGLMSRVAQPASKKIDQNKLKPEMDEKGNLTTAGFACSQCGQPLFVYKLEQVSEKGKAYTNYFGRCNVAEHEKLILLAQLKPEKDSDEAVTYSLGKFGQRALDFYSIHVTKESTHPVKPLAQIAGNRYASYPVGKALSDACMGTIASFLSKYQDIIIEHQKVVKGNQKRLESLRELAGKENLEYPSVTLPPQPHTKEGVDAYNEVIARVRMWVNLNLWQKLKLSRDDAKPLLRLKGFPSFPLVERQANEVDWWDMVCNVKKLINEKKEDGKVFWQNLAGYKRQEALRPYLSSEEDRKKGKKFARYQLGDLLLHLEKKHGEDWGKVYDEAWERIDKKVEGLSKHIKLEEERRSEDAQSKAALTDWLRAKASFVIEGLKEADKDEFCRCELKLQKWYGDLRGKPFAIEAENSILDISGFSKQYNCAFIWQKDGVKKLNLYLIINYFKGGKLRFKKIKPEAFEANRFYTVINKKSGEIVPMEVNFNFDDPNLIILPLAFGKRQGREFIWNDLLSLETGSLQLANGRVIEKTLYNRRTRQDEPALFVALTFERREVLDSSNIKPMNLIGVDRGENIPAVIALTDPEGCPLSRFKDSLGNPTHILRIGESYKEKQRTIQAKKEVEQRRAGGYSRKYASKAKNLADDMVRNTARDLLYYAVTQDAMLIFENLSRGFGRQGKRTFMAERQYTRMEDWLTAKLAYEGLPSKTYLSKTLAQYTSKTCSNCGFTITSADYDRVLEKLKKTATGWMTTINGKELKVEGQITYYNRYKRQNVVKDLSVELDRLSEESVNNDISSWTKGRSGEALSLLKKRFSHRPVQEKFVCLNCGFETHADEQAALNIARSWLFLRSQEYKKYQTNKTTGNTDKRAFVETWQSFYRKKLKEVWKPAV

SEQ ID NO: 32176 - protein, 978 aa, synthetic construct
  REGION 1..978: note = engineered CasX variant
QEIGRINKIRRRLVKDSNTKKAGKTGPMKTLLVRVMTPDLRERLENLRKKPENIPQPISNTSRANLNKLLTDYTEMKKAILHVYWEEFQKDPVGLMSRVAQPASKKIDQNKLKPEMDEKGNLTTAGFACSQCGQPLFVYKLEQVSEKGKAYTNYFGRCNVAEHEKLILLAQLKPEKDSDEAVTYSLGKFGQRALDFYSIHVTKESTHPVKPLAQIAGNRYASHPVGKALSDACMGTIASFLSKYQDIIIEHQKVVKGNQKRLESLRELAGKENLEYPSVTLPPQPHTKEGVDAYNEVIARVRMWVNLNLWQKLKLSRDDAKPLLRLKGFPSFPLVERQANEVDWWDMVCNVKKLINEKKEDGKVFWQNLAGYKRQEALRPYLSSEEDRKKGKKFARYQLGDLLLHLEKKHGEDWGKVYDEAWERIDKKVEGLSKHIKLEEERRSEDAQSKAALTDWLRAKASFVIEGLKEADKDEFCRCELKLQKWYGDLRGKPFAIEAENSILDISGFSKQYNCAFIWQKDGVKKLNLYLIINYFKGGKLRFKKIKPEAFEANRFYTVINKKSGEIVPMEVNFNFDDPNLIILPLAFGKRQGREFIWNDLLSLETGSLQLANGRVIEKTLYNRRTRQDEPALFVALTFERREVLDSSNIKPMNLIGVDRGENIPAVIALTDPEGCPLSRFKDSLGNPTHILRIGESYKEKQRTIQAKKEVEQRRAGGYSRKYASKAKNLADDMVRNTARDLLYYAVTQDAMLIFENLSRGFGRQGKRTFMAERQYTRMEDWLTAKLAYEGLPSKTYLSKTLAQYTSKTCSNCGFTITSADYDRVLEKLKKTATGWMTTINGKELKVEGQITYYNRYKRQNVVKDLSVELDRLSEESVNNDISSWTKGRSGEALSLLKKRFSHRPVQEKFVCLNCGFETHADEQAALNIARSWLFLRSQEYKKYQTNKTTGNTDKRAFVETWQSFYRKKLKEVWKPAV

SEQ ID NO: 32177 - protein, 978 aa, synthetic construct
  REGION 1..978: note = engineered CasX variant
QEIGRINKIRRRLVKDSNTKKAGKTGPMKTLLVRVMTPDLRERLENLRKKPENIPQPISNTSRANLNKLLTDYTEMKKAILHVYWEEFQKDPVGLMSRVAQPASKKIDQNKLKPEMDEKGNLTTAGFACSQCGQPLFVYKLEQVSEKGKAYTNYFGRCNVAEHEKLILLAQLKPEKDSDEAVTYSLGKFGQRALDFYSIHVTKESTHPVKPLAQIAGNRYASSPVGKALSDACMGTIASFLSKYQDIIIEHQKVVKGNQKRLESLRELAGKENLEYPSVTLPPQPHTKEGVDAYNEVIARVRMWVNLNLWQKLKLSRDDAKPLLRLKGFPSFPLVERQANEVDWWDMVCNVKKLINEKKEDGKVFWQNLAGYKRQEALRPYLSSEEDRKKGKKFARYQLGDLLLHLEKKHGEDWGKVYDEAWERIDKKVEGLSKHIKLEEERRSEDAQSKAALTDWLRAKASFVIEGLKEADKDEFCRCELKLQKWYGDLRGKPFAIEAENSILDISGFSKQYNCAFIWQKDGVKKLNLYLIINYFKGGKLRFKKIKPEAFEANRFYTVINKKSGEIVPMEVNFNFDDPNLIILPLAFGKRQGREFIWNDLLSLETGSLQLANGRVIEKTLYNRRTRQDEPALFVALTFERREVLDSSNIKPMNLIGVDRGENIPAVIALTDPEGCPLSRFKDSLGNPTHILRIGESYKEKQRTIQAKKEVEQRRAGGYSRKYASKAKNLADDMVRNTARDLLYYAVTQDAMLIFENLSRGFGRQGKRTFMAERQYTRMEDWLTAKLAYEGLPSKTYLSKTLAQYTSKTCSNCGFTITSADYDRVLEKLKKTATGWMTTINGKELKVEGQITYYNRYKRQNVVKDLSVELDRLSEESVNNDISSWTKGRSGEALSLLKKRFSHRPVQEKFVCLNCGFETHADEQAALNIARSWLFLRSQEYKKYQTNKTTGNTDKRAFVETWQSFYRKKLKEVWKPAV

SEQ ID NO: 32178 - protein, 978 aa, synthetic construct
  REGION 1..978: note = engineered CasX variant
QEIGRINKIRRRLVKDSNTKKAGKTGPMKTLLVRVMTPDLRERLENLRKKPENIPQPISNTSRANLNKLLTDYTEMKKAILHVYWEEFQKDPVGLMSRVAQPASKKIDQNKLKPEMDEKGNLTTAGFACSQCGQPLFVYKLEQVSEKGKAYTNYFGRCNVAEHEKLILLAQLKPEKDSDEAVTYSLGKFGQRALDFYSIHVTKESTHPVKPLAQIAGNRYASTPVGKALSDACMGTIASFLSKYQDIIIEHQKVVKGNQKRLESLRELAGKENLEYPSVTLPPQPHTKEGVDAYNEVIARVRMWVNLNLWQKLKLSRDDAKPLLRLKGFPSFPLVERQANEVDWWDMVCNVKKLINEKKEDGKVFWQNLAGYKRQEALRPYLSSEEDRKKGKKFARYQLGDLLLHLEKKHGEDWGKVYDEAWERIDKKVEGLSKHIKLEEERRSEDAQSKAALTDWLRAKASFVIEGLKEADKDEFCRCELKLQKWYGDLRGKPFAIEAENSILDISGFSKQYNCAFIWQKDGVKKLNLYLIINYFKGGKLRFKKIKPEAFEANRFYTVINKKSGEIVPMEVNFNFDDPNLIILPLAFGKRQGREFIWNDLLSLETGSLQLANGRVIEKTLYNRRTRQDEPALFVALTFERREVLDSSNIKPMNLIGVDRGENIPAVIALTDPEGCPLSRFKDSLGNPTHILRIGESYKEKQRTIQAKKEVEQRRAGGYSRKYASKAKNLADDMVRNTARDLLYYAVTQDAMLIFENLSRGFGRQGKRTFMAERQYTRMEDWLTAKLAYEGLPSKTYLSKTLAQYTSKTCSNCGFTITSADYDRVLEKLKKTATGWMTTINGKELKVEGQITYYNRYKRQNVVKDLSVELDRLSEESVNNDISSWTKGRSGEALSLLKKRFSHRPVQEKFVCLNCGFETHADEQAALNIARSWLFLRSQEYKKYQTNKTTGNTDKRAFVETWQSFYRKKLKEVWKPAV

SEQ ID NO: 32179 - protein, 978 aa, synthetic construct
  REGION 1..978: note = engineered CasX variant
QEIGRINKIRRRLVKDSNTKKAGKTGPMKTLLVRVMTPDLRERLENLRKKPENIPQPISNTSRANLNKLLTDYTEMKKAILHVYWEEFQKDPVGLMSRVAQPASKKIDQNKLKPEMDEKGNLTTAGFACSQCGQPLFVYKLEQVSEKGKAYTNYFGRCNVAEHEKLILLAQLKPEKDSDEAVTYSLGKFGQRALDFYSIHVTKESTHPVKPLAQIAGNRYASAPVGKALSDACMGTIASFLSKYQDIIIEHQKVVKGNQKRLESLRELAGKENLEYPSVTLPPQPHTKEGVDAYNEVIARVRMWVNLNLWQKLKLSRDDAKPLLRLKGFPSFPLVERQANEVDWWDMVCNVKKLINEKKEDGKVFWQNLAGYKRQEALRPYLSSEEDRKKGKKFARYQLGDLLLHLEKKHGEDWGKVYDEAWERIDKKVEGLSKHIKLEEERRSEDAQSKAALTDWLRAKASFVIEGLKEADKDEFCRCELKLQKWYGDLRGKPFAIEAENSILDISGFSKQYNCAFIWQKDGVKKLNLYLIINYFKGGKLRFKKIKPEAFEANRFYTVINKKSGEIVPMEVNFNFDDPNLIILPLAFGKRQGREFIWNDLLSLETGSLQLANGRVIEKTLYNRRTRQDEPALFVALTFERREVLDSSNIKPMNLIGVDRGENIPAVIALTDPEGCPLSRFKDSLGNPTHILRIGESYKEKQRTIQAKKEVEQRRAGGYSRKYASKAKNLADDMVRNTARDLLYYAVTQDAMLIFENLSRGFGRQGKRTFMAERQYTRMEDWLTAKLAYEGLPSKTYLSKTLAQYTSKTCSNCGFTITSADYDRVLEKLKKTATGWMTTINGKELKVEGQITYYNRYKRQNVVKDLSVELDRLSEESVNNDISSWTKGRSGEALSLLKKRFSHRPVQEKFVCLNCGFETHADEQAALNIARSWLFLRSQEYKKYQTNKTTGNTDKRAFVETWQSFYRKKLKEVWKPAV

SEQ ID NO: 32180 - protein, 978 aa, synthetic construct
  REGION 1..978: note = engineered CasX variant
QEIGRINKIRRRLVKDSNTKKAGKTGPMKTLLVRVMTPDLRERLENLRKKPENIPQPISNTSRANLNKLLTDYTEMKKAILHVYWEEFQKDPVGLMSRVAQPASKKIDQNKLKPEMDEKGNLTTAGFACSQCGQPLFVYKLEQVSEKGKAYTNYFGRCNVAEHEKLILLAQLKPEKDSDEAVTYSLGKFGQRALDFYSIHVTKESTHPVKPLAQIAGNRYASVPVGKALSDACMGTIASFLSKYQDIIIEHQKVVKGNQKRLESLRELAGKENLEYPSVTLPPQPHTKEGVDAYNEVIARVRMWVNLNLWQKLKLSRDDAKPLLRLKGFPSFPLVERQANEVDWWDMVCNVKKLINEKKEDGKVFWQNLAGYKRQEALRPYLSSEEDRKKGKKFARYQLGDLLLHLEKKHGEDWGKVYDEAWERIDKKVEGLSKHIKLEEERRSEDAQSKAALTDWLRAKASFVIEGLKEADKDEFCRCELKLQKWYGDLRGKPFAIEAENSILDISGFSKQYNCAFIWQKDGVKKLNLYLIINYFKGGKLRFKKIKPEAFEANRFYTVINKKSGEIVPMEVNFNFDDPNLIILPLAFGKRQGREFIWNDLLSLETGSLQLANGRVIEKTLYNRRTRQDEPALFVALTFERREVLDSSNIKPMNLIGVDRGENIPAVIALTDPEGCPLSRFKDSLGNPTHILRIGESYKEKQRTIQAKKEVEQRRAGGYSRKYASKAKNLADDMVRNTARDLLYYAVTQDAMLIFENLSRGFGRQGKRTFMAERQYTRMEDWLTAKLAYEGLPSKTYLSKTLAQYTSKTCSNCGFTITSADYDRVLEKLKKTATGWMTTINGKELKVEGQITYYNRYKRQNVVKDLSVELDRLSEESVNNDISSWTKGRSGEALSLLKKRFSHRPVQEKFVCLNCGFETHADEQAALNIARSWLFLRSQEYKKYQTNKTTGNTDKRAFVETWQSFYRKKLKEVWKPAV

SEQ ID NO: 32181 - protein, 978 aa, synthetic construct
  REGION 1..978: note = engineered CasX variant
QEIGRINKIRRRLVKDSNTKKAGKTGPMKTLLVRVMTPDLRERLENLRKKPENIPQPISNTSRANLNKLLTDYTEMKKAILHVYWEEFQKDPVGLMSRVAQPASKKIDQNKLKPEMDEKGNLTTAGFACSQCGQPLFVYKLEQVSEKGKAYTNYFGRCNVAEHEKLIKLAQLKPEKDSDEAVTYSLGKFGQRALDFYSIHVTKESTHPVKPLAQIAGNRYASGPVGKALSDACMGTIASFLSKYQDIIIEHQKVVKGNQKRLESLRELAGKENLEYPSVTLPPQPHTKEGVDAYNEVIARVRMWVNLNLWQKLKLSRDDAKPLLRLKGFPSFPLVERQANEVDWWDMVCNVKKLINEKKEDGKVFWQNLAGYKRQEALRPYLSSEEDRKKGKKFARYQLGDLLLHLEKKHGEDWGKVYDEAWERIDKKVEGLSKHIKLEEERRSEDAQSKAALTDWLRAKASFVIEGLKEADKDEFCRCELKLQKWYGDLRGKPFAIEAENSILDISGFSKQYNCAFIWQKDGVKKLNLYLIINYFKGGKLRFKKIKPEAFEANRFYTVINKKSGEIVPMEVNFNFDDPNLIILPLAFGKRQGREFIWNDLLSLETGSLQLANGRVIEKTLYNRRTRQDEPALFVALTFERREVLDSSNIKPMNLIGVDRGENIPAVIALTDPEGCPLSRFKDSLGNPTHILRIGESYKEKQRTIQAKKEVEQRRAGGYSRKYASKAKNLADDMVRNTARDLLYYAVTQDAMLIFENLSRGFGRQGKRTFMAERQYTRMEDWLTAKLAYEGLPSKTYLSKTLAQYTSKTCSNCGFTITSADYDRVLEKLKKTATGWMTTINGKELKVEGQITYYNRYKRQNVVKDLSVELDRLSEESVNNDISSWTKGRSGEALSLLKKRFSHRPVQEKFVCLNCGFETHADEQAALNIARSWLFLRSQEYKKYQTNKTTGNTDKRAFVETWQSFYRKKLKEVWKPAV

SEQ ID NO: 32182 - protein, 977 aa, synthetic construct
  REGION 1..977: note = engineered CasX variant
QEIGRINKIRRRLVKDSNTKKAGKTGPMKTLLVRVMTPDLRERLENLRKKPENIPQPISNTSRANLNKLLTDYTEMKKAILHVYWEEFQKDPVGLMSRVAQPASKKIDQNKLKPEMDEKGNLTTAGFACSQCGQPLFVYKLEQVSEKGKAYTNYFGRCNVAEHEKLILLAQLKPEKDSDEAVTYSLGKFGQRALDFYSIHVTKESTHPVKPLAQIAGNRYASPVGKALSDACMGTIASFLSKYQDIIIEHQKVVKGNQKRLESLRELAGKENLEYPSVTLPPQPHTKEGVDAYNEVIARVRMWVNLNLWQKLKLSRDDAKPLLRLKGFPSFPLVERQANEVDWWDMVCNVKKLINEKKEDGKVFWQNLAGYKRQEALRPYLSSEEDRKKGKKFARYQLGDLLLHLEKKHGEDWGKVYDEAWERIDKKVEGLSKHIKLEEERRSEDAQSKAALTDWLRAKASFVIEGLKEADKDEFCRCELKLQKWYGDLRGKPFAIEAENSILDISGFSKQYNCAFIWQKDGVKKLNLYLIINYFKGGKLRFKKIKPEAFEANRFYTVINKKSGEIVPMEVNFNFDDPNLIILPLAFGKRQGREFIWNDLLSLETGSLQLANGRVIEKTLYNRRTRQDEPALFVALTFERREVLDSSNIKPMNLIGVDRGENIPAVIALTDPEGCPLSRFKDSLGNPTHILRIGESYKEKQRTIQAKKEVEQRRAGGYSRKYASKAKNLADDMVRNTARDLLYYAVTQDAMLIFENLSRGFGRQGKRTFMAERQYTRMEDWLTAKLAYEGLPSKTYLSKTLAQYTSKTCSNCGFTITSADYDRVLEKLKKTATGWMTTINGKELKVEGQITYYNRYKRQNVVKDLSVELDRLSEESVNNDISSWTKGRSGEALSLLKKRFSHRPVQEKFVCLNCGFETHADEQAALNIARSWLFLRSQEYKKYQTNKTTGNTDKRAFVETWQSFYRKKLKEVWKPAV

SEQ ID NO: 32183 - protein, 979 aa, synthetic construct
  REGION 1..979: note = engineered CasX variant
QEIKGRANKIRRRLVKDSNTKKAGKTGPMKTLLVRVMTPDLRERLENLRKKPENIPQPISNTSRANLNKLLTDYTEMKKAILHVYWEEFQKDPVGLMSRVAQPASKKIDQNKLKPEMDEKGNLTTAGFACSQCGQPLFVYKLEQVSEKGKAYTNYFGRCNVAEHEKLILLAQLKPEKDSDEAVTYSLGKFGQRALDFYSIHVTKESTHPVKPLAQIAGNRYASYPVGKALSDACMGTIASFLSKYQDIIIEHQKVVKGNQKRLESLRELAGKENLEYPSVTLPPQPHTKEGVDAYNEVIARVRMWVNLNLWQKLKLSRDDAKPLLRLKGFPSFPLVERQANEVDWWDMVCNVKKLINEKKEDGKVFWQNLAGYKRQEALRPYLSSEEDRKKGKKFARYQLGDLLLHLEKKHGEDWGKVYDEAWERIDKKVEGLSKHIKLEEERRSEDAQSKAALTDWLRAKASFVIEGLKEADKDEFCRCELKLQKWYGDLRGKPFAIEAENSILDISGFSKQYNCAFIWQKDGVKKLNLYLIINYFKGGKLRFKKIKPEAFEANRFYTVINKKSGEIVPMEVNFNFDDPNLIILPLAFGKRQGREFIWNDLLSLETGSLKLANGRVIEKTLYNRRTRQDEPALFVALTFERREVLDSSNIKPMNLIGVDRGENIPAVIALTDPEGCPLSRFKDSLGNPTHILRIGESYKEKQRTIQAKKEVEQRRAGGYSRKYASKAKNLADDMVRNTARDLLYYAVTQDAMLIFENLSRGFGRQGKRTFMAERQYTRMEDWLTAKLAYEGLPSKTYLSKTLAQYTSKTCSNCGFTITSADYDRVLEKLKKTATGWMTTINGKELKVEGQITYYNRYKRQNVVKDLSVELDRLSEESVNNDISSWTKGRSGEALSLLKKRFSHRPVQEKFVCLNCGFETHADEQAALNIARSWLFLRSQEYKKYQTNKTTGNTDKRAFVETWQSFYRKKLKEVWKPAV

SEQ ID NO: 32184 - protein, 979 aa, synthetic construct
  REGION 1..979: note = engineered CasX variant
QEIKGRANKIRRRLVKDSNTKKAGKTGPMKTLLVRVMTPDLRERLENLRKKPENIPQPISNTSRANLNKLLTDYTEMKKAILHVYWEEFQKDPVGLMSRVAQPASKKIDQNKLKPEMDEKGNLTTAGFACSQCGQPLFVYKLEQVSEKGKAYTNYFGRCNVAEHEKLILLAQLKPEKDSDEAVTYSLGKFGQRALDFYSIHVTKESTHPVKPLAQIAGNRYASHPVGKALSDACMGTIASFLSKYQDIIIEHQKVVKGNQKRLESLRELAGKENLEYPSVTLPPQPHTKEGVDAYNEVIARVRMWVNLNLWQKLKLSRDDAKPLLRLKGFPSFPLVERQANEVDWWDMVCNVKKLINEKKEDGKVFWQNLAGYKRQEALRPYLSSEEDRKKGKKFARYQLGDLLLHLEKKHGEDWGKVYDEAWERIDKKVEGLSKHIKLEEERRSEDAQSKAALTDWLRAKASFVIEGLKEADKDEFCRCELKLQKWYGDLRGKPFAIEAENSILDISGFSKQYNCAFIWQKDGVKKLNLYLIINYFKGGKLRFKKIKPEAFEANRFYTVINKKSGEIVPMEVNFNFDDPNLIILPLAFGKRQGREFIWNDLLSLETGSLKLANGRVIEKTLYNRRTRQDEPALFVALTFERREVLDSSNIKPMNLIGVDRGENIPAVIALTDPEGCPLSRFKDSLGNPTHILRIGESYKEKQRTIQAKKEVEQRRAGGYSRKYASKAKNLADDMVRNTARDLLYYAVTQDAMLIFENLSRGFGRQGKRTFMAERQYTRMEDWLTAKLAYEGLPSKTYLSKTLAQYTSKTCSNCGFTITSADYDRVLEKLKKTATGWMTTINGKELKVEGQITYYNRYKRQNVVKDLSVELDRLSEESVNNDISSWTKGRSGEALSLLKKRFSHRPVQEKFVCLNCGFETHADEQAALNIARSWLFLRSQEYKKYQTNKTTGNTDKRAFVETWQSFYRKKLKEVWKPAV

SEQ ID NO: 32185 - protein, 979 aa, synthetic construct
  REGION 1..979: note = engineered CasX variant
QEIKGRANKIRRRLVKDSNTKKAGKTGPMKTLLVRVMTPDLRERLENLRKKPENIPQPISNTSRANLNKLLTDYTEMKKAILHVYWEEFQKDPVGLMSRVAQPASKKIDQNKLKPEMDEKGNLTTAGFACSQCGQPLFVYKLEQVSEKGKAYTNYFGRCNVAEHEKLILLAQLKPEKDSDEAVTYSLGKFGQRALDFYSIHVTKESTHPVKPLAQIAGNRYASSPVGKALSDACMGTIASFLSKYQDIIIEHQKVVKGNQKRLESLRELAGKENLEYPSVTLPPQPHTKEGVDAYNEVIARVRMWVNLNLWQKLKLSRDDAKPLLRLKGFPSFPLVERQANEVDWWDMVCNVKKLINEKKEDGKVFWQNLAGYKRQEALRPYLSSEEDRKKGKKFARYQLGDLLLHLEKKHGEDWGKVYDEAWERIDKKVEGLSKHIKLEEERRSEDAQSKAALTDWLRAKASFVIEGLKEADKDEFCRCELKLQKWYGDLRGKPFAIEAENSILDISGFSKQYNCAFIWQKDGVKKLNLYLIINYFKGGKLRFKKIKPEAFEANRFYTVINKKSGEIVPMEVNFNFDDPNLIILPLAFGKRQGREFIWNDLLSLETGSLKLANGRVIEKTLYNRRTRQDEPALFVALTFERREVLDSSNIKPMNLIGVDRGENIPAVIALTDPEGCPLSRFKDSLGNPTHILRIGESYKEKQRTIQAKKEVEQRRAGGYSRKYASKAKNLADDMVRNTARDLLYYAVTQDAMLIFENLSRGFGRQGKRTFMAERQYTRMEDWLTAKLAYEGLPSKTYLSKTLAQYTSKTCSNCGFTITSADYDRVLEKLKKTATGWMTTINGKELKVEGQITYYNRYKRQNVVKDLSVELDRLSEESVNNDISSWTKGRSGEALSLLKKRFSHRPVQEKFVCLNCGFETHADEQAALNIARSWLFLRSQEYKKYQTNKTTGNTDKRAFVETWQSFYRKKLKEVWKPAV

SEQ ID NO: 32186 - protein, 979 aa, synthetic construct
  REGION 1..979: note = engineered CasX variant
QEIKGRANKIRRRLVKDSNTKKAGKTGPMKTLLVRVMTPDLRERLENLRKKPENIPQPISNTSRANLNKLLTDYTEMKKAILHVYWEEFQKDPVGLMSRVAQPASKKIDQNKLKPEMDEKGNLTTAGFACSQCGQPLFVYKLEQVSEKGKAYTNYFGRCNVAEHEKLILLAQLKPEKDSDEAVTYSLGKFGQRALDFYSIHVTKESTHPVKPLAQIAGNRYASTPVGKALSDACMGTIASFLSKYQDIIIEHQKVVKGNQKRLESLRELAGKENLEYPSVTLPPQPHTKEGVDAYNEVIARVRMWVNLNLWQKLKLSRDDAKPLLRLKGFPSFPLVERQANEVDWWDMVCNVKKLINEKKEDGKVFWQNLAGYKRQEALRPYLSSEEDRKKGKKFARYQLGDLLLHLEKKHGEDWGKVYDEAWERIDKKVEGLSKHIKLEEERRSEDAQSKAALTDWLRAKASFVIEGLKEADKDEFCRCELKLQKWYGDLRGKPFAIEAENSILDISGFSKQYNCAFIWQKDGVKKLNLYLIINYFKGGKLRFKKIKPEAFEANRFYTVINKKSGEIVPMEVNFNFDDPNLIILPLAFGKRQGREFIWNDLLSLETGSLKLANGRVIEKTLYNRRTRQDEPALFVALTFERREVLDSSNIKPMNLIGVDRGENIPAVIALTDPEGCPLSRFKDSLGNPTHILRIGESYKEKQRTIQAKKEVEQRRAGGYSRKYASKAKNLADDMVRNTARDLLYYAVTQDAMLIFENLSRGFGRQGKRTFMAERQYTRMEDWLTAKLAYEGLPSKTYLSKTLAQYTSKTCSNCGFTITSADYDRVLEKLKKTATGWMTTINGKELKVEGQITYYNRYKRQNVVKDLSVELDRLSEESVNNDISSWTKGRSGEALSLLKKRFSHRPVQEKFVCLNCGFETHADEQAALNIARSWLFLRSQEYKKYQTNKTTGNTDKRAFVETWQSFYRKKLKEVWKPAV

SEQ ID NO: 32187 - protein, 979 aa, synthetic construct
  REGION 1..979: note = engineered CasX variant
QEIKGRANKIRRRLVKDSNTKKAGKTGPMKTLLVRVMTPDLRERLENLRKKPENIPQPISNTSRANLNKLLTDYTEMKKAILHVYWEEFQKDPVGLMSRVAQPASKKIDQNKLKPEMDEKGNLTTAGFACSQCGQPLFVYKLEQVSEKGKAYTNYFGRCNVAEHEKLILLAQLKPEKDSDEAVTYSLGKFGQRALDFYSIHVTKESTHPVKPLAQIAGNRYASAPVGKALSDACMGTIASFLSKYQDIIIEHQKVVKGNQKRLESLRELAGKENLEYPSVTLPPQPHTKEGVDAYNEVIARVRMWVNLNLWQKLKLSRDDAKPLLRLKGFPSFPLVERQANEVDWWDMVCNVKKLINEKKEDGKVFWQNLAGYKRQEALRPYLSSEEDRKKGKKFARYQLGDLLLHLEKKHGEDWGKVYDEAWERIDKKVEGLSKHIKLEEERRSEDAQSKAALTDWLRAKASFVIEGLKEADKDEFCRCELKLQKWYGDLRGKPFAIEAENSILDISGFSKQYNCAFIWQKDGVKKLNLYLIINYFKGGKLRFKKIKPEAFEANRFYTVINKKSGEIVPMEVNFNFDDPNLIILPLAFGKRQGREFIWNDLLSLETGSLKLANGRVIEKTLYNRRTRQDEPALFVALTFERREVLDSSNIKPMNLIGVDRGENIPAVIALTDPEGCPLSRFKDSLGNPTHILRIGESYKEKQRTIQAKKEVEQRRAGGYSRKYASKAKNLADDMVRNTARDLLYYAVTQDAMLIFENLSRGFGRQGKRTFMAERQYTRMEDWLTAKLAYEGLPSKTYLSKTLAQYTSKTCSNCGFTITSADYDRVLEKLKKTATGWMTTINGKELKVEGQITYYNRYKRQNVVKDLSVELDRLSEESVNNDISSWTKGRSGEALSLLKKRFSHRPVQEKFVCLNCGFETHADEQAALNIARSWLFLRSQEYKKYQTNKTTGNTDKRAFVETWQSFYRKKLKEVWKPAV

SEQ ID NO: 32188 - protein, 979 aa, synthetic construct
  REGION 1..979: note = engineered CasX variant
QEIKGRANKIRRRLVKDSNTKKAGKTGPMKTLLVRVMTPDLRERLENLRKKPENIPQPISNTSRANLNKLLTDYTEMKKAILHVYWEEFQKDPVGLMSRVAQPASKKIDQNKLKPEMDEKGNLTTAGFACSQCGQPLFVYKLEQVSEKGKAYTNYFGRCNVAEHEKLILLAQLKPEKDSDEAVTYSLGKFGQRALDFYSIHVTKESTHPVKPLAQIAGNRYASVPVGKALSDACMGTIASFLSKYQDIIIEHQKVVKGNQKRLESLRELAGKENLEYPSVTLPPQPHTKEGVDAYNEVIARVRMWVNLNLWQKLKLSRDDAKPLLRLKGFPSFPLVERQANEVDWWDMVCNVKKLINEKKEDGKVFWQNLAGYKRQEALRPYLSSEEDRKKGKKFARYQLGDLLLHLEKKHGEDWGKVYDEAWERIDKKVEGLSKHIKLEEERRSEDAQSKAALTDWLRAKASFVIEGLKEADKDEFCRCELKLQKWYGDLRGKPFAIEAENSILDISGFSKQYNCAFIWQKDGVKKLNLYLIINYFKGGKLRFKKIKPEAFEANRFYTVINKKSGEIVPMEVNFNFDDPNLIILPLAFGKRQGREFIWNDLLSLETGSLKLANGRVIEKTLYNRRTRQDEPALFVALTFERREVLDSSNIKPMNLIGVDRGENIPAVIALTDPEGCPLSRFKDSLGNPTHILRIGESYKEKQRTIQAKKEVEQRRAGGYSRKYASKAKNLADDMVRNTARDLLYYAVTQDAMLIFENLSRGFGRQGKRTFMAERQYTRMEDWLTAKLAYEGLPSKTYLSKTLAQYTSKTCSNCGFTITSADYDRVLEKLKKTATGWMTTINGKELKVEGQITYYNRYKRQNVVKDLSVELDRLSEESVNNDISSWTKGRSGEALSLLKKRFSHRPVQEKFVCLNCGFETHADEQAALNIARSWLFLRSQEYKKYQTNKTTGNTDKRAFVETWQSFYRKKLKEVWKPAV

SEQ ID NO: 32189 - protein, 979 aa, synthetic construct
  REGION 1..979: note = engineered CasX variant
QEIKGRANKIRRRLVKDSNTKKAGKTGPMKTLLVRVMTPDLRERLENLRKKPENIPQPISNTSRANLNKLLTDYTEMKKAILHVYWEEFQKDPVGLMSRVAQPASKKIDQNKLKPEMDEKGNLTTAGFACSQCGQPLFVYKLEQVSEKGKAYTNYFGRCNVAEHEKLIKLAQLKPEKDSDEAVTYSLGKFGQRALDFYSIHVTKESTHPVKPLAQIAGNRYASGPVGKALSDACMGTIASFLSKYQDIIIEHQKVVKGNQKRLESLRELAGKENLEYPSVTLPPQPHTKEGVDAYNEVIARVRMWVNLNLWQKLKLSRDDAKPLLRLKGFPSFPLVERQANEVDWWDMVCNVKKLINEKKEDGKVFWQNLAGYKRQEALRPYLSSEEDRKKGKKFARYQLGDLLLHLEKKHGEDWGKVYDEAWERIDKKVEGLSKHIKLEEERRSEDAQSKAALTDWLRAKASFVIEGLKEADKDEFCRCELKLQKWYGDLRGKPFAIEAENSILDISGFSKQYNCAFIWQKDGVKKLNLYLIINYFKGGKLRFKKIKPEAFEANRFYTVINKKSGEIVPMEVNFNFDDPNLIILPLAFGKRQGREFIWNDLLSLETGSLKLANGRVIEKTLYNRRTRQDEPALFVALTFERREVLDSSNIKPMNLIGVDRGENIPAVIALTDPEGCPLSRFKDSLGNPTHILRIGESYKEKQRTIQAKKEVEQRRAGGYSRKYASKAKNLADDMVRNTARDLLYYAVTQDAMLIFENLSRGFGRQGKRTFMAERQYTRMEDWLTAKLAYEGLPSKTYLSKTLAQYTSKTCSNCGFTITSADYDRVLEKLKKTATGWMTTINGKELKVEGQITYYNRYKRQNVVKDLSVELDRLSEESVNNDISSWTKGRSGEALSLLKKRFSHRPVQEKFVCLNCGFETHADEQAALNIARSWLFLRSQEYKKYQTNKTTGNTDKRAFVETWQSFYRKKLKEVWKPAV

SEQ ID NO: 32190 - protein, 978 aa, synthetic construct
  REGION 1..978: note = engineered CasX variant
QEIKGRANKIRRRLVKDSNTKKAGKTGPMKTLLVRVMTPDLRERLENLRKKPENIPQPISNTSRANLNKLLTDYTEMKKAILHVYWEEFQKDPVGLMSRVAQPASKKIDQNKLKPEMDEKGNLTTAGFACSQCGQPLFVYKLEQVSEKGKAYTNYFGRCNVAEHEKLILLAQLKPEKDSDEAVTYSLGKFGQRALDFYSIHVTKESTHPVKPLAQIAGNRYASPVGKALSDACMGTIASFLSKYQDIIIEHQKVVKGNQKRLESLRELAGKENLEYPSVTLPPQPHTKEGVDAYNEVIARVRMWVNLNLWQKLKLSRDDAKPLLRLKGFPSFPLVERQANEVDWWDMVCNVKKLINEKKEDGKVFWQNLAGYKRQEALRPYLSSEEDRKKGKKFARYQLGDLLLHLEKKHGEDWGKVYDEAWERIDKKVEGLSKHIKLEEERRSEDAQSKAALTDWLRAKASFVIEGLKEADKDEFCRCELKLQKWYGDLRGKPFAIEAENSILDISGFSKQYNCAFIWQKDGVKKLNLYLIINYFKGGKLRFKKIKPEAFEANRFYTVINKKSGEIVPMEVNFNFDDPNLIILPLAFGKRQGREFIWNDLLSLETGSLKLANGRVIEKTLYNRRTRQDEPALFVALTFERREVLDSSNIKPMNLIGVDRGENIPAVIALTDPEGCPLSRFKDSLGNPTHILRIGESYKEKQRTIQAKKEVEQRRAGGYSRKYASKAKNLADDMVRNTARDLLYYAVTQDAMLIFENLSRGFGRQGKRTFMAERQYTRMEDWLTAKLAYEGLPSKTYLSKTLAQYTSKTCSNCGFTITSADYDRVLEKLKKTATGWMTTINGKELKVEGQITYYNRYKRQNVVKDLSVELDRLSEESVNNDISSWTKGRSGEALSLLKKRFSHRPVQEKFVCLNCGFETHADEQAALNIARSWLFLRSQEYKKYQTNKTTGNTDKRAFVETWQSFYRKKLKEVWKPAV

SEQ ID NO: 32191 - protein, 979 aa, synthetic construct
  REGION 1..979: note = engineered CasX variant
QEIKGRISKIRRRLVKDSNTKKAGKTGPMKTLLVRVMTPDLRERLENLRKKPENIPQPISNTSRANLNKLLTDYTEMKKAILHVYWEEFQKDPVGLMSRVAQPASKKIDQNKLKPEMDEKGNLTTAGFACSQCGQPLFVYKLEQVSEKGKAYTNYFGRCNVAEHEKLILLAQLKPEKDSDEAVTYSLGKFGQRALDFYSIHVTKESTHPVKPLAQIAGNRYASYPVGKALSDACMGTIASFLSKYQDIIIEHQKVVKGNQKRLESLRELAGKENLEYPSVTLPPQPHTKEGVDAYNEVIARVRMWVNLNLWQKLKLSRDDAKPLLRLKGFPSFPLVERQANEVDWWDMVCNVKKLINEKKEDGKVFWQNLAGYKRQEALRPYLSSEEDRKKGKKFARYQLGDLLLHLEKKHGEDWGKVYDEAWERIDKKVEGLSKHIKLEEERRSEDAQSKAALTDWLRAKASFVIEGLKEADKDEFCRCELKLQKWYGDLRGKPFAIEAENSILDISGFSKQYNCAFIWQKDGVKKLNLYLIINYFKGGKLRFKKIKPEAFEANRFYTVINKKSGEIVPMEVNFNFDDPNLIILPLAFGKRQGREFIWNDLLSLETGSLKLANGRVIEKTLYNRRTRQDEPALFVALTFERREVLDSSNIKPMNLIGVDRGENIPAVIALTDPEGCPLSRFKDSLGNPTHILRIGESYKEKQRTIQAKKEVEQRRAGGYSRKYASKAKNLADDMVRNTARDLLYYAVTQDAMLIFENLSRGFGRQGKRTFMAERQYTRMEDWLTAKLAYEGLPSKTYLSKTLAQYTSKTCSNCGFTITSADYDRVLEKLKKTATGWMTTINGKELKVEGQITYYNRYKRQNVVKDLSVELDRLSEESVNNDISSWTKGRSGEALSLLKKRFSHRPVQEKFVCLNCGFETHADEQAALNIARSWLFLRSQEYKKYQTNKTTGNTDKRAFVETWQSFYRKKLKEVWKPAV

SEQ ID NO: 32192 - protein, 979 aa, synthetic construct
  REGION 1..979: note = engineered CasX variant
QEIKGRISKIRRRLVKDSNTKKAGKTGPMKTLLVRVMTPDLRERLENLRKKPENIPQPISNTSRANLNKLLTDYTEMKKAILHVYWEEFQKDPVGLMSRVAQPASKKIDQNKLKPEMDEKGNLTTAGFACSQCGQPLFVYKLEQVSEKGKAYTNYFGRCNVAEHEKLILLAQLKPEKDSDEAVTYSLGKFGQRALDFYSIHVTKESTHPVKPLAQIAGNRYASHPVGKALSDACMGTIASFLSKYQDIIIEHQKVVKGNQKRLESLRELAGKENLEYPSVTLPPQPHTKEGVDAYNEVIARVRMWVNLNLWQKLKLSRDDAKPLLRLKGFPSFPLVERQANEVDWWDMVCNVKKLINEKKEDGKVFWQNLAGYKRQEALRPYLSSEEDRKKGKKFARYQLGDLLLHLEKKHGEDWGKVYDEAWERIDKKVEGLSKHIKLEEERRSEDAQSKAALTDWLRAKASFVIEGLKEADKDEFCRCELKLQKWYGDLRGKPFAIEAENSILDISGFSKQYNCAFIWQKDGVKKLNLYLIINYFKGGKLRFKKIKPEAFEANRFYTVINKKSGEIVPMEVNFNFDDPNLIILPLAFGKRQGREFIWNDLLSLETGSLKLANGRVIEKTLYNRRTRQDEPALFVALTFERREVLDSSNIKPMNLIGVDRGENIPAVIALTDPEGCPLSRFKDSLGNPTHILRIGESYKEKQRTIQAKKEVEQRRAGGYSRKYASKAKNLADDMVRNTARDLLYYAVTQDAMLIFENLSRGFGRQGKRTFMAERQYTRMEDWLTAKLAYEGLPSKTYLSKTLAQYTSKTCSNCGFTITSADYDRVLEKLKKTATGWMTTINGKELKVEGQITYYNRYKRQNVVKDLSVELDRLSEESVNNDISSWTKGRSGEALSLLKKRFSHRPVQEKFVCLNCGFETHADEQAALNIARSWLFLRSQEYKKYQTNKTTGNTDKRAFVETWQSFYRKKLKEVWKPAV

SEQ ID NO: 32193 - protein, 979 aa, synthetic construct
  REGION 1..979: note = engineered CasX variant
QEIKGRISKIRRRLVKDSNTKKAGKTGPMKTLLVRVMTPDLRERLENLRKKPENIPQPISNTSRANLNKLLTDYTEMKKAILHVYWEEFQKDPVGLMSRVAQPASKKIDQNKLKPEMDEKGNLTTAGFACSQCGQPLFVYKLEQVSEKGKAYTNYFGRCNVAEHEKLILLAQLKPEKDSDEAVTYSLGKFGQRALDFYSIHVTKESTHPVKPLAQIAGNRYASSPVGKALSDACMGTIASFLSKYQDIIIEHQKVVKGNQKRLESLRELAGKENLEYPSVTLPPQPHTKEGVDAYNEVIARVRMWVNLNLWQKLKLSRDDAKPLLRLKGFPSFPLVERQANEVDWWDMVCNVKKLINEKKEDGKVFWQNLAGYKRQEALRPYLSSEEDRKKGKKFARYQLGDLLLHLEKKHGEDWGKVYDEAWERIDKKVEGLSKHIKLEEERRSEDAQSKAALTDWLRAKASFVIEGLKEADKDEFCRCELKLQKWYGDLRGKPFAIEAENSILDISGFSKQYNCAFIWQKDGVKKLNLYLIINYFKGGKLRFKKIKPEAFEANRFYTVINKKSGEIVPMEVNFNFDDPNLIILPLAFGKRQGREFIWNDLLSLETGSLKLANGRVIEKTLYNRRTRQDEPALFVALTFERREVLDSSNIKPMNLIGVDRGENIPAVIALTDPEGCPLSRFKDSLGNPTHILRIGESYKEKQRTIQAKKEVEQRRAGGYSRKYASKAKNLADDMVRNTARDLLYYAVTQDAMLIFENLSRGFGRQGKRTFMAERQYTRMEDWLTAKLAYEGLPSKTYLSKTLAQYTSKTCSNCGFTITSADYDRVLEKLKKTATGWMTTINGKELKVEGQITYYNRYKRQNVVKDLSVELDRLSEESVNNDISSWTKGRSGEALSLLKKRFSHRPVQEKFVCLNCGFETHADEQAALNIARSWLFLRSQEYKKYQTNKTTGNTDKRAFVETWQSFYRKKLKEVWKPAV

SEQ ID NO: 32194 - protein, 979 aa, synthetic construct
  REGION 1..979: note = engineered CasX variant
QEIKGRISKIRRRLVKDSNTKKAGKTGPMKTLLVRVMTPDLRERLENLRKKPENIPQPISNTSRANLNKLLTDYTEMKKAILHVYWEEFQKDPVGLMSRVAQPASKKIDQNKLKPEMDEKGNLTTAGFACSQCGQPLFVYKLEQVSEKGKAYTNYFGRCNVAEHEKLILLAQLKPEKDSDEAVTYSLGKFGQRALDFYSIHVTKESTHPVKPLAQIAGNRYASTPVGKALSDACMGTIASFLSKYQDIIIEHQKVVKGNQKRLESLRELAGKENLEYPSVTLPPQPHTKEGVDAYNEVIARVRMWVNLNLWQKLKLSRDDAKPLLRLKGFPSFPLVERQANEVDWWDMVCNVKKLINEKKEDGKVFWQNLAGYKRQEALRPYLSSEEDRKKGKKFARYQLGDLLLHLEKKHGEDWGKVYDEAWERIDKKVEGLSKHIKLEEERRSEDAQSKAALTDWLRAKASFVIEGLKEADKDEFCRCELKLQKWYGDLRGKPFAIEAENSILDISGFSKQYNCAFIWQKDGVKKLNLYLIINYFKGGKLRFKKIKPEAFEANRFYTVINKKSGEIVPMEVNFNFDDPNLIILPLAFGKRQGREFIWNDLLSLETGSLKLANGRVIEKTLYNRRTRQDEPALFVALTFERREVLDSSNIKPMNLIGVDRGENIPAVIALTDPEGCPLSRFKDSLGNPTHILRIGESYKEKQRTIQAKKEVEQRRAGGYSRKYASKAKNLADDMVRNTARDLLYYAVTQDAMLIFENLSRGFGRQGKRTFMAERQYTRMEDWLTAKLAYEGLPSKTYLSKTLAQYTSKTCSNCGFTITSADYDRVLEKLKKTATGWMTTINGKELKVEGQITYYNRYKRQNVVKDLSVELDRLSEESVNNDISSWTKGRSGEALSLLKKRFSHRPVQEKFVCLNCGFETHADEQAALNIARSWLFLRSQEYKKYQTNKTTGNTDKRAFVETWQSFYRKKLKEVWKPAV

SEQ ID NO: 32195 - protein, 979 aa, synthetic construct
  REGION 1..979: note = engineered CasX variant
QEIKGRISKIRRRLVKDSNTKKAGKTGPMKTLLVRVMTPDLRERLENLRKKPENIPQPISNTSRANLNKLLTDYTEMKKAILHVYWEEFQKDPVGLMSRVAQPASKKIDQNKLKPEMDEKGNLTTAGFACSQCGQPLFVYKLEQVSEKGKAYTNYFGRCNVAEHEKLILLAQLKPEKDSDEAVTYSLGKFGQRALDFYSIHVTKESTHPVKPLAQIAGNRYASAPVGKALSDACMGTIASFLSKYQDIIIEHQKVVKGNQKRLESLRELAGKENLEYPSVTLPPQPHTKEGVDAYNEVIARVRMWVNLNLWQKLKLSRDDAKPLLRLKGFPSFPLVERQANEVDWWDMVCNVKKLINEKKEDGKVFWQNLAGYKRQEALRPYLSSEEDRKKGKKFARYQLGDLLLHLEKKHGEDWGKVYDEAWERIDKKVEGLSKHIKLEEERRSEDAQSKAALTDWLRAKASFVIEGLKEADKDEFCRCELKLQKWYGDLRGKPFAIEAENSILDISGFSKQYNCAFIWQKDGVKKLNLYLIINYFKGGKLRFKKIKPEAFEANRFYTVINKKSGEIVPMEVNFNFDDPNLIILPLAFGKRQGREFIWNDLLSLETGSLKLANGRVIEKTLYNRRTRQDEPALFVALTFERREVLDSSNIKPMNLIGVDRGENIPAVIALTDPEGCPLSRFKDSLGNPTHILRIGESYKEKQRTIQAKKEVEQRRAGGYSRKYASKAKNLADDMVRNTARDLLYYAVTQDAMLIFENLSRGFGRQGKRTFMAERQYTRMEDWLTAKLAYEGLPSKTYLSKTLAQYTSKTCSNCGFTITSADYDRVLEKLKKTATGWMTTINGKELKVEGQITYYNRYKRQNVVKDLSVELDRLSEESVNNDISSWTKGRSGEALSLLKKRFSHRPVQEKFVCLNCGFETHADEQAALNIARSWLFLRSQEYKKYQTNKTTGNTDKRAFVETWQSFYRKKLKEVWKPAV

SEQ ID NO: 32196 - protein, 979 aa, synthetic construct
  REGION 1..979: note = engineered CasX variant
QEIKGRISKIRRRLVKDSNTKKAGKTGPMKTLLVRVMTPDLRERLENLRKKPENIPQPISNTSRANLNKLLTDYTEMKKAILHVYWEEFQKDPVGLMSRVAQPASKKIDQNKLKPEMDEKGNLTTAGFACSQCGQPLFVYKLEQVSEKGKAYTNYFGRCNVAEHEKLILLAQLKPEKDSDEAVTYSLGKFGQRALDFYSIHVTKESTHPVKPLAQIAGNRYASVPVGKALSDACMGTIASFLSKYQDIIIEHQKVVKGNQKRLESLRELAGKENLEYPSVTLPPQPHTKEGVDAYNEVIARVRMWVNLNLWQKLKLSRDDAKPLLRLKGFPSFPLVERQANEVDWWDMVCNVKKLINEKKEDGKVFWQNLAGYKRQEALRPYLSSEEDRKKGKKFARYQLGDLLLHLEKKHGEDWGKVYDEAWERIDKKVEGLSKHIKLEEERRSEDAQSKAALTDWLRAKASFVIEGLKEADKDEFCRCELKLQKWYGDLRGKPFAIEAENSILDISGFSKQYNCAFIWQKDGVKKLNLYLIINYFKGGKLRFKKIKPEAFEANRFYTVINKKSGEIVPMEVNFNFDDPNLIILPLAFGKRQGREFIWNDLLSLETGSLKLANGRVIEKTLYNRRTRQDEPALFVALTFERREVLDSSNIKPMNLIGVDRGENIPAVIALTDPEGCPLSRFKDSLGNPTHILRIGESYKEKQRTIQAKKEVEQRRAGGYSRKYASKAKNLADDMVRNTARDLLYYAVTQDAMLIFENLSRGFGRQGKRTFMAERQYTRMEDWLTAKLAYEGLPSKTYLSKTLAQYTSKTCSNCGFTITSADYDRVLEKLKKTATGWMTTINGKELKVEGQITYYNRYKRQNVVKDLSVELDRLSEESVNNDISSWTKGRSGEALSLLKKRFSHRPVQEKFVCLNCGFETHADEQAALNIARSWLFLRSQEYKKYQTNKTTGNTDKRAFVETWQSFYRKKLKEVWKPAV

SEQ ID NO: 32197 - protein, 979 aa, synthetic construct
  REGION 1..979: note = engineered CasX variant
QEIKGRISKIRRRLVKDSNTKKAGKTGPMKTLLVRVMTPDLRERLENLRKKPENIPQPISNTSRANLNKLLTDYTEMKKAILHVYWEEFQKDPVGLMSRVAQPASKKIDQNKLKPEMDEKGNLTTAGFACSQCGQPLFVYKLEQVSEKGKAYTNYFGRCNVAEHEKLIKLAQLKPEKDSDEAVTYSLGKFGQRALDFYSIHVTKESTHPVKPLAQIAGNRYASGPVGKALSDACMGTIASFLSKYQDIIIEHQKVVKGNQKRLESLRELAGKENLEYPSVTLPPQPHTKEGVDAYNEVIARVRMWVNLNLWQKLKLSRDDAKPLLRLKGFPSFPLVERQANEVDWWDMVCNVKKLINEKKEDGKVFWQNLAGYKRQEALRPYLSSEEDRKKGKKFARYQLGDLLLHLEKKHGEDWGKVYDEAWERIDKKVEGLSKHIKLEEERRSEDAQSKAALTDWLRAKASFVIEGLKEADKDEFCRCELKLQKWYGDLRGKPFAIEAENSILDISGFSKQYNCAFIWQKDGVKKLNLYLIINYFKGGKLRFKKIKPEAFEANRFYTVINKKSGEIVPMEVNFNFDDPNLIILPLAFGKRQGREFIWNDLLSLETGSLKLANGRVIEKTLYNRRTRQDEPALFVALTFERREVLDSSNIKPMNLIGVDRGENIPAVIALTDPEGCPLSRFKDSLGNPTHILRIGESYKEKQRTIQAKKEVEQRRAGGYSRKYASKAKNLADDMVRNTARDLLYYAVTQDAMLIFENLSRGFGRQGKRTFMAERQYTRMEDWLTAKLAYEGLPSKTYLSKTLAQYTSKTCSNCGFTITSADYDRVLEKLKKTATGWMTTINGKELKVEGQITYYNRYKRQNVVKDLSVELDRLSEESVNNDISSWTKGRSGEALSLLKKRFSHRPVQEKFVCLNCGFETHADEQAALNIARSWLFLRSQEYKKYQTNKTTGNTDKRAFVETWQSFYRKKLKEVWKPAV

SEQ ID NO: 32198 - protein, 978 aa, synthetic construct
  REGION 1..978: note = engineered CasX variant
QEIKGRISKIRRRLVKDSNTKKAGKTGPMKTLLVRVMTPDLRERLENLRKKPENIPQPISNTSRANLNKLLTDYTEMKKAILHVYWEEFQKDPVGLMSRVAQPASKKIDQNKLKPEMDEKGNLTTAGFACSQCGQPLFVYKLEQVSEKGKAYTNYFGRCNVAEHEKLILLAQLKPEKDSDEAVTYSLGKFGQRALDFYSIHVTKESTHPVKPLAQIAGNRYASPVGKALSDACMGTIASFLSKYQDIIIEHQKVVKGNQKRLESLRELAGKENLEYPSVTLPPQPHTKEGVDAYNEVIARVRMWVNLNLWQKLKLSRDDAKPLLRLKGFPSFPLVERQANEVDWWDMVCNVKKLINEKKEDGKVFWQNLAGYKRQEALRPYLSSEEDRKKGKKFARYQLGDLLLHLEKKHGEDWGKVYDEAWERIDKKVEGLSKHIKLEEERRSEDAQSKAALTDWLRAKASFVIEGLKEADKDEFCRCELKLQKWYGDLRGKPFAIEAENSILDISGFSKQYNCAFIWQKDGVKKLNLYLIINYFKGGKLRFKKIKPEAFEANRFYTVINKKSGEIVPMEVNFNFDDPNLIILPLAFGKRQGREFIWNDLLSLETGSLKLANGRVIEKTLYNRRTRQDEPALFVALTFERREVLDSSNIKPMNLIGVDRGENIPAVIALTDPEGCPLSRFKDSLGNPTHILRIGESYKEKQRTIQAKKEVEQRRAGGYSRKYASKAKNLADDMVRNTARDLLYYAVTQDAMLIFENLSRGFGRQGKRTFMAERQYTRMEDWLTAKLAYEGLPSKTYLSKTLAQYTSKTCSNCGFTITSADYDRVLEKLKKTATGWMTTINGKELKVEGQITYYNRYKRQNVVKDLSVELDRLSEESVNNDISSWTKGRSGEALSLLKKRFSHRPVQEKFVCLNCGFETHADEQAALNIARSWLFLRSQEYKKYQTNKTTGNTDKRAFVETWQSFYRKKLKEVWKPAV

SEQ ID NO: 32199 - protein, 979 aa, synthetic construct
  REGION 1..979: note = engineered CasX variant
QEIKGRINGIRRRLVKDSNTKKAGKTGPMKTLLVRVMTPDLRERLENLRKKPENIPQPISNTSRANLNKLLTDYTEMKKAILHVYWEEFQKDPVGLMSRVAQPASKKIDQNKLKPEMDEKGNLTTAGFACSQCGQPLFVYKLEQVSEKGKAYTNYFGRCNVAEHEKLILLAQLKPEKDSDEAVTYSLGKFGQRALDFYSIHVTKESTHPVKPLAQIAGNRYASYPVGKALSDACMGTIASFLSKYQDIIIEHQKVVKGNQKRLESLRELAGKENLEYPSVTLPPQPHTKEGVDAYNEVIARVRMWVNLNLWQKLKLSRDDAKPLLRLKGFPSFPLVERQANEVDWWDMVCNVKKLINEKKEDGKVFWQNLAGYKRQEALRPYLSSEEDRKKGKKFARYQLGDLLLHLEKKHGEDWGKVYDEAWERIDKKVEGLSKHIKLEEERRSEDAQSKAALTDWLRAKASFVIEGLKEADKDEFCRCELKLQKWYGDLRGKPFAIEAENSILDISGFSKQYNCAFIWQKDGVKKLNLYLIINYFKGGKLRFKKIKPEAFEANRFYTVINKKSGEIVPMEVNFNFDDPNLIILPLAFGKRQGREFIWNDLLSLETGSLKLANGRVIEKTLYNRRTRQDEPALFVALTFERREVLDSSNIKPMNLIGVDRGENIPAVIALTDPEGCPLSRFKDSLGNPTHILRIGESYKEKQRTIQAKKEVEQRRAGGYSRKYASKAKNLADDMVRNTARDLLYYAVTQDAMLIFENLSRGFGRQGKRTFMAERQYTRMEDWLTAKLAYEGLPSKTYLSKTLAQYTSKTCSNCGFTITSADYDRVLEKLKKTATGWMTTINGKELKVEGQITYYNRYKRQNVVKDLSVELDRLSEESVNNDISSWTKGRSGEALSLLKKRFSHRPVQEKFVCLNCGFETHADEQAALNIARSWLFLRSQEYKKYQTNKTTGNTDKRAFVETWQSFYRKKLKEVWKPAV

SEQ ID NO: 32200 - protein, 979 aa, synthetic construct
  REGION 1..979: note = engineered CasX variant
QEIKGRINGIRRRLVKDSNTKKAGKTGPMKTLLVRVMTPDLRERLENLRKKPENIPQPISNTSRANLNKLLTDYTEMKKAILHVYWEEFQKDPVGLMSRVAQPASKKIDQNKLKPEMDEKGNLTTAGFACSQCGQPLFVYKLEQVSEKGKAYTNYFGRCNVAEHEKLILLAQLKPEKDSDEAVTYSLGKFGQRALDFYSIHVTKESTHPVKPLAQIAGNRYASHPVGKALSDACMGTIASFLSKYQDIIIEHQKVVKGNQKRLESLRELAGKENLEYPSVTLPPQPHTKEGVDAYNEVIARVRMWVNLNLWQKLKLSRDDAKPLLRLKGFPSFPLVERQANEVDWWDMVCNVKKLINEKKEDGKVFWQNLAGYKRQEALRPYLSSEEDRKKGKKFARYQLGDLLLHLEKKHGEDWGKVYDEAWERIDKKVEGLSKHIKLEEERRSEDAQSKAALTDWLRAKASFVIEGLKEADKDEFCRCELKLQKWYGDLRGKPFAIEAENSILDISGFSKQYNCAFIWQKDGVKKLNLYLIINYFKGGKLRFKKIKPEAFEANRFYTVINKKSGEIVPMEVNFNFDDPNLIILPLAFGKRQGREFIWNDLLSLETGSLKLANGRVIEKTLYNRRTRQDEPALFVALTFERREVLDSSNIKPMNLIGVDRGENIPAVIALTDPEGCPLSRFKDSLGNPTHILRIGESYKEKQRTIQAKKEVEQRRAGGYSRKYASKAKNLADDMVRNTARDLLYYAVTQDAMLIFENLSRGFGRQGKRTFMAERQYTRMEDWLTAKLAYEGLPSKTYLSKTLAQYTSKTCSNCGFTITSADYDRVLEKLKKTATGWMTTINGKELKVEGQITYYNRYKRQNVVKDLSVELDRLSEESVNNDISSWTKGRSGEALSLLKKRFSHRPVQEKFVCLNCGFETHADEQAALNIARSWLFLRSQEYKKYQTNKTTGNTDKRAFVETWQSFYRKKLKEVWKPAV

SEQ ID NO: 32201 - protein, 979 aa, synthetic construct
  REGION 1..979: note = engineered CasX variant
QEIKGRINGIRRRLVKDSNTKKAGKTGPMKTLLVRVMTPDLRERLENLRKKPENIPQPISNTSRANLNKLLTDYTEMKKAILHVYWEEFQKDPVGLMSRVAQPASKKIDQNKLKPEMDEKGNLTTAGFACSQCGQPLFVYKLEQVSEKGKAYTNYFGRCNVAEHEKLILLAQLKPEKDSDEAVTYSLGKFGQRALDFYSIHVTKESTHPVKPLAQIAGNRYASSPVGKALSDACMGTIASFLSKYQDIIIEHQKVVKGNQKRLESLRELAGKENLEYPSVTLPPQPHTKEGVDAYNEVIARVRMWVNLNLWQKLKLSRDDAKPLLRLKGFPSFPLVERQANEVDWWDMVCNVKKLINEKKEDGKVFWQNLAGYKRQEALRPYLSSEEDRKKGKKFARYQLGDLLLHLEKKHGEDWGKVYDEAWERIDKKVEGLSKHIKLEEERRSEDAQSKAALTDWLRAKASFVIEGLKEADKDEFCRCELKLQKWYGDLRGKPFAIEAENSILDISGFSKQYNCAFIWQKDGVKKLNLYLIINYFKGGKLRFKKIKPEAFEANRFYTVINKKSGEIVPMEVNFNFDDPNLIILPLAFGKRQGREFIWNDLLSLETGSLKLANGRVIEKTLYNRRTRQDEPALFVALTFERREVLDSSNIKPMNLIGVDRGENIPAVIALTDPEGCPLSRFKDSLGNPTHILRIGESYKEKQRTIQAKKEVEQRRAGGYSRKYASKAKNLADDMVRNTARDLLYYAVTQDAMLIFENLSRGFGRQGKRTFMAERQYTRMEDWLTAKLAYEGLPSKTYLSKTLAQYTSKTCSNCGFTITSADYDRVLEKLKKTATGWMTTINGKELKVEGQITYYNRYKRQNVVKDLSVELDRLSEESVNNDISSWTKGRSGEALSLLKKRFSHRPVQEKFVCLNCGFETHADEQAALNIARSWLFLRSQEYKKYQTNKTTGNTDKRAFVETWQSFYRKKLKEVWKPAV

SEQ ID NO: 32202 - protein, 979 aa, synthetic construct
  REGION 1..979: note = engineered CasX variant
QEIKGRINGIRRRLVKDSNTKKAGKTGPMKTLLVRVMTPDLRERLENLRKKPENIPQPISNTSRANLNKLLTDYTEMKKAILHVYWEEFQKDPVGLMSRVAQPASKKIDQNKLKPEMDEKGNLTTAGFACSQCGQPLFVYKLEQVSEKGKAYTNYFGRCNVAEHEKLILLAQLKPEKDSDEAVTYSLGKFGQRALDFYSIHVTKESTHPVKPLAQIAGNRYASTPVGKALSDACMGTIASFLSKYQDIIIEHQKVVKGNQKRLESLRELAGKENLEYPSVTLPPQPHTKEGVDAYNEVIARVRMWVNLNLWQKLKLSRDDAKPLLRLKGFPSFPLVERQANEVDWWDMVCNVKKLINEKKEDGKVFWQNLAGYKRQEALRPYLSSEEDRKKGKKFARYQLGDLLLHLEKKHGEDWGKVYDEAWERIDKKVEGLSKHIKLEEERRSEDAQSKAALTDWLRAKASFVIEGLKEADKDEFCRCELKLQKWYGDLRGKPFAIEAENSILDISGFSKQYNCAFIWQKDGVKKLNLYLIINYFKGGKLRFKKIKPEAFEANRFYTVINKKSGEIVPMEVNFNFDDPNLIILPLAFGKRQGREFIWNDLLSLETGSLKLANGRVIEKTLYNRRTRQDEPALFVALTFERREVLDSSNIKPMNLIGVDRGENIPAVIALTDPEGCPLSRFKDSLGNPTHILRIGESYKEKQRTIQAKKEVEQRRAGGYSRKYASKAKNLADDMVRNTARDLLYYAVTQDAMLIFENLSRGFGRQGKRTFMAERQYTRMEDWLTAKLAYEGLPSKTYLSKTLAQYTSKTCSNCGFTITSADYDRVLEKLKKTATGWMTTINGKELKVEGQITYYNRYKRQNVVKDLSVELDRLSEESVNNDISSWTKGRSGEALSLLKKRFSHRPVQEKFVCLNCGFETHADEQAALNIARSWLFLRSQEYKKYQTNKTTGNTDKRAFVETWQSFYRKKLKEVWKPAV

SEQ ID NO: 32203 - protein, 979 aa, synthetic construct
  REGION 1..979: note = engineered CasX variant
QEIKGRINGIRRRLVKDSNTKKAGKTGPMKTLLVRVMTPDLRERLENLRKKPENIPQPISNTSRANLNKLLTDYTEMKKAILHVYWEEFQKDPVGLMSRVAQPASKKIDQNKLKPEMDEKGNLTTAGFACSQCGQPLFVYKLEQVSEKGKAYTNYFGRCNVAEHEKLILLAQLKPEKDSDEAVTYSLGKFGQRALDFYSIHVTKESTHPVKPLAQIAGNRYASAPVGKALSDACMGTIASFLSKYQDIIIEHQKVVKGNQKRLESLRELAGKENLEYPSVTLPPQPHTKEGVDAYNEVIARVRMWVNLNLWQKLKLSRDDAKPLLRLKGFPSFPLVERQANEVDWWDMVCNVKKLINEKKEDGKVFWQNLAGYKRQEALRPYLSSEEDRKKGKKFARYQLGDLLLHLEKKHGEDWGKVYDEAWERIDKKVEGLSKHIKLEEERRSEDAQSKAALTDWLRAKASFVIEGLKEADKDEFCRCELKLQKWYGDLRGKPFAIEAENSILDISGFSKQYNCAFIWQKDGVKKLNLYLIINYFKGGKLRFKKIKPEAFEANRFYTVINKKSGEIVPMEVNFNFDDPNLIILPLAFGKRQGREFIWNDLLSLETGSLKLANGRVIEKTLYNRRTRQDEPALFVALTFERREVLDSSNIKPMNLIGVDRGENIPAVIALTDPEGCPLSRFKDSLGNPTHILRIGESYKEKQRTIQAKKEVEQRRAGGYSRKYASKAKNLADDMVRNTARDLLYYAVTQDAMLIFENLSRGFGRQGKRTFMAERQYTRMEDWLTAKLAYEGLPSKTYLSKTLAQYTSKTCSNCGFTITSADYDRVLEKLKKTATGWMTTINGKELKVEGQITYYNRYKRQNVVKDLSVELDRLSEESVNNDISSWTKGRSGEALSLLKKRFSHRPVQEKFVCLNCGFETHADEQAALNIARSWLFLRSQEYKKYQTNKTTGNTDKRAFVETWQSFYRKKLKEVWKPAV

SEQ ID NO: 32204 - protein, 979 aa, synthetic construct
  REGION 1..979: note = engineered CasX variant
QEIKGRINGIRRRLVKDSNTKKAGKTGPMKTLLVRVMTPDLRERLENLRKKPENIPQPISNTSRANLNKLLTDYTEMKKAILHVYWEEFQKDPVGLMSRVAQPASKKIDQNKLKPEMDEKGNLTTAGFACSQCGQPLFVYKLEQVSEKGKAYTNYFGRCNVAEHEKLILLAQLKPEKDSDEAVTYSLGKFGQRALDFYSIHVTKESTHPVKPLAQIAGNRYASVPVGKALSDACMGTIASFLSKYQDIIIEHQKVVKGNQKRLESLRELAGKENLEYPSVTLPPQPHTKEGVDAYNEVIARVRMWVNLNLWQKLKLSRDDAKPLLRLKGFPSFPLVERQANEVDWWDMVCNVKKLINEKKEDGKVFWQNLAGYKRQEALRPYLSSEEDRKKGKKFARYQLGDLLLHLEKKHGEDWGKVYDEAWERIDKKVEGLSKHIKLEEERRSEDAQSKAALTDWLRAKASFVIEGLKEADKDEFCRCELKLQKWYGDLRGKPFAIEAENSILDISGFSKQYNCAFIWQKDGVKKLNLYLIINYFKGGKLRFKKIKPEAFEANRFYTVINKKSGEIVPMEVNFNFDDPNLIILPLAFGKRQGREFIWNDLLSLETGSLKLANGRVIEKTLYNRRTRQDEPALFVALTFERREVLDSSNIKPMNLIGVDRGENIPAVIALTDPEGCPLSRFKDSLGNPTHILRIGESYKEKQRTIQAKKEVEQRRAGGYSRKYASKAKNLADDMVRNTARDLLYYAVTQDAMLIFENLSRGFGRQGKRTFMAERQYTRMEDWLTAKLAYEGLPSKTYLSKTLAQYTSKTCSNCGFTITSADYDRVLEKLKKTATGWMTTINGKELKVEGQITYYNRYKRQNVVKDLSVELDRLSEESVNNDISSWTKGRSGEALSLLKKRFSHRPVQEKFVCLNCGFETHADEQAALNIARSWLFLRSQEYKKYQTNKTTGNTDKRAFVETWQSFYRKKLKEVWKPAV

SEQ ID NO: 32205 - protein, 979 aa, synthetic construct
  REGION 1..979: note = engineered CasX variant
QEIKGRINGIRRRLVKDSNTKKAGKTGPMKTLLVRVMTPDLRERLENLRKKPENIPQPISNTSRANLNKLLTDYTEMKKAILHVYWEEFQKDPVGLMSRVAQPASKKIDQNKLKPEMDEKGNLTTAGFACSQCGQPLFVYKLEQVSEKGKAYTNYFGRCNVAEHEKLIKLAQLKPEKDSDEAVTYSLGKFGQRALDFYSIHVTKESTHPVKPLAQIAGNRYASGPVGKALSDACMGTIASFLSKYQDIIIEHQKVVKGNQKRLESLRELAGKENLEYPSVTLPPQPHTKEGVDAYNEVIARVRMWVNLNLWQKLKLSRDDAKPLLRLKGFPSFPLVERQANEVDWWDMVCNVKKLINEKKEDGKVFWQNLAGYKRQEALRPYLSSEEDRKKGKKFARYQLGDLLLHLEKKHGEDWGKVYDEAWERIDKKVEGLSKHIKLEEERRSEDAQSKAALTDWLRAKASFVIEGLKEADKDEFCRCELKLQKWYGDLRGKPFAIEAENSILDISGFSKQYNCAFIWQKDGVKKLNLYLIINYFKGGKLRFKKIKPEAFEANRFYTVINKKSGEIVPMEVNFNFDDPNLIILPLAFGKRQGREFIWNDLLSLETGSLKLANGRVIEKTLYNRRTRQDEPALFVALTFERREVLDSSNIKPMNLIGVDRGENIPAVIALTDPEGCPLSRFKDSLGNPTHILRIGESYKEKQRTIQAKKEVEQRRAGGYSRKYASKAKNLADDMVRNTARDLLYYAVTQDAMLIFENLSRGFGRQGKRTFMAERQYTRMEDWLTAKLAYEGLPSKTYLSKTLAQYTSKTCSNCGFTITSADYDRVLEKLKKTATGWMTTINGKELKVEGQITYYNRYKRQNVVKDLSVELDRLSEESVNNDISSWTKGRSGEALSLLKKRFSHRPVQEKFVCLNCGFETHADEQAALNIARSWLFLRSQEYKKYQTNKTTGNTDKRAFVETWQSFYRKKLKEVWKPAV

SEQ ID NO: 32206 - protein, 978 aa, synthetic construct
  REGION 1..978: note = engineered CasX variant
QEIKGRINGIRRRLVKDSNTKKAGKTGPMKTLLVRVMTPDLRERLENLRKKPENIPQPISNTSRANLNKLLTDYTEMKKAILHVYWEEFQKDPVGLMSRVAQPASKKIDQNKLKPEMDEKGNLTTAGFACSQCGQPLFVYKLEQVSEKGKAYTNYFGRCNVAEHEKLILLAQLKPEKDSDEAVTYSLGKFGQRALDFYSIHVTKESTHPVKPLAQIAGNRYASPVGKALSDACMGTIASFLSKYQDIIIEHQKVVKGNQKRLESLRELAGKENLEYPSVTLPPQPHTKEGVDAYNEVIARVRMWVNLNLWQKLKLSRDDAKPLLRLKGFPSFPLVERQANEVDWWDMVCNVKKLINEKKEDGKVFWQNLAGYKRQEALRPYLSSEEDRKKGKKFARYQLGDLLLHLEKKHGEDWGKVYDEAWERIDKKVEGLSKHIKLEEERRSEDAQSKAALTDWLRAKASFVIEGLKEADKDEFCRCELKLQKWYGDLRGKPFAIEAENSILDISGFSKQYNCAFIWQKDGVKKLNLYLIINYFKGGKLRFKKIKPEAFEANRFYTVINKKSGEIVPMEVNFNFDDPNLIILPLAFGKRQGREFIWNDLLSLETGSLKLANGRVIEKTLYNRRTRQDEPALFVALTFERREVLDSSNIKPMNLIGVDRGENIPAVIALTDPEGCPLSRFKDSLGNPTHILRIGESYKEKQRTIQAKKEVEQRRAGGYSRKYASKAKNLADDMVRNTARDLLYYAVTQDAMLIFENLSRGFGRQGKRTFMAERQYTRMEDWLTAKLAYEGLPSKTYLSKTLAQYTSKTCSNCGFTITSADYDRVLEKLKKTATGWMTTINGKELKVEGQITYYNRYKRQNVVKDLSVELDRLSEESVNNDISSWTKGRSGEALSLLKKRFSHRPVQEKFVCLNCGFETHADEQAALNIARSWLFLRSQEYKKYQTNKTTGNTDKRAFVETWQSFYRKKLKEVWKPAV

SEQ ID NO: 32207 - protein, 979 aa, synthetic construct
  REGION 1..979: note = engineered CasX variant
QEIKGRINKIRRRLVKDSNTKKAGKTGPMKTLLVPVMTPDLRERLENLRKKPENIPQPISNTSRANLNKLLTDYTEMKKAILHVYWEEFQKDPVGLMSRVAQPASKKIDQNKLKPEMDEKGNLTTAGFACSQCGQPLFVYKLEQVSEKGKAYTNYFGRCNVAEHEKLILLAQLKPEKDSDEAVTYSLGKFGQRALDFYSIHVTKESTHPVKPLAQIAGNRYASYPVGKALSDACMGTIASFLSKYQDIIIEHQKVVKGNQKRLESLRELAGKENLEYPSVTLPPQPHTKEGVDAYNEVIARVRMWVNLNLWQKLKLSRDDAKPLLRLKGFPSFPLVERQANEVDWWDMVCNVKKLINEKKEDGKVFWQNLAGYKRQEALRPYLSSEEDRKKGKKFARYQLGDLLLHLEKKHGEDWGKVYDEAWERIDKKVEGLSKHIKLEEERRSEDAQSKAALTDWLRAKASFVIEGLKEADKDEFCRCELKLQKWYGDLRGKPFAIEAENSILDISGFSKQYNCAFIWQKDGVKKLNLYLIINYFKGGKLRFKKIKPEAFEANRFYTVINKKSGEIVPMEVNFNFDDPNLIILPLAFGKRQGREFIWNDLLSLETGSLKLANGRVIEKTLYNRRTRQDEPALFVALTFERREVLDSSNIKPMNLIGVDRGENIPAVIALTDPEGCPLSRFKDSLGNPTHILRIGESYKEKQRTIQAKKEVEQRRAGGYSRKYASKAKNLADDMVRNTARDLLYYAVTQDAMLIFENLSRGFGRQGKRTFMAERQYTRMEDWLTAKLAYEGLPSKTYLSKTLAQYTSKTCSNCGFTITSADYDRVLEKLKKTATGWMTTINGKELKVEGQITYYNRYKRQNVVKDLSVELDRLSEESVNNDISSWTKGRSGEALSLLKKRFSHRPVQEKFVCLNCGFETHADEQAALNIARSWLFLRSQEYKKYQTNKTTGNTDKRAFVETWQSFYRKKLKEVWKPAV

SEQ ID NO: 32208 - protein, 979 aa, synthetic construct
  REGION 1..979: note = engineered CasX variant
QEIKGRINKIRRRLVKDSNTKKAGKTGPMKTLLVPVMTPDLRERLENLRKKPENIPQPISNTSRANLNKLLTDYTEMKKAILHVYWEEFQKDPVGLMSRVAQPASKKIDQNKLKPEMDEKGNLTTAGFACSQCGQPLFVYKLEQVSEKGKAYTNYFGRCNVAEHEKLILLAQLKPEKDSDEAVTYSLGKFGQRALDFYSIHVTKESTHPVKPLAQIAGNRYASHPVGKALSDACMGTIASFLSKYQDIIIEHQKVVKGNQKRLESLRELAGKENLEYPSVTLPPQPHTKEGVDAYNEVIARVRMWVNLNLWQKLKLSRDDAKPLLRLKGFPSFPLVERQANEVDWWDMVCNVKKLINEKKEDGKVFWQNLAGYKRQEALRPYLSSEEDRKKGKKFARYQLGDLLLHLEKKHGEDWGKVYDEAWERIDKKVEGLSKHIKLEEERRSEDAQSKAALTDWLRAKASFVIEGLKEADKDEFCRCELKLQKWYGDLRGKPFAIEAENSILDISGFSKQYNCAFIWQKDGVKKLNLYLIINYFKGGKLRFKKIKPEAFEANRFYTVINKKSGEIVPMEVNFNFDDPNLIILPLAFGKRQGREFIWNDLLSLETGSLKLANGRVIEKTLYNRRTRQDEPALFVALTFERREVLDSSNIKPMNLIGVDRGENIPAVIALTDPEGCPLSRFKDSLGNPTHILRIGESYKEKQRTIQAKKEVEQRRAGGYSRKYASKAKNLADDMVRNTARDLLYYAVTQDAMLIFENLSRGFGRQGKRTFMAERQYTRMEDWLTAKLAYEGLPSKTYLSKTLAQYTSKTCSNCGFTITSADYDRVLEKLKKTATGWMTTINGKELKVEGQITYYNRYKRQNVVKDLSVELDRLSEESVNNDISSWTKGRSGEALSLLKKRFSHRPVQEKFVCLNCGFETHADEQAALNIARSWLFLRSQEYKKYQTNKTTGNTDKRAFVETWQSFYRKKLKEVWKPAV

SEQ ID NO: 32209 - protein, 979 aa, synthetic construct
  REGION 1..979: note = engineered CasX variant
QEIKGRINKIRRRLVKDSNTKKAGKTGPMKTLLVPVMTPDLRERLENLRKKPENIPQPISNTSRANLNKLLTDYTEMKKAILHVYWEEFQKDPVGLMSRVAQPASKKIDQNKLKPEMDEKGNLTTAGFACSQCGQPLFVYKLEQVSEKGKAYTNYFGRCNVAEHEKLILLAQLKPEKDSDEAVTYSLGKFGQRALDFYSIHVTKESTHPVKPLAQIAGNRYASSPVGKALSDACMGTIASFLSKYQDIIIEHQKVVKGNQKRLESLRELAGKENLEYPSVTLPPQPHTKEGVDAYNEVIARVRMWVNLNLWQKLKLSRDDAKPLLRLKGFPSFPLVERQANEVDWWDMVCNVKKLINEKKEDGKVFWQNLAGYKRQEALRPYLSSEEDRKKGKKFARYQLGDLLLHLEKKHGEDWGKVYDEAWERIDKKVEGLSKHIKLEEERRSEDAQSKAALTDWLRAKASFVIEGLKEADKDEFCRCELKLQKWYGDLRGKPFAIEAENSILDISGFSKQYNCAFIWQKDGVKKLNLYLIINYFKGGKLRFKKIKPEAFEANRFYTVINKKSGEIVPMEVNFNFDDPNLIILPLAFGKRQGREFIWNDLLSLETGSLKLANGRVIEKTLYNRRTRQDEPALFVALTFERREVLDSSNIKPMNLIGVDRGENIPAVIALTDPEGCPLSRFKDSLGNPTHILRIGESYKEKQRTIQAKKEVEQRRAGGYSRKYASKAKNLADDMVRNTARDLLYYAVTQDAMLIFENLSRGFGRQGKRTFMAERQYTRMEDWLTAKLAYEGLPSKTYLSKTLAQYTSKTCSNCGFTITSADYDRVLEKLKKTATGWMTTINGKELKVEGQITYYNRYKRQNVVKDLSVELDRLSEESVNNDISSWTKGRSGEALSLLKKRFSHRPVQEKFVCLNCGFETHADEQAALNIARSWLFLRSQEYKKYQTNKTTGNTDKRAFVETWQSFYRKKLKEVWKPAV

SEQ ID NO: 32210 - protein, 979 aa, synthetic construct
  REGION 1..979: note = engineered CasX variant
QEIKGRINKIRRRLVKDSNTKKAGKTGPMKTLLVPVMTPDLRERLENLRKKPENIPQPISNTSRANLNKLLTDYTEMKKAILHVYWEEFQKDPVGLMSRVAQPASKKIDQNKLKPEMDEKGNLTTAGFACSQCGQPLFVYKLEQVSEKGKAYTNYFGRCNVAEHEKLILLAQLKPEKDSDEAVTYSLGKFGQRALDFYSIHVTKESTHPVKPLAQIAGNRYASTPVGKALSDACMGTIASFLSKYQDIIIEHQKVVKGNQKRLESLRELAGKENLEYPSVTLPPQPHTKEGVDAYNEVIARVRMWVNLNLWQKLKLSRDDAKPLLRLKGFPSFPLVERQANEVDWWDMVCNVKKLINEKKEDGKVFWQNLAGYKRQEALRPYLSSEEDRKKGKKFARYQLGDLLLHLEKKHGEDWGKVYDEAWERIDKKVEGLSKHIKLEEERRSEDAQSKAALTDWLRAKASFVIEGLKEADKDEFCRCELKLQKWYGDLRGKPFAIEAENSILDISGFSKQYNCAFIWQKDGVKKLNLYLIINYFKGGKLRFKKIKPEAFEANRFYTVINKKSGEIVPMEVNFNFDDPNLIILPLAFGKRQGREFIWNDLLSLETGSLKLANGRVIEKTLYNRRTRQDEPALFVALTFERREVLDSSNIKPMNLIGVDRGENIPAVIALTDPEGCPLSRFKDSLGNPTHILRIGESYKEKQRTIQAKKEVEQRRAGGYSRKYASKAKNLADDMVRNTARDLLYYAVTQDAMLIFENLSRGFGRQGKRTFMAERQYTRMEDWLTAKLAYEGLPSKTYLSKTLAQYTSKTCSNCGFTITSADYDRVLEKLKKTATGWMTTINGKELKVEGQITYYNRYKRQNVVKDLSVELDRLSEESVNNDISSWTKGRSGEALSLLKKRFSHRPVQEKFVCLNCGFETHADEQAALNIARSWLFLRSQEYKKYQTNKTTGNTDKRAFVETWQSFYRKKLKEVWKPAV

SEQ ID NO: 32211 - protein, 979 aa, synthetic construct
  REGION 1..979: note = engineered CasX variant
QEIKGRINKIRRRLVKDSNTKKAGKTGPMKTLLVPVMTPDLRERLENLRKKPENIPQPISNTSRANLNKLLTDYTEMKKAILHVYWEEFQKDPVGLMSRVAQPASKKIDQNKLKPEMDEKGNLTTAGFACSQCGQPLFVYKLEQVSEKGKAYTNYFGRCNVAEHEKLILLAQLKPEKDSDEAVTYSLGKFGQRALDFYSIHVTKESTHPVKPLAQIAGNRYASAPVGKALSDACMGTIASFLSKYQDIIIEHQKVVKGNQKRLESLRELAGKENLEYPSVTLPPQPHTKEGVDAYNEVIARVRMWVNLNLWQKLKLSRDDAKPLLRLKGFPSFPLVERQANEVDWWDMVCNVKKLINEKKEDGKVFWQNLAGYKRQEALRPYLSSEEDRKKGKKFARYQLGDLLLHLEKKHGEDWGKVYDEAWERIDKKVEGLSKHIKLEEERRSEDAQSKAALTDWLRAKASFVIEGLKEADKDEFCRCELKLQKWYGDLRGKPFAIEAENSILDISGFSKQYNCAFIWQKDGVKKLNLYLIINYFKGGKLRFKKIKPEAFEANRFYTVINKKSGEIVPMEVNFNFDDPNLIILPLAFGKRQGREFIWNDLLSLETGSLKLANGRVIEKTLYNRRTRQDEPALFVALTFERREVLDSSNIKPMNLIGVDRGENIPAVIALTDPEGCPLSRFKDSLGNPTHILRIGESYKEKQRTIQAKKEVEQRRAGGYSRKYASKAKNLADDMVRNTARDLLYYAVTQDAMLIFENLSRGFGRQGKRTFMAERQYTRMEDWLTAKLAYEGLPSKTYLSKTLAQYTSKTCSNCGFTITSADYDRVLEKLKKTATGWMTTINGKELKVEGQITYYNRYKRQNVVKDLSVELDRLSEESVNNDISSWTKGRSGEALSLLKKRFSHRPVQEKFVCLNCGFETHADEQAALNIARSWLFLRSQEYKKYQTNKTTGNTDKRAFVETWQSFYRKKLKEVWKPAV

SEQ ID NO: 32212 - protein, 979 aa, synthetic construct
  REGION 1..979: note = engineered CasX variant
QEIKGRINKIRRRLVKDSNTKKAGKTGPMKTLLVPVMTPDLRERLENLRKKPENIPQPISNTSRANLNKLLTDYTEMKKAILHVYWEEFQKDPVGLMSRVAQPASKKIDQNKLKPEMDEKGNLTTAGFACSQCGQPLFVYKLEQVSEKGKAYTNYFGRCNVAEHEKLILLAQLKPEKDSDEAVTYSLGKFGQRALDFYSIHVTKESTHPVKPLAQIAGNRYASVPVGKALSDACMGTIASFLSKYQDIIIEHQKVVKGNQKRLESLRELAGKENLEYPSVTLPPQPHTKEGVDAYNEVIARVRMWVNLNLWQKLKLSRDDAKPLLRLKGFPSFPLVERQANEVDWWDMVCNVKKLINEKKEDGKVFWQNLAGYKRQEALRPYLSSEEDRKKGKKFARYQLGDLLLHLEKKHGEDWGKVYDEAWERIDKKVEGLSKHIKLEEERRSEDAQSKAALTDWLRAKASFVIEGLKEADKDEFCRCELKLQKWYGDLRGKPFAIEAENSILDISGFSKQYNCAFIWQKDGVKKLNLYLIINYFKGGKLRFKKIKPEAFEANRFYTVINKKSGEIVPMEVNFNFDDPNLIILPLAFGKRQGREFIWNDLLSLETGSLKLANGRVIEKTLYNRRTRQDEPALFVALTFERREVLDSSNIKPMNLIGVDRGENIPAVIALTDPEGCPLSRFKDSLGNPTHILRIGESYKEKQRTIQAKKEVEQRRAGGYSRKYASKAKNLADDMVRNTARDLLYYAVTQDAMLIFENLSRGFGRQGKRTFMAERQYTRMEDWLTAKLAYEGLPSKTYLSKTLAQYTSKTCSNCGFTITSADYDRVLEKLKKTATGWMTTINGKELKVEGQITYYNRYKRQNVVKDLSVELDRLSEESVNNDISSWTKGRSGEALSLLKKRFSHRPVQEKFVCLNCGFETHADEQAALNIARSWLFLRSQEYKKYQTNKTTGNTDKRAFVETWQSFYRKKLKEVWKPAV

SEQ ID NO: 32213 - protein, 979 aa, synthetic construct
  REGION 1..979: note = engineered CasX variant
QEIKGRINKIRRRLVKDSNTKKAGKTGPMKTLLVPVMTPDLRERLENLRKKPENIPQPISNTSRANLNKLLTDYTEMKKAILHVYWEEFQKDPVGLMSRVAQPASKKIDQNKLKPEMDEKGNLTTAGFACSQCGQPLFVYKLEQVSEKGKAYTNYFGRCNVAEHEKLIKLAQLKPEKDSDEAVTYSLGKFGQRALDFYSIHVTKESTHPVKPLAQIAGNRYASGPVGKALSDACMGTIASFLSKYQDIIIEHQKVVKGNQKRLESLRELAGKENLEYPSVTLPPQPHTKEGVDAYNEVIARVRMWVNLNLWQKLKLSRDDAKPLLRLKGFPSFPLVERQANEVDWWDMVCNVKKLINEKKEDGKVFWQNLAGYKRQEALRPYLSSEEDRKKGKKFARYQLGDLLLHLEKKHGEDWGKVYDEAWERIDKKVEGLSKHIKLEEERRSEDAQSKAALTDWLRAKASFVIEGLKEADKDEFCRCELKLQKWYGDLRGKPFAIEAENSILDISGFSKQYNCAFIWQKDGVKKLNLYLIINYFKGGKLRFKKIKPEAFEANRFYTVINKKSGEIVPMEVNFNFDDPNLIILPLAFGKRQGREFIWNDLLSLETGSLKLANGRVIEKTLYNRRTRQDEPALFVALTFERREVLDSSNIKPMNLIGVDRGENIPAVIALTDPEGCPLSRFKDSLGNPTHILRIGESYKEKQRTIQAKKEVEQRRAGGYSRKYASKAKNLADDMVRNTARDLLYYAVTQDAMLIFENLSRGFGRQGKRTFMAERQYTRMEDWLTAKLAYEGLPSKTYLSKTLAQYTSKTCSNCGFTITSADYDRVLEKLKKTATGWMTTINGKELKVEGQITYYNRYKRQNVVKDLSVELDRLSEESVNNDISSWTKGRSGEALSLLKKRFSHRPVQEKFVCLNCGFETHADEQAALNIARSWLFLRSQEYKKYQTNKTTGNTDKRAFVETWQSFYRKKLKEVWKPAV

SEQ ID NO: 32214 - protein, 978 aa, synthetic construct
  REGION 1..978: note = engineered CasX variant
QEIKGRINKIRRRLVKDSNTKKAGKTGPMKTLLVPVMTPDLRERLENLRKKPENIPQPISNTSRANLNKLLTDYTEMKKAILHVYWEEFQKDPVGLMSRVAQPASKKIDQNKLKPEMDEKGNLTTAGFACSQCGQPLFVYKLEQVSEKGKAYTNYFGRCNVAEHEKLILLAQLKPEKDSDEAVTYSLGKFGQRALDFYSIHVTKESTHPVKPLAQIAGNRYASPVGKALSDACMGTIASFLSKYQDIIIEHQKVVKGNQKRLESLRELAGKENLEYPSVTLPPQPHTKEGVDAYNEVIARVRMWVNLNLWQKLKLSRDDAKPLLRLKGFPSFPLVERQANEVDWWDMVCNVKKLINEKKEDGKVFWQNLAGYKRQEALRPYLSSEEDRKKGKKFARYQLGDLLLHLEKKHGEDWGKVYDEAWERIDKKVEGLSKHIKLEEERRSEDAQSKAALTDWLRAKASFVIEGLKEADKDEFCRCELKLQKWYGDLRGKPFAIEAENSILDISGFSKQYNCAFIWQKDGVKKLNLYLIINYFKGGKLRFKKIKPEAFEANRFYTVINKKSGEIVPMEVNFNFDDPNLIILPLAFGKRQGREFIWNDLLSLETGSLKLANGRVIEKTLYNRRTRQDEPALFVALTFERREVLDSSNIKPMNLIGVDRGENIPAVIALTDPEGCPLSRFKDSLGNPTHILRIGESYKEKQRTIQAKKEVEQRRAGGYSRKYASKAKNLADDMVRNTARDLLYYAVTQDAMLIFENLSRGFGRQGKRTFMAERQYTRMEDWLTAKLAYEGLPSKTYLSKTLAQYTSKTCSNCGFTITSADYDRVLEKLKKTATGWMTTINGKELKVEGQITYYNRYKRQNVVKDLSVELDRLSEESVNNDISSWTKGRSGEALSLLKKRFSHRPVQEKFVCLNCGFETHADEQAALNIARSWLFLRSQEYKKYQTNKTTGNTDKRAFVETWQSFYRKKLKEVWKPAV

SEQ ID NO: 32215 - protein, 979 aa, synthetic construct
  REGION 1..979: note = engineered CasX variant
QEIKGRINKIRRRLVKDSNTKKAGKTGPMKTLLVRVMTPDLRERLENLRKKPPNIPQPISNTSRANLNKLLTDYTEMKKAILHVYWEEFQKDPVGLMSRVAQPASKKIDQNKLKPEMDEKGNLTTAGFACSQCGQPLFVYKLEQVSEKGKAYTNYFGRCNVAEHEKLILLAQLKPEKDSDEAVTYSLGKFGQRALDFYSIHVTKESTHPVKPLAQIAGNRYASYPVGKALSDACMGTIASFLSKYQDIIIEHQKVVKGNQKRLESLRELAGKENLEYPSVTLPPQPHTKEGVDAYNEVIARVRMWVNLNLWQKLKLSRDDAKPLLRLKGFPSFPLVERQANEVDWWDMVCNVKKLINEKKEDGKVFWQNLAGYKRQEALRPYLSSEEDRKKGKKFARYQLGDLLLHLEKKHGEDWGKVYDEAWERIDKKVEGLSKHIKLEEERRSEDAQSKAALTDWLRAKASFVIEGLKEADKDEFCRCELKLQKWYGDLRGKPFAIEAENSILDISGFSKQYNCAFIWQKDGVKKLNLYLIINYFKGGKLRFKKIKPEAFEANRFYTVINKKSGEIVPMEVNFNFDDPNLIILPLAFGKRQGREFIWNDLLSLETGSLKLANGRVIEKTLYNRRTRQDEPALFVALTFERREVLDSSNIKPMNLIGVDRGENIPAVIALTDPEGCPLSRFKDSLGNPTHILRIGESYKEKQRTIQAKKEVEQRRAGGYSRKYASKAKNLADDMVRNTARDLLYYAVTQDAMLIFENLSRGFGRQGKRTFMAERQYTRMEDWLTAKLAYEGLPSKTYLSKTLAQYTSKTCSNCGFTITSADYDRVLEKLKKTATGWMTTINGKELKVEGQITYYNRYKRQNVVKDLSVELDRLSEESVNNDISSWTKGRSGEALSLLKKRFSHRPVQEKFVCLNCGFETHADEQAALNIARSWLFLRSQEYKKYQTNKTTGNTDKRAFVETWQSFYRKKLKEVWKPAV

SEQ ID NO: 32216 - protein, 979 aa, synthetic construct
  REGION 1..979: note = engineered CasX variant
QEIKGRINKIRRRLVKDSNTKKAGKTGPMKTLLVRVMTPDLRERLENLRKKPPNIPQPISNTSRANLNKLLTDYTEMKKAILHVYWEEFQKDPVGLMSRVAQPASKKIDQNKLKPEMDEKGNLTTAGFACSQCGQPLFVYKLEQVSEKGKAYTNYFGRCNVAEHEKLILLAQLKPEKDSDEAVTYSLGKFGQRALDFYSIHVTKESTHPVKPLAQIAGNRYASHPVGKALSDACMGTIASFLSKYQDIIIEHQKVVKGNQKRLESLRELAGKENLEYPSVTLPPQPHTKEGVDAYNEVIARVRMWVNLNLWQKLKLSRDDAKPLLRLKGFPSFPLVERQANEVDWWDMVCNVKKLINEKKEDGKVFWQNLAGYKRQEALRPYLSSEEDRKKGKKFARYQLGDLLLHLEKKHGEDWGKVYDEAWERIDKKVEGLSKHIKLEEERRSEDAQSKAALTDWLRAKASFVIEGLKEADKDEFCRCELKLQKWYGDLRGKPFAIEAENSILDISGFSKQYNCAFIWQKDGVKKLNLYLIINYFKGGKLRFKKIKPEAFEANRFYTVINKKSGEIVPMEVNFNFDDPNLIILPLAFGKRQGREFIWNDLLSLETGSLKLANGRVIEKTLYNRRTRQDEPALFVALTFERREVLDSSNIKPMNLIGVDRGENIPAVIALTDPEGCPLSRFKDSLGNPTHILRIGESYKEKQRTIQAKKEVEQRRAGGYSRKYASKAKNLADDMVRNTARDLLYYAVTQDAMLIFENLSRGFGRQGKRTFMAERQYTRMEDWLTAKLAYEGLPSKTYLSKTLAQYTSKTCSNCGFTITSADYDRVLEKLKKTATGWMTTINGKELKVEGQITYYNRYKRQNVVKDLSVELDRLSEESVNNDISSWTKGRSGEALSLLKKRFSHRPVQEKFVCLNCGFETHADEQAALNIARSWLFLRSQEYKKYQTNKTTGNTDKRAFVETWQSFYRKKLKEVWKPAV

SEQ ID NO: 32217 - protein, 979 aa, synthetic construct
  REGION 1..979: note = engineered CasX variant
QEIKGRINKIRRRLVKDSNTKKAGKTGPMKTLLVRVMTPDLRERLENLRKKPPNIPQPISNTSRANLNKLLTDYTEMKKAILHVYWEEFQKDPVGLMSRVAQPASKKIDQNKLKPEMDEKGNLTTAGFACSQCGQPLFVYKLEQVSEKGKAYTNYFGRCNVAEHEKLILLAQLKPEKDSDEAVTYSLGKFGQRALDFYSIHVTKESTHPVKPLAQIAGNRYASSPVGKALSDACMGTIASFLSKYQDIIIEHQKVVKGNQKRLESLRELAGKENLEYPSVTLPPQPHTKEGVDAYNEVIARVRMWVNLNLWQKLKLSRDDAKPLLRLKGFPSFPLVERQANEVDWWDMVCNVKKLINEKKEDGKVFWQNLAGYKRQEALRPYLSSEEDRKKGKKFARYQLGDLLLHLEKKHGEDWGKVYDEAWERIDKKVEGLSKHIKLEEERRSEDAQSKAALTDWLRAKASFVIEGLKEADKDEFCRCELKLQKWYGDLRGKPFAIEAENSILDISGFSKQYNCAFIWQKDGVKKLNLYLIINYFKGGKLRFKKIKPEAFEANRFYTVINKKSGEIVPMEVNFNFDDPNLIILPLAFGKRQGREFIWNDLLSLETGSLKLANGRVIEKTLYNRRTRQDEPALFVALTFERREVLDSSNIKPMNLIGVDRGENIPAVIALTDPEGCPLSRFKDSLGNPTHILRIGESYKEKQRTIQAKKEVEQRRAGGYSRKYASKAKNLADDMVRNTARDLLYYAVTQDAMLIFENLSRGFGRQGKRTFMAERQYTRMEDWLTAKLAYEGLPSKTYLSKTLAQYTSKTCSNCGFTITSADYDRVLEKLKKTATGWMTTINGKELKVEGQITYYNRYKRQNVVKDLSVELDRLSEESVNNDISSWTKGRSGEALSLLKKRFSHRPVQEKFVCLNCGFETHADEQAALNIARSWLFLRSQEYKKYQTNKTTGNTDKRAFVETWQSFYRKKLKEVWKPAV

SEQ ID NO: 32218 - protein, 979 aa, synthetic construct
  REGION 1..979: note = engineered CasX variant
QEIKGRINKIRRRLVKDSNTKKAGKTGPMKTLLVRVMTPDLRERLENLRKKPPNIPQPISNTSRANLNKLLTDYTEMKKAILHVYWEEFQKDPVGLMSRVAQPASKKIDQNKLKPEMDEKGNLTTAGFACSQCGQPLFVYKLEQVSEKGKAYTNYFGRCNVAEHEKLILLAQLKPEKDSDEAVTYSLGKFGQRALDFYSIHVTKESTHPVKPLAQIAGNRYASTPVGKALSDACMGTIASFLSKYQDIIIEHQKVVKGNQKRLESLRELAGKENLEYPSVTLPPQPHTKEGVDAYNEVIARVRMWVNLNLWQKLKLSRDDAKPLLRLKGFPSFPLVERQANEVDWWDMVCNVKKLINEKKEDGKVFWQNLAGYKRQEALRPYLSSEEDRKKGKKFARYQLGDLLLHLEKKHGEDWGKVYDEAWERIDKKVEGLSKHIKLEEERRSEDAQSKAALTDWLRAKASFVIEGLKEADKDEFCRCELKLQKWYGDLRGKPFAIEAENSILDISGFSKQYNCAFIWQKDGVKKLNLYLIINYFKGGKLRFKKIKPEAFEANRFYTVINKKSGEIVPMEVNFNFDDPNLIILPLAFGKRQGREFIWNDLLSLETGSLKLANGRVIEKTLYNRRTRQDEPALFVALTFERREVLDSSNIKPMNLIGVDRGENIPAVIALTDPEGCPLSRFKDSLGNPTHILRIGESYKEKQRTIQAKKEVEQRRAGGYSRKYASKAKNLADDMVRNTARDLLYYAVTQDAMLIFENLSRGFGRQGKRTFMAERQYTRMEDWLTAKLAYEGLPSKTYLSKTLAQYTSKTCSNCGFTITSADYDRVLEKLKKTATGWMTTINGKELKVEGQITYYNRYKRQNVVKDLSVELDRLSEESVNNDISSWTKGRSGEALSLLKKRFSHRPVQEKFVCLNCGFETHADEQAALNIARSWLFLRSQEYKKYQTNKTTGNTDKRAFVETWQSFYRKKLKEVWKPAV

SEQ ID NO: 32219 - protein, 979 aa, synthetic construct
  REGION 1..979: note = engineered CasX variant
QEIKGRINKIRRRLVKDSNTKKAGKTGPMKTLLVRVMTPDLRERLENLRKKPPNIPQPISNTSRANLNKLLTDYTEMKKAILHVYWEEFQKDPVGLMSRVAQPASKKIDQNKLKPEMDEKGNLTTAGFACSQCGQPLFVYKLEQVSEKGKAYTNYFGRCNVAEHEKLILLAQLKPEKDSDEAVTYSLGKFGQRALDFYSIHVTKESTHPVKPLAQIAGNRYASAPVGKALSDACMGTIASFLSKYQDIIIEHQKVVKGNQKRLESLRELAGKENLEYPSVTLPPQPHTKEGVDAYNEVIARVRMWVNLNLWQKLKLSRDDAKPLLRLKGFPSFPLVERQANEVDWWDMVCNVKKLINEKKEDGKVFWQNLAGYKRQEALRPYLSSEEDRKKGKKFARYQLGDLLLHLEKKHGEDWGKVYDEAWERIDKKVEGLSKHIKLEEERRSEDAQSKAALTDWLRAKASFVIEGLKEADKDEFCRCELKLQKWYGDLRGKPFAIEAENSILDISGFSKQYNCAFIWQKDGVKKLNLYLIINYFKGGKLRFKKIKPEAFEANRFYTVINKKSGEIVPMEVNFNFDDPNLIILPLAFGKRQGREFIWNDLLSLETGSLKLANGRVIEKTLYNRRTRQDEPALFVALTFERREVLDSSNIKPMNLIGVDRGENIPAVIALTDPEGCPLSRFKDSLGNPTHILRIGESYKEKQRTIQAKKEVEQRRAGGYSRKYASKAKNLADDMVRNTARDLLYYAVTQDAMLIFENLSRGFGRQGKRTFMAERQYTRMEDWLTAKLAYEGLPSKTYLSKTLAQYTSKTCSNCGFTITSADYDRVLEKLKKTATGWMTTINGKELKVEGQITYYNRYKRQNVVKDLSVELDRLSEESVNNDISSWTKGRSGEALSLLKKRFSHRPVQEKFVCLNCGFETHADEQAALNIARSWLFLRSQEYKKYQTNKTTGNTDKRAFVETWQSFYRKKLKEVWKPAV

SEQ ID NO: 32220 - protein, 979 aa, synthetic construct
  REGION 1..979: note = engineered CasX variant
QEIKGRINKIRRRLVKDSNTKKAGKTGPMKTLLVRVMTPDLRERLENLRKKPPNIPQPISNTSRANLNKLLTDYTEMKKAILHVYWEEFQKDPVGLMSRVAQPASKKIDQNKLKPEMDEKGNLTTAGFACSQCGQPLFVYKLEQVSEKGKAYTNYFGRCNVAEHEKLILLAQLKPEKDSDEAVTYSLGKFGQRALDFYSIHVTKESTHPVKPLAQIAGNRYASVPVGKALSDACMGTIASFLSKYQDIIIEHQKVVKGNQKRLESLRELAGKENLEYPSVTLPPQPHTKEGVDAYNEVIARVRMWVNLNLWQKLKLSRDDAKPLLRLKGFPSFPLVERQANEVDWWDMVCNVKKLINEKKEDGKVFWQNLAGYKRQEALRPYLSSEEDRKKGKKFARYQLGDLLLHLEKKHGEDWGKVYDEAWERIDKKVEGLSKHIKLEEERRSEDAQSKAALTDWLRAKASFVIEGLKEADKDEFCRCELKLQKWYGDLRGKPFAIEAENSILDISGFSKQYNCAFIWQKDGVKKLNLYLIINYFKGGKLRFKKIKPEAFEANRFYTVINKKSGEIVPMEVNFNFDDPNLIILPLAFGKRQGREFIWNDLLSLETGSLKLANGRVIEKTLYNRRTRQDEPALFVALTFERREVLDSSNIKPMNLIGVDRGENIPAVIALTDPEGCPLSRFKDSLGNPTHILRIGESYKEKQRTIQAKKEVEQRRAGGYSRKYASKAKNLADDMVRNTARDLLYYAVTQDAMLIFENLSRGFGRQGKRTFMAERQYTRMEDWLTAKLAYEGLPSKTYLSKTLAQYTSKTCSNCGFTITSADYDRVLEKLKKTATGWMTTINGKELKVEGQITYYNRYKRQNVVKDLSVELDRLSEESVNNDISSWTKGRSGEALSLLKKRFSHRPVQEKFVCLNCGFETHADEQAALNIARSWLFLRSQEYKKYQTNKTTGNTDKRAFVETWQSFYRKKLKEVWKPAV

SEQ ID NO: 32221 - protein, 979 aa, synthetic construct
  REGION 1..979: note = engineered CasX variant
QEIKGRINKIRRRLVKDSNTKKAGKTGPMKTLLVRVMTPDLRERLENLRKKPPNIPQPISNTSRANLNKLLTDYTEMKKAILHVYWEEFQKDPVGLMSRVAQPASKKIDQNKLKPEMDEKGNLTTAGFACSQCGQPLFVYKLEQVSEKGKAYTNYFGRCNVAEHEKLIKLAQLKPEKDSDEAVTYSLGKFGQRALDFYSIHVTKESTHPVKPLAQIAGNRYASGPVGKALSDACMGTIASFLSKYQDIIIEHQKVVKGNQKRLESLRELAGKENLEYPSVTLPPQPHTKEGVDAYNEVIARVRMWVNLNLWQKLKLSRDDAKPLLRLKGFPSFPLVERQANEVDWWDMVCNVKKLINEKKEDGKVFWQNLAGYKRQEALRPYLSSEEDRKKGKKFARYQLGDLLLHLEKKHGEDWGKVYDEAWERIDKKVEGLSKHIKLEEERRSEDAQSKAALTDWLRAKASFVIEGLKEADKDEFCRCELKLQKWYGDLRGKPFAIEAENSILDISGFSKQYNCAFIWQKDGVKKLNLYLIINYFKGGKLRFKKIKPEAFEANRFYTVINKKSGEIVPMEVNFNFDDPNLIILPLAFGKRQGREFIWNDLLSLETGSLKLANGRVIEKTLYNRRTRQDEPALFVALTFERREVLDSSNIKPMNLIGVDRGENIPAVIALTDPEGCPLSRFKDSLGNPTHILRIGESYKEKQRTIQAKKEVEQRRAGGYSRKYASKAKNLADDMVRNTARDLLYYAVTQDAMLIFENLSRGFGRQGKRTFMAERQYTRMEDWLTAKLAYEGLPSKTYLSKTLAQYTSKTCSNCGFTITSADYDRVLEKLKKTATGWMTTINGKELKVEGQITYYNRYKRQNVVKDLSVELDRLSEESVNNDISSWTKGRSGEALSLLKKRFSHRPVQEKFVCLNCGFETHADEQAALNIARSWLFLRSQEYKKYQTNKTTGNTDKRAFVETWQSFYRKKLKEVWKPAV

SEQ ID NO: 32222 - protein, 978 aa, synthetic construct
  REGION 1..978: note = engineered CasX variant
QEIKGRINKIRRRLVKDSNTKKAGKTGPMKTLLVRVMTPDLRERLENLRKKPPNIPQPISNTSRANLNKLLTDYTEMKKAILHVYWEEFQKDPVGLMSRVAQPASKKIDQNKLKPEMDEKGNLTTAGFACSQCGQPLFVYKLEQVSEKGKAYTNYFGRCNVAEHEKLILLAQLKPEKDSDEAVTYSLGKFGQRALDFYSIHVTKESTHPVKPLAQIAGNRYASPVGKALSDACMGTIASFLSKYQDIIIEHQKVVKGNQKRLESLRELAGKENLEYPSVTLPPQPHTKEGVDAYNEVIARVRMWVNLNLWQKLKLSRDDAKPLLRLKGFPSFPLVERQANEVDWWDMVCNVKKLINEKKEDGKVFWQNLAGYKRQEALRPYLSSEEDRKKGKKFARYQLGDLLLHLEKKHGEDWGKVYDEAWERIDKKVEGLSKHIKLEEERRSEDAQSKAALTDWLRAKASFVIEGLKEADKDEFCRCELKLQKWYGDLRGKPFAIEAENSILDISGFSKQYNCAFIWQKDGVKKLNLYLIINYFKGGKLRFKKIKPEAFEANRFYTVINKKSGEIVPMEVNFNFDDPNLIILPLAFGKRQGREFIWNDLLSLETGSLKLANGRVIEKTLYNRRTRQDEPALFVALTFERREVLDSSNIKPMNLIGVDRGENIPAVIALTDPEGCPLSRFKDSLGNPTHILRIGESYKEKQRTIQAKKEVEQRRAGGYSRKYASKAKNLADDMVRNTARDLLYYAVTQDAMLIFENLSRGFGRQGKRTFMAERQYTRMEDWLTAKLAYEGLPSKTYLSKTLAQYTSKTCSNCGFTITSADYDRVLEKLKKTATGWMTTINGKELKVEGQITYYNRYKRQNVVKDLSVELDRLSEESVNNDISSWTKGRSGEALSLLKKRFSHRPVQEKFVCLNCGFETHADEQAALNIARSWLFLRSQEYKKYQTNKTTGNTDKRAFVETWQSFYRKKLKEVWKPAV

SEQ ID NO: 32223 - protein, 979 aa, synthetic construct
  REGION 1..979: note = engineered CasX variant
QEIKGRINKIRRRLVKDSNTKKAGKTGPMKTLLVRVMTPDLRERLENLRKKPENIPQPISNTSQANLNKLLTDYTEMKKAILHVYWEEFQKDPVGLMSRVAQPASKKIDQNKLKPEMDEKGNLTTAGFACSQCGQPLFVYKLEQVSEKGKAYTNYFGRCNVAEHEKLILLAQLKPEKDSDEAVTYSLGKFGQRALDFYSIHVTKESTHPVKPLAQIAGNRYASYPVGKALSDACMGTIASFLSKYQDIIIEHQKVVKGNQKRLESLRELAGKENLEYPSVTLPPQPHTKEGVDAYNEVIARVRMWVNLNLWQKLKLSRDDAKPLLRLKGFPSFPLVERQANEVDWWDMVCNVKKLINEKKEDGKVFWQNLAGYKRQEALRPYLSSEEDRKKGKKFARYQLGDLLLHLEKKHGEDWGKVYDEAWERIDKKVEGLSKHIKLEEERRSEDAQSKAALTDWLRAKASFVIEGLKEADKDEFCRCELKLQKWYGDLRGKPFAIEAENSILDISGFSKQYNCAFIWQKDGVKKLNLYLIINYFKGGKLRFKKIKPEAFEANRFYTVINKKSGEIVPMEVNFNFDDPNLIILPLAFGKRQGREFIWNDLLSLETGSLKLANGRVIEKTLYNRRTRQDEPALFVALTFERREVLDSSNIKPMNLIGVDRGENIPAVIALTDPEGCPLSRFKDSLGNPTHILRIGESYKEKQRTIQAKKEVEQRRAGGYSRKYASKAKNLADDMVRNTARDLLYYAVTQDAMLIFENLSRGFGRQGKRTFMAERQYTRMEDWLTAKLAYEGLPSKTYLSKTLAQYTSKTCSNCGFTITSADYDRVLEKLKKTATGWMTTINGKELKVEGQITYYNRYKRQNVVKDLSVELDRLSEESVNNDISSWTKGRSGEALSLLKKRFSHRPVQEKFVCLNCGFETHADEQAALNIARSWLFLRSQEYKKYQTNKTTGNTDKRAFVETWQSFYRKKLKEVWKPAV

SEQ ID NO: 32224 - protein, 979 aa, synthetic construct
  REGION 1..979: note = engineered CasX variant
QEIKGRINKIRRRLVKDSNTKKAGKTGPMKTLLVRVMTPDLRERLENLRKKPENIPQPISNTSQANLNKLLTDYTEMKKAILHVYWEEFQKDPVGLMSRVAQPASKKIDQNKLKPEMDEKGNLTTAGFACSQCGQPLFVYKLEQVSEKGKAYTNYFGRCNVAEHEKLILLAQLKPEKDSDEAVTYSLGKFGQRALDFYSIHVTKESTHPVKPLAQIAGNRYASHPVGKALSDACMGTIASFLSKYQDIIIEHQKVVKGNQKRLESLRELAGKENLEYPSVTLPPQPHTKEGVDAYNEVIARVRMWVNLNLWQKLKLSRDDAKPLLRLKGFPSFPLVERQANEVDWWDMVCNVKKLINEKKEDGKVFWQNLAGYKRQEALRPYLSSEEDRKKGKKFARYQLGDLLLHLEKKHGEDWGKVYDEAWERIDKKVEGLSKHIKLEEERRSEDAQSKAALTDWLRAKASFVIEGLKEADKDEFCRCELKLQKWYGDLRGKPFAIEAENSILDISGFSKQYNCAFIWQKDGVKKLNLYLIINYFKGGKLRFKKIKPEAFEANRFYTVINKKSGEIVPMEVNFNFDDPNLIILPLAFGKRQGREFIWNDLLSLETGSLKLANGRVIEKTLYNRRTRQDEPALFVALTFERREVLDSSNIKPMNLIGVDRGENIPAVIALTDPEGCPLSRFKDSLGNPTHILRIGESYKEKQRTIQAKKEVEQRRAGGYSRKYASKAKNLADDMVRNTARDLLYYAVTQDAMLIFENLSRGFGRQGKRTFMAERQYTRMEDWLTAKLAYEGLPSKTYLSKTLAQYTSKTCSNCGFTITSADYDRVLEKLKKTATGWMTTINGKELKVEGQITYYNRYKRQNVVKDLSVELDRLSEESVNNDISSWTKGRSGEALSLLKKRFSHRPVQEKFVCLNCGFETHADEQAALNIARSWLFLRSQEYKKYQTNKTTGNTDKRAFVETWQSFYRKKLKEVWKPAV

SEQ ID NO: 32225 - protein, 979 aa, synthetic construct
  REGION 1..979: note = engineered CasX variant
QEIKGRINKIRRRLVKDSNTKKAGKTGPMKTLLVRVMTPDLRERLENLRKKPENIPQPISNTSQANLNKLLTDYTEMKKAILHVYWEEFQKDPVGLMSRVAQPASKKIDQNKLKPEMDEKGNLTTAGFACSQCGQPLFVYKLEQVSEKGKAYTNYFGRCNVAEHEKLILLAQLKPEKDSDEAVTYSLGKFGQRALDFYSIHVTKESTHPVKPLAQIAGNRYASSPVGKALSDACMGTIASFLSKYQDIIIEHQKVVKGNQKRLESLRELAGKENLEYPSVTLPPQPHTKEGVDAYNEVIARVRMWVNLNLWQKLKLSRDDAKPLLRLKGFPSFPLVERQANEVDWWDMVCNVKKLINEKKEDGKVFWQNLAGYKRQEALRPYLSSEEDRKKGKKFARYQLGDLLLHLEKKHGEDWGKVYDEAWERIDKKVEGLSKHIKLEEERRSEDAQSKAALTDWLRAKASFVIEGLKEADKDEFCRCELKLQKWYGDLRGKPFAIEAENSILDISGFSKQYNCAFIWQKDGVKKLNLYLIINYFKGGKLRFKKIKPEAFEANRFYTVINKKSGEIVPMEVNFNFDDPNLIILPLAFGKRQGREFIWNDLLSLETGSLKLANGRVIEKTLYNRRTRQDEPALFVALTFERREVLDSSNIKPMNLIGVDRGENIPAVIALTDPEGCPLSRFKDSLGNPTHILRIGESYKEKQRTIQAKKEVEQRRAGGYSRKYASKAKNLADDMVRNTARDLLYYAVTQDAMLIFENLSRGFGRQGKRTFMAERQYTRMEDWLTAKLAYEGLPSKTYLSKTLAQYTSKTCSNCGFTITSADYDRVLEKLKKTATGWMTTINGKELKVEGQITYYNRYKRQNVVKDLSVELDRLSEESVNNDISSWTKGRSGEALSLLKKRFSHRPVQEKFVCLNCGFETHADEQAALNIARSWLFLRSQEYKKYQTNKTTGNTDKRAFVETWQSFYRKKLKEVWKPAV

SEQ ID NO: 32226 - protein, 979 aa, synthetic construct
  REGION 1..979: note = engineered CasX variant
QEIKGRINKIRRRLVKDSNTKKAGKTGPMKTLLVRVMTPDLRERLENLRKKPENIPQPISNTSQANLNKLLTDYTEMKKAILHVYWEEFQKDPVGLMSRVAQPASKKIDQNKLKPEMDEKGNLTTAGFACSQCGQPLFVYKLEQVSEKGKAYTNYFGRCNVAEHEKLILLAQLKPEKDSDEAVTYSLGKFGQRALDFYSIHVTKESTHPVKPLAQIAGNRYASTPVGKALSDACMGTIASFLSKYQDIIIEHQKVVKGNQKRLESLRELAGKENLEYPSVTLPPQPHTKEGVDAYNEVIARVRMWVNLNLWQKLKLSRDDAKPLLRLKGFPSFPLVERQANEVDWWDMVCNVKKLINEKKEDGKVFWQNLAGYKRQEALRPYLSSEEDRKKGKKFARYQLGDLLLHLEKKHGEDWGKVYDEAWERIDKKVEGLSKHIKLEEERRSEDAQSKAALTDWLRAKASFVIEGLKEADKDEFCRCELKLQKWYGDLRGKPFAIEAENSILDISGFSKQYNCAFIWQKDGVKKLNLYLIINYFKGGKLRFKKIKPEAFEANRFYTVINKKSGEIVPMEVNFNFDDPNLIILPLAFGKRQGREFIWNDLLSLETGSLKLANGRVIEKTLYNRRTRQDEPALFVALTFERREVLDSSNIKPMNLIGVDRGENIPAVIALTDPEGCPLSRFKDSLGNPTHILRIGESYKEKQRTIQAKKEVEQRRAGGYSRKYASKAKNLADDMVRNTARDLLYYAVTQDAMLIFENLSRGFGRQGKRTFMAERQYTRMEDWLTAKLAYEGLPSKTYLSKTLAQYTSKTCSNCGFTITSADYDRVLEKLKKTATGWMTTINGKELKVEGQITYYNRYKRQNVVKDLSVELDRLSEESVNNDISSWTKGRSGEALSLLKKRFSHRPVQEKFVCLNCGFETHADEQAALNIARSWLFLRSQEYKKYQTNKTTGNTDKRAFVETWQSFYRKKLKEVWKPAV

SEQ ID NO: 32227 - protein, 979 aa, synthetic construct
  REGION 1..979: note = engineered CasX variant
QEIKGRINKIRRRLVKDSNTKKAGKTGPMKTLLVRVMTPDLRERLENLRKKPENIPQPISNTSQANLNKLLTDYTEMKKAILHVYWEEFQKDPVGLMSRVAQPASKKIDQNKLKPEMDEKGNLTTAGFACSQCGQPLFVYKLEQVSEKGKAYTNYFGRCNVAEHEKLILLAQLKPEKDSDEAVTYSLGKFGQRALDFYSIHVTKESTHPVKPLAQIAGNRYASAPVGKALSDACMGTIASFLSKYQDIIIEHQKVVKGNQKRLESLRELAGKENLEYPSVTLPPQPHTKEGVDAYNEVIARVRMWVNLNLWQKLKLSRDDAKPLLRLKGFPSFPLVERQANEVDWWDMVCNVKKLINEKKEDGKVFWQNLAGYKRQEALRPYLSSEEDRKKGKKFARYQLGDLLLHLEKKHGEDWGKVYDEAWERIDKKVEGLSKHIKLEEERRSEDAQSKAALTDWLRAKASFVIEGLKEADKDEFCRCELKLQKWYGDLRGKPFAIEAENSILDISGFSKQYNCAFIWQKDGVKKLNLYLIINYFKGGKLRFKKIKPEAFEANRFYTVINKKSGEIVPMEVNFNFDDPNLIILPLAFGKRQGREFIWNDLLSLETGSLKLANGRVIEKTLYNRRTRQDEPALFVALTFERREVLDSSNIKPMNLIGVDRGENIPAVIALTDPEGCPLSRFKDSLGNPTHILRIGESYKEKQRTIQAKKEVEQRRAGGYSRKYASKAKNLADDMVRNTARDLLYYAVTQDAMLIFENLSRGFGRQGKRTFMAERQYTRMEDWLTAKLAYEGLPSKTYLSKTLAQYTSKTCSNCGFTITSADYDRVLEKLKKTATGWMTTINGKELKVEGQITYYNRYKRQNVVKDLSVELDRLSEESVNNDISSWTKGRSGEALSLLKKRFSHRPVQEKFVCLNCGFETHADEQAALNIARSWLFLRSQEYKKYQTNKTTGNTDKRAFVETWQSFYRKKLKEVWKPAV

SEQ ID NO: 32228 - protein, 979 aa, synthetic construct
  REGION 1..979: note = engineered CasX variant
QEIKGRINKIRRRLVKDSNTKKAGKTGPMKTLLVRVMTPDLRERLENLRKKPENIPQPISNTSQANLNKLLTDYTEMKKAILHVYWEEFQKDPVGLMSRVAQPASKKIDQNKLKPEMDEKGNLTTAGFACSQCGQPLFVYKLEQVSEKGKAYTNYFGRCNVAEHEKLILLAQLKPEKDSDEAVTYSLGKFGQRALDFYSIHVTKESTHPVKPLAQIAGNRYASVPVGKALSDACMGTIASFLSKYQDIIIEHQKVVKGNQKRLESLRELAGKENLEYPSVTLPPQPHTKEGVDAYNEVIARVRMWVNLNLWQKLKLSRDDAKPLLRLKGFPSFPLVERQANEVDWWDMVCNVKKLINEKKEDGKVFWQNLAGYKRQEALRPYLSSEEDRKKGKKFARYQLGDLLLHLEKKHGEDWGKVYDEAWERIDKKVEGLSKHIKLEEERRSEDAQSKAALTDWLRAKASFVIEGLKEADKDEFCRCELKLQKWYGDLRGKPFAIEAENSILDISGFSKQYNCAFIWQKDGVKKLNLYLIINYFKGGKLRFKKIKPEAFEANRFYTVINKKSGEIVPMEVNFNFDDPNLIILPLAFGKRQGREFIWNDLLSLETGSLKLANGRVIEKTLYNRRTRQDEPALFVALTFERREVLDSSNIKPMNLIGVDRGENIPAVIALTDPEGCPLSRFKDSLGNPTHILRIGESYKEKQRTIQAKKEVEQRRAGGYSRKYASKAKNLADDMVRNTARDLLYYAVTQDAMLIFENLSRGFGRQGKRTFMAERQYTRMEDWLTAKLAYEGLPSKTYLSKTLAQYTSKTCSNCGFTITSADYDRVLEKLKKTATGWMTTINGKELKVEGQITYYNRYKRQNVVKDLSVELDRLSEESVNNDISSWTKGRSGEALSLLKKRFSHRPVQEKFVCLNCGFETHADEQAALNIARSWLFLRSQEYKKYQTNKTTGNTDKRAFVETWQSFYRKKLKEVWKPAV

SEQ ID NO: 32229 - protein, 979 aa, synthetic construct
  REGION 1..979: note = engineered CasX variant
QEIKGRINKIRRRLVKDSNTKKAGKTGPMKTLLVRVMTPDLRERLENLRKKPENIPQPISNTSQANLNKLLTDYTEMKKAILHVYWEEFQKDPVGLMSRVAQPASKKIDQNKLKPEMDEKGNLTTAGFACSQCGQPLFVYKLEQVSEKGKAYTNYFGRCNVAEHEKLIKLAQLKPEKDSDEAVTYSLGKFGQRALDFYSIHVTKESTHPVKPLAQIAGNRYASGPVGKALSDACMGTIASFLSKYQDIIIEHQKVVKGNQKRLESLRELAGKENLEYPSVTLPPQPHTKEGVDAYNEVIARVRMWVNLNLWQKLKLSRDDAKPLLRLKGFPSFPLVERQANEVDWWDMVCNVKKLINEKKEDGKVFWQNLAGYKRQEALRPYLSSEEDRKKGKKFARYQLGDLLLHLEKKHGEDWGKVYDEAWERIDKKVEGLSKHIKLEEERRSEDAQSKAALTDWLRAKASFVIEGLKEADKDEFCRCELKLQKWYGDLRGKPFAIEAENSILDISGFSKQYNCAFIWQKDGVKKLNLYLIINYFKGGKLRFKKIKPEAFEANRFYTVINKKSGEIVPMEVNFNFDDPNLIILPLAFGKRQGREFIWNDLLSLETGSLKLANGRVIEKTLYNRRTRQDEPALFVALTFERREVLDSSNIKPMNLIGVDRGENIPAVIALTDPEGCPLSRFKDSLGNPTHILRIGESYKEKQRTIQAKKEVEQRRAGGYSRKYASKAKNLADDMVRNTARDLLYYAVTQDAMLIFENLSRGFGRQGKRTFMAERQYTRMEDWLTAKLAYEGLPSKTYLSKTLAQYTSKTCSNCGFTITSADYDRVLEKLKKTATGWMTTINGKELKVEGQITYYNRYKRQNVVKDLSVELDRLSEESVNNDISSWTKGRSGEALSLLKKRFSHRPVQEKFVCLNCGFETHADEQAALNIARSWLFLRSQEYKKYQTNKTTGNTDKRAFVETWQSFYRKKLKEVWKPAV

SEQ ID NO: 32230 - protein, 978 aa, synthetic construct
  REGION 1..978: note = engineered CasX variant
QEIKGRINKIRRRLVKDSNTKKAGKTGPMKTLLVRVMTPDLRERLENLRKKPENIPQPISNTSQANLNKLLTDYTEMKKAILHVYWEEFQKDPVGLMSRVAQPASKKIDQNKLKPEMDEKGNLTTAGFACSQCGQPLFVYKLEQVSEKGKAYTNYFGRCNVAEHEKLILLAQLKPEKDSDEAVTYSLGKFGQRALDFYSIHVTKESTHPVKPLAQIAGNRYASPVGKALSDACMGTIASFLSKYQDIIIEHQKVVKGNQKRLESLRELAGKENLEYPSVTLPPQPHTKEGVDAYNEVIARVRMWVNLNLWQKLKLSRDDAKPLLRLKGFPSFPLVERQANEVDWWDMVCNVKKLINEKKEDGKVFWQNLAGYKRQEALRPYLSSEEDRKKGKKFARYQLGDLLLHLEKKHGEDWGKVYDEAWERIDKKVEGLSKHIKLEEERRSEDAQSKAALTDWLRAKASFVIEGLKEADKDEFCRCELKLQKWYGDLRGKPFAIEAENSILDISGFSKQYNCAFIWQKDGVKKLNLYLIINYFKGGKLRFKKIKPEAFEANRFYTVINKKSGEIVPMEVNFNFDDPNLIILPLAFGKRQGREFIWNDLLSLETGSLKLANGRVIEKTLYNRRTRQDEPALFVALTFERREVLDSSNIKPMNLIGVDRGENIPAVIALTDPEGCPLSRFKDSLGNPTHILRIGESYKEKQRTIQAKKEVEQRRAGGYSRKYASKAKNLADDMVRNTARDLLYYAVTQDAMLIFENLSRGFGRQGKRTFMAERQYTRMEDWLTAKLAYEGLPSKTYLSKTLAQYTSKTCSNCGFTITSADYDRVLEKLKKTATGWMTTINGKELKVEGQITYYNRYKRQNVVKDLSVELDRLSEESVNNDISSWTKGRSGEALSLLKKRFSHRPVQEKFVCLNCGFETHADEQAALNIARSWLFLRSQEYKKYQTNKTTGNTDKRAFVETWQSFYRKKLKEVWKPAV

SEQ ID NO: 32231 - protein, 979 aa, synthetic construct
  REGION 1..979: note = engineered CasX variant
QEIKGRINKIRRRLVKDSNTKKAGKTGPMKTLLVRVMTPDLRERLENLRKKPENIPQPISNTSRANLNKLLTDYTEMKKAILHVYDEEFQKDPVGLMSRVAQPASKKIDQNKLKPEMDEKGNLTTAGFACSQCGQPLFVYKLEQVSEKGKAYTNYFGRCNVAEHEKLILLAQLKPEKDSDEAVTYSLGKFGQRALDFYSIHVTKESTHPVKPLAQIAGNRYASYPVGKALSDACMGTIASFLSKYQDIIIEHQKVVKGNQKRLESLRELAGKENLEYPSVTLPPQPHTKEGVDAYNEVIARVRMWVNLNLWQKLKLSRDDAKPLLRLKGFPSFPLVERQANEVDWWDMVCNVKKLINEKKEDGKVFWQNLAGYKRQEALRPYLSSEEDRKKGKKFARYQLGDLLLHLEKKHGEDWGKVYDEAWERIDKKVEGLSKHIKLEEERRSEDAQSKAALTDWLRAKASFVIEGLKEADKDEFCRCELKLQKWYGDLRGKPFAIEAENSILDISGFSKQYNCAFIWQKDGVKKLNLYLIINYFKGGKLRFKKIKPEAFEANRFYTVINKKSGEIVPMEVNFNFDDPNLIILPLAFGKRQGREFIWNDLLSLETGSLKLANGRVIEKTLYNRRTRQDEPALFVALTFERREVLDSSNIKPMNLIGVDRGENIPAVIALTDPEGCPLSRFKDSLGNPTHILRIGESYKEKQRTIQAKKEVEQRRAGGYSRKYASKAKNLADDMVRNTARDLLYYAVTQDAMLIFENLSRGFGRQGKRTFMAERQYTRMEDWLTAKLAYEGLPSKTYLSKTLAQYTSKTCSNCGFTITSADYDRVLEKLKKTATGWMTTINGKELKVEGQITYYNRYKRQNVVKDLSVELDRLSEESVNNDISSWTKGRSGEALSLLKKRFSHRPVQEKFVCLNCGFETHADEQAALNIARSWLFLRSQEYKKYQTNKTTGNTDKRAFVETWQSFYRKKLKEVWKPAV

SEQ ID NO: 32232 - protein, 979 aa, synthetic construct
  REGION 1..979: note = engineered CasX variant
QEIKGRINKIRRRLVKDSNTKKAGKTGPMKTLLVRVMTPDLRERLENLRKKPENIPQPISNTSRANLNKLLTDYTEMKKAILHVYDEEFQKDPVGLMSRVAQPASKKIDQNKLKPEMDEKGNLTTAGFACSQCGQPLFVYKLEQVSEKGKAYTNYFGRCNVAEHEKLILLAQLKPEKDSDEAVTYSLGKFGQRALDFYSIHVTKESTHPVKPLAQIAGNRYASHPVGKALSDACMGTIASFLSKYQDIIIEHQKVVKGNQKRLESLRELAGKENLEYPSVTLPPQPHTKEGVDAYNEVIARVRMWVNLNLWQKLKLSRDDAKPLLRLKGFPSFPLVERQANEVDWWDMVCNVKKLINEKKEDGKVFWQNLAGYKRQEALRPYLSSEEDRKKGKKFARYQLGDLLLHLEKKHGEDWGKVYDEAWERIDKKVEGLSKHIKLEEERRSEDAQSKAALTDWLRAKASFVIEGLKEADKDEFCRCELKLQKWYGDLRGKPFAIEAENSILDISGFSKQYNCAFIWQKDGVKKLNLYLIINYFKGGKLRFKKIKPEAFEANRFYTVINKKSGEIVPMEVNFNFDDPNLIILPLAFGKRQGREFIWNDLLSLETGSLKLANGRVIEKTLYNRRTRQDEPALFVALTFERREVLDSSNIKPMNLIGVDRGENIPAVIALTDPEGCPLSRFKDSLGNPTHILRIGESYKEKQRTIQAKKEVEQRRAGGYSRKYASKAKNLADDMVRNTARDLLYYAVTQDAMLIFENLSRGFGRQGKRTFMAERQYTRMEDWLTAKLAYEGLPSKTYLSKTLAQYTSKTCSNCGFTITSADYDRVLEKLKKTATGWMTTINGKELKVEGQITYYNRYKRQNVVKDLSVELDRLSEESVNNDISSWTKGRSGEALSLLKKRFSHRPVQEKFVCLNCGFETHADEQAALNIARSWLFLRSQEYKKYQTNKTTGNTDKRAFVETWQSFYRKKLKEVWKPAV

SEQ ID NO: 32233 - protein, 979 aa, synthetic construct
  REGION 1..979: note = engineered CasX variant
QEIKGRINKIRRRLVKDSNTKKAGKTGPMKTLLVRVMTPDLRERLENLRKKPENIPQPISNTSRANLNKLLTDYTEMKKAILHVYDEEFQKDPVGLMSRVAQPASKKIDQNKLKPEMDEKGNLTTAGFACSQCGQPLFVYKLEQVSEKGKAYTNYFGRCNVAEHEKLILLAQLKPEKDSDEAVTYSLGKFGQRALDFYSIHVTKESTHPVKPLAQIAGNRYASSPVGKALSDACMGTIASFLSKYQDIIIEHQKVVKGNQKRLESLRELAGKENLEYPSVTLPPQPHTKEGVDAYNEVIARVRMWVNLNLWQKLKLSRDDAKPLLRLKGFPSFPLVERQANEVDWWDMVCNVKKLINEKKEDGKVFWQNLAGYKRQEALRPYLSSEEDRKKGKKFARYQLGDLLLHLEKKHGEDWGKVYDEAWERIDKKVEGLSKHIKLEEERRSEDAQSKAALTDWLRAKASFVIEGLKEADKDEFCRCELKLQKWYGDLRGKPFAIEAENSILDISGFSKQYNCAFIWQKDGVKKLNLYLIINYFKGGKLRFKKIKPEAFEANRFYTVINKKSGEIVPMEVNFNFDDPNLIILPLAFGKRQGREFIWNDLLSLETGSLKLANGRVIEKTLYNRRTRQDEPALFVALTFERREVLDSSNIKPMNLIGVDRGENIPAVIALTDPEGCPLSRFKDSLGNPTHILRIGESYKEKQRTIQAKKEVEQRRAGGYSRKYASKAKNLADDMVRNTARDLLYYAVTQDAMLIFENLSRGFGRQGKRTFMAERQYTRMEDWLTAKLAYEGLPSKTYLSKTLAQYTSKTCSNCGFTITSADYDRVLEKLKKTATGWMTTINGKELKVEGQITYYNRYKRQNVVKDLSVELDRLSEESVNNDISSWTKGRSGEALSLLKKRFSHRPVQEKFVCLNCGFETHADEQAALNIARSWLFLRSQEYKKYQTNKTTGNTDKRAFVETWQSFYRKKLKEVWKPAV

SEQ ID NO: 32234 - protein, 979 aa, synthetic construct
  REGION 1..979: note = engineered CasX variant
QEIKGRINKIRRRLVKDSNTKKAGKTGPMKTLLVRVMTPDLRERLENLRKKPENIPQPISNTSRANLNKLLTDYTEMKKAILHVYDEEFQKDPVGLMSRVAQPASKKIDQNKLKPEMDEKGNLTTAGFACSQCGQPLFVYKLEQVSEKGKAYTNYFGRCNVAEHEKLILLAQLKPEKDSDEAVTYSLGKFGQRALDFYSIHVTKESTHPVKPLAQIAGNRYASTPVGKALSDACMGTIASFLSKYQDIIIEHQKVVKGNQKRLESLRELAGKENLEYPSVTLPPQPHTKEGVDAYNEVIARVRMWVNLNLWQKLKLSRDDAKPLLRLKGFPSFPLVERQANEVDWWDMVCNVKKLINEKKEDGKVFWQNLAGYKRQEALRPYLSSEEDRKKGKKFARYQLGDLLLHLEKKHGEDWGKVYDEAWERIDKKVEGLSKHIKLEEERRSEDAQSKAALTDWLRAKASFVIEGLKEADKDEFCRCELKLQKWYGDLRGKPFAIEAENSILDISGFSKQYNCAFIWQKDGVKKLNLYLIINYFKGGKLRFKKIKPEAFEANRFYTVINKKSGEIVPMEVNFNFDDPNLIILPLAFGKRQGREFIWNDLLSLETGSLKLANGRVIEKTLYNRRTRQDEPALFVALTFERREVLDSSNIKPMNLIGVDRGENIPAVIALTDPEGCPLSRFKDSLGNPTHILRIGESYKEKQRTIQAKKEVEQRRAGGYSRKYASKAKNLADDMVRNTARDLLYYAVTQDAMLIFENLSRGFGRQGKRTFMAERQYTRMEDWLTAKLAYEGLPSKTYLSKTLAQYTSKTCSNCGFTITSADYDRVLEKLKKTATGWMTTINGKELKVEGQITYYNRYKRQNVVKDLSVELDRLSEESVNNDISSWTKGRSGEALSLLKKRFSHRPVQEKFVCLNCGFETHADEQAALNIARSWLFLRSQEYKKYQTNKTTGNTDKRAFVETWQSFYRKKLKEVWKPAV

SEQ ID NO: 32235 - protein, 979 aa, synthetic construct
  REGION 1..979: note = engineered CasX variant
QEIKGRINKIRRRLVKDSNTKKAGKTGPMKTLLVRVMTPDLRERLENLRKKPENIPQPISNTSRANLNKLLTDYTEMKKAILHVYDEEFQKDPVGLMSRVAQPASKKIDQNKLKPEMDEKGNLTTAGFACSQCGQPLFVYKLEQVSEKGKAYTNYFGRCNVAEHEKLILLAQLKPEKDSDEAVTYSLGKFGQRALDFYSIHVTKESTHPVKPLAQIAGNRYASAPVGKALSDACMGTIASFLSKYQDIIIEHQKVVKGNQKRLESLRELAGKENLEYPSVTLPPQPHTKEGVDAYNEVIARVRMWVNLNLWQKLKLSRDDAKPLLRLKGFPSFPLVERQANEVDWWDMVCNVKKLINEKKEDGKVFWQNLAGYKRQEALRPYLSSEEDRKKGKKFARYQLGDLLLHLEKKHGEDWGKVYDEAWERIDKKVEGLSKHIKLEEERRSEDAQSKAALTDWLRAKASFVIEGLKEADKDEFCRCELKLQKWYGDLRGKPFAIEAENSILDISGFSKQYNCAFIWQKDGVKKLNLYLIINYFKGGKLRFKKIKPEAFEANRFYTVINKKSGEIVPMEVNFNFDDPNLIILPLAFGKRQGREFIWNDLLSLETGSLKLANGRVIEKTLYNRRTRQDEPALFVALTFERREVLDSSNIKPMNLIGVDRGENIPAVIALTDPEGCPLSRFKDSLGNPTHILRIGESYKEKQRTIQAKKEVEQRRAGGYSRKYASKAKNLADDMVRNTARDLLYYAVTQDAMLIFENLSRGFGRQGKRTFMAERQYTRMEDWLTAKLAYEGLPSKTYLSKTLAQYTSKTCSNCGFTITSADYDRVLEKLKKTATGWMTTINGKELKVEGQITYYNRYKRQNVVKDLSVELDRLSEESVNNDISSWTKGRSGEALSLLKKRFSHRPVQEKFVCLNCGFETHADEQAALNIARSWLFLRSQEYKKYQTNKTTGNTDKRAFVETWQSFYRKKLKEVWKPAV

SEQ ID NO: 32236 - protein, 979 aa, synthetic construct
  REGION 1..979: note = engineered CasX variant
QEIKGRINKIRRRLVKDSNTKKAGKTGPMKTLLVRVMTPDLRERLENLRKKPENIPQPISNTSRANLNKLLTDYTEMKKAILHVYDEEFQKDPVGLMSRVAQPASKKIDQNKLKPEMDEKGNLTTAGFACSQCGQPLFVYKLEQVSEKGKAYTNYFGRCNVAEHEKLILLAQLKPEKDSDEAVTYSLGKFGQRALDFYSIHVTKESTHPVKPLAQIAGNRYASVPVGKALSDACMGTIASFLSKYQDIIIEHQKVVKGNQKRLESLRELAGKENLEYPSVTLPPQPHTKEGVDAYNEVIARVRMWVNLNLWQKLKLSRDDAKPLLRLKGFPSFPLVERQANEVDWWDMVCNVKKLINEKKEDGKVFWQNLAGYKRQEALRPYLSSEEDRKKGKKFARYQLGDLLLHLEKKHGEDWGKVYDEAWERIDKKVEGLSKHIKLEEERRSEDAQSKAALTDWLRAKASFVIEGLKEADKDEFCRCELKLQKWYGDLRGKPFAIEAENSILDISGFSKQYNCAFIWQKDGVKKLNLYLIINYFKGGKLRFKKIKPEAFEANRFYTVINKKSGEIVPMEVNFNFDDPNLIILPLAFGKRQGREFIWNDLLSLETGSLKLANGRVIEKTLYNRRTRQDEPALFVALTFERREVLDSSNIKPMNLIGVDRGENIPAVIALTDPEGCPLSRFKDSLGNPTHILRIGESYKEKQRTIQAKKEVEQRRAGGYSRKYASKAKNLADDMVRNTARDLLYYAVTQDAMLIFENLSRGFGRQGKRTFMAERQYTRMEDWLTAKLAYEGLPSKTYLSKTLAQYTSKTCSNCGFTITSADYDRVLEKLKKTATGWMTTINGKELKVEGQITYYNRYKRQNVVKDLSVELDRLSEESVNNDISSWTKGRSGEALSLLKKRFSHRPVQEKFVCLNCGFETHADEQAALNIARSWLFLRSQEYKKYQTNKTTGNTDKRAFVETWQSFYRKKLKEVWKPAV

SEQ ID NO: 32237 - protein, 979 aa, synthetic construct
  REGION 1..979: note = engineered CasX variant
QEIKGRINKIRRRLVKDSNTKKAGKTGPMKTLLVRVMTPDLRERLENLRKKPENIPQPISNTSRANLNKLLTDYTEMKKAILHVYDEEFQKDPVGLMSRVAQPASKKIDQNKLKPEMDEKGNLTTAGFACSQCGQPLFVYKLEQVSEKGKAYTNYFGRCNVAEHEKLIKLAQLKPEKDSDEAVTYSLGKFGQRALDFYSIHVTKESTHPVKPLAQIAGNRYASGPVGKALSDACMGTIASFLSKYQDIIIEHQKVVKGNQKRLESLRELAGKENLEYPSVTLPPQPHTKEGVDAYNEVIARVRMWVNLNLWQKLKLSRDDAKPLLRLKGFPSFPLVERQANEVDWWDMVCNVKKLINEKKEDGKVFWQNLAGYKRQEALRPYLSSEEDRKKGKKFARYQLGDLLLHLEKKHGEDWGKVYDEAWERIDKKVEGLSKHIKLEEERRSEDAQSKAALTDWLRAKASFVIEGLKEADKDEFCRCELKLQKWYGDLRGKPFAIEAENSILDISGFSKQYNCAFIWQKDGVKKLNLYLIINYFKGGKLRFKKIKPEAFEANRFYTVINKKSGEIVPMEVNFNFDDPNLIILPLAFGKRQGREFIWNDLLSLETGSLKLANGRVIEKTLYNRRTRQDEPALFVALTFERREVLDSSNIKPMNLIGVDRGENIPAVIALTDPEGCPLSRFKDSLGNPTHILRIGESYKEKQRTIQAKKEVEQRRAGGYSRKYASKAKNLADDMVRNTARDLLYYAVTQDAMLIFENLSRGFGRQGKRTFMAERQYTRMEDWLTAKLAYEGLPSKTYLSKTLAQYTSKTCSNCGFTITSADYDRVLEKLKKTATGWMTTINGKELKVEGQITYYNRYKRQNVVKDLSVELDRLSEESVNNDISSWTKGRSGEALSLLKKRFSHRPVQEKFVCLNCGFETHADEQAALNIARSWLFLRSQEYKKYQTNKTTGNTDKRAFVETWQSFYRKKLKEVWKPAV

SEQ ID NO: 32238 - protein, 978 aa, synthetic construct
  REGION 1..978: note = engineered CasX variant
QEIKGRINKIRRRLVKDSNTKKAGKTGPMKTLLVRVMTPDLRERLENLRKKPENIPQPISNTSRANLNKLLTDYTEMKKAILHVYDEEFQKDPVGLMSRVAQPASKKIDQNKLKPEMDEKGNLTTAGFACSQCGQPLFVYKLEQVSEKGKAYTNYFGRCNVAEHEKLILLAQLKPEKDSDEAVTYSLGKFGQRALDFYSIHVTKESTHPVKPLAQIAGNRYASPVGKALSDACMGTIASFLSKYQDIIIEHQKVVKGNQKRLESLRELAGKENLEYPSVTLPPQPHTKEGVDAYNEVIARVRMWVNLNLWQKLKLSRDDAKPLLRLKGFPSFPLVERQANEVDWWDMVCNVKKLINEKKEDGKVFWQNLAGYKRQEALRPYLSSEEDRKKGKKFARYQLGDLLLHLEKKHGEDWGKVYDEAWERIDKKVEGLSKHIKLEEERRSEDAQSKAALTDWLRAKASFVIEGLKEADKDEFCRCELKLQKWYGDLRGKPFAIEAENSILDISGFSKQYNCAFIWQKDGVKKLNLYLIINYFKGGKLRFKKIKPEAFEANRFYTVINKKSGEIVPMEVNFNFDDPNLIILPLAFGKRQGREFIWNDLLSLETGSLKLANGRVIEKTLYNRRTRQDEPALFVALTFERREVLDSSNIKPMNLIGVDRGENIPAVIALTDPEGCPLSRFKDSLGNPTHILRIGESYKEKQRTIQAKKEVEQRRAGGYSRKYASKAKNLADDMVRNTARDLLYYAVTQDAMLIFENLSRGFGRQGKRTFMAERQYTRMEDWLTAKLAYEGLPSKTYLSKTLAQYTSKTCSNCGFTITSADYDRVLEKLKKTATGWMTTINGKELKVEGQITYYNRYKRQNVVKDLSVELDRLSEESVNNDISSWTKGRSGEALSLLKKRFSHRPVQEKFVCLNCGFETHADEQAALNIARSWLFLRSQEYKKYQTNKTTGNTDKRAFVETWQSFYRKKLKEVWKPAV

SEQ ID NO: 32239 - protein, 979 aa, synthetic construct
  REGION 1..979: note = engineered CasX variant
QEIKGRINKIRRRLVKDSNTKKAGKTGPMKTLLVRVMTPDLRERLENLRKKPENIPQPISNTSRANLNKLLTDYTEMKKAILHVYWEEFQKDPVGLMSRVAQPASKKIDQNKLKPEMDEKGNLTTAGFACSQCGQPLFVYKLEQVSEKGKAYTNYFGRCNVAEHEKLIKLAQLKPEKDSDEAVTYSLGKFGQRALDFYSIHVTKESTHPVKPLAQIAGNRYASYPVGKALSDACMGTIASFLSKYQDIIIEHQKVVKGNQKRLESLRELAGKENLEYPSVTLPPQPHTKEGVDAYNEVIARVRMWVNLNLWQKLKLSRDDAKPLLRLKGFPSFPLVERQANEVDWWDMVCNVKKLINEKKEDGKVFWQNLAGYKRQEALRPYLSSEEDRKKGKKFARYQLGDLLLHLEKKHGEDWGKVYDEAWERIDKKVEGLSKHIKLEEERRSEDAQSKAALTDWLRAKASFVIEGLKEADKDEFCRCELKLQKWYGDLRGKPFAIEAENSILDISGFSKQYNCAFIWQKDGVKKLNLYLIINYFKGGKLRFKKIKPEAFEANRFYTVINKKSGEIVPMEVNFNFDDPNLIILPLAFGKRQGREFIWNDLLSLETGSLKLANGRVIEKTLYNRRTRQDEPALFVALTFERREVLDSSNIKPMNLIGVDRGENIPAVIALTDPEGCPLSRFKDSLGNPTHILRIGESYKEKQRTIQAKKEVEQRRAGGYSRKYASKAKNLADDMVRNTARDLLYYAVTQDAMLIFENLSRGFGRQGKRTFMAERQYTRMEDWLTAKLAYEGLPSKTYLSKTLAQYTSKTCSNCGFTITSADYDRVLEKLKKTATGWMTTINGKELKVEGQITYYNRYKRQNVVKDLSVELDRLSEESVNNDISSWTKGRSGEALSLLKKRFSHRPVQEKFVCLNCGFETHADEQAALNIARSWLFLRSQEYKKYQTNKTTGNTDKRAFVETWQSFYRKKLKEVWKPAV

SEQ ID NO: 32240 - protein, 979 aa, synthetic construct
  REGION 1..979: note = engineered CasX variant
QEIKGRINKIRRRLVKDSNTKKAGKTGPMKTLLVRVMTPDLRERLENLRKKPENIPQPISNTSRANLNKLLTDYTEMKKAILHVYWEEFQKDPVGLMSRVAQPASKKIDQNKLKPEMDEKGNLTTAGFACSQCGQPLFVYKLEQVSEKGKAYTNYFGRCNVAEHEKLIKLAQLKPEKDSDEAVTYSLGKFGQRALDFYSIHVTKESTHPVKPLAQIAGNRYASHPVGKALSDACMGTIASFLSKYQDIIIEHQKVVKGNQKRLESLRELAGKENLEYPSVTLPPQPHTKEGVDAYNEVIARVRMWVNLNLWQKLKLSRDDAKPLLRLKGFPSFPLVERQANEVDWWDMVCNVKKLINEKKEDGKVFWQNLAGYKRQEALRPYLSSEEDRKKGKKFARYQLGDLLLHLEKKHGEDWGKVYDEAWERIDKKVEGLSKHIKLEEERRSEDAQSKAALTDWLRAKASFVIEGLKEADKDEFCRCELKLQKWYGDLRGKPFAIEAENSILDISGFSKQYNCAFIWQKDGVKKLNLYLIINYFKGGKLRFKKIKPEAFEANRFYTVINKKSGEIVPMEVNFNFDDPNLIILPLAFGKRQGREFIWNDLLSLETGSLKLANGRVIEKTLYNRRTRQDEPALFVALTFERREVLDSSNIKPMNLIGVDRGENIPAVIALTDPEGCPLSRFKDSLGNPTHILRIGESYKEKQRTIQAKKEVEQRRAGGYSRKYASKAKNLADDMVRNTARDLLYYAVTQDAMLIFENLSRGFGRQGKRTFMAERQYTRMEDWLTAKLAYEGLPSKTYLSKTLAQYTSKTCSNCGFTITSADYDRVLEKLKKTATGWMTTINGKELKVEGQITYYNRYKRQNVVKDLSVELDRLSEESVNNDISSWTKGRSGEALSLLKKRFSHRPVQEKFVCLNCGFETHADEQAALNIARSWLFLRSQEYKKYQTNKTTGNTDKRAFVETWQSFYRKKLKEVWKPAV

SEQ ID NO: 32241 - protein, 979 aa, synthetic construct
  REGION 1..979: note = engineered CasX variant
QEIKGRINKIRRRLVKDSNTKKAGKTGPMKTLLVRVMTPDLRERLENLRKKPENIPQPISNTSRANLNKLLTDYTEMKKAILHVYWEEFQKDPVGLMSRVAQPASKKIDQNKLKPEMDEKGNLTTAGFACSQCGQPLFVYKLEQVSEKGKAYTNYFGRCNVAEHEKLIKLAQLKPEKDSDEAVTYSLGKFGQRALDFYSIHVTKESTHPVKPLAQIAGNRYASTPVGKALSDACMGTIASFLSKYQDIIIEHQKVVKGNQKRLESLRELAGKENLEYPSVTLPPQPHTKEGVDAYNEVIARVRMWVNLNLWQKLKLSRDDAKPLLRLKGFPSFPLVERQANEVDWWDMVCNVKKLINEKKEDGKVFWQNLAGYKRQEALRPYLSSEEDRKKGKKFARYQLGDLLLHLEKKHGEDWGKVYDEAWERIDKKVEGLSKHIKLEEERRSEDAQSKAALTDWLRAKASFVIEGLKEADKDEFCRCELKLQKWYGDLRGKPFAIEAENSILDISGFSKQYNCAFIWQKDGVKKLNLYLIINYFKGGKLRFKKIKPEAFEANRFYTVINKKSGEIVPMEVNFNFDDPNLIILPLAFGKRQGREFIWNDLLSLETGSLKLANGRVIEKTLYNRRTRQDEPALFVALTFERREVLDSSNIKPMNLIGVDRGENIPAVIALTDPEGCPLSRFKDSLGNPTHILRIGESYKEKQRTIQAKKEVEQRRAGGYSRKYASKAKNLADDMVRNTARDLLYYAVTQDAMLIFENLSRGFGRQGKRTFMAERQYTRMEDWLTAKLAYEGLPSKTYLSKTLAQYTSKTCSNCGFTITSADYDRVLEKLKKTATGWMTTINGKELKVEGQITYYNRYKRQNVVKDLSVELDRLSEESVNNDISSWTKGRSGEALSLLKKRFSHRPVQEKFVCLNCGFETHADEQAALNIARSWLFLRSQEYKKYQTNKTTGNTDKRAFVETWQSFYRKKLKEVWKPAV

SEQ ID NO: 32242 - protein, 979 aa, synthetic construct
  REGION 1..979: note = engineered CasX variant
QEIKGRINKIRRRLVKDSNTKKAGKTGPMKTLLVRVMTPDLRERLENLRKKPENIPQPISNTSRANLNKLLTDYTEMKKAILHVYWEEFQKDPVGLMSRVAQPASKKIDQNKLKPEMDEKGNLTTAGFACSQCGQPLFVYKLEQVSEKGKAYTNYFGRCNVAEHEKLIKLAQLKPEKDSDEAVTYSLGKFGQRALDFYSIHVTKESTHPVKPLAQIAGNRYASAPVGKALSDACMGTIASFLSKYQDIIIEHQKVVKGNQKRLESLRELAGKENLEYPSVTLPPQPHTKEGVDAYNEVIARVRMWVNLNLWQKLKLSRDDAKPLLRLKGFPSFPLVERQANEVDWWDMVCNVKKLINEKKEDGKVFWQNLAGYKRQEALRPYLSSEEDRKKGKKFARYQLGDLLLHLEKKHGEDWGKVYDEAWERIDKKVEGLSKHIKLEEERRSEDAQSKAALTDWLRAKASFVIEGLKEADKDEFCRCELKLQKWYGDLRGKPFAIEAENSILDISGFSKQYNCAFIWQKDGVKKLNLYLIINYFKGGKLRFKKIKPEAFEANRFYTVINKKSGEIVPMEVNFNFDDPNLIILPLAFGKRQGREFIWNDLLSLETGSLKLANGRVIEKTLYNRRTRQDEPALFVALTFERREVLDSSNIKPMNLIGVDRGENIPAVIALTDPEGCPLSRFKDSLGNPTHILRIGESYKEKQRTIQAKKEVEQRRAGGYSRKYASKAKNLADDMVRNTARDLLYYAVTQDAMLIFENLSRGFGRQGKRTFMAERQYTRMEDWLTAKLAYEGLPSKTYLSKTLAQYTSKTCSNCGFTITSADYDRVLEKLKKTATGWMTTINGKELKVEGQITYYNRYKRQNVVKDLSVELDRLSEESVNNDISSWTKGRSGEALSLLKKRFSHRPVQEKFVCLNCGFETHADEQAALNIARSWLFLRSQEYKKYQTNKTTGNTDKRAFVETWQSFYRKKLKEVWKPAV

SEQ ID NO: 32243 - protein, 979 aa, synthetic construct
  REGION 1..979: note = engineered CasX variant
QEIKGRINKIRRRLVKDSNTKKAGKTGPMKTLLVRVMTPDLRERLENLRKKPENIPQPISNTSRANLNKLLTDYTEMKKAILHVYWEEFQKDPVGLMSRVAQPASKKIDQNKLKPEMDEKGNLTTAGFACSQCGQPLFVYKLEQVSEKGKAYTNYFGRCNVAEHEKLIKLAQLKPEKDSDEAVTYSLGKFGQRALDFYSIHVTKESTHPVKPLAQIAGNRYASVPVGKALSDACMGTIASFLSKYQDIIIEHQKVVKGNQKRLESLRELAGKENLEYPSVTLPPQPHTKEGVDAYNEVIARVRMWVNLNLWQKLKLSRDDAKPLLRLKGFPSFPLVERQANEVDWWDMVCNVKKLINEKKEDGKVFWQNLAGYKRQEALRPYLSSEEDRKKGKKFARYQLGDLLLHLEKKHGEDWGKVYDEAWERIDKKVEGLSKHIKLEEERRSEDAQSKAALTDWLRAKASFVIEGLKEADKDEFCRCELKLQKWYGDLRGKPFAIEAENSILDISGFSKQYNCAFIWQKDGVKKLNLYLIINYFKGGKLRFKKIKPEAFEANRFYTVINKKSGEIVPMEVNFNFDDPNLIILPLAFGKRQGREFIWNDLLSLETGSLKLANGRVIEKTLYNRRTRQDEPALFVALTFERREVLDSSNIKPMNLIGVDRGENIPAVIALTDPEGCPLSRFKDSLGNPTHILRIGESYKEKQRTIQAKKEVEQRRAGGYSRKYASKAKNLADDMVRNTARDLLYYAVTQDAMLIFENLSRGFGRQGKRTFMAERQYTRMEDWLTAKLAYEGLPSKTYLSKTLAQYTSKTCSNCGFTITSADYDRVLEKLKKTATGWMTTINGKELKVEGQITYYNRYKRQNVVKDLSVELDRLSEESVNNDISSWTKGRSGEALSLLKKRFSHRPVQEKFVCLNCGFETHADEQAALNIARSWLFLRSQEYKKYQTNKTTGNTDKRAFVETWQSFYRKKLKEVWKPAV

SEQ ID NO: 32244 - protein, 980 aa, synthetic construct
  REGION 1..980: note = engineered CasX variant
QEIKGRINKIRRRLVKDSNTKKAGKTGPMKTLLVRVMTPDLRERLENLRKKPENIPQPISNTSRANLNKLLTDYTEMKKAILHVYWEEFQKDPVGLMSRVAQPASKKIDQNKLKPEMDEKGNLTTAGFACSQCGQPLFVYKLEQVSEKGKAYTNYFGRCNVAEHEKLIKKLAQLKPEKDSDEAVTYSLGKFGQRALDFYSIHVTKESTHPVKPLAQIAGNRYASGPVGKALSDACMGTIASFLSKYQDIIIEHQKVVKGNQKRLESLRELAGKENLEYPSVTLPPQPHTKEGVDAYNEVIARVRMWVNLNLWQKLKLSRDDAKPLLRLKGFPSFPLVERQANEVDWWDMVCNVKKLINEKKEDGKVFWQNLAGYKRQEALRPYLSSEEDRKKGKKFARYQLGDLLLHLEKKHGEDWGKVYDEAWERIDKKVEGLSKHIKLEEERRSEDAQSKAALTDWLRAKASFVIEGLKEADKDEFCRCELKLQKWYGDLRGKPFAIEAENSILDISGFSKQYNCAFIWQKDGVKKLNLYLIINYFKGGKLRFKKIKPEAFEANRFYTVINKKSGEIVPMEVNFNFDDPNLIILPLAFGKRQGREFIWNDLLSLETGSLKLANGRVIEKTLYNRRTRQDEPALFVALTFERREVLDSSNIKPMNLIGVDRGENIPAVIALTDPEGCPLSRFKDSLGNPTHILRIGESYKEKQRTIQAKKEVEQRRAGGYSRKYASKAKNLADDMVRNTARDLLYYAVTQDAMLIFENLSRGFGRQGKRTFMAERQYTRMEDWLTAKLAYEGLPSKTYLSKTLAQYTSKTCSNCGFTITSADYDRVLEKLKKTATGWMTTINGKELKVEGQITYYNRYKRQNVVKDLSVELDRLSEESVNNDISSWTKGRSGEALSLLKKRFSHRPVQEKFVCLNCGFETHADEQAALNIARSWLFLRSQEYKKYQTNKTTGNTDKRAFVETWQSFYRKKLKEVWKPAV

SEQ ID NO: 32245 - protein, 978 aa, synthetic construct
  REGION 1..978: note = engineered CasX variant
QEIKGRINKIRRRLVKDSNTKKAGKTGPMKTLLVRVMTPDLRERLENLRKKPENIPQPISNTSRANLNKLLTDYTEMKKAILHVYWEEFQKDPVGLMSRVAQPASKKIDQNKLKPEMDEKGNLTTAGFACSQCGQPLFVYKLEQVSEKGKAYTNYFGRCNVAEHEKLIKLAQLKPEKDSDEAVTYSLGKFGQRALDFYSIHVTKESTHPVKPLAQIAGNRYASPVGKALSDACMGTIASFLSKYQDIIIEHQKVVKGNQKRLESLRELAGKENLEYPSVTLPPQPHTKEGVDAYNEVIARVRMWVNLNLWQKLKLSRDDAKPLLRLKGFPSFPLVERQANEVDWWDMVCNVKKLINEKKEDGKVFWQNLAGYKRQEALRPYLSSEEDRKKGKKFARYQLGDLLLHLEKKHGEDWGKVYDEAWERIDKKVEGLSKHIKLEEERRSEDAQSKAALTDWLRAKASFVIEGLKEADKDEFCRCELKLQKWYGDLRGKPFAIEAENSILDISGFSKQYNCAFIWQKDGVKKLNLYLIINYFKGGKLRFKKIKPEAFEANRFYTVINKKSGEIVPMEVNFNFDDPNLIILPLAFGKRQGREFIWNDLLSLETGSLKLANGRVIEKTLYNRRTRQDEPALFVALTFERREVLDSSNIKPMNLIGVDRGENIPAVIALTDPEGCPLSRFKDSLGNPTHILRIGESYKEKQRTIQAKKEVEQRRAGGYSRKYASKAKNLADDMVRNTARDLLYYAVTQDAMLIFENLSRGFGRQGKRTFMAERQYTRMEDWLTAKLAYEGLPSKTYLSKTLAQYTSKTCSNCGFTITSADYDRVLEKLKKTATGWMTTINGKELKVEGQITYYNRYKRQNVVKDLSVELDRLSEESVNNDISSWTKGRSGEALSLLKKRFSHRPVQEKFVCLNCGFETHADEQAALNIARSWLFLRSQEYKKYQTNKTTGNTDKRAFVETWQSFYRKKLKEVWKPAV

SEQ ID NO: 32246 - protein, 979 aa, synthetic construct
  REGION 1..979: note = engineered CasX variant
QEIKGRINKIRRRLVKDSNTKKAGKTGPMKTLLVRVMTPDLRERLENLRKKPENIPQPISNTSRANLNKLLTDYTEMKKAILHVYWEEFQKDPVGLMSRVAQPASKKIDQNKLKPEMDEKGNLTTAGFACSQCGQPLFVYKLEQVSEKGKAYTNYFGRCNVAEHEKLILLYQLKPEKDSDEAVTYSLGKFGQRALDFYSIHVTKESTHPVKPLAQIAGNRYASYPVGKALSDACMGTIASFLSKYQDIIIEHQKVVKGNQKRLESLRELAGKENLEYPSVTLPPQPHTKEGVDAYNEVIARVRMWVNLNLWQKLKLSRDDAKPLLRLKGFPSFPLVERQANEVDWWDMVCNVKKLINEKKEDGKVFWQNLAGYKRQEALRPYLSSEEDRKKGKKFARYQLGDLLLHLEKKHGEDWGKVYDEAWERIDKKVEGLSKHIKLEEERRSEDAQSKAALTDWLRAKASFVIEGLKEADKDEFCRCELKLQKWYGDLRGKPFAIEAENSILDISGFSKQYNCAFIWQKDGVKKLNLYLIINYFKGGKLRFKKIKPEAFEANRFYTVINKKSGEIVPMEVNFNFDDPNLIILPLAFGKRQGREFIWNDLLSLETGSLKLANGRVIEKTLYNRRTRQDEPALFVALTFERREVLDSSNIKPMNLIGVDRGENIPAVIALTDPEGCPLSRFKDSLGNPTHILRIGESYKEKQRTIQAKKEVEQRRAGGYSRKYASKAKNLADDMVRNTARDLLYYAVTQDAMLIFENLSRGFGRQGKRTFMAERQYTRMEDWLTAKLAYEGLPSKTYLSKTLAQYTSKTCSNCGFTITSADYDRVLEKLKKTATGWMTTINGKELKVEGQITYYNRYKRQNVVKDLSVELDRLSEESVNNDISSWTKGRSGEALSLLKKRFSHRPVQEKFVCLNCGFETHADEQAALNIARSWLFLRSQEYKKYQTNKTTGNTDKRAFVETWQSFYRKKLKEVWKPAV

SEQ ID NO: 32247 - protein, 979 aa, synthetic construct
  REGION 1..979: note = engineered CasX variant
QEIKGRINKIRRRLVKDSNTKKAGKTGPMKTLLVRVMTPDLRERLENLRKKPENIPQPISNTSRANLNKLLTDYTEMKKAILHVYWEEFQKDPVGLMSRVAQPASKKIDQNKLKPEMDEKGNLTTAGFACSQCGQPLFVYKLEQVSEKGKAYTNYFGRCNVAEHEKLILLYQLKPEKDSDEAVTYSLGKFGQRALDFYSIHVTKESTHPVKPLAQIAGNRYASHPVGKALSDACMGTIASFLSKYQDIIIEHQKVVKGNQKRLESLRELAGKENLEYPSVTLPPQPHTKEGVDAYNEVIARVRMWVNLNLWQKLKLSRDDAKPLLRLKGFPSFPLVERQANEVDWWDMVCNVKKLINEKKEDGKVFWQNLAGYKRQEALRPYLSSEEDRKKGKKFARYQLGDLLLHLEKKHGEDWGKVYDEAWERIDKKVEGLSKHIKLEEERRSEDAQSKAALTDWLRAKASFVIEGLKEADKDEFCRCELKLQKWYGDLRGKPFAIEAENSILDISGFSKQYNCAFIWQKDGVKKLNLYLIINYFKGGKLRFKKIKPEAFEANRFYTVINKKSGEIVPMEVNFNFDDPNLIILPLAFGKRQGREFIWNDLLSLETGSLKLANGRVIEKTLYNRRTRQDEPALFVALTFERREVLDSSNIKPMNLIGVDRGENIPAVIALTDPEGCPLSRFKDSLGNPTHILRIGESYKEKQRTIQAKKEVEQRRAGGYSRKYASKAKNLADDMVRNTARDLLYYAVTQDAMLIFENLSRGFGRQGKRTFMAERQYTRMEDWLTAKLAYEGLPSKTYLSKTLAQYTSKTCSNCGFTITSADYDRVLEKLKKTATGWMTTINGKELKVEGQITYYNRYKRQNVVKDLSVELDRLSEESVNNDISSWTKGRSGEALSLLKKRFSHRPVQEKFVCLNCGFETHADEQAALNIARSWLFLRSQEYKKYQTNKTTGNTDKRAFVETWQSFYRKKLKEVWKPAV

SEQ ID NO: 32248 - protein, 979 aa, synthetic construct
  REGION 1..979: note = engineered CasX variant
QEIKGRINKIRRRLVKDSNTKKAGKTGPMKTLLVRVMTPDLRERLENLRKKPENIPQPISNTSRANLNKLLTDYTEMKKAILHVYWEEFQKDPVGLMSRVAQPASKKIDQNKLKPEMDEKGNLTTAGFACSQCGQPLFVYKLEQVSEKGKAYTNYFGRCNVAEHEKLILLYQLKPEKDSDEAVTYSLGKFGQRALDFYSIHVTKESTHPVKPLAQIAGNRYASSPVGKALSDACMGTIASFLSKYQDIIIEHQKVVKGNQKRLESLRELAGKENLEYPSVTLPPQPHTKEGVDAYNEVIARVRMWVNLNLWQKLKLSRDDAKPLLRLKGFPSFPLVERQANEVDWWDMVCNVKKLINEKKEDGKVFWQNLAGYKRQEALRPYLSSEEDRKKGKKFARYQLGDLLLHLEKKHGEDWGKVYDEAWERIDKKVEGLSKHIKLEEERRSEDAQSKAALTDWLRAKASFVIEGLKEADKDEFCRCELKLQKWYGDLRGKPFAIEAENSILDISGFSKQYNCAFIWQKDGVKKLNLYLIINYFKGGKLRFKKIKPEAFEANRFYTVINKKSGEIVPMEVNFNFDDPNLIILPLAFGKRQGREFIWNDLLSLETGSLKLANGRVIEKTLYNRRTRQDEPALFVALTFERREVLDSSNIKPMNLIGVDRGENIPAVIALTDPEGCPLSRFKDSLGNPTHILRIGESYKEKQRTIQAKKEVEQRRAGGYSRKYASKAKNLADDMVRNTARDLLYYAVTQDAMLIFENLSRGFGRQGKRTFMAERQYTRMEDWLTAKLAYEGLPSKTYLSKTLAQYTSKTCSNCGFTITSADYDRVLEKLKKTATGWMTTINGKELKVEGQITYYNRYKRQNVVKDLSVELDRLSEESVNNDISSWTKGRSGEALSLLKKRFSHRPVQEKFVCLNCGFETHADEQAALNIARSWLFLRSQEYKKYQTNKTTGNTDKRAFVETWQSFYRKKLKEVWKPAV

SEQ ID NO: 32249 - protein, 979 aa, synthetic construct
  REGION 1..979: note = engineered CasX variant
QEIKGRINKIRRRLVKDSNTKKAGKTGPMKTLLVRVMTPDLRERLENLRKKPENIPQPISNTSRANLNKLLTDYTEMKKAILHVYWEEFQKDPVGLMSRVAQPASKKIDQNKLKPEMDEKGNLTTAGFACSQCGQPLFVYKLEQVSEKGKAYTNYFGRCNVAEHEKLILLYQLKPEKDSDEAVTYSLGKFGQRALDFYSIHVTKESTHPVKPLAQIAGNRYASTPVGKALSDACMGTIASFLSKYQDIIIEHQKVVKGNQKRLESLRELAGKENLEYPSVTLPPQPHTKEGVDAYNEVIARVRMWVNLNLWQKLKLSRDDAKPLLRLKGFPSFPLVERQANEVDWWDMVCNVKKLINEKKEDGKVFWQNLAGYKRQEALRPYLSSEEDRKKGKKFARYQLGDLLLHLEKKHGEDWGKVYDEAWERIDKKVEGLSKHIKLEEERRSEDAQSKAALTDWLRAKASFVIEGLKEADKDEFCRCELKLQKWYGDLRGKPFAIEAENSILDISGFSKQYNCAFIWQKDGVKKLNLYLIINYFKGGKLRFKKIKPEAFEANRFYTVINKKSGEIVPMEVNFNFDDPNLIILPLAFGKRQGREFIWNDLLSLETGSLKLANGRVIEKTLYNRRTRQDEPALFVALTFERREVLDSSNIKPMNLIGVDRGENIPAVIALTDPEGCPLSRFKDSLGNPTHILRIGESYKEKQRTIQAKKEVEQRRAGGYSRKYASKAKNLADDMVRNTARDLLYYAVTQDAMLIFENLSRGFGRQGKRTFMAERQYTRMEDWLTAKLAYEGLPSKTYLSKTLAQYTSKTCSNCGFTITSADYDRVLEKLKKTATGWMTTINGKELKVEGQITYYNRYKRQNVVKDLSVELDRLSEESVNNDISSWTKGRSGEALSLLKKRFSHRPVQEKFVCLNCGFETHADEQAALNIARSWLFLRSQEYKKYQTNKTTGNTDKRAFVETWQSFYRKKLKEVWKPAV

SEQ ID NO: 32250 - protein, 979 aa, synthetic construct
  REGION 1..979: note = engineered CasX variant
QEIKGRINKIRRRLVKDSNTKKAGKTGPMKTLLVRVMTPDLRERLENLRKKPENIPQPISNTSRANLNKLLTDYTEMKKAILHVYWEEFQKDPVGLMSRVAQPASKKIDQNKLKPEMDEKGNLTTAGFACSQCGQPLFVYKLEQVSEKGKAYTNYFGRCNVAEHEKLILLYQLKPEKDSDEAVTYSLGKFGQRALDFYSIHVTKESTHPVKPLAQIAGNRYASAPVGKALSDACMGTIASFLSKYQDIIIEHQKVVKGNQKRLESLRELAGKENLEYPSVTLPPQPHTKEGVDAYNEVIARVRMWVNLNLWQKLKLSRDDAKPLLRLKGFPSFPLVERQANEVDWWDMVCNVKKLINEKKEDGKVFWQNLAGYKRQEALRPYLSSEEDRKKGKKFARYQLGDLLLHLEKKHGEDWGKVYDEAWERIDKKVEGLSKHIKLEEERRSEDAQSKAALTDWLRAKASFVIEGLKEADKDEFCRCELKLQKWYGDLRGKPFAIEAENSILDISGFSKQYNCAFIWQKDGVKKLNLYLIINYFKGGKLRFKKIKPEAFEANRFYTVINKKSGEIVPMEVNFNFDDPNLIILPLAFGKRQGREFIWNDLLSLETGSLKLANGRVIEKTLYNRRTRQDEPALFVALTFERREVLDSSNIKPMNLIGVDRGENIPAVIALTDPEGCPLSRFKDSLGNPTHILRIGESYKEKQRTIQAKKEVEQRRAGGYSRKYASKAKNLADDMVRNTARDLLYYAVTQDAMLIFENLSRGFGRQGKRTFMAERQYTRMEDWLTAKLAYEGLPSKTYLSKTLAQYTSKTCSNCGFTITSADYDRVLEKLKKTATGWMTTINGKELKVEGQITYYNRYKRQNVVKDLSVELDRLSEESVNNDISSWTKGRSGEALSLLKKRFSHRPVQEKFVCLNCGFETHADEQAALNIARSWLFLRSQEYKKYQTNKTTGNTDKRAFVETWQSFYRKKLKEVWKPAV

SEQ ID NO: 32251 - protein, 979 aa, synthetic construct
  REGION 1..979: note = engineered CasX variant
QEIKGRINKIRRRLVKDSNTKKAGKTGPMKTLLVRVMTPDLRERLENLRKKPENIPQPISNTSRANLNKLLTDYTEMKKAILHVYWEEFQKDPVGLMSRVAQPASKKIDQNKLKPEMDEKGNLTTAGFACSQCGQPLFVYKLEQVSEKGKAYTNYFGRCNVAEHEKLILLYQLKPEKDSDEAVTYSLGKFGQRALDFYSIHVTKESTHPVKPLAQIAGNRYASVPVGKALSDACMGTIASFLSKYQDIIIEHQKVVKGNQKRLESLRELAGKENLEYPSVTLPPQPHTKEGVDAYNEVIARVRMWVNLNLWQKLKLSRDDAKPLLRLKGFPSFPLVERQANEVDWWDMVCNVKKLINEKKEDGKVFWQNLAGYKRQEALRPYLSSEEDRKKGKKFARYQLGDLLLHLEKKHGEDWGKVYDEAWERIDKKVEGLSKHIKLEEERRSEDAQSKAALTDWLRAKASFVIEGLKEADKDEFCRCELKLQKWYGDLRGKPFAIEAENSILDISGFSKQYNCAFIWQKDGVKKLNLYLIINYFKGGKLRFKKIKPEAFEANRFYTVINKKSGEIVPMEVNFNFDDPNLIILPLAFGKRQGREFIWNDLLSLETGSLKLANGRVIEKTLYNRRTRQDEPALFVALTFERREVLDSSNIKPMNLIGVDRGENIPAVIALTDPEGCPLSRFKDSLGNPTHILRIGESYKEKQRTIQAKKEVEQRRAGGYSRKYASKAKNLADDMVRNTARDLLYYAVTQDAMLIFENLSRGFGRQGKRTFMAERQYTRMEDWLTAKLAYEGLPSKTYLSKTLAQYTSKTCSNCGFTITSADYDRVLEKLKKTATGWMTTINGKELKVEGQITYYNRYKRQNVVKDLSVELDRLSEESVNNDISSWTKGRSGEALSLLKKRFSHRPVQEKFVCLNCGFETHADEQAALNIARSWLFLRSQEYKKYQTNKTTGNTDKRAFVETWQSFYRKKLKEVWKPAV

SEQ ID NO: 32252 - protein, 979 aa, synthetic construct
  REGION 1..979: note = engineered CasX variant
QEIKGRINKIRRRLVKDSNTKKAGKTGPMKTLLVRVMTPDLRERLENLRKKPENIPQPISNTSRANLNKLLTDYTEMKKAILHVYWEEFQKDPVGLMSRVAQPASKKIDQNKLKPEMDEKGNLTTAGFACSQCGQPLFVYKLEQVSEKGKAYTNYFGRCNVAEHEKLIKLYQLKPEKDSDEAVTYSLGKFGQRALDFYSIHVTKESTHPVKPLAQIAGNRYASGPVGKALSDACMGTIASFLSKYQDIIIEHQKVVKGNQKRLESLRELAGKENLEYPSVTLPPQPHTKEGVDAYNEVIARVRMWVNLNLWQKLKLSRDDAKPLLRLKGFPSFPLVERQANEVDWWDMVCNVKKLINEKKEDGKVFWQNLAGYKRQEALRPYLSSEEDRKKGKKFARYQLGDLLLHLEKKHGEDWGKVYDEAWERIDKKVEGLSKHIKLEEERRSEDAQSKAALTDWLRAKASFVIEGLKEADKDEFCRCELKLQKWYGDLRGKPFAIEAENSILDISGFSKQYNCAFIWQKDGVKKLNLYLIINYFKGGKLRFKKIKPEAFEANRFYTVINKKSGEIVPMEVNFNFDDPNLIILPLAFGKRQGREFIWNDLLSLETGSLKLANGRVIEKTLYNRRTRQDEPALFVALTFERREVLDSSNIKPMNLIGVDRGENIPAVIALTDPEGCPLSRFKDSLGNPTHILRIGESYKEKQRTIQAKKEVEQRRAGGYSRKYASKAKNLADDMVRNTARDLLYYAVTQDAMLIFENLSRGFGRQGKRTFMAERQYTRMEDWLTAKLAYEGLPSKTYLSKTLAQYTSKTCSNCGFTITSADYDRVLEKLKKTATGWMTTINGKELKVEGQITYYNRYKRQNVVKDLSVELDRLSEESVNNDISSWTKGRSGEALSLLKKRFSHRPVQEKFVCLNCGFETHADEQAALNIARSWLFLRSQEYKKYQTNKTTGNTDKRAFVETWQSFYRKKLKEVWKPAV

SEQ ID NO: 32253 - protein, 978 aa, synthetic construct
  REGION 1..978: note = engineered CasX variant
QEIKGRINKIRRRLVKDSNTKKAGKTGPMKTLLVRVMTPDLRERLENLRKKPENIPQPISNTSRANLNKLLTDYTEMKKAILHVYWEEFQKDPVGLMSRVAQPASKKIDQNKLKPEMDEKGNLTTAGFACSQCGQPLFVYKLEQVSEKGKAYTNYFGRCNVAEHEKLILLYQLKPEKDSDEAVTYSLGKFGQRALDFYSIHVTKESTHPVKPLAQIAGNRYASPVGKALSDACMGTIASFLSKYQDIIIEHQKVVKGNQKRLESLRELAGKENLEYPSVTLPPQPHTKEGVDAYNEVIARVRMWVNLNLWQKLKLSRDDAKPLLRLKGFPSFPLVERQANEVDWWDMVCNVKKLINEKKEDGKVFWQNLAGYKRQEALRPYLSSEEDRKKGKKFARYQLGDLLLHLEKKHGEDWGKVYDEAWERIDKKVEGLSKHIKLEEERRSEDAQSKAALTDWLRAKASFVIEGLKEADKDEFCRCELKLQKWYGDLRGKPFAIEAENSILDISGFSKQYNCAFIWQKDGVKKLNLYLIINYFKGGKLRFKKIKPEAFEANRFYTVINKKSGEIVPMEVNFNFDDPNLIILPLAFGKRQGREFIWNDLLSLETGSLKLANGRVIEKTLYNRRTRQDEPALFVALTFERREVLDSSNIKPMNLIGVDRGENIPAVIALTDPEGCPLSRFKDSLGNPTHILRIGESYKEKQRTIQAKKEVEQRRAGGYSRKYASKAKNLADDMVRNTARDLLYYAVTQDAMLIFENLSRGFGRQGKRTFMAERQYTRMEDWLTAKLAYEGLPSKTYLSKTLAQYTSKTCSNCGFTITSADYDRVLEKLKKTATGWMTTINGKELKVEGQITYYNRYKRQNVVKDLSVELDRLSEESVNNDISSWTKGRSGEALSLLKKRFSHRPVQEKFVCLNCGFETHADEQAALNIARSWLFLRSQEYKKYQTNKTTGNTDKRAFVETWQSFYRKKLKEVWKPAV

SEQ ID NO: 32254 - protein, 979 aa, synthetic construct
  REGION 1..979: note = engineered CasX variant
QEIKGRINKIRRRLVKDSNTKKAGKTGPMKTLLVRVMTPDLRERLENLRKKPENIPQPISNTSRANLNKLLTDYTEMKKAILHVYWEEFQKDPVGLMSRVAQPASKKIDQNKLKPEMDEKGNLTTAGFACSQCGQPLFVYKLEQVSEKGKAYTNYFGRCNVAEHEKLILLSQLKPEKDSDEAVTYSLGKFGQRALDFYSIHVTKESTHPVKPLAQIAGNRYASYPVGKALSDACMGTIASFLSKYQDIIIEHQKVVKGNQKRLESLRELAGKENLEYPSVTLPPQPHTKEGVDAYNEVIARVRMWVNLNLWQKLKLSRDDAKPLLRLKGFPSFPLVERQANEVDWWDMVCNVKKLINEKKEDGKVFWQNLAGYKRQEALRPYLSSEEDRKKGKKFARYQLGDLLLHLEKKHGEDWGKVYDEAWERIDKKVEGLSKHIKLEEERRSEDAQSKAALTDWLRAKASFVIEGLKEADKDEFCRCELKLQKWYGDLRGKPFAIEAENSILDISGFSKQYNCAFIWQKDGVKKLNLYLIINYFKGGKLRFKKIKPEAFEANRFYTVINKKSGEIVPMEVNFNFDDPNLIILPLAFGKRQGREFIWNDLLSLETGSLKLANGRVIEKTLYNRRTRQDEPALFVALTFERREVLDSSNIKPMNLIGVDRGENIPAVIALTDPEGCPLSRFKDSLGNPTHILRIGESYKEKQRTIQAKKEVEQRRAGGYSRKYASKAKNLADDMVRNTARDLLYYAVTQDAMLIFENLSRGFGRQGKRTFMAERQYTRMEDWLTAKLAYEGLPSKTYLSKTLAQYTSKTCSNCGFTITSADYDRVLEKLKKTATGWMTTINGKELKVEGQITYYNRYKRQNVVKDLSVELDRLSEESVNNDISSWTKGRSGEALSLLKKRFSHRPVQEKFVCLNCGFETHADEQAALNIARSWLFLRSQEYKKYQTNKTTGNTDKRAFVETWQSFYRKKLKEVWKPAV

SEQ ID NO: 32255 - protein, 979 aa, synthetic construct
  REGION 1..979: note = engineered CasX variant
QEIKGRINKIRRRLVKDSNTKKAGKTGPMKTLLVRVMTPDLRERLENLRKKPENIPQPISNTSRANLNKLLTDYTEMKKAILHVYWEEFQKDPVGLMSRVAQPASKKIDQNKLKPEMDEKGNLTTAGFACSQCGQPLFVYKLEQVSEKGKAYTNYFGRCNVAEHEKLILLSQLKPEKDSDEAVTYSLGKFGQRALDFYSIHVTKESTHPVKPLAQIAGNRYASHPVGKALSDACMGTIASFLSKYQDIIIEHQKVVKGNQKRLESLRELAGKENLEYPSVTLPPQPHTKEGVDAYNEVIARVRMWVNLNLWQKLKLSRDDAKPLLRLKGFPSFPLVERQANEVDWWDMVCNVKKLINEKKEDGKVFWQNLAGYKRQEALRPYLSSEEDRKKGKKFARYQLGDLLLHLEKKHGEDWGKVYDEAWERIDKKVEGLSKHIKLEEERRSEDAQSKAALTDWLRAKASFVIEGLKEADKDEFCRCELKLQKWYGDLRGKPFAIEAENSILDISGFSKQYNCAFIWQKDGVKKLNLYLIINYFKGGKLRFKKIKPEAFEANRFYTVINKKSGEIVPMEVNFNFDDPNLIILPLAFGKRQGREFIWNDLLSLETGSLKLANGRVIEKTLYNRRTRQDEPALFVALTFERREVLDSSNIKPMNLIGVDRGENIPAVIALTDPEGCPLSRFKDSLGNPTHILRIGESYKEKQRTIQAKKEVEQRRAGGYSRKYASKAKNLADDMVRNTARDLLYYAVTQDAMLIFENLSRGFGRQGKRTFMAERQYTRMEDWLTAKLAYEGLPSKTYLSKTLAQYTSKTCSNCGFTITSADYDRVLEKLKKTATGWMTTINGKELKVEGQITYYNRYKRQNVVKDLSVELDRLSEESVNNDISSWTKGRSGEALSLLKKRFSHRPVQEKFVCLNCGFETHADEQAALNIARSWLFLRSQEYKKYQTNKTTGNTDKRAFVETWQSFYRKKLKEVWKPAV

SEQ ID NO: 32256 - protein, 979 aa, synthetic construct
  REGION 1..979: note = engineered CasX variant
QEIKGRINKIRRRLVKDSNTKKAGKTGPMKTLLVRVMTPDLRERLENLRKKPENIPQPISNTSRANLNKLLTDYTEMKKAILHVYWEEFQKDPVGLMSRVAQPASKKIDQNKLKPEMDEKGNLTTAGFACSQCGQPLFVYKLEQVSEKGKAYTNYFGRCNVAEHEKLILLSQLKPEKDSDEAVTYSLGKFGQRALDFYSIHVTKESTHPVKPLAQIAGNRYASSPVGKALSDACMGTIASFLSKYQDIIIEHQKVVKGNQKRLESLRELAGKENLEYPSVTLPPQPHTKEGVDAYNEVIARVRMWVNLNLWQKLKLSRDDAKPLLRLKGFPSFPLVERQANEVDWWDMVCNVKKLINEKKEDGKVFWQNLAGYKRQEALRPYLSSEEDRKKGKKFARYQLGDLLLHLEKKHGEDWGKVYDEAWERIDKKVEGLSKHIKLEEERRSEDAQSKAALTDWLRAKASFVIEGLKEADKDEFCRCELKLQKWYGDLRGKPFAIEAENSILDISGFSKQYNCAFIWQKDGVKKLNLYLIINYFKGGKLRFKKIKPEAFEANRFYTVINKKSGEIVPMEVNFNFDDPNLIILPLAFGKRQGREFIWNDLLSLETGSLKLANGRVIEKTLYNRRTRQDEPALFVALTFERREVLDSSNIKPMNLIGVDRGENIPAVIALTDPEGCPLSRFKDSLGNPTHILRIGESYKEKQRTIQAKKEVEQRRAGGYSRKYASKAKNLADDMVRNTARDLLYYAVTQDAMLIFENLSRGFGRQGKRTFMAERQYTRMEDWLTAKLAYEGLPSKTYLSKTLAQYTSKTCSNCGFTITSADYDRVLEKLKKTATGWMTTINGKELKVEGQITYYNRYKRQNVVKDLSVELDRLSEESVNNDISSWTKGRSGEALSLLKKRFSHRPVQEKFVCLNCGFETHADEQAALNIARSWLFLRSQEYKKYQTNKTTGNTDKRAFVETWQSFYRKKLKEVWKPAV

SEQ ID NO: 32257 - protein, 979 aa, synthetic construct
  REGION 1..979: note = engineered CasX variant
QEIKGRINKIRRRLVKDSNTKKAGKTGPMKTLLVRVMTPDLRERLENLRKKPENIPQPISNTSRANLNKLLTDYTEMKKAILHVYWEEFQKDPVGLMSRVAQPASKKIDQNKLKPEMDEKGNLTTAGFACSQCGQPLFVYKLEQVSEKGKAYTNYFGRCNVAEHEKLILLSQLKPEKDSDEAVTYSLGKFGQRALDFYSIHVTKESTHPVKPLAQIAGNRYASTPVGKALSDACMGTIASFLSKYQDIIIEHQKVVKGNQKRLESLRELAGKENLEYPSVTLPPQPHTKEGVDAYNEVIARVRMWVNLNLWQKLKLSRDDAKPLLRLKGFPSFPLVERQANEVDWWDMVCNVKKLINEKKEDGKVFWQNLAGYKRQEALRPYLSSEEDRKKGKKFARYQLGDLLLHLEKKHGEDWGKVYDEAWERIDKKVEGLSKHIKLEEERRSEDAQSKAALTDWLRAKASFVIEGLKEADKDEFCRCELKLQKWYGDLRGKPFAIEAENSILDISGFSKQYNCAFIWQKDGVKKLNLYLIINYFKGGKLRFKKIKPEAFEANRFYTVINKKSGEIVPMEVNFNFDDPNLIILPLAFGKRQGREFIWNDLLSLETGSLKLANGRVIEKTLYNRRTRQDEPALFVALTFERREVLDSSNIKPMNLIGVDRGENIPAVIALTDPEGCPLSRFKDSLGNPTHILRIGESYKEKQRTIQAKKEVEQRRAGGYSRKYASKAKNLADDMVRNTARDLLYYAVTQDAMLIFENLSRGFGRQGKRTFMAERQYTRMEDWLTAKLAYEGLPSKTYLSKTLAQYTSKTCSNCGFTITSADYDRVLEKLKKTATGWMTTINGKELKVEGQITYYNRYKRQNVVKDLSVELDRLSEESVNNDISSWTKGRSGEALSLLKKRFSHRPVQEKFVCLNCGFETHADEQAALNIARSWLFLRSQEYKKYQTNKTTGNTDKRAFVETWQSFYRKKLKEVWKPAV

SEQ ID NO: 32258 - protein, 979 aa, synthetic construct
  REGION 1..979: note = engineered CasX variant
QEIKGRINKIRRRLVKDSNTKKAGKTGPMKTLLVRVMTPDLRERLENLRKKPENIPQPISNTSRANLNKLLTDYTEMKKAILHVYWEEFQKDPVGLMSRVAQPASKKIDQNKLKPEMDEKGNLTTAGFACSQCGQPLFVYKLEQVSEKGKAYTNYFGRCNVAEHEKLILLSQLKPEKDSDEAVTYSLGKFGQRALDFYSIHVTKESTHPVKPLAQIAGNRYASAPVGKALSDACMGTIASFLSKYQDIIIEHQKVVKGNQKRLESLRELAGKENLEYPSVTLPPQPHTKEGVDAYNEVIARVRMWVNLNLWQKLKLSRDDAKPLLRLKGFPSFPLVERQANEVDWWDMVCNVKKLINEKKEDGKVFWQNLAGYKRQEALRPYLSSEEDRKKGKKFARYQLGDLLLHLEKKHGEDWGKVYDEAWERIDKKVEGLSKHIKLEEERRSEDAQSKAALTDWLRAKASFVIEGLKEADKDEFCRCELKLQKWYGDLRGKPFAIEAENSILDISGFSKQYNCAFIWQKDGVKKLNLYLIINYFKGGKLRFKKIKPEAFEANRFYTVINKKSGEIVPMEVNFNFDDPNLIILPLAFGKRQGREFIWNDLLSLETGSLKLANGRVIEKTLYNRRTRQDEPALFVALTFERREVLDSSNIKPMNLIGVDRGENIPAVIALTDPEGCPLSRFKDSLGNPTHILRIGESYKEKQRTIQAKKEVEQRRAGGYSRKYASKAKNLADDMVRNTARDLLYYAVTQDAMLIFENLSRGFGRQGKRTFMAERQYTRMEDWLTAKLAYEGLPSKTYLSKTLAQYTSKTCSNCGFTITSADYDRVLEKLKKTATGWMTTINGKELKVEGQITYYNRYKRQNVVKDLSVELDRLSEESVNNDISSWTKGRSGEALSLLKKRFSHRPVQEKFVCLNCGFETHADEQAALNIARSWLFLRSQEYKKYQTNKTTGNTDKRAFVETWQSFYRKKLKEVWKPAV

SEQ ID NO: 32259 - protein, 979 aa, synthetic construct
  REGION 1..979: note = engineered CasX variant
QEIKGRINKIRRRLVKDSNTKKAGKTGPMKTLLVRVMTPDLRERLENLRKKPENIPQPISNTSRANLNKLLTDYTEMKKAILHVYWEEFQKDPVGLMSRVAQPASKKIDQNKLKPEMDEKGNLTTAGFACSQCGQPLFVYKLEQVSEKGKAYTNYFGRCNVAEHEKLILLSQLKPEKDSDEAVTYSLGKFGQRALDFYSIHVTKESTHPVKPLAQIAGNRYASVPVGKALSDACMGTIASFLSKYQDIIIEHQKVVKGNQKRLESLRELAGKENLEYPSVTLPPQPHTKEGVDAYNEVIARVRMWVNLNLWQKLKLSRDDAKPLLRLKGFPSFPLVERQANEVDWWDMVCNVKKLINEKKEDGKVFWQNLAGYKRQEALRPYLSSEEDRKKGKKFARYQLGDLLLHLEKKHGEDWGKVYDEAWERIDKKVEGLSKHIKLEEERRSEDAQSKAALTDWLRAKASFVIEGLKEADKDEFCRCELKLQKWYGDLRGKPFAIEAENSILDISGFSKQYNCAFIWQKDGVKKLNLYLIINYFKGGKLRFKKIKPEAFEANRFYTVINKKSGEIVPMEVNFNFDDPNLIILPLAFGKRQGREFIWNDLLSLETGSLKLANGRVIEKTLYNRRTRQDEPALFVALTFERREVLDSSNIKPMNLIGVDRGENIPAVIALTDPEGCPLSRFKDSLGNPTHILRIGESYKEKQRTIQAKKEVEQRRAGGYSRKYASKAKNLADDMVRNTARDLLYYAVTQDAMLIFENLSRGFGRQGKRTFMAERQYTRMEDWLTAKLAYEGLPSKTYLSKTLAQYTSKTCSNCGFTITSADYDRVLEKLKKTATGWMTTINGKELKVEGQITYYNRYKRQNVVKDLSVELDRLSEESVNNDISSWTKGRSGEALSLLKKRFSHRPVQEKFVCLNCGFETHADEQAALNIARSWLFLRSQEYKKYQTNKTTGNTDKRAFVETWQSFYRKKLKEVWKPAV

SEQ ID NO: 32260 - protein, 979 aa, synthetic construct
  REGION 1..979: note = engineered CasX variant
QEIKGRINKIRRRLVKDSNTKKAGKTGPMKTLLVRVMTPDLRERLENLRKKPENIPQPISNTSRANLNKLLTDYTEMKKAILHVYWEEFQKDPVGLMSRVAQPASKKIDQNKLKPEMDEKGNLTTAGFACSQCGQPLFVYKLEQVSEKGKAYTNYFGRCNVAEHEKLIKLSQLKPEKDSDEAVTYSLGKFGQRALDFYSIHVTKESTHPVKPLAQIAGNRYASGPVGKALSDACMGTIASFLSKYQDIIIEHQKVVKGNQKRLESLRELAGKENLEYPSVTLPPQPHTKEGVDAYNEVIARVRMWVNLNLWQKLKLSRDDAKPLLRLKGFPSFPLVERQANEVDWWDMVCNVKKLINEKKEDGKVFWQNLAGYKRQEALRPYLSSEEDRKKGKKFARYQLGDLLLHLEKKHGEDWGKVYDEAWERIDKKVEGLSKHIKLEEERRSEDAQSKAALTDWLRAKASFVIEGLKEADKDEFCRCELKLQKWYGDLRGKPFAIEAENSILDISGFSKQYNCAFIWQKDGVKKLNLYLIINYFKGGKLRFKKIKPEAFEANRFYTVINKKSGEIVPMEVNFNFDDPNLIILPLAFGKRQGREFIWNDLLSLETGSLKLANGRVIEKTLYNRRTRQDEPALFVALTFERREVLDSSNIKPMNLIGVDRGENIPAVIALTDPEGCPLSRFKDSLGNPTHILRIGESYKEKQRTIQAKKEVEQRRAGGYSRKYASKAKNLADDMVRNTARDLLYYAVTQDAMLIFENLSRGFGRQGKRTFMAERQYTRMEDWLTAKLAYEGLPSKTYLSKTLAQYTSKTCSNCGFTITSADYDRVLEKLKKTATGWMTTINGKELKVEGQITYYNRYKRQNVVKDLSVELDRLSEESVNNDISSWTKGRSGEALSLLKKRFSHRPVQEKFVCLNCGFETHADEQAALNIARSWLFLRSQEYKKYQTNKTTGNTDKRAFVETWQSFYRKKLKEVWKPAV

SEQ ID NO: 32261 - protein, 978 aa, synthetic construct
  REGION 1..978: note = engineered CasX variant
QEIKGRINKIRRRLVKDSNTKKAGKTGPMKTLLVRVMTPDLRERLENLRKKPENIPQPISNTSRANLNKLLTDYTEMKKAILHVYWEEFQKDPVGLMSRVAQPASKKIDQNKLKPEMDEKGNLTTAGFACSQCGQPLFVYKLEQVSEKGKAYTNYFGRCNVAEHEKLILLSQLKPEKDSDEAVTYSLGKFGQRALDFYSIHVTKESTHPVKPLAQIAGNRYASPVGKALSDACMGTIASFLSKYQDIIIEHQKVVKGNQKRLESLRELAGKENLEYPSVTLPPQPHTKEGVDAYNEVIARVRMWVNLNLWQKLKLSRDDAKPLLRLKGFPSFPLVERQANEVDWWDMVCNVKKLINEKKEDGKVFWQNLAGYKRQEALRPYLSSEEDRKKGKKFARYQLGDLLLHLEKKHGEDWGKVYDEAWERIDKKVEGLSKHIKLEEERRSEDAQSKAALTDWLRAKASFVIEGLKEADKDEFCRCELKLQKWYGDLRGKPFAIEAENSILDISGFSKQYNCAFIWQKDGVKKLNLYLIINYFKGGKLRFKKIKPEAFEANRFYTVINKKSGEIVPMEVNFNFDDPNLIILPLAFGKRQGREFIWNDLLSLETGSLKLANGRVIEKTLYNRRTRQDEPALFVALTFERREVLDSSNIKPMNLIGVDRGENIPAVIALTDPEGCPLSRFKDSLGNPTHILRIGESYKEKQRTIQAKKEVEQRRAGGYSRKYASKAKNLADDMVRNTARDLLYYAVTQDAMLIFENLSRGFGRQGKRTFMAERQYTRMEDWLTAKLAYEGLPSKTYLSKTLAQYTSKTCSNCGFTITSADYDRVLEKLKKTATGWMTTINGKELKVEGQITYYNRYKRQNVVKDLSVELDRLSEESVNNDISSWTKGRSGEALSLLKKRFSHRPVQEKFVCLNCGFETHADEQAALNIARSWLFLRSQEYKKYQTNKTTGNTDKRAFVETWQSFYRKKLKEVWKPAV

SEQ ID NO: 32262 - protein, 979 aa, synthetic construct
  REGION 1..979: note = engineered CasX variant
QEIKGRINKIRRRLVKDSNTKKAGKTGPMKTLLVRVMTPDLRERLENLRKKPENIPQPISNTSRANLNKLLTDYTEMKKAILHVYWEEFQKDPVGLMSRVAQPASKKIDQNKLKPEMDEKGNLTTAGFACSQCGQPLFVYKLEQVSEKGKAYTNYFGRCNVAEHEKLILLAQLKPEKDSDEAVTYSLGKFGQRALDFYSIHVTKESTHPVKPLAQIAGNRYASYPVGKALSDACMGTIASFLSKYQDIIIEHQKVVKGNQKRLESLRELAGKENLEYPSVTLPPQPHTKEGVDAYNEVIARVRMWVNLNLWQKLKLSRDDAKPLLRLKGFPSFPLVERQANEVDWWDMVCNVKKLINEKKEDGKVFWQNLAGYKRQEALRPYLSSEEDRKKGKKFARYQLGDLLLHLEKKHGEDWGKVYDEAWERIDKKVEGLSKHIKLEEERRSEDAQSKAALTDWLRAKASFVIEGLKEADKDEFCRCELKLQKWYGDLRGKPFAIEAENSILDISGFSKQYNCAFIWQKDGVKKLNLYLIINYFKGGKLRFKKIKPEAFEANRFYTVINKKSGEIVPMEVNFNFDDPNLIILPLAFGKRQGREFIWNDLLSLETGSLKLANGRVIEKTLYNRRTRQDEPALFVALTFERREVLDSSNIKPMNLIGVDRGENIPAVIALTDPEGCPLSRFKDSLGNPTHILRIGESYKEKQRTIQAKKEVEQRRAGGYSRKYASKAKNLADDMVRNTARDLLYYAVTQDAMLIFENLSRGFGRQGKRTFMAERQYTRMEDWLTAKLAYEGLPSKTYLSKTLAQYTSKTCSNCGFTITSADYDRVLEKLKKTATGWMTTINGKELKVEGQITYYNRYKRQNVVKDLSVELDRLSEESVNNDISSWTKGRSGEALSLLKKRFSHRPVQEKFVCLNCGFETHADEQAALNIARSWLFLRSQEYKKYQTNKTTGNTDKRAFVETWQSFYRKKLKEVWKPAV

SEQ ID NO: 32263 - protein, 979 aa, synthetic construct
  REGION 1..979: note = engineered CasX variant
QEIKGRINKIRRRLVKDSNTKKAGKTGPMKTLLVRVMTPDLRERLENLRKKPENIPQPISNTSRANLNKLLTDYTEMKKAILHVYWEEFQKDPVGLMSRVAQPASKKIDQNKLKPEMDEKGNLTTAGFACSQCGQPLFVYKLEQVSEKGKAYTNYFGRCNVAEHEKLILLAQLKPEKDSDEAVTYSLGKFGQRALDFYSIHVTKESTHPVKPLAQIAGNRYASHPVGKALSDACMGTIASFLSKYQDIIIEHQKVVKGNQKRLESLRELAGKENLEYPSVTLPPQPHTKEGVDAYNEVIARVRMWVNLNLWQKLKLSRDDAKPLLRLKGFPSFPLVERQANEVDWWDMVCNVKKLINEKKEDGKVFWQNLAGYKRQEALRPYLSSEEDRKKGKKFARYQLGDLLLHLEKKHGEDWGKVYDEAWERIDKKVEGLSKHIKLEEERRSEDAQSKAALTDWLRAKASFVIEGLKEADKDEFCRCELKLQKWYGDLRGKPFAIEAENSILDISGFSKQYNCAFIWQKDGVKKLNLYLIINYFKGGKLRFKKIKPEAFEANRFYTVINKKSGEIVPMEVNFNFDDPNLIILPLAFGKRQGREFIWNDLLSLETGSLKLANGRVIEKTLYNRRTRQDEPALFVALTFERREVLDSSNIKPMNLIGVDRGENIPAVIALTDPEGCPLSRFKDSLGNPTHILRIGESYKEKQRTIQAKKEVEQRRAGGYSRKYASKAKNLADDMVRNTARDLLYYAVTQDAMLIFENLSRGFGRQGKRTFMAERQYTRMEDWLTAKLAYEGLPSKTYLSKTLAQYTSKTCSNCGFTITSADYDRVLEKLKKTATGWMTTINGKELKVEGQITYYNRYKRQNVVKDLSVELDRLSEESVNNDISSWTKGRSGEALSLLKKRFSHRPVQEKFVCLNCGFETHADEQAALNIARSWLFLRSQEYKKYQTNKTTGNTDKRAFVETWQSFYRKKLKEVWKPAV

SEQ ID NO: 32264 - protein, 979 aa, synthetic construct
  REGION 1..979: note = engineered CasX variant
QEIKGRINKIRRRLVKDSNTKKAGKTGPMKTLLVRVMTPDLRERLENLRKKPENIPQPISNTSRANLNKLLTDYTEMKKAILHVYWEEFQKDPVGLMSRVAQPASKKIDQNKLKPEMDEKGNLTTAGFACSQCGQPLFVYKLEQVSEKGKAYTNYFGRCNVAEHEKLILLAQLKPEKDSDEAVTYSLGKFGQRALDFYSIHVTKESTHPVKPLAQIAGNRYASTPVGKALSDACMGTIASFLSKYQDIIIEHQKVVKGNQKRLESLRELAGKENLEYPSVTLPPQPHTKEGVDAYNEVIARVRMWVNLNLWQKLKLSRDDAKPLLRLKGFPSFPLVERQANEVDWWDMVCNVKKLINEKKEDGKVFWQNLAGYKRQEALRPYLSSEEDRKKGKKFARYQLGDLLLHLEKKHGEDWGKVYDEAWERIDKKVEGLSKHIKLEEERRSEDAQSKAALTDWLRAKASFVIEGLKEADKDEFCRCELKLQKWYGDLRGKPFAIEAENSILDISGFSKQYNCAFIWQKDGVKKLNLYLIINYFKGGKLRFKKIKPEAFEANRFYTVINKKSGEIVPMEVNFNFDDPNLIILPLAFGKRQGREFIWNDLLSLETGSLKLANGRVIEKTLYNRRTRQDEPALFVALTFERREVLDSSNIKPMNLIGVDRGENIPAVIALTDPEGCPLSRFKDSLGNPTHILRIGESYKEKQRTIQAKKEVEQRRAGGYSRKYASKAKNLADDMVRNTARDLLYYAVTQDAMLIFENLSRGFGRQGKRTFMAERQYTRMEDWLTAKLAYEGLPSKTYLSKTLAQYTSKTCSNCGFTITSADYDRVLEKLKKTATGWMTTINGKELKVEGQITYYNRYKRQNVVKDLSVELDRLSEESVNNDISSWTKGRSGEALSLLKKRFSHRPVQEKFVCLNCGFETHADEQAALNIARSWLFLRSQEYKKYQTNKTTGNTDKRAFVETWQSFYRKKLKEVWKPAV

SEQ ID NO: 32265 - protein, 979 aa, synthetic construct
  REGION 1..979: note = engineered CasX variant
QEIKGRINKIRRRLVKDSNTKKAGKTGPMKTLLVRVMTPDLRERLENLRKKPENIPQPISNTSRANLNKLLTDYTEMKKAILHVYWEEFQKDPVGLMSRVAQPASKKIDQNKLKPEMDEKGNLTTAGFACSQCGQPLFVYKLEQVSEKGKAYTNYFGRCNVAEHEKLILLAQLKPEKDSDEAVTYSLGKFGQRALDFYSIHVTKESTHPVKPLAQIAGNRYASAPVGKALSDACMGTIASFLSKYQDIIIEHQKVVKGNQKRLESLRELAGKENLEYPSVTLPPQPHTKEGVDAYNEVIARVRMWVNLNLWQKLKLSRDDAKPLLRLKGFPSFPLVERQANEVDWWDMVCNVKKLINEKKEDGKVFWQNLAGYKRQEALRPYLSSEEDRKKGKKFARYQLGDLLLHLEKKHGEDWGKVYDEAWERIDKKVEGLSKHIKLEEERRSEDAQSKAALTDWLRAKASFVIEGLKEADKDEFCRCELKLQKWYGDLRGKPFAIEAENSILDISGFSKQYNCAFIWQKDGVKKLNLYLIINYFKGGKLRFKKIKPEAFEANRFYTVINKKSGEIVPMEVNFNFDDPNLIILPLAFGKRQGREFIWNDLLSLETGSLKLANGRVIEKTLYNRRTRQDEPALFVALTFERREVLDSSNIKPMNLIGVDRGENIPAVIALTDPEGCPLSRFKDSLGNPTHILRIGESYKEKQRTIQAKKEVEQRRAGGYSRKYASKAKNLADDMVRNTARDLLYYAVTQDAMLIFENLSRGFGRQGKRTFMAERQYTRMEDWLTAKLAYEGLPSKTYLSKTLAQYTSKTCSNCGFTITSADYDRVLEKLKKTATGWMTTINGKELKVEGQITYYNRYKRQNVVKDLSVELDRLSEESVNNDISSWTKGRSGEALSLLKKRFSHRPVQEKFVCLNCGFETHADEQAALNIARSWLFLRSQEYKKYQTNKTTGNTDKRAFVETWQSFYRKKLKEVWKPAV

SEQ ID NO: 32266 - protein, 979 aa, synthetic construct
  REGION 1..979: note = engineered CasX variant
QEIKGRINKIRRRLVKDSNTKKAGKTGPMKTLLVRVMTPDLRERLENLRKKPENIPQPISNTSRANLNKLLTDYTEMKKAILHVYWEEFQKDPVGLMSRVAQPASKKIDQNKLKPEMDEKGNLTTAGFACSQCGQPLFVYKLEQVSEKGKAYTNYFGRCNVAEHEKLILLAQLKPEKDSDEAVTYSLGKFGQRALDFYSIHVTKESTHPVKPLAQIAGNRYASVPVGKALSDACMGTIASFLSKYQDIIIEHQKVVKGNQKRLESLRELAGKENLEYPSVTLPPQPHTKEGVDAYNEVIARVRMWVNLNLWQKLKLSRDDAKPLLRLKGFPSFPLVERQANEVDWWDMVCNVKKLINEKKEDGKVFWQNLAGYKRQEALRPYLSSEEDRKKGKKFARYQLGDLLLHLEKKHGEDWGKVYDEAWERIDKKVEGLSKHIKLEEERRSEDAQSKAALTDWLRAKASFVIEGLKEADKDEFCRCELKLQKWYGDLRGKPFAIEAENSILDISGFSKQYNCAFIWQKDGVKKLNLYLIINYFKGGKLRFKKIKPEAFEANRFYTVINKKSGEIVPMEVNFNFDDPNLIILPLAFGKRQGREFIWNDLLSLETGSLKLANGRVIEKTLYNRRTRQDEPALFVALTFERREVLDSSNIKPMNLIGVDRGENIPAVIALTDPEGCPLSRFKDSLGNPTHILRIGESYKEKQRTIQAKKEVEQRRAGGYSRKYASKAKNLADDMVRNTARDLLYYAVTQDAMLIFENLSRGFGRQGKRTFMAERQYTRMEDWLTAKLAYEGLPSKTYLSKTLAQYTSKTCSNCGFTITSADYDRVLEKLKKTATGWMTTINGKELKVEGQITYYNRYKRQNVVKDLSVELDRLSEESVNNDISSWTKGRSGEALSLLKKRFSHRPVQEKFVCLNCGFETHADEQAALNIARSWLFLRSQEYKKYQTNKTTGNTDKRAFVETWQSFYRKKLKEVWKPAV

SEQ ID NO: 32267 - protein, 979 aa, synthetic construct
  REGION 1..979: note = engineered CasX variant
QEIKGRINKIRRRLVKDSNTKKAGKTGPMKTLLVRVMTPDLRERLENLRKKPENIPQPISNTSRANLNKLLTDYTEMKKAILHVYWEEFQKDPVGLMSRVAQPASKKIDQNKLKPEMDEKGNLTTAGFACSQCGQPLFVYKLEQVSEKGKAYTNYFGRCNVAEHEKLILLAQLKPEKDSDEAVTYSLGKFGQRALDFYSIHVTKESTHPVKPLAQIAGNRYASYPVGKALSDACMGTIASFLSKYQDIIIEHQKVVKGNQKRLESLRELAGKENLEYPSVTLPPQPHTSEGVDAYNEVIARVRMWVNLNLWQKLKLSRDDAKPLLRLKGFPSFPLVERQANEVDWWDMVCNVKKLINEKKEDGKVFWQNLAGYKRQEALRPYLSSEEDRKKGKKFARYQLGDLLLHLEKKHGEDWGKVYDEAWERIDKKVEGLSKHIKLEEERRSEDAQSKAALTDWLRAKASFVIEGLKEADKDEFCRCELKLQKWYGDLRGKPFAIEAENSILDISGFSKQYNCAFIWQKDGVKKLNLYLIINYFKGGKLRFKKIKPEAFEANRFYTVINKKSGEIVPMEVNFNFDDPNLIILPLAFGKRQGREFIWNDLLSLETGSLKLANGRVIEKTLYNRRTRQDEPALFVALTFERREVLDSSNIKPMNLIGVDRGENIPAVIALTDPEGCPLSRFKDSLGNPTHILRIGESYKEKQRTIQAKKEVEQRRAGGYSRKYASKAKNLADDMVRNTARDLLYYAVTQDAMLIFENLSRGFGRQGKRTFMAERQYTRMEDWLTAKLAYEGLPSKTYLSKTLAQYTSKTCSNCGFTITSADYDRVLEKLKKTATGWMTTINGKELKVEGQITYYNRYKRQNVVKDLSVELDRLSEESVNNDISSWTKGRSGEALSLLKKRFSHRPVQEKFVCLNCGFETHADEQAALNIARSWLFLRSQEYKKYQTNKTTGNTDKRAFVETWQSFYRKKLKEVWKPAV

SEQ ID NO: 32268 - protein, 979 aa, synthetic construct
  REGION 1..979: note = engineered CasX variant
QEIKGRINKIRRRLVKDSNTKKAGKTGPMKTLLVRVMTPDLRERLENLRKKPENIPQPISNTSRANLNKLLTDYTEMKKAILHVYWEEFQKDPVGLMSRVAQPASKKIDQNKLKPEMDEKGNLTTAGFACSQCGQPLFVYKLEQVSEKGKAYTNYFGRCNVAEHEKLILLAQLKPEKDSDEAVTYSLGKFGQRALDFYSIHVTKESTHPVKPLAQIAGNRYASHPVGKALSDACMGTIASFLSKYQDIIIEHQKVVKGNQKRLESLRELAGKENLEYPSVTLPPQPHTSEGVDAYNEVIARVRMWVNLNLWQKLKLSRDDAKPLLRLKGFPSFPLVERQANEVDWWDMVCNVKKLINEKKEDGKVFWQNLAGYKRQEALRPYLSSEEDRKKGKKFARYQLGDLLLHLEKKHGEDWGKVYDEAWERIDKKVEGLSKHIKLEEERRSEDAQSKAALTDWLRAKASFVIEGLKEADKDEFCRCELKLQKWYGDLRGKPFAIEAENSILDISGFSKQYNCAFIWQKDGVKKLNLYLIINYFKGGKLRFKKIKPEAFEANRFYTVINKKSGEIVPMEVNFNFDDPNLIILPLAFGKRQGREFIWNDLLSLETGSLKLANGRVIEKTLYNRRTRQDEPALFVALTFERREVLDSSNIKPMNLIGVDRGENIPAVIALTDPEGCPLSRFKDSLGNPTHILRIGESYKEKQRTIQAKKEVEQRRAGGYSRKYASKAKNLADDMVRNTARDLLYYAVTQDAMLIFENLSRGFGRQGKRTFMAERQYTRMEDWLTAKLAYEGLPSKTYLSKTLAQYTSKTCSNCGFTITSADYDRVLEKLKKTATGWMTTINGKELKVEGQITYYNRYKRQNVVKDLSVELDRLSEESVNNDISSWTKGRSGEALSLLKKRFSHRPVQEKFVCLNCGFETHADEQAALNIARSWLFLRSQEYKKYQTNKTTGNTDKRAFVETWQSFYRKKLKEVWKPAV

SEQ ID NO: 32269 - protein, 979 aa, synthetic construct
  REGION 1..979: note = engineered CasX variant
QEIKGRINKIRRRLVKDSNTKKAGKTGPMKTLLVRVMTPDLRERLENLRKKPENIPQPISNTSRANLNKLLTDYTEMKKAILHVYWEEFQKDPVGLMSRVAQPASKKIDQNKLKPEMDEKGNLTTAGFACSQCGQPLFVYKLEQVSEKGKAYTNYFGRCNVAEHEKLILLAQLKPEKDSDEAVTYSLGKFGQRALDFYSIHVTKESTHPVKPLAQIAGNRYASSPVGKALSDACMGTIASFLSKYQDIIIEHQKVVKGNQKRLESLRELAGKENLEYPSVTLPPQPHTSEGVDAYNEVIARVRMWVNLNLWQKLKLSRDDAKPLLRLKGFPSFPLVERQANEVDWWDMVCNVKKLINEKKEDGKVFWQNLAGYKRQEALRPYLSSEEDRKKGKKFARYQLGDLLLHLEKKHGEDWGKVYDEAWERIDKKVEGLSKHIKLEEERRSEDAQSKAALTDWLRAKASFVIEGLKEADKDEFCRCELKLQKWYGDLRGKPFAIEAENSILDISGFSKQYNCAFIWQKDGVKKLNLYLIINYFKGGKLRFKKIKPEAFEANRFYTVINKKSGEIVPMEVNFNFDDPNLIILPLAFGKRQGREFIWNDLLSLETGSLKLANGRVIEKTLYNRRTRQDEPALFVALTFERREVLDSSNIKPMNLIGVDRGENIPAVIALTDPEGCPLSRFKDSLGNPTHILRIGESYKEKQRTIQAKKEVEQRRAGGYSRKYASKAKNLADDMVRNTARDLLYYAVTQDAMLIFENLSRGFGRQGKRTFMAERQYTRMEDWLTAKLAYEGLPSKTYLSKTLAQYTSKTCSNCGFTITSADYDRVLEKLKKTATGWMTTINGKELKVEGQITYYNRYKRQNVVKDLSVELDRLSEESVNNDISSWTKGRSGEALSLLKKRFSHRPVQEKFVCLNCGFETHADEQAALNIARSWLFLRSQEYKKYQTNKTTGNTDKRAFVETWQSFYRKKLKEVWKPAV

SEQ ID NO: 32270 - protein, 979 aa, synthetic construct
  REGION 1..979: note = engineered CasX variant
QEIKGRINKIRRRLVKDSNTKKAGKTGPMKTLLVRVMTPDLRERLENLRKKPENIPQPISNTSRANLNKLLTDYTEMKKAILHVYWEEFQKDPVGLMSRVAQPASKKIDQNKLKPEMDEKGNLTTAGFACSQCGQPLFVYKLEQVSEKGKAYTNYFGRCNVAEHEKLILLAQLKPEKDSDEAVTYSLGKFGQRALDFYSIHVTKESTHPVKPLAQIAGNRYASTPVGKALSDACMGTIASFLSKYQDIIIEHQKVVKGNQKRLESLRELAGKENLEYPSVTLPPQPHTSEGVDAYNEVIARVRMWVNLNLWQKLKLSRDDAKPLLRLKGFPSFPLVERQANEVDWWDMVCNVKKLINEKKEDGKVFWQNLAGYKRQEALRPYLSSEEDRKKGKKFARYQLGDLLLHLEKKHGEDWGKVYDEAWERIDKKVEGLSKHIKLEEERRSEDAQSKAALTDWLRAKASFVIEGLKEADKDEFCRCELKLQKWYGDLRGKPFAIEAENSILDISGFSKQYNCAFIWQKDGVKKLNLYLIINYFKGGKLRFKKIKPEAFEANRFYTVINKKSGEIVPMEVNFNFDDPNLIILPLAFGKRQGREFIWNDLLSLETGSLKLANGRVIEKTLYNRRTRQDEPALFVALTFERREVLDSSNIKPMNLIGVDRGENIPAVIALTDPEGCPLSRFKDSLGNPTHILRIGESYKEKQRTIQAKKEVEQRRAGGYSRKYASKAKNLADDMVRNTARDLLYYAVTQDAMLIFENLSRGFGRQGKRTFMAERQYTRMEDWLTAKLAYEGLPSKTYLSKTLAQYTSKTCSNCGFTITSADYDRVLEKLKKTATGWMTTINGKELKVEGQITYYNRYKRQNVVKDLSVELDRLSEESVNNDISSWTKGRSGEALSLLKKRFSHRPVQEKFVCLNCGFETHADEQAALNIARSWLFLRSQEYKKYQTNKTTGNTDKRAFVETWQSFYRKKLKEVWKPAV

SEQ ID NO: 32271 - protein, 979 aa, synthetic construct
  REGION 1..979: note = engineered CasX variant
QEIKGRINKIRRRLVKDSNTKKAGKTGPMKTLLVRVMTPDLRERLENLRKKPENIPQPISNTSRANLNKLLTDYTEMKKAILHVYWEEFQKDPVGLMSRVAQPASKKIDQNKLKPEMDEKGNLTTAGFACSQCGQPLFVYKLEQVSEKGKAYTNYFGRCNVAEHEKLILLAQLKPEKDSDEAVTYSLGKFGQRALDFYSIHVTKESTHPVKPLAQIAGNRYASAPVGKALSDACMGTIASFLSKYQDIIIEHQKVVKGNQKRLESLRELAGKENLEYPSVTLPPQPHTSEGVDAYNEVIARVRMWVNLNLWQKLKLSRDDAKPLLRLKGFPSFPLVERQANEVDWWDMVCNVKKLINEKKEDGKVFWQNLAGYKRQEALRPYLSSEEDRKKGKKFARYQLGDLLLHLEKKHGEDWGKVYDEAWERIDKKVEGLSKHIKLEEERRSEDAQSKAALTDWLRAKASFVIEGLKEADKDEFCRCELKLQKWYGDLRGKPFAIEAENSILDISGFSKQYNCAFIWQKDGVKKLNLYLIINYFKGGKLRFKKIKPEAFEANRFYTVINKKSGEIVPMEVNFNFDDPNLIILPLAFGKRQGREFIWNDLLSLETGSLKLANGRVIEKTLYNRRTRQDEPALFVALTFERREVLDSSNIKPMNLIGVDRGENIPAVIALTDPEGCPLSRFKDSLGNPTHILRIGESYKEKQRTIQAKKEVEQRRAGGYSRKYASKAKNLADDMVRNTARDLLYYAVTQDAMLIFENLSRGFGRQGKRTFMAERQYTRMEDWLTAKLAYEGLPSKTYLSKTLAQYTSKTCSNCGFTITSADYDRVLEKLKKTATGWMTTINGKELKVEGQITYYNRYKRQNVVKDLSVELDRLSEESVNNDISSWTKGRSGEALSLLKKRFSHRPVQEKFVCLNCGFETHADEQAALNIARSWLFLRSQEYKKYQTNKTTGNTDKRAFVETWQSFYRKKLKEVWKPAV

SEQ ID NO: 32272 - protein, 979 aa, synthetic construct
  REGION 1..979: note = engineered CasX variant
QEIKGRINKIRRRLVKDSNTKKAGKTGPMKTLLVRVMTPDLRERLENLRKKPENIPQPISNTSRANLNKLLTDYTEMKKAILHVYWEEFQKDPVGLMSRVAQPASKKIDQNKLKPEMDEKGNLTTAGFACSQCGQPLFVYKLEQVSEKGKAYTNYFGRCNVAEHEKLILLAQLKPEKDSDEAVTYSLGKFGQRALDFYSIHVTKESTHPVKPLAQIAGNRYASVPVGKALSDACMGTIASFLSKYQDIIIEHQKVVKGNQKRLESLRELAGKENLEYPSVTLPPQPHTSEGVDAYNEVIARVRMWVNLNLWQKLKLSRDDAKPLLRLKGFPSFPLVERQANEVDWWDMVCNVKKLINEKKEDGKVFWQNLAGYKRQEALRPYLSSEEDRKKGKKFARYQLGDLLLHLEKKHGEDWGKVYDEAWERIDKKVEGLSKHIKLEEERRSEDAQSKAALTDWLRAKASFVIEGLKEADKDEFCRCELKLQKWYGDLRGKPFAIEAENSILDISGFSKQYNCAFIWQKDGVKKLNLYLIINYFKGGKLRFKKIKPEAFEANRFYTVINKKSGEIVPMEVNFNFDDPNLIILPLAFGKRQGREFIWNDLLSLETGSLKLANGRVIEKTLYNRRTRQDEPALFVALTFERREVLDSSNIKPMNLIGVDRGENIPAVIALTDPEGCPLSRFKDSLGNPTHILRIGESYKEKQRTIQAKKEVEQRRAGGYSRKYASKAKNLADDMVRNTARDLLYYAVTQDAMLIFENLSRGFGRQGKRTFMAERQYTRMEDWLTAKLAYEGLPSKTYLSKTLAQYTSKTCSNCGFTITSADYDRVLEKLKKTATGWMTTINGKELKVEGQITYYNRYKRQNVVKDLSVELDRLSEESVNNDISSWTKGRSGEALSLLKKRFSHRPVQEKFVCLNCGFETHADEQAALNIARSWLFLRSQEYKKYQTNKTTGNTDKRAFVETWQSFYRKKLKEVWKPAV

SEQ ID NO: 32273 - protein, 979 aa, synthetic construct
  REGION 1..979: note = engineered CasX variant
QEIKGRINKIRRRLVKDSNTKKAGKTGPMKTLLVRVMTPDLRERLENLRKKPENIPQPISNTSRANLNKLLTDYTEMKKAILHVYWEEFQKDPVGLMSRVAQPASKKIDQNKLKPEMDEKGNLTTAGFACSQCGQPLFVYKLEQVSEKGKAYTNYFGRCNVAEHEKLIKLAQLKPEKDSDEAVTYSLGKFGQRALDFYSIHVTKESTHPVKPLAQIAGNRYASGPVGKALSDACMGTIASFLSKYQDIIIEHQKVVKGNQKRLESLRELAGKENLEYPSVTLPPQPHTSEGVDAYNEVIARVRMWVNLNLWQKLKLSRDDAKPLLRLKGFPSFPLVERQANEVDWWDMVCNVKKLINEKKEDGKVFWQNLAGYKRQEALRPYLSSEEDRKKGKKFARYQLGDLLLHLEKKHGEDWGKVYDEAWERIDKKVEGLSKHIKLEEERRSEDAQSKAALTDWLRAKASFVIEGLKEADKDEFCRCELKLQKWYGDLRGKPFAIEAENSILDISGFSKQYNCAFIWQKDGVKKLNLYLIINYFKGGKLRFKKIKPEAFEANRFYTVINKKSGEIVPMEVNFNFDDPNLIILPLAFGKRQGREFIWNDLLSLETGSLKLANGRVIEKTLYNRRTRQDEPALFVALTFERREVLDSSNIKPMNLIGVDRGENIPAVIALTDPEGCPLSRFKDSLGNPTHILRIGESYKEKQRTIQAKKEVEQRRAGGYSRKYASKAKNLADDMVRNTARDLLYYAVTQDAMLIFENLSRGFGRQGKRTFMAERQYTRMEDWLTAKLAYEGLPSKTYLSKTLAQYTSKTCSNCGFTITSADYDRVLEKLKKTATGWMTTINGKELKVEGQITYYNRYKRQNVVKDLSVELDRLSEESVNNDISSWTKGRSGEALSLLKKRFSHRPVQEKFVCLNCGFETHADEQAALNIARSWLFLRSQEYKKYQTNKTTGNTDKRAFVETWQSFYRKKLKEVWKPAV

SEQ ID NO: 32274 - protein, 978 aa, synthetic construct
  REGION 1..978: note = engineered CasX variant
QEIKGRINKIRRRLVKDSNTKKAGKTGPMKTLLVRVMTPDLRERLENLRKKPENIPQPISNTSRANLNKLLTDYTEMKKAILHVYWEEFQKDPVGLMSRVAQPASKKIDQNKLKPEMDEKGNLTTAGFACSQCGQPLFVYKLEQVSEKGKAYTNYFGRCNVAEHEKLILLAQLKPEKDSDEAVTYSLGKFGQRALDFYSIHVTKESTHPVKPLAQIAGNRYASPVGKALSDACMGTIASFLSKYQDIIIEHQKVVKGNQKRLESLRELAGKENLEYPSVTLPPQPHTSEGVDAYNEVIARVRMWVNLNLWQKLKLSRDDAKPLLRLKGFPSFPLVERQANEVDWWDMVCNVKKLINEKKEDGKVFWQNLAGYKRQEALRPYLSSEEDRKKGKKFARYQLGDLLLHLEKKHGEDWGKVYDEAWERIDKKVEGLSKHIKLEEERRSEDAQSKAALTDWLRAKASFVIEGLKEADKDEFCRCELKLQKWYGDLRGKPFAIEAENSILDISGFSKQYNCAFIWQKDGVKKLNLYLIINYFKGGKLRFKKIKPEAFEANRFYTVINKKSGEIVPMEVNFNFDDPNLIILPLAFGKRQGREFIWNDLLSLETGSLKLANGRVIEKTLYNRRTRQDEPALFVALTFERREVLDSSNIKPMNLIGVDRGENIPAVIALTDPEGCPLSRFKDSLGNPTHILRIGESYKEKQRTIQAKKEVEQRRAGGYSRKYASKAKNLADDMVRNTARDLLYYAVTQDAMLIFENLSRGFGRQGKRTFMAERQYTRMEDWLTAKLAYEGLPSKTYLSKTLAQYTSKTCSNCGFTITSADYDRVLEKLKKTATGWMTTINGKELKVEGQITYYNRYKRQNVVKDLSVELDRLSEESVNNDISSWTKGRSGEALSLLKKRFSHRPVQEKFVCLNCGFETHADEQAALNIARSWLFLRSQEYKKYQTNKTTGNTDKRAFVETWQSFYRKKLKEVWKPAV

SEQ ID NO: 32275 - protein, 979 aa, synthetic construct
  REGION 1..979: note = engineered CasX variant
QEIKGRINKIRRRLVKDSNTKKAGKTGPMKTLLVRVMTPDLRERLENLRKKPENIPQPISNTSRANLNKLLTDYTEMKKAILHVYWEEFQKDPVGLMSRVAQPASKKIDQNKLKPEMDEKGNLTTAGFACSQCGQPLFVYKLEQVSEKGKAYTNYFGRCNVAEHEKLILLAQLKPEKDSDEAVTYSLGKFGQRALDFYSIHVTKESTHPVKPLAQIAGNRYASYPVGKALSDACMGTIASFLSKYQDIIIEHQKVVKGNQKRLESLRELAGKENLEYPSVTLPPQPHTKEGLDAYNEVIARVRMWVNLNLWQKLKLSRDDAKPLLRLKGFPSFPLVERQANEVDWWDMVCNVKKLINEKKEDGKVFWQNLAGYKRQEALRPYLSSEEDRKKGKKFARYQLGDLLLHLEKKHGEDWGKVYDEAWERIDKKVEGLSKHIKLEEERRSEDAQSKAALTDWLRAKASFVIEGLKEADKDEFCRCELKLQKWYGDLRGKPFAIEAENSILDISGFSKQYNCAFIWQKDGVKKLNLYLIINYFKGGKLRFKKIKPEAFEANRFYTVINKKSGEIVPMEVNFNFDDPNLIILPLAFGKRQGREFIWNDLLSLETGSLKLANGRVIEKTLYNRRTRQDEPALFVALTFERREVLDSSNIKPMNLIGVDRGENIPAVIALTDPEGCPLSRFKDSLGNPTHILRIGESYKEKQRTIQAKKEVEQRRAGGYSRKYASKAKNLADDMVRNTARDLLYYAVTQDAMLIFENLSRGFGRQGKRTFMAERQYTRMEDWLTAKLAYEGLPSKTYLSKTLAQYTSKTCSNCGFTITSADYDRVLEKLKKTATGWMTTINGKELKVEGQITYYNRYKRQNVVKDLSVELDRLSEESVNNDISSWTKGRSGEALSLLKKRFSHRPVQEKFVCLNCGFETHADEQAALNIARSWLFLRSQEYKKYQTNKTTGNTDKRAFVETWQSFYRKKLKEVWKPAV

SEQ ID NO: 32276 - protein, 979 aa, synthetic construct
  REGION 1..979: note = engineered CasX variant
QEIKGRINKIRRRLVKDSNTKKAGKTGPMKTLLVRVMTPDLRERLENLRKKPENIPQPISNTSRANLNKLLTDYTEMKKAILHVYWEEFQKDPVGLMSRVAQPASKKIDQNKLKPEMDEKGNLTTAGFACSQCGQPLFVYKLEQVSEKGKAYTNYFGRCNVAEHEKLILLAQLKPEKDSDEAVTYSLGKFGQRALDFYSIHVTKESTHPVKPLAQIAGNRYASHPVGKALSDACMGTIASFLSKYQDIIIEHQKVVKGNQKRLESLRELAGKENLEYPSVTLPPQPHTKEGLDAYNEVIARVRMWVNLNLWQKLKLSRDDAKPLLRLKGFPSFPLVERQANEVDWWDMVCNVKKLINEKKEDGKVFWQNLAGYKRQEALRPYLSSEEDRKKGKKFARYQLGDLLLHLEKKHGEDWGKVYDEAWERIDKKVEGLSKHIKLEEERRSEDAQSKAALTDWLRAKASFVIEGLKEADKDEFCRCELKLQKWYGDLRGKPFAIEAENSILDISGFSKQYNCAFIWQKDGVKKLNLYLIINYFKGGKLRFKKIKPEAFEANRFYTVINKKSGEIVPMEVNFNFDDPNLIILPLAFGKRQGREFIWNDLLSLETGSLKLANGRVIEKTLYNRRTRQDEPALFVALTFERREVLDSSNIKPMNLIGVDRGENIPAVIALTDPEGCPLSRFKDSLGNPTHILRIGESYKEKQRTIQAKKEVEQRRAGGYSRKYASKAKNLADDMVRNTARDLLYYAVTQDAMLIFENLSRGFGRQGKRTFMAERQYTRMEDWLTAKLAYEGLPSKTYLSKTLAQYTSKTCSNCGFTITSADYDRVLEKLKKTATGWMTTINGKELKVEGQITYYNRYKRQNVVKDLSVELDRLSEESVNNDISSWTKGRSGEALSLLKKRFSHRPVQEKFVCLNCGFETHADEQAALNIARSWLFLRSQEYKKYQTNKTTGNTDKRAFVETWQSFYRKKLKEVWKPAV

SEQ ID NO: 32277 - protein, 979 aa, synthetic construct
  REGION 1..979: note = engineered CasX variant
QEIKGRINKIRRRLVKDSNTKKAGKTGPMKTLLVRVMTPDLRERLENLRKKPENIPQPISNTSRANLNKLLTDYTEMKKAILHVYWEEFQKDPVGLMSRVAQPASKKIDQNKLKPEMDEKGNLTTAGFACSQCGQPLFVYKLEQVSEKGKAYTNYFGRCNVAEHEKLILLAQLKPEKDSDEAVTYSLGKFGQRALDFYSIHVTKESTHPVKPLAQIAGNRYASSPVGKALSDACMGTIASFLSKYQDIIIEHQKVVKGNQKRLESLRELAGKENLEYPSVTLPPQPHTKEGLDAYNEVIARVRMWVNLNLWQKLKLSRDDAKPLLRLKGFPSFPLVERQANEVDWWDMVCNVKKLINEKKEDGKVFWQNLAGYKRQEALRPYLSSEEDRKKGKKFARYQLGDLLLHLEKKHGEDWGKVYDEAWERIDKKVEGLSKHIKLEEERRSEDAQSKAALTDWLRAKASFVIEGLKEADKDEFCRCELKLQKWYGDLRGKPFAIEAENSILDISGFSKQYNCAFIWQKDGVKKLNLYLIINYFKGGKLRFKKIKPEAFEANRFYTVINKKSGEIVPMEVNFNFDDPNLIILPLAFGKRQGREFIWNDLLSLETGSLKLANGRVIEKTLYNRRTRQDEPALFVALTFERREVLDSSNIKPMNLIGVDRGENIPAVIALTDPEGCPLSRFKDSLGNPTHILRIGESYKEKQRTIQAKKEVEQRRAGGYSRKYASKAKNLADDMVRNTARDLLYYAVTQDAMLIFENLSRGFGRQGKRTFMAERQYTRMEDWLTAKLAYEGLPSKTYLSKTLAQYTSKTCSNCGFTITSADYDRVLEKLKKTATGWMTTINGKELKVEGQITYYNRYKRQNVVKDLSVELDRLSEESVNNDISSWTKGRSGEALSLLKKRFSHRPVQEKFVCLNCGFETHADEQAALNIARSWLFLRSQEYKKYQTNKTTGNTDKRAFVETWQSFYRKKLKEVWKPAV

SEQ ID NO: 32278 - protein, 979 aa, synthetic construct
  REGION 1..979: note = engineered CasX variant
QEIKGRINKIRRRLVKDSNTKKAGKTGPMKTLLVRVMTPDLRERLENLRKKPENIPQPISNTSRANLNKLLTDYTEMKKAILHVYWEEFQKDPVGLMSRVAQPASKKIDQNKLKPEMDEKGNLTTAGFACSQCGQPLFVYKLEQVSEKGKAYTNYFGRCNVAEHEKLILLAQLKPEKDSDEAVTYSLGKFGQRALDFYSIHVTKESTHPVKPLAQIAGNRYASTPVGKALSDACMGTIASFLSKYQDIIIEHQKVVKGNQKRLESLRELAGKENLEYPSVTLPPQPHTKEGLDAYNEVIARVRMWVNLNLWQKLKLSRDDAKPLLRLKGFPSFPLVERQANEVDWWDMVCNVKKLINEKKEDGKVFWQNLAGYKRQEALRPYLSSEEDRKKGKKFARYQLGDLLLHLEKKHGEDWGKVYDEAWERIDKKVEGLSKHIKLEEERRSEDAQSKAALTDWLRAKASFVIEGLKEADKDEFCRCELKLQKWYGDLRGKPFAIEAENSILDISGFSKQYNCAFIWQKDGVKKLNLYLIINYFKGGKLRFKKIKPEAFEANRFYTVINKKSGEIVPMEVNFNFDDPNLIILPLAFGKRQGREFIWNDLLSLETGSLKLANGRVIEKTLYNRRTRQDEPALFVALTFERREVLDSSNIKPMNLIGVDRGENIPAVIALTDPEGCPLSRFKDSLGNPTHILRIGESYKEKQRTIQAKKEVEQRRAGGYSRKYASKAKNLADDMVRNTARDLLYYAVTQDAMLIFENLSRGFGRQGKRTFMAERQYTRMEDWLTAKLAYEGLPSKTYLSKTLAQYTSKTCSNCGFTITSADYDRVLEKLKKTATGWMTTINGKELKVEGQITYYNRYKRQNVVKDLSVELDRLSEESVNNDISSWTKGRSGEALSLLKKRFSHRPVQEKFVCLNCGFETHADEQAALNIARSWLFLRSQEYKKYQTNKTTGNTDKRAFVETWQSFYRKKLKEVWKPAV

SEQ ID NO: 32279 - protein, 979 aa, synthetic construct
  REGION 1..979: note = engineered CasX variant
QEIKGRINKIRRRLVKDSNTKKAGKTGPMKTLLVRVMTPDLRERLENLRKKPENIPQPISNTSRANLNKLLTDYTEMKKAILHVYWEEFQKDPVGLMSRVAQPASKKIDQNKLKPEMDEKGNLTTAGFACSQCGQPLFVYKLEQVSEKGKAYTNYFGRCNVAEHEKLILLAQLKPEKDSDEAVTYSLGKFGQRALDFYSIHVTKESTHPVKPLAQIAGNRYASAPVGKALSDACMGTIASFLSKYQDIIIEHQKVVKGNQKRLESLRELAGKENLEYPSVTLPPQPHTKEGLDAYNEVIARVRMWVNLNLWQKLKLSRDDAKPLLRLKGFPSFPLVERQANEVDWWDMVCNVKKLINEKKEDGKVFWQNLAGYKRQEALRPYLSSEEDRKKGKKFARYQLGDLLLHLEKKHGEDWGKVYDEAWERIDKKVEGLSKHIKLEEERRSEDAQSKAALTDWLRAKASFVIEGLKEADKDEFCRCELKLQKWYGDLRGKPFAIEAENSILDISGFSKQYNCAFIWQKDGVKKLNLYLIINYFKGGKLRFKKIKPEAFEANRFYTVINKKSGEIVPMEVNFNFDDPNLIILPLAFGKRQGREFIWNDLLSLETGSLKLANGRVIEKTLYNRRTRQDEPALFVALTFERREVLDSSNIKPMNLIGVDRGENIPAVIALTDPEGCPLSRFKDSLGNPTHILRIGESYKEKQRTIQAKKEVEQRRAGGYSRKYASKAKNLADDMVRNTARDLLYYAVTQDAMLIFENLSRGFGRQGKRTFMAERQYTRMEDWLTAKLAYEGLPSKTYLSKTLAQYTSKTCSNCGFTITSADYDRVLEKLKKTATGWMTTINGKELKVEGQITYYNRYKRQNVVKDLSVELDRLSEESVNNDISSWTKGRSGEALSLLKKRFSHRPVQEKFVCLNCGFETHADEQAALNIARSWLFLRSQEYKKYQTNKTTGNTDKRAFVETWQSFYRKKLKEVWKPAV

SEQ ID NO: 32280 - protein, 979 aa, synthetic construct
  REGION 1..979: note = engineered CasX variant
QEIKGRINKIRRRLVKDSNTKKAGKTGPMKTLLVRVMTPDLRERLENLRKKPENIPQPISNTSRANLNKLLTDYTEMKKAILHVYWEEFQKDPVGLMSRVAQPASKKIDQNKLKPEMDEKGNLTTAGFACSQCGQPLFVYKLEQVSEKGKAYTNYFGRCNVAEHEKLILLAQLKPEKDSDEAVTYSLGKFGQRALDFYSIHVTKESTHPVKPLAQIAGNRYASVPVGKALSDACMGTIASFLSKYQDIIIEHQKVVKGNQKRLESLRELAGKENLEYPSVTLPPQPHTKEGLDAYNEVIARVRMWVNLNLWQKLKLSRDDAKPLLRLKGFPSFPLVERQANEVDWWDMVCNVKKLINEKKEDGKVFWQNLAGYKRQEALRPYLSSEEDRKKGKKFARYQLGDLLLHLEKKHGEDWGKVYDEAWERIDKKVEGLSKHIKLEEERRSEDAQSKAALTDWLRAKASFVIEGLKEADKDEFCRCELKLQKWYGDLRGKPFAIEAENSILDISGFSKQYNCAFIWQKDGVKKLNLYLIINYFKGGKLRFKKIKPEAFEANRFYTVINKKSGEIVPMEVNFNFDDPNLIILPLAFGKRQGREFIWNDLLSLETGSLKLANGRVIEKTLYNRRTRQDEPALFVALTFERREVLDSSNIKPMNLIGVDRGENIPAVIALTDPEGCPLSRFKDSLGNPTHILRIGESYKEKQRTIQAKKEVEQRRAGGYSRKYASKAKNLADDMVRNTARDLLYYAVTQDAMLIFENLSRGFGRQGKRTFMAERQYTRMEDWLTAKLAYEGLPSKTYLSKTLAQYTSKTCSNCGFTITSADYDRVLEKLKKTATGWMTTINGKELKVEGQITYYNRYKRQNVVKDLSVELDRLSEESVNNDISSWTKGRSGEALSLLKKRFSHRPVQEKFVCLNCGFETHADEQAALNIARSWLFLRSQEYKKYQTNKTTGNTDKRAFVETWQSFYRKKLKEVWKPAV

SEQ ID NO: 32281 - protein, 979 aa, synthetic construct
  REGION 1..979: note = engineered CasX variant
QEIKGRINKIRRRLVKDSNTKKAGKTGPMKTLLVRVMTPDLRERLENLRKKPENIPQPISNTSRANLNKLLTDYTEMKKAILHVYWEEFQKDPVGLMSRVAQPASKKIDQNKLKPEMDEKGNLTTAGFACSQCGQPLFVYKLEQVSEKGKAYTNYFGRCNVAEHEKLIKLAQLKPEKDSDEAVTYSLGKFGQRALDFYSIHVTKESTHPVKPLAQIAGNRYASGPVGKALSDACMGTIASFLSKYQDIIIEHQKVVKGNQKRLESLRELAGKENLEYPSVTLPPQPHTKEGLDAYNEVIARVRMWVNLNLWQKLKLSRDDAKPLLRLKGFPSFPLVERQANEVDWWDMVCNVKKLINEKKEDGKVFWQNLAGYKRQEALRPYLSSEEDRKKGKKFARYQLGDLLLHLEKKHGEDWGKVYDEAWERIDKKVEGLSKHIKLEEERRSEDAQSKAALTDWLRAKASFVIEGLKEADKDEFCRCELKLQKWYGDLRGKPFAIEAENSILDISGFSKQYNCAFIWQKDGVKKLNLYLIINYFKGGKLRFKKIKPEAFEANRFYTVINKKSGEIVPMEVNFNFDDPNLIILPLAFGKRQGREFIWNDLLSLETGSLKLANGRVIEKTLYNRRTRQDEPALFVALTFERREVLDSSNIKPMNLIGVDRGENIPAVIALTDPEGCPLSRFKDSLGNPTHILRIGESYKEKQRTIQAKKEVEQRRAGGYSRKYASKAKNLADDMVRNTARDLLYYAVTQDAMLIFENLSRGFGRQGKRTFMAERQYTRMEDWLTAKLAYEGLPSKTYLSKTLAQYTSKTCSNCGFTITSADYDRVLEKLKKTATGWMTTINGKELKVEGQITYYNRYKRQNVVKDLSVELDRLSEESVNNDISSWTKGRSGEALSLLKKRFSHRPVQEKFVCLNCGFETHADEQAALNIARSWLFLRSQEYKKYQTNKTTGNTDKRAFVETWQSFYRKKLKEVWKPAV

SEQ ID NO: 32282 - protein, 978 aa, synthetic construct
  REGION 1..978: note = engineered CasX variant
QEIKGRINKIRRRLVKDSNTKKAGKTGPMKTLLVRVMTPDLRERLENLRKKPENIPQPISNTSRANLNKLLTDYTEMKKAILHVYWEEFQKDPVGLMSRVAQPASKKIDQNKLKPEMDEKGNLTTAGFACSQCGQPLFVYKLEQVSEKGKAYTNYFGRCNVAEHEKLILLAQLKPEKDSDEAVTYSLGKFGQRALDFYSIHVTKESTHPVKPLAQIAGNRYASPVGKALSDACMGTIASFLSKYQDIIIEHQKVVKGNQKRLESLRELAGKENLEYPSVTLPPQPHTKEGLDAYNEVIARVRMWVNLNLWQKLKLSRDDAKPLLRLKGFPSFPLVERQANEVDWWDMVCNVKKLINEKKEDGKVFWQNLAGYKRQEALRPYLSSEEDRKKGKKFARYQLGDLLLHLEKKHGEDWGKVYDEAWERIDKKVEGLSKHIKLEEERRSEDAQSKAALTDWLRAKASFVIEGLKEADKDEFCRCELKLQKWYGDLRGKPFAIEAENSILDISGFSKQYNCAFIWQKDGVKKLNLYLIINYFKGGKLRFKKIKPEAFEANRFYTVINKKSGEIVPMEVNFNFDDPNLIILPLAFGKRQGREFIWNDLLSLETGSLKLANGRVIEKTLYNRRTRQDEPALFVALTFERREVLDSSNIKPMNLIGVDRGENIPAVIALTDPEGCPLSRFKDSLGNPTHILRIGESYKEKQRTIQAKKEVEQRRAGGYSRKYASKAKNLADDMVRNTARDLLYYAVTQDAMLIFENLSRGFGRQGKRTFMAERQYTRMEDWLTAKLAYEGLPSKTYLSKTLAQYTSKTCSNCGFTITSADYDRVLEKLKKTATGWMTTINGKELKVEGQITYYNRYKRQNVVKDLSVELDRLSEESVNNDISSWTKGRSGEALSLLKKRFSHRPVQEKFVCLNCGFETHADEQAALNIARSWLFLRSQEYKKYQTNKTTGNTDKRAFVETWQSFYRKKLKEVWKPAV

SEQ ID NO: 32283 - protein, 979 aa, synthetic construct
  REGION 1..979: note = engineered CasX variant
QEIKGRINKIRRRLVKDSNTKKAGKTGPMKTLLVRVMTPDLRERLENLRKKPENIPQPISNTSRANLNKLLTDYTEMKKAILHVYWEEFQKDPVGLMSRVAQPASKKIDQNKLKPEMDEKGNLTTAGFACSQCGQPLFVYKLEQVSEKGKAYTNYFGRCNVAEHEKLILLAQLKPEKDSDEAVTYSLGKFGQRALDFYSIHVTKESTHPVKPLAQIAGNRYASYPVGKALSDACMGTIASFLSKYQDIIIEHQKVVKGNQKRLESLRELAGKENLEYPSVTLPPQPHTKEGVDAYNEVIARVRTWVNLNLWQKLKLSRDDAKPLLRLKGFPSFPLVERQANEVDWWDMVCNVKKLINEKKEDGKVFWQNLAGYKRQEALRPYLSSEEDRKKGKKFARYQLGDLLLHLEKKHGEDWGKVYDEAWERIDKKVEGLSKHIKLEEERRSEDAQSKAALTDWLRAKASFVIEGLKEADKDEFCRCELKLQKWYGDLRGKPFAIEAENSILDISGFSKQYNCAFIWQKDGVKKLNLYLIINYFKGGKLRFKKIKPEAFEANRFYTVINKKSGEIVPMEVNFNFDDPNLIILPLAFGKRQGREFIWNDLLSLETGSLKLANGRVIEKTLYNRRTRQDEPALFVALTFERREVLDSSNIKPMNLIGVDRGENIPAVIALTDPEGCPLSRFKDSLGNPTHILRIGESYKEKQRTIQAKKEVEQRRAGGYSRKYASKAKNLADDMVRNTARDLLYYAVTQDAMLIFENLSRGFGRQGKRTFMAERQYTRMEDWLTAKLAYEGLPSKTYLSKTLAQYTSKTCSNCGFTITSADYDRVLEKLKKTATGWMTTINGKELKVEGQITYYNRYKRQNVVKDLSVELDRLSEESVNNDISSWTKGRSGEALSLLKKRFSHRPVQEKFVCLNCGFETHADEQAALNIARSWLFLRSQEYKKYQTNKTTGNTDKRAFVETWQSFYRKKLKEVWKPAV

SEQ ID NO: 32284 - protein, 979 aa, synthetic construct
  REGION 1..979: note = engineered CasX variant
QEIKGRINKIRRRLVKDSNTKKAGKTGPMKTLLVRVMTPDLRERLENLRKKPENIPQPISNTSRANLNKLLTDYTEMKKAILHVYWEEFQKDPVGLMSRVAQPASKKIDQNKLKPEMDEKGNLTTAGFACSQCGQPLFVYKLEQVSEKGKAYTNYFGRCNVAEHEKLILLAQLKPEKDSDEAVTYSLGKFGQRALDFYSIHVTKESTHPVKPLAQIAGNRYASHPVGKALSDACMGTIASFLSKYQDIIIEHQKVVKGNQKRLESLRELAGKENLEYPSVTLPPQPHTKEGVDAYNEVIARVRTWVNLNLWQKLKLSRDDAKPLLRLKGFPSFPLVERQANEVDWWDMVCNVKKLINEKKEDGKVFWQNLAGYKRQEALRPYLSSEEDRKKGKKFARYQLGDLLLHLEKKHGEDWGKVYDEAWERIDKKVEGLSKHIKLEEERRSEDAQSKAALTDWLRAKASFVIEGLKEADKDEFCRCELKLQKWYGDLRGKPFAIEAENSILDISGFSKQYNCAFIWQKDGVKKLNLYLIINYFKGGKLRFKKIKPEAFEANRFYTVINKKSGEIVPMEVNFNFDDPNLIILPLAFGKRQGREFIWNDLLSLETGSLKLANGRVIEKTLYNRRTRQDEPALFVALTFERREVLDSSNIKPMNLIGVDRGENIPAVIALTDPEGCPLSRFKDSLGNPTHILRIGESYKEKQRTIQAKKEVEQRRAGGYSRKYASKAKNLADDMVRNTARDLLYYAVTQDAMLIFENLSRGFGRQGKRTFMAERQYTRMEDWLTAKLAYEGLPSKTYLSKTLAQYTSKTCSNCGFTITSADYDRVLEKLKKTATGWMTTINGKELKVEGQITYYNRYKRQNVVKDLSVELDRLSEESVNNDISSWTKGRSGEALSLLKKRFSHRPVQEKFVCLNCGFETHADEQAALNIARSWLFLRSQEYKKYQTNKTTGNTDKRAFVETWQSFYRKKLKEVWKPAV

SEQ ID NO: 32285 - protein, 979 aa, synthetic construct
  REGION 1..979: note = engineered CasX variant
QEIKGRINKIRRRLVKDSNTKKAGKTGPMKTLLVRVMTPDLRERLENLRKKPENIPQPISNTSRANLNKLLTDYTEMKKAILHVYWEEFQKDPVGLMSRVAQPASKKIDQNKLKPEMDEKGNLTTAGFACSQCGQPLFVYKLEQVSEKGKAYTNYFGRCNVAEHEKLILLAQLKPEKDSDEAVTYSLGKFGQRALDFYSIHVTKESTHPVKPLAQIAGNRYASSPVGKALSDACMGTIASFLSKYQDIIIEHQKVVKGNQKRLESLRELAGKENLEYPSVTLPPQPHTKEGVDAYNEVIARVRTWVNLNLWQKLKLSRDDAKPLLRLKGFPSFPLVERQANEVDWWDMVCNVKKLINEKKEDGKVFWQNLAGYKRQEALRPYLSSEEDRKKGKKFARYQLGDLLLHLEKKHGEDWGKVYDEAWERIDKKVEGLSKHIKLEEERRSEDAQSKAALTDWLRAKASFVIEGLKEADKDEFCRCELKLQKWYGDLRGKPFAIEAENSILDISGFSKQYNCAFIWQKDGVKKLNLYLIINYFKGGKLRFKKIKPEAFEANRFYTVINKKSGEIVPMEVNFNFDDPNLIILPLAFGKRQGREFIWNDLLSLETGSLKLANGRVIEKTLYNRRTRQDEPALFVALTFERREVLDSSNIKPMNLIGVDRGENIPAVIALTDPEGCPLSRFKDSLGNPTHILRIGESYKEKQRTIQAKKEVEQRRAGGYSRKYASKAKNLADDMVRNTARDLLYYAVTQDAMLIFENLSRGFGRQGKRTFMAERQYTRMEDWLTAKLAYEGLPSKTYLSKTLAQYTSKTCSNCGFTITSADYDRVLEKLKKTATGWMTTINGKELKVEGQITYYNRYKRQNVVKDLSVELDRLSEESVNNDISSWTKGRSGEALSLLKKRFSHRPVQEKFVCLNCGFETHADEQAALNIARSWLFLRSQEYKKYQTNKTTGNTDKRAFVETWQSFYRKKLKEVWKPAV

SEQ ID NO: 32286 - protein, 979 aa, synthetic construct
  REGION 1..979: note = engineered CasX variant
QEIKGRINKIRRRLVKDSNTKKAGKTGPMKTLLVRVMTPDLRERLENLRKKPENIPQPISNTSRANLNKLLTDYTEMKKAILHVYWEEFQKDPVGLMSRVAQPASKKIDQNKLKPEMDEKGNLTTAGFACSQCGQPLFVYKLEQVSEKGKAYTNYFGRCNVAEHEKLILLAQLKPEKDSDEAVTYSLGKFGQRALDFYSIHVTKESTHPVKPLAQIAGNRYASTPVGKALSDACMGTIASFLSKYQDIIIEHQKVVKGNQKRLESLRELAGKENLEYPSVTLPPQPHTKEGVDAYNEVIARVRTWVNLNLWQKLKLSRDDAKPLLRLKGFPSFPLVERQANEVDWWDMVCNVKKLINEKKEDGKVFWQNLAGYKRQEALRPYLSSEEDRKKGKKFARYQLGDLLLHLEKKHGEDWGKVYDEAWERIDKKVEGLSKHIKLEEERRSEDAQSKAALTDWLRAKASFVIEGLKEADKDEFCRCELKLQKWYGDLRGKPFAIEAENSILDISGFSKQYNCAFIWQKDGVKKLNLYLIINYFKGGKLRFKKIKPEAFEANRFYTVINKKSGEIVPMEVNFNFDDPNLIILPLAFGKRQGREFIWNDLLSLETGSLKLANGRVIEKTLYNRRTRQDEPALFVALTFERREVLDSSNIKPMNLIGVDRGENIPAVIALTDPEGCPLSRFKDSLGNPTHILRIGESYKEKQRTIQAKKEVEQRRAGGYSRKYASKAKNLADDMVRNTARDLLYYAVTQDAMLIFENLSRGFGRQGKRTFMAERQYTRMEDWLTAKLAYEGLPSKTYLSKTLAQYTSKTCSNCGFTITSADYDRVLEKLKKTATGWMTTINGKELKVEGQITYYNRYKRQNVVKDLSVELDRLSEESVNNDISSWTKGRSGEALSLLKKRFSHRPVQEKFVCLNCGFETHADEQAALNIARSWLFLRSQEYKKYQTNKTTGNTDKRAFVETWQSFYRKKLKEVWKPAV

SEQ ID NO: 32287 - protein, 979 aa, synthetic construct
  REGION 1..979: note = engineered CasX variant
QEIKGRINKIRRRLVKDSNTKKAGKTGPMKTLLVRVMTPDLRERLENLRKKPENIPQPISNTSRANLNKLLTDYTEMKKAILHVYWEEFQKDPVGLMSRVAQPASKKIDQNKLKPEMDEKGNLTTAGFACSQCGQPLFVYKLEQVSEKGKAYTNYFGRCNVAEHEKLILLAQLKPEKDSDEAVTYSLGKFGQRALDFYSIHVTKESTHPVKPLAQIAGNRYASAPVGKALSDACMGTIASFLSKYQDIIIEHQKVVKGNQKRLESLRELAGKENLEYPSVTLPPQPHTKEGVDAYNEVIARVRTWVNLNLWQKLKLSRDDAKPLLRLKGFPSFPLVERQANEVDWWDMVCNVKKLINEKKEDGKVFWQNLAGYKRQEALRPYLSSEEDRKKGKKFARYQLGDLLLHLEKKHGEDWGKVYDEAWERIDKKVEGLSKHIKLEEERRSEDAQSKAALTDWLRAKASFVIEGLKEADKDEFCRCELKLQKWYGDLRGKPFAIEAENSILDISGFSKQYNCAFIWQKDGVKKLNLYLIINYFKGGKLRFKKIKPEAFEANRFYTVINKKSGEIVPMEVNFNFDDPNLIILPLAFGKRQGREFIWNDLLSLETGSLKLANGRVIEKTLYNRRTRQDEPALFVALTFERREVLDSSNIKPMNLIGVDRGENIPAVIALTDPEGCPLSRFKDSLGNPTHILRIGESYKEKQRTIQAKKEVEQRRAGGYSRKYASKAKNLADDMVRNTARDLLYYAVTQDAMLIFENLSRGFGRQGKRTFMAERQYTRMEDWLTAKLAYEGLPSKTYLSKTLAQYTSKTCSNCGFTITSADYDRVLEKLKKTATGWMTTINGKELKVEGQITYYNRYKRQNVVKDLSVELDRLSEESVNNDISSWTKGRSGEALSLLKKRFSHRPVQEKFVCLNCGFETHADEQAALNIARSWLFLRSQEYKKYQTNKTTGNTDKRAFVETWQSFYRKKLKEVWKPAV

SEQ ID NO: 32288 - protein, 979 aa, synthetic construct
  REGION 1..979: note = engineered CasX variant
QEIKGRINKIRRRLVKDSNTKKAGKTGPMKTLLVRVMTPDLRERLENLRKKPENIPQPISNTSRANLNKLLTDYTEMKKAILHVYWEEFQKDPVGLMSRVAQPASKKIDQNKLKPEMDEKGNLTTAGFACSQCGQPLFVYKLEQVSEKGKAYTNYFGRCNVAEHEKLILLAQLKPEKDSDEAVTYSLGKFGQRALDFYSIHVTKESTHPVKPLAQIAGNRYASVPVGKALSDACMGTIASFLSKYQDIIIEHQKVVKGNQKRLESLRELAGKENLEYPSVTLPPQPHTKEGVDAYNEVIARVRTWVNLNLWQKLKLSRDDAKPLLRLKGFPSFPLVERQANEVDWWDMVCNVKKLINEKKEDGKVFWQNLAGYKRQEALRPYLSSEEDRKKGKKFARYQLGDLLLHLEKKHGEDWGKVYDEAWERIDKKVEGLSKHIKLEEERRSEDAQSKAALTDWLRAKASFVIEGLKEADKDEFCRCELKLQKWYGDLRGKPFAIEAENSILDISGFSKQYNCAFIWQKDGVKKLNLYLIINYFKGGKLRFKKIKPEAFEANRFYTVINKKSGEIVPMEVNFNFDDPNLIILPLAFGKRQGREFIWNDLLSLETGSLKLANGRVIEKTLYNRRTRQDEPALFVALTFERREVLDSSNIKPMNLIGVDRGENIPAVIALTDPEGCPLSRFKDSLGNPTHILRIGESYKEKQRTIQAKKEVEQRRAGGYSRKYASKAKNLADDMVRNTARDLLYYAVTQDAMLIFENLSRGFGRQGKRTFMAERQYTRMEDWLTAKLAYEGLPSKTYLSKTLAQYTSKTCSNCGFTITSADYDRVLEKLKKTATGWMTTINGKELKVEGQITYYNRYKRQNVVKDLSVELDRLSEESVNNDISSWTKGRSGEALSLLKKRFSHRPVQEKFVCLNCGFETHADEQAALNIARSWLFLRSQEYKKYQTNKTTGNTDKRAFVETWQSFYRKKLKEVWKPAV

SEQ ID NO: 32289 - protein, 979 aa, synthetic construct
  REGION 1..979: note = engineered CasX variant
QEIKGRINKIRRRLVKDSNTKKAGKTGPMKTLLVRVMTPDLRERLENLRKKPENIPQPISNTSRANLNKLLTDYTEMKKAILHVYWEEFQKDPVGLMSRVAQPASKKIDQNKLKPEMDEKGNLTTAGFACSQCGQPLFVYKLEQVSEKGKAYTNYFGRCNVAEHEKLIKLAQLKPEKDSDEAVTYSLGKFGQRALDFYSIHVTKESTHPVKPLAQIAGNRYASGPVGKALSDACMGTIASFLSKYQDIIIEHQKVVKGNQKRLESLRELAGKENLEYPSVTLPPQPHTKEGVDAYNEVIARVRTWVNLNLWQKLKLSRDDAKPLLRLKGFPSFPLVERQANEVDWWDMVCNVKKLINEKKEDGKVFWQNLAGYKRQEALRPYLSSEEDRKKGKKFARYQLGDLLLHLEKKHGEDWGKVYDEAWERIDKKVEGLSKHIKLEEERRSEDAQSKAALTDWLRAKASFVIEGLKEADKDEFCRCELKLQKWYGDLRGKPFAIEAENSILDISGFSKQYNCAFIWQKDGVKKLNLYLIINYFKGGKLRFKKIKPEAFEANRFYTVINKKSGEIVPMEVNFNFDDPNLIILPLAFGKRQGREFIWNDLLSLETGSLKLANGRVIEKTLYNRRTRQDEPALFVALTFERREVLDSSNIKPMNLIGVDRGENIPAVIALTDPEGCPLSRFKDSLGNPTHILRIGESYKEKQRTIQAKKEVEQRRAGGYSRKYASKAKNLADDMVRNTARDLLYYAVTQDAMLIFENLSRGFGRQGKRTFMAERQYTRMEDWLTAKLAYEGLPSKTYLSKTLAQYTSKTCSNCGFTITSADYDRVLEKLKKTATGWMTTINGKELKVEGQITYYNRYKRQNVVKDLSVELDRLSEESVNNDISSWTKGRSGEALSLLKKRFSHRPVQEKFVCLNCGFETHADEQAALNIARSWLFLRSQEYKKYQTNKTTGNTDKRAFVETWQSFYRKKLKEVWKPAV

SEQ ID NO: 32290 - protein, 978 aa, synthetic construct
  REGION 1..978: note = engineered CasX variant
QEIKGRINKIRRRLVKDSNTKKAGKTGPMKTLLVRVMTPDLRERLENLRKKPENIPQPISNTSRANLNKLLTDYTEMKKAILHVYWEEFQKDPVGLMSRVAQPASKKIDQNKLKPEMDEKGNLTTAGFACSQCGQPLFVYKLEQVSEKGKAYTNYFGRCNVAEHEKLILLAQLKPEKDSDEAVTYSLGKFGQRALDFYSIHVTKESTHPVKPLAQIAGNRYASPVGKALSDACMGTIASFLSKYQDIIIEHQKVVKGNQKRLESLRELAGKENLEYPSVTLPPQPHTKEGVDAYNEVIARVRTWVNLNLWQKLKLSRDDAKPLLRLKGFPSFPLVERQANEVDWWDMVCNVKKLINEKKEDGKVFWQNLAGYKRQEALRPYLSSEEDRKKGKKFARYQLGDLLLHLEKKHGEDWGKVYDEAWERIDKKVEGLSKHIKLEEERRSEDAQSKAALTDWLRAKASFVIEGLKEADKDEFCRCELKLQKWYGDLRGKPFAIEAENSILDISGFSKQYNCAFIWQKDGVKKLNLYLIINYFKGGKLRFKKIKPEAFEANRFYTVINKKSGEIVPMEVNFNFDDPNLIILPLAFGKRQGREFIWNDLLSLETGSLKLANGRVIEKTLYNRRTRQDEPALFVALTFERREVLDSSNIKPMNLIGVDRGENIPAVIALTDPEGCPLSRFKDSLGNPTHILRIGESYKEKQRTIQAKKEVEQRRAGGYSRKYASKAKNLADDMVRNTARDLLYYAVTQDAMLIFENLSRGFGRQGKRTFMAERQYTRMEDWLTAKLAYEGLPSKTYLSKTLAQYTSKTCSNCGFTITSADYDRVLEKLKKTATGWMTTINGKELKVEGQITYYNRYKRQNVVKDLSVELDRLSEESVNNDISSWTKGRSGEALSLLKKRFSHRPVQEKFVCLNCGFETHADEQAALNIARSWLFLRSQEYKKYQTNKTTGNTDKRAFVETWQSFYRKKLKEVWKPAV

SEQ ID NO: 32291 - protein, 979 aa, synthetic construct
  REGION 1..979: note = engineered CasX variant
QEIKGRINKIRRRLVKDSNTKKAGKTGPMKTLLVRVMTPDLRERLENLRKKPENIPQPISNTSRANLNKLLTDYTEMKKAILHVYWEEFQKDPVGLMSRVAQPASKKIDQNKLKPEMDEKGNLTTAGFACSQCGQPLFVYKLEQVSEKGKAYTNYFGRCNVAEHEKLILLAQLKPEKDSDEAVTYSLGKFGQRALDFYSIHVTKESTHPVKPLAQIAGNRYASYPVGKALSDACMGTIASFLSKYQDIIIEHQKVVKGNQKRLESLRELAGKENLEYPSVTLPPQPHTKEGVDAYNEVIARVRWWVNLNLWQKLKLSRDDAKPLLRLKGFPSFPLVERQANEVDWWDMVCNVKKLINEKKEDGKVFWQNLAGYKRQEALRPYLSSEEDRKKGKKFARYQLGDLLLHLEKKHGEDWGKVYDEAWERIDKKVEGLSKHIKLEEERRSEDAQSKAALTDWLRAKASFVIEGLKEADKDEFCRCELKLQKWYGDLRGKPFAIEAENSILDISGFSKQYNCAFIWQKDGVKKLNLYLIINYFKGGKLRFKKIKPEAFEANRFYTVINKKSGEIVPMEVNFNFDDPNLIILPLAFGKRQGREFIWNDLLSLETGSLKLANGRVIEKTLYNRRTRQDEPALFVALTFERREVLDSSNIKPMNLIGVDRGENIPAVIALTDPEGCPLSRFKDSLGNPTHILRIGESYKEKQRTIQAKKEVEQRRAGGYSRKYASKAKNLADDMVRNTARDLLYYAVTQDAMLIFENLSRGFGRQGKRTFMAERQYTRMEDWLTAKLAYEGLPSKTYLSKTLAQYTSKTCSNCGFTITSADYDRVLEKLKKTATGWMTTINGKELKVEGQITYYNRYKRQNVVKDLSVELDRLSEESVNNDISSWTKGRSGEALSLLKKRFSHRPVQEKFVCLNCGFETHADEQAALNIARSWLFLRSQEYKKYQTNKTTGNTDKRAFVETWQSFYRKKLKEVWKPAV

SEQ ID NO: 32292 - protein, 979 aa, synthetic construct
  REGION 1..979: note = engineered CasX variant
QEIKGRINKIRRRLVKDSNTKKAGKTGPMKTLLVRVMTPDLRERLENLRKKPENIPQPISNTSRANLNKLLTDYTEMKKAILHVYWEEFQKDPVGLMSRVAQPASKKIDQNKLKPEMDEKGNLTTAGFACSQCGQPLFVYKLEQVSEKGKAYTNYFGRCNVAEHEKLILLAQLKPEKDSDEAVTYSLGKFGQRALDFYSIHVTKESTHPVKPLAQIAGNRYASHPVGKALSDACMGTIASFLSKYQDIIIEHQKVVKGNQKRLESLRELAGKENLEYPSVTLPPQPHTKEGVDAYNEVIARVRWWVNLNLWQKLKLSRDDAKPLLRLKGFPSFPLVERQANEVDWWDMVCNVKKLINEKKEDGKVFWQNLAGYKRQEALRPYLSSEEDRKKGKKFARYQLGDLLLHLEKKHGEDWGKVYDEAWERIDKKVEGLSKHIKLEEERRSEDAQSKAALTDWLRAKASFVIEGLKEADKDEFCRCELKLQKWYGDLRGKPFAIEAENSILDISGFSKQYNCAFIWQKDGVKKLNLYLIINYFKGGKLRFKKIKPEAFEANRFYTVINKKSGEIVPMEVNFNFDDPNLIILPLAFGKRQGREFIWNDLLSLETGSLKLANGRVIEKTLYNRRTRQDEPALFVALTFERREVLDSSNIKPMNLIGVDRGENIPAVIALTDPEGCPLSRFKDSLGNPTHILRIGESYKEKQRTIQAKKEVEQRRAGGYSRKYASKAKNLADDMVRNTARDLLYYAVTQDAMLIFENLSRGFGRQGKRTFMAERQYTRMEDWLTAKLAYEGLPSKTYLSKTLAQYTSKTCSNCGFTITSADYDRVLEKLKKTATGWMTTINGKELKVEGQITYYNRYKRQNVVKDLSVELDRLSEESVNNDISSWTKGRSGEALSLLKKRFSHRPVQEKFVCLNCGFETHADEQAALNIARSWLFLRSQEYKKYQTNKTTGNTDKRAFVETWQSFYRKKLKEVWKPAV

SEQ ID NO: 32293 - protein, 979 aa, synthetic construct
  REGION 1..979: note = engineered CasX variant
QEIKGRINKIRRRLVKDSNTKKAGKTGPMKTLLVRVMTPDLRERLENLRKKPENIPQPISNTSRANLNKLLTDYTEMKKAILHVYWEEFQKDPVGLMSRVAQPASKKIDQNKLKPEMDEKGNLTTAGFACSQCGQPLFVYKLEQVSEKGKAYTNYFGRCNVAEHEKLILLAQLKPEKDSDEAVTYSLGKFGQRALDFYSIHVTKESTHPVKPLAQIAGNRYASSPVGKALSDACMGTIASFLSKYQDIIIEHQKVVKGNQKRLESLRELAGKENLEYPSVTLPPQPHTKEGVDAYNEVIARVRWWVNLNLWQKLKLSRDDAKPLLRLKGFPSFPLVERQANEVDWWDMVCNVKKLINEKKEDGKVFWQNLAGYKRQEALRPYLSSEEDRKKGKKFARYQLGDLLLHLEKKHGEDWGKVYDEAWERIDKKVEGLSKHIKLEEERRSEDAQSKAALTDWLRAKASFVIEGLKEADKDEFCRCELKLQKWYGDLRGKPFAIEAENSILDISGFSKQYNCAFIWQKDGVKKLNLYLIINYFKGGKLRFKKIKPEAFEANRFYTVINKKSGEIVPMEVNFNFDDPNLIILPLAFGKRQGREFIWNDLLSLETGSLKLANGRVIEKTLYNRRTRQDEPALFVALTFERREVLDSSNIKPMNLIGVDRGENIPAVIALTDPEGCPLSRFKDSLGNPTHILRIGESYKEKQRTIQAKKEVEQRRAGGYSRKYASKAKNLADDMVRNTARDLLYYAVTQDAMLIFENLSRGFGRQGKRTFMAERQYTRMEDWLTAKLAYEGLPSKTYLSKTLAQYTSKTCSNCGFTITSADYDRVLEKLKKTATGWMTTINGKELKVEGQITYYNRYKRQNVVKDLSVELDRLSEESVNNDISSWTKGRSGEALSLLKKRFSHRPVQEKFVCLNCGFETHADEQAALNIARSWLFLRSQEYKKYQTNKTTGNTDKRAFVETWQSFYRKKLKEVWKPAV

SEQ ID NO: 32294 - protein, 979 aa, synthetic construct
  REGION 1..979: note = engineered CasX variant
QEIKGRINKIRRRLVKDSNTKKAGKTGPMKTLLVRVMTPDLRERLENLRKKPENIPQPISNTSRANLNKLLTDYTEMKKAILHVYWEEFQKDPVGLMSRVAQPASKKIDQNKLKPEMDEKGNLTTAGFACSQCGQPLFVYKLEQVSEKGKAYTNYFGRCNVAEHEKLILLAQLKPEKDSDEAVTYSLGKFGQRALDFYSIHVTKESTHPVKPLAQIAGNRYASTPVGKALSDACMGTIASFLSKYQDIIIEHQKVVKGNQKRLESLRELAGKENLEYPSVTLPPQPHTKEGVDAYNEVIARVRWWVNLNLWQKLKLSRDDAKPLLRLKGFPSFPLVERQANEVDWWDMVCNVKKLINEKKEDGKVFWQNLAGYKRQEALRPYLSSEEDRKKGKKFARYQLGDLLLHLEKKHGEDWGKVYDEAWERIDKKVEGLSKHIKLEEERRSEDAQSKAALTDWLRAKASFVIEGLKEADKDEFCRCELKLQKWYGDLRGKPFAIEAENSILDISGFSKQYNCAFIWQKDGVKKLNLYLIINYFKGGKLRFKKIKPEAFEANRFYTVINKKSGEIVPMEVNFNFDDPNLIILPLAFGKRQGREFIWNDLLSLETGSLKLANGRVIEKTLYNRRTRQDEPALFVALTFERREVLDSSNIKPMNLIGVDRGENIPAVIALTDPEGCPLSRFKDSLGNPTHILRIGESYKEKQRTIQAKKEVEQRRAGGYSRKYASKAKNLADDMVRNTARDLLYYAVTQDAMLIFENLSRGFGRQGKRTFMAERQYTRMEDWLTAKLAYEGLPSKTYLSKTLAQYTSKTCSNCGFTITSADYDRVLEKLKKTATGWMTTINGKELKVEGQITYYNRYKRQNVVKDLSVELDRLSEESVNNDISSWTKGRSGEALSLLKKRFSHRPVQEKFVCLNCGFETHADEQAALNIARSWLFLRSQEYKKYQTNKTTGNTDKRAFVETWQSFYRKKLKEVWKPAV

SEQ ID NO: 32295 - protein, 979 aa, synthetic construct
  REGION 1..979: note = engineered CasX variant
QEIKGRINKIRRRLVKDSNTKKAGKTGPMKTLLVRVMTPDLRERLENLRKKPENIPQPISNTSRANLNKLLTDYTEMKKAILHVYWEEFQKDPVGLMSRVAQPASKKIDQNKLKPEMDEKGNLTTAGFACSQCGQPLFVYKLEQVSEKGKAYTNYFGRCNVAEHEKLILLAQLKPEKDSDEAVTYSLGKFGQRALDFYSIHVTKESTHPVKPLAQIAGNRYASAPVGKALSDACMGTIASFLSKYQDIIIEHQKVVKGNQKRLESLRELAGKENLEYPSVTLPPQPHTKEGVDAYNEVIARVRWWVNLNLWQKLKLSRDDAKPLLRLKGFPSFPLVERQANEVDWWDMVCNVKKLINEKKEDGKVFWQNLAGYKRQEALRPYLSSEEDRKKGKKFARYQLGDLLLHLEKKHGEDWGKVYDEAWERIDKKVEGLSKHIKLEEERRSEDAQSKAALTDWLRAKASFVIEGLKEADKDEFCRCELKLQKWYGDLRGKPFAIEAENSILDISGFSKQYNCAFIWQKDGVKKLNLYLIINYFKGGKLRFKKIKPEAFEANRFYTVINKKSGEIVPMEVNFNFDDPNLIILPLAFGKRQGREFIWNDLLSLETGSLKLANGRVIEKTLYNRRTRQDEPALFVALTFERREVLDSSNIKPMNLIGVDRGENIPAVIALTDPEGCPLSRFKDSLGNPTHILRIGESYKEKQRTIQAKKEVEQRRAGGYSRKYASKAKNLADDMVRNTARDLLYYAVTQDAMLIFENLSRGFGRQGKRTFMAERQYTRMEDWLTAKLAYEGLPSKTYLSKTLAQYTSKTCSNCGFTITSADYDRVLEKLKKTATGWMTTINGKELKVEGQITYYNRYKRQNVVKDLSVELDRLSEESVNNDISSWTKGRSGEALSLLKKRFSHRPVQEKFVCLNCGFETHADEQAALNIARSWLFLRSQEYKKYQTNKTTGNTDKRAFVETWQSFYRKKLKEVWKPAV

SEQ ID NO: 32296 - protein, 979 aa, synthetic construct
  REGION 1..979: note = engineered CasX variant
QEIKGRINKIRRRLVKDSNTKKAGKTGPMKTLLVRVMTPDLRERLENLRKKPENIPQPISNTSRANLNKLLTDYTEMKKAILHVYWEEFQKDPVGLMSRVAQPASKKIDQNKLKPEMDEKGNLTTAGFACSQCGQPLFVYKLEQVSEKGKAYTNYFGRCNVAEHEKLILLAQLKPEKDSDEAVTYSLGKFGQRALDFYSIHVTKESTHPVKPLAQIAGNRYASVPVGKALSDACMGTIASFLSKYQDIIIEHQKVVKGNQKRLESLRELAGKENLEYPSVTLPPQPHTKEGVDAYNEVIARVRWWVNLNLWQKLKLSRDDAKPLLRLKGFPSFPLVERQANEVDWWDMVCNVKKLINEKKEDGKVFWQNLAGYKRQEALRPYLSSEEDRKKGKKFARYQLGDLLLHLEKKHGEDWGKVYDEAWERIDKKVEGLSKHIKLEEERRSEDAQSKAALTDWLRAKASFVIEGLKEADKDEFCRCELKLQKWYGDLRGKPFAIEAENSILDISGFSKQYNCAFIWQKDGVKKLNLYLIINYFKGGKLRFKKIKPEAFEANRFYTVINKKSGEIVPMEVNFNFDDPNLIILPLAFGKRQGREFIWNDLLSLETGSLKLANGRVIEKTLYNRRTRQDEPALFVALTFERREVLDSSNIKPMNLIGVDRGENIPAVIALTDPEGCPLSRFKDSLGNPTHILRIGESYKEKQRTIQAKKEVEQRRAGGYSRKYASKAKNLADDMVRNTARDLLYYAVTQDAMLIFENLSRGFGRQGKRTFMAERQYTRMEDWLTAKLAYEGLPSKTYLSKTLAQYTSKTCSNCGFTITSADYDRVLEKLKKTATGWMTTINGKELKVEGQITYYNRYKRQNVVKDLSVELDRLSEESVNNDISSWTKGRSGEALSLLKKRFSHRPVQEKFVCLNCGFETHADEQAALNIARSWLFLRSQEYKKYQTNKTTGNTDKRAFVETWQSFYRKKLKEVWKPAV

SEQ ID NO: 32297 - protein, 979 aa, synthetic construct
  REGION 1..979: note = engineered CasX variant
QEIKGRINKIRRRLVKDSNTKKAGKTGPMKTLLVRVMTPDLRERLENLRKKPENIPQPISNTSRANLNKLLTDYTEMKKAILHVYWEEFQKDPVGLMSRVAQPASKKIDQNKLKPEMDEKGNLTTAGFACSQCGQPLFVYKLEQVSEKGKAYTNYFGRCNVAEHEKLIKLAQLKPEKDSDEAVTYSLGKFGQRALDFYSIHVTKESTHPVKPLAQIAGNRYASGPVGKALSDACMGTIASFLSKYQDIIIEHQKVVKGNQKRLESLRELAGKENLEYPSVTLPPQPHTKEGVDAYNEVIARVRWWVNLNLWQKLKLSRDDAKPLLRLKGFPSFPLVERQANEVDWWDMVCNVKKLINEKKEDGKVFWQNLAGYKRQEALRPYLSSEEDRKKGKKFARYQLGDLLLHLEKKHGEDWGKVYDEAWERIDKKVEGLSKHIKLEEERRSEDAQSKAALTDWLRAKASFVIEGLKEADKDEFCRCELKLQKWYGDLRGKPFAIEAENSILDISGFSKQYNCAFIWQKDGVKKLNLYLIINYFKGGKLRFKKIKPEAFEANRFYTVINKKSGEIVPMEVNFNFDDPNLIILPLAFGKRQGREFIWNDLLSLETGSLKLANGRVIEKTLYNRRTRQDEPALFVALTFERREVLDSSNIKPMNLIGVDRGENIPAVIALTDPEGCPLSRFKDSLGNPTHILRIGESYKEKQRTIQAKKEVEQRRAGGYSRKYASKAKNLADDMVRNTARDLLYYAVTQDAMLIFENLSRGFGRQGKRTFMAERQYTRMEDWLTAKLAYEGLPSKTYLSKTLAQYTSKTCSNCGFTITSADYDRVLEKLKKTATGWMTTINGKELKVEGQITYYNRYKRQNVVKDLSVELDRLSEESVNNDISSWTKGRSGEALSLLKKRFSHRPVQEKFVCLNCGFETHADEQAALNIARSWLFLRSQEYKKYQTNKTTGNTDKRAFVETWQSFYRKKLKEVWKPAV

SEQ ID NO: 32298 - protein, 978 aa, synthetic construct
  REGION 1..978: note = engineered CasX variant
QEIKGRINKIRRRLVKDSNTKKAGKTGPMKTLLVRVMTPDLRERLENLRKKPENIPQPISNTSRANLNKLLTDYTEMKKAILHVYWEEFQKDPVGLMSRVAQPASKKIDQNKLKPEMDEKGNLTTAGFACSQCGQPLFVYKLEQVSEKGKAYTNYFGRCNVAEHEKLILLAQLKPEKDSDEAVTYSLGKFGQRALDFYSIHVTKESTHPVKPLAQIAGNRYASPVGKALSDACMGTIASFLSKYQDIIIEHQKVVKGNQKRLESLRELAGKENLEYPSVTLPPQPHTKEGVDAYNEVIARVRWWVNLNLWQKLKLSRDDAKPLLRLKGFPSFPLVERQANEVDWWDMVCNVKKLINEKKEDGKVFWQNLAGYKRQEALRPYLSSEEDRKKGKKFARYQLGDLLLHLEKKHGEDWGKVYDEAWERIDKKVEGLSKHIKLEEERRSEDAQSKAALTDWLRAKASFVIEGLKEADKDEFCRCELKLQKWYGDLRGKPFAIEAENSILDISGFSKQYNCAFIWQKDGVKKLNLYLIINYFKGGKLRFKKIKPEAFEANRFYTVINKKSGEIVPMEVNFNFDDPNLIILPLAFGKRQGREFIWNDLLSLETGSLKLANGRVIEKTLYNRRTRQDEPALFVALTFERREVLDSSNIKPMNLIGVDRGENIPAVIALTDPEGCPLSRFKDSLGNPTHILRIGESYKEKQRTIQAKKEVEQRRAGGYSRKYASKAKNLADDMVRNTARDLLYYAVTQDAMLIFENLSRGFGRQGKRTFMAERQYTRMEDWLTAKLAYEGLPSKTYLSKTLAQYTSKTCSNCGFTITSADYDRVLEKLKKTATGWMTTINGKELKVEGQITYYNRYKRQNVVKDLSVELDRLSEESVNNDISSWTKGRSGEALSLLKKRFSHRPVQEKFVCLNCGFETHADEQAALNIARSWLFLRSQEYKKYQTNKTTGNTDKRAFVETWQSFYRKKLKEVWKPAV

SEQ ID NO: 32299 - protein, 980 aa, synthetic construct
  REGION 1..980: note = engineered CasX variant
QEIKGRINKIRRRLVKDSNTKKAGKTGPMKTLLVRVMTPDLRERLENLRKKPENIPQPISNTSRANLNKLLTDYTEMKKAILHVYWEEFQKDPVGLMSRVAQPASKKIDQNKLKPEMDEKGNLTTAGFACSQCGQPLFVYKLEQVSEKGKAYTNYFGRCNVAEHEKLILLAQLKPEKDSDEAVTYSLGKFGQRALDFYSIHVTKESTHPVKPLAQIAGNRYASYPVGKALSDACMGTIASFLSKYQDIIIEHQKVVKGNQKRLESLRELAGKENLEYPSVTLPPQPHTKEGVDAYNEVIARVRMWVNLNLWQKLKLSRDDAKPLLRLKGFPSFPLVERQQANEVDWWDMVCNVKKLINEKKEDGKVFWQNLAGYKRQEALRPYLSSEEDRKKGKKFARYQLGDLLLHLEKKHGEDWGKVYDEAWERIDKKVEGLSKHIKLEEERRSEDAQSKAALTDWLRAKASFVIEGLKEADKDEFCRCELKLQKWYGDLRGKPFAIEAENSILDISGFSKQYNCAFIWQKDGVKKLNLYLIINYFKGGKLRFKKIKPEAFEANRFYTVINKKSGEIVPMEVNFNFDDPNLIILPLAFGKRQGREFIWNDLLSLETGSLKLANGRVIEKTLYNRRTRQDEPALFVALTFERREVLDSSNIKPMNLIGVDRGENIPAVIALTDPEGCPLSRFKDSLGNPTHILRIGESYKEKQRTIQAKKEVEQRRAGGYSRKYASKAKNLADDMVRNTARDLLYYAVTQDAMLIFENLSRGFGRQGKRTFMAERQYTRMEDWLTAKLAYEGLPSKTYLSKTLAQYTSKTCSNCGFTITSADYDRVLEKLKKTATGWMTTINGKELKVEGQITYYNRYKRQNVVKDLSVELDRLSEESVNNDISSWTKGRSGEALSLLKKRFSHRPVQEKFVCLNCGFETHADEQAALNIARSWLFLRSQEYKKYQTNKTTGNTDKRAFVETWQSFYRKKLKEVWKPAV

SEQ ID NO: 32300 - protein, 980 aa, synthetic construct
  REGION 1..980: note = engineered CasX variant
QEIKGRINKIRRRLVKDSNTKKAGKTGPMKTLLVRVMTPDLRERLENLRKKPENIPQPISNTSRANLNKLLTDYTEMKKAILHVYWEEFQKDPVGLMSRVAQPASKKIDQNKLKPEMDEKGNLTTAGFACSQCGQPLFVYKLEQVSEKGKAYTNYFGRCNVAEHEKLILLAQLKPEKDSDEAVTYSLGKFGQRALDFYSIHVTKESTHPVKPLAQIAGNRYASHPVGKALSDACMGTIASFLSKYQDIIIEHQKVVKGNQKRLESLRELAGKENLEYPSVTLPPQPHTKEGVDAYNEVIARVRMWVNLNLWQKLKLSRDDAKPLLRLKGFPSFPLVERQQANEVDWWDMVCNVKKLINEKKEDGKVFWQNLAGYKRQEALRPYLSSEEDRKKGKKFARYQLGDLLLHLEKKHGEDWGKVYDEAWERIDKKVEGLSKHIKLEEERRSEDAQSKAALTDWLRAKASFVIEGLKEADKDEFCRCELKLQKWYGDLRGKPFAIEAENSILDISGFSKQYNCAFIWQKDGVKKLNLYLIINYFKGGKLRFKKIKPEAFEANRFYTVINKKSGEIVPMEVNFNFDDPNLIILPLAFGKRQGREFIWNDLLSLETGSLKLANGRVIEKTLYNRRTRQDEPALFVALTFERREVLDSSNIKPMNLIGVDRGENIPAVIALTDPEGCPLSRFKDSLGNPTHILRIGESYKEKQRTIQAKKEVEQRRAGGYSRKYASKAKNLADDMVRNTARDLLYYAVTQDAMLIFENLSRGFGRQGKRTFMAERQYTRMEDWLTAKLAYEGLPSKTYLSKTLAQYTSKTCSNCGFTITSADYDRVLEKLKKTATGWMTTINGKELKVEGQITYYNRYKRQNVVKDLSVELDRLSEESVNNDISSWTKGRSGEALSLLKKRFSHRPVQEKFVCLNCGFETHADEQAALNIARSWLFLRSQEYKKYQTNKTTGNTDKRAFVETWQSFYRKKLKEVWKPAV

SEQ ID NO: 32301 - protein, 980 aa, synthetic construct
  REGION 1..980: note = engineered CasX variant
QEIKGRINKIRRRLVKDSNTKKAGKTGPMKTLLVRVMTPDLRERLENLRKKPENIPQPISNTSRANLNKLLTDYTEMKKAILHVYWEEFQKDPVGLMSRVAQPASKKIDQNKLKPEMDEKGNLTTAGFACSQCGQPLFVYKLEQVSEKGKAYTNYFGRCNVAEHEKLILLAQLKPEKDSDEAVTYSLGKFGQRALDFYSIHVTKESTHPVKPLAQIAGNRYASSPVGKALSDACMGTIASFLSKYQDIIIEHQKVVKGNQKRLESLRELAGKENLEYPSVTLPPQPHTKEGVDAYNEVIARVRMWVNLNLWQKLKLSRDDAKPLLRLKGFPSFPLVERQQANEVDWWDMVCNVKKLINEKKEDGKVFWQNLAGYKRQEALRPYLSSEEDRKKGKKFARYQLGDLLLHLEKKHGEDWGKVYDEAWERIDKKVEGLSKHIKLEEERRSEDAQSKAALTDWLRAKASFVIEGLKEADKDEFCRCELKLQKWYGDLRGKPFAIEAENSILDISGFSKQYNCAFIWQKDGVKKLNLYLIINYFKGGKLRFKKIKPEAFEANRFYTVINKKSGEIVPMEVNFNFDDPNLIILPLAFGKRQGREFIWNDLLSLETGSLKLANGRVIEKTLYNRRTRQDEPALFVALTFERREVLDSSNIKPMNLIGVDRGENIPAVIALTDPEGCPLSRFKDSLGNPTHILRIGESYKEKQRTIQAKKEVEQRRAGGYSRKYASKAKNLADDMVRNTARDLLYYAVTQDAMLIFENLSRGFGRQGKRTFMAERQYTRMEDWLTAKLAYEGLPSKTYLSKTLAQYTSKTCSNCGFTITSADYDRVLEKLKKTATGWMTTINGKELKVEGQITYYNRYKRQNVVKDLSVELDRLSEESVNNDISSWTKGRSGEALSLLKKRFSHRPVQEKFVCLNCGFETHADEQAALNIARSWLFLRSQEYKKYQTNKTTGNTDKRAFVETWQSFYRKKLKEVWKPAV

SEQ ID NO: 32302 - protein, 980 aa, synthetic construct
  REGION 1..980: note = engineered CasX variant
QEIKGRINKIRRRLVKDSNTKKAGKTGPMKTLLVRVMTPDLRERLENLRKKPENIPQPISNTSRANLNKLLTDYTEMKKAILHVYWEEFQKDPVGLMSRVAQPASKKIDQNKLKPEMDEKGNLTTAGFACSQCGQPLFVYKLEQVSEKGKAYTNYFGRCNVAEHEKLILLAQLKPEKDSDEAVTYSLGKFGQRALDFYSIHVTKESTHPVKPLAQIAGNRYASTPVGKALSDACMGTIASFLSKYQDIIIEHQKVVKGNQKRLESLRELAGKENLEYPSVTLPPQPHTKEGVDAYNEVIARVRMWVNLNLWQKLKLSRDDAKPLLRLKGFPSFPLVERQQANEVDWWDMVCNVKKLINEKKEDGKVFWQNLAGYKRQEALRPYLSSEEDRKKGKKFARYQLGDLLLHLEKKHGEDWGKVYDEAWERIDKKVEGLSKHIKLEEERRSEDAQSKAALTDWLRAKASFVIEGLKEADKDEFCRCELKLQKWYGDLRGKPFAIEAENSILDISGFSKQYNCAFIWQKDGVKKLNLYLIINYFKGGKLRFKKIKPEAFEANRFYTVINKKSGEIVPMEVNFNFDDPNLIILPLAFGKRQGREFIWNDLLSLETGSLKLANGRVIEKTLYNRRTRQDEPALFVALTFERREVLDSSNIKPMNLIGVDRGENIPAVIALTDPEGCPLSRFKDSLGNPTHILRIGESYKEKQRTIQAKKEVEQRRAGGYSRKYASKAKNLADDMVRNTARDLLYYAVTQDAMLIFENLSRGFGRQGKRTFMAERQYTRMEDWLTAKLAYEGLPSKTYLSKTLAQYTSKTCSNCGFTITSADYDRVLEKLKKTATGWMTTINGKELKVEGQITYYNRYKRQNVVKDLSVELDRLSEESVNNDISSWTKGRSGEALSLLKKRFSHRPVQEKFVCLNCGFETHADEQAALNIARSWLFLRSQEYKKYQTNKTTGNTDKRAFVETWQSFYRKKLKEVWKPAV

SEQ ID NO: 32303 - protein, 980 aa, synthetic construct
  REGION 1..980: note = engineered CasX variant
QEIKGRINKIRRRLVKDSNTKKAGKTGPMKTLLVRVMTPDLRERLENLRKKPENIPQPISNTSRANLNKLLTDYTEMKKAILHVYWEEFQKDPVGLMSRVAQPASKKIDQNKLKPEMDEKGNLTTAGFACSQCGQPLFVYKLEQVSEKGKAYTNYFGRCNVAEHEKLILLAQLKPEKDSDEAVTYSLGKFGQRALDFYSIHVTKESTHPVKPLAQIAGNRYASAPVGKALSDACMGTIASFLSKYQDIIIEHQKVVKGNQKRLESLRELAGKENLEYPSVTLPPQPHTKEGVDAYNEVIARVRMWVNLNLWQKLKLSRDDAKPLLRLKGFPSFPLVERQQANEVDWWDMVCNVKKLINEKKEDGKVFWQNLAGYKRQEALRPYLSSEEDRKKGKKFARYQLGDLLLHLEKKHGEDWGKVYDEAWERIDKKVEGLSKHIKLEEERRSEDAQSKAALTDWLRAKASFVIEGLKEADKDEFCRCELKLQKWYGDLRGKPFAIEAENSILDISGFSKQYNCAFIWQKDGVKKLNLYLIINYFKGGKLRFKKIKPEAFEANRFYTVINKKSGEIVPMEVNFNFDDPNLIILPLAFGKRQGREFIWNDLLSLETGSLKLANGRVIEKTLYNRRTRQDEPALFVALTFERREVLDSSNIKPMNLIGVDRGENIPAVIALTDPEGCPLSRFKDSLGNPTHILRIGESYKEKQRTIQAKKEVEQRRAGGYSRKYASKAKNLADDMVRNTARDLLYYAVTQDAMLIFENLSRGFGRQGKRTFMAERQYTRMEDWLTAKLAYEGLPSKTYLSKTLAQYTSKTCSNCGFTITSADYDRVLEKLKKTATGWMTTINGKELKVEGQITYYNRYKRQNVVKDLSVELDRLSEESVNNDISSWTKGRSGEALSLLKKRFSHRPVQEKFVCLNCGFETHADEQAALNIARSWLFLRSQEYKKYQTNKTTGNTDKRAFVETWQSFYRKKLKEVWKPAV

SEQ ID NO: 32304 - protein, 980 aa, synthetic construct
  REGION 1..980: note = engineered CasX variant
QEIKGRINKIRRRLVKDSNTKKAGKTGPMKTLLVRVMTPDLRERLENLRKKPENIPQPISNTSRANLNKLLTDYTEMKKAILHVYWEEFQKDPVGLMSRVAQPASKKIDQNKLKPEMDEKGNLTTAGFACSQCGQPLFVYKLEQVSEKGKAYTNYFGRCNVAEHEKLILLAQLKPEKDSDEAVTYSLGKFGQRALDFYSIHVTKESTHPVKPLAQIAGNRYASVPVGKALSDACMGTIASFLSKYQDIIIEHQKVVKGNQKRLESLRELAGKENLEYPSVTLPPQPHTKEGVDAYNEVIARVRMWVNLNLWQKLKLSRDDAKPLLRLKGFPSFPLVERQQANEVDWWDMVCNVKKLINEKKEDGKVFWQNLAGYKRQEALRPYLSSEEDRKKGKKFARYQLGDLLLHLEKKHGEDWGKVYDEAWERIDKKVEGLSKHIKLEEERRSEDAQSKAALTDWLRAKASFVIEGLKEADKDEFCRCELKLQKWYGDLRGKPFAIEAENSILDISGFSKQYNCAFIWQKDGVKKLNLYLIINYFKGGKLRFKKIKPEAFEANRFYTVINKKSGEIVPMEVNFNFDDPNLIILPLAFGKRQGREFIWNDLLSLETGSLKLANGRVIEKTLYNRRTRQDEPALFVALTFERREVLDSSNIKPMNLIGVDRGENIPAVIALTDPEGCPLSRFKDSLGNPTHILRIGESYKEKQRTIQAKKEVEQRRAGGYSRKYASKAKNLADDMVRNTARDLLYYAVTQDAMLIFENLSRGFGRQGKRTFMAERQYTRMEDWLTAKLAYEGLPSKTYLSKTLAQYTSKTCSNCGFTITSADYDRVLEKLKKTATGWMTTINGKELKVEGQITYYNRYKRQNVVKDLSVELDRLSEESVNNDISSWTKGRSGEALSLLKKRFSHRPVQEKFVCLNCGFETHADEQAALNIARSWLFLRSQEYKKYQTNKTTGNTDKRAFVETWQSFYRKKLKEVWKPAV

SEQ ID NO: 32305 - protein, 980 aa, synthetic construct
  REGION 1..980: note = engineered CasX variant
QEIKGRINKIRRRLVKDSNTKKAGKTGPMKTLLVRVMTPDLRERLENLRKKPENIPQPISNTSRANLNKLLTDYTEMKKAILHVYWEEFQKDPVGLMSRVAQPASKKIDQNKLKPEMDEKGNLTTAGFACSQCGQPLFVYKLEQVSEKGKAYTNYFGRCNVAEHEKLIKLAQLKPEKDSDEAVTYSLGKFGQRALDFYSIHVTKESTHPVKPLAQIAGNRYASGPVGKALSDACMGTIASFLSKYQDIIIEHQKVVKGNQKRLESLRELAGKENLEYPSVTLPPQPHTKEGVDAYNEVIARVRMWVNLNLWQKLKLSRDDAKPLLRLKGFPSFPLVERQQANEVDWWDMVCNVKKLINEKKEDGKVFWQNLAGYKRQEALRPYLSSEEDRKKGKKFARYQLGDLLLHLEKKHGEDWGKVYDEAWERIDKKVEGLSKHIKLEEERRSEDAQSKAALTDWLRAKASFVIEGLKEADKDEFCRCELKLQKWYGDLRGKPFAIEAENSILDISGFSKQYNCAFIWQKDGVKKLNLYLIINYFKGGKLRFKKIKPEAFEANRFYTVINKKSGEIVPMEVNFNFDDPNLIILPLAFGKRQGREFIWNDLLSLETGSLKLANGRVIEKTLYNRRTRQDEPALFVALTFERREVLDSSNIKPMNLIGVDRGENIPAVIALTDPEGCPLSRFKDSLGNPTHILRIGESYKEKQRTIQAKKEVEQRRAGGYSRKYASKAKNLADDMVRNTARDLLYYAVTQDAMLIFENLSRGFGRQGKRTFMAERQYTRMEDWLTAKLAYEGLPSKTYLSKTLAQYTSKTCSNCGFTITSADYDRVLEKLKKTATGWMTTINGKELKVEGQITYYNRYKRQNVVKDLSVELDRLSEESVNNDISSWTKGRSGEALSLLKKRFSHRPVQEKFVCLNCGFETHADEQAALNIARSWLFLRSQEYKKYQTNKTTGNTDKRAFVETWQSFYRKKLKEVWKPAV

SEQ ID NO: 32306 - protein, 979 aa, synthetic construct
  REGION 1..979: note = engineered CasX variant
QEIKGRINKIRRRLVKDSNTKKAGKTGPMKTLLVRVMTPDLRERLENLRKKPENIPQPISNTSRANLNKLLTDYTEMKKAILHVYWEEFQKDPVGLMSRVAQPASKKIDQNKLKPEMDEKGNLTTAGFACSQCGQPLFVYKLEQVSEKGKAYTNYFGRCNVAEHEKLILLAQLKPEKDSDEAVTYSLGKFGQRALDFYSIHVTKESTHPVKPLAQIAGNRYASPVGKALSDACMGTIASFLSKYQDIIIEHQKVVKGNQKRLESLRELAGKENLEYPSVTLPPQPHTKEGVDAYNEVIARVRMWVNLNLWQKLKLSRDDAKPLLRLKGFPSFPLVERQQANEVDWWDMVCNVKKLINEKKEDGKVFWQNLAGYKRQEALRPYLSSEEDRKKGKKFARYQLGDLLLHLEKKHGEDWGKVYDEAWERIDKKVEGLSKHIKLEEERRSEDAQSKAALTDWLRAKASFVIEGLKEADKDEFCRCELKLQKWYGDLRGKPFAIEAENSILDISGFSKQYNCAFIWQKDGVKKLNLYLIINYFKGGKLRFKKIKPEAFEANRFYTVINKKSGEIVPMEVNFNFDDPNLIILPLAFGKRQGREFIWNDLLSLETGSLKLANGRVIEKTLYNRRTRQDEPALFVALTFERREVLDSSNIKPMNLIGVDRGENIPAVIALTDPEGCPLSRFKDSLGNPTHILRIGESYKEKQRTIQAKKEVEQRRAGGYSRKYASKAKNLADDMVRNTARDLLYYAVTQDAMLIFENLSRGFGRQGKRTFMAERQYTRMEDWLTAKLAYEGLPSKTYLSKTLAQYTSKTCSNCGFTITSADYDRVLEKLKKTATGWMTTINGKELKVEGQITYYNRYKRQNVVKDLSVELDRLSEESVNNDISSWTKGRSGEALSLLKKRFSHRPVQEKFVCLNCGFETHADEQAALNIARSWLFLRSQEYKKYQTNKTTGNTDKRAFVETWQSFYRKKLKEVWKPAV

SEQ ID NO: 32307 - protein, 980 aa, synthetic construct
  REGION 1..980: note = engineered CasX variant
QEIKGRINKIRRRLVKDSNTKKAGKTGPMKTLLVRVMTPDLRERLENLRKKPENIPQPISNTSRANLNKLLTDYTEMKKAILHVYWEEFQKDPVGLMSRVAQPASKKIDQNKLKPEMDEKGNLTTAGFACSQCGQPLFVYKLEQVSEKGKAYTNYFGRCNVAEHEKLILLAQLKPEKDSDEAVTYSLGKFGQRALDFYSIHVTKESTHPVKPLAQIAGNRYASYPVGKALSDACMGTIASFLSKYQDIIIEHQKVVKGNQKRLESLRELAGKENLEYPSVTLPPQPHTKEGVDAYNEVIARVRMWVNLNLWQKLKLSRDDAKPLLRLKGFPSFPLVERQANAEVDWWDMVCNVKKLINEKKEDGKVFWQNLAGYKRQEALRPYLSSEEDRKKGKKFARYQLGDLLLHLEKKHGEDWGKVYDEAWERIDKKVEGLSKHIKLEEERRSEDAQSKAALTDWLRAKASFVIEGLKEADKDEFCRCELKLQKWYGDLRGKPFAIEAENSILDISGFSKQYNCAFIWQKDGVKKLNLYLIINYFKGGKLRFKKIKPEAFEANRFYTVINKKSGEIVPMEVNFNFDDPNLIILPLAFGKRQGREFIWNDLLSLETGSLKLANGRVIEKTLYNRRTRQDEPALFVALTFERREVLDSSNIKPMNLIGVDRGENIPAVIALTDPEGCPLSRFKDSLGNPTHILRIGESYKEKQRTIQAKKEVEQRRAGGYSRKYASKAKNLADDMVRNTARDLLYYAVTQDAMLIFENLSRGFGRQGKRTFMAERQYTRMEDWLTAKLAYEGLPSKTYLSKTLAQYTSKTCSNCGFTITSADYDRVLEKLKKTATGWMTTINGKELKVEGQITYYNRYKRQNVVKDLSVELDRLSEESVNNDISSWTKGRSGEALSLLKKRFSHRPVQEKFVCLNCGFETHADEQAALNIARSWLFLRSQEYKKYQTNKTTGNTDKRAFVETWQSFYRKKLKEVWKPAV

SEQ ID NO: 32308 - protein, 980 aa, synthetic construct
  REGION 1..980: note = engineered CasX variant
QEIKGRINKIRRRLVKDSNTKKAGKTGPMKTLLVRVMTPDLRERLENLRKKPENIPQPISNTSRANLNKLLTDYTEMKKAILHVYWEEFQKDPVGLMSRVAQPASKKIDQNKLKPEMDEKGNLTTAGFACSQCGQPLFVYKLEQVSEKGKAYTNYFGRCNVAEHEKLILLAQLKPEKDSDEAVTYSLGKFGQRALDFYSIHVTKESTHPVKPLAQIAGNRYASHPVGKALSDACMGTIASFLSKYQDIIIEHQKVVKGNQKRLESLRELAGKENLEYPSVTLPPQPHTKEGVDAYNEVIARVRMWVNLNLWQKLKLSRDDAKPLLRLKGFPSFPLVERQANAEVDWWDMVCNVKKLINEKKEDGKVFWQNLAGYKRQEALRPYLSSEEDRKKGKKFARYQLGDLLLHLEKKHGEDWGKVYDEAWERIDKKVEGLSKHIKLEEERRSEDAQSKAALTDWLRAKASFVIEGLKEADKDEFCRCELKLQKWYGDLRGKPFAIEAENSILDISGFSKQYNCAFIWQKDGVKKLNLYLIINYFKGGKLRFKKIKPEAFEANRFYTVINKKSGEIVPMEVNFNFDDPNLIILPLAFGKRQGREFIWNDLLSLETGSLKLANGRVIEKTLYNRRTRQDEPALFVALTFERREVLDSSNIKPMNLIGVDRGENIPAVIALTDPEGCPLSRFKDSLGNPTHILRIGESYKEKQRTIQAKKEVEQRRAGGYSRKYASKAKNLADDMVRNTARDLLYYAVTQDAMLIFENLSRGFGRQGKRTFMAERQYTRMEDWLTAKLAYEGLPSKTYLSKTLAQYTSKTCSNCGFTITSADYDRVLEKLKKTATGWMTTINGKELKVEGQITYYNRYKRQNVVKDLSVELDRLSEESVNNDISSWTKGRSGEALSLLKKRFSHRPVQEKFVCLNCGFETHADEQAALNIARSWLFLRSQEYKKYQTNKTTGNTDKRAFVETWQSFYRKKLKEVWKPAV

SEQ ID NO: 32309 - protein, 980 aa, synthetic construct
  REGION 1..980: note = engineered CasX variant
QEIKGRINKIRRRLVKDSNTKKAGKTGPMKTLLVRVMTPDLRERLENLRKKPENIPQPISNTSRANLNKLLTDYTEMKKAILHVYWEEFQKDPVGLMSRVAQPASKKIDQNKLKPEMDEKGNLTTAGFACSQCGQPLFVYKLEQVSEKGKAYTNYFGRCNVAEHEKLILLAQLKPEKDSDEAVTYSLGKFGQRALDFYSIHVTKESTHPVKPLAQIAGNRYASSPVGKALSDACMGTIASFLSKYQDIIIEHQKVVKGNQKRLESLRELAGKENLEYPSVTLPPQPHTKEGVDAYNEVIARVRMWVNLNLWQKLKLSRDDAKPLLRLKGFPSFPLVERQANAEVDWWDMVCNVKKLINEKKEDGKVFWQNLAGYKRQEALRPYLSSEEDRKKGKKFARYQLGDLLLHLEKKHGEDWGKVYDEAWERIDKKVEGLSKHIKLEEERRSEDAQSKAALTDWLRAKASFVIEGLKEADKDEFCRCELKLQKWYGDLRGKPFAIEAENSILDISGFSKQYNCAFIWQKDGVKKLNLYLIINYFKGGKLRFKKIKPEAFEANRFYTVINKKSGEIVPMEVNFNFDDPNLIILPLAFGKRQGREFIWNDLLSLETGSLKLANGRVIEKTLYNRRTRQDEPALFVALTFERREVLDSSNIKPMNLIGVDRGENIPAVIALTDPEGCPLSRFKDSLGNPTHILRIGESYKEKQRTIQAKKEVEQRRAGGYSRKYASKAKNLADDMVRNTARDLLYYAVTQDAMLIFENLSRGFGRQGKRTFMAERQYTRMEDWLTAKLAYEGLPSKTYLSKTLAQYTSKTCSNCGFTITSADYDRVLEKLKKTATGWMTTINGKELKVEGQITYYNRYKRQNVVKDLSVELDRLSEESVNNDISSWTKGRSGEALSLLKKRFSHRPVQEKFVCLNCGFETHADEQAALNIARSWLFLRSQEYKKYQTNKTTGNTDKRAFVETWQSFYRKKLKEVWKPAV

SEQ ID NO: 32310 - protein, 980 aa, synthetic construct
  REGION 1..980: note = engineered CasX variant
QEIKGRINKIRRRLVKDSNTKKAGKTGPMKTLLVRVMTPDLRERLENLRKKPENIPQPISNTSRANLNKLLTDYTEMKKAILHVYWEEFQKDPVGLMSRVAQPASKKIDQNKLKPEMDEKGNLTTAGFACSQCGQPLFVYKLEQVSEKGKAYTNYFGRCNVAEHEKLILLAQLKPEKDSDEAVTYSLGKFGQRALDFYSIHVTKESTHPVKPLAQIAGNRYASTPVGKALSDACMGTIASFLSKYQDIIIEHQKVVKGNQKRLESLRELAGKENLEYPSVTLPPQPHTKEGVDAYNEVIARVRMWVNLNLWQKLKLSRDDAKPLLRLKGFPSFPLVERQANAEVDWWDMVCNVKKLINEKKEDGKVFWQNLAGYKRQEALRPYLSSEEDRKKGKKFARYQLGDLLLHLEKKHGEDWGKVYDEAWERIDKKVEGLSKHIKLEEERRSEDAQSKAALTDWLRAKASFVIEGLKEADKDEFCRCELKLQKWYGDLRGKPFAIEAENSILDISGFSKQYNCAFIWQKDGVKKLNLYLIINYFKGGKLRFKKIKPEAFEANRFYTVINKKSGEIVPMEVNFNFDDPNLIILPLAFGKRQGREFIWNDLLSLETGSLKLANGRVIEKTLYNRRTRQDEPALFVALTFERREVLDSSNIKPMNLIGVDRGENIPAVIALTDPEGCPLSRFKDSLGNPTHILRIGESYKEKQRTIQAKKEVEQRRAGGYSRKYASKAKNLADDMVRNTARDLLYYAVTQDAMLIFENLSRGFGRQGKRTFMAERQYTRMEDWLTAKLAYEGLPSKTYLSKTLAQYTSKTCSNCGFTITSADYDRVLEKLKKTATGWMTTINGKELKVEGQITYYNRYKRQNVVKDLSVELDRLSEESVNNDISSWTKGRSGEALSLLKKRFSHRPVQEKFVCLNCGFETHADEQAALNIARSWLFLRSQEYKKYQTNKTTGNTDKRAFVETWQSFYRKKLKEVWKPAV

SEQ ID NO: 32311 - protein, 980 aa, synthetic construct
  REGION 1..980: note = engineered CasX variant
QEIKGRINKIRRRLVKDSNTKKAGKTGPMKTLLVRVMTPDLRERLENLRKKPENIPQPISNTSRANLNKLLTDYTEMKKAILHVYWEEFQKDPVGLMSRVAQPASKKIDQNKLKPEMDEKGNLTTAGFACSQCGQPLFVYKLEQVSEKGKAYTNYFGRCNVAEHEKLILLAQLKPEKDSDEAVTYSLGKFGQRALDFYSIHVTKESTHPVKPLAQIAGNRYASAPVGKALSDACMGTIASFLSKYQDIIIEHQKVVKGNQKRLESLRELAGKENLEYPSVTLPPQPHTKEGVDAYNEVIARVRMWVNLNLWQKLKLSRDDAKPLLRLKGFPSFPLVERQANAEVDWWDMVCNVKKLINEKKEDGKVFWQNLAGYKRQEALRPYLSSEEDRKKGKKFARYQLGDLLLHLEKKHGEDWGKVYDEAWERIDKKVEGLSKHIKLEEERRSEDAQSKAALTDWLRAKASFVIEGLKEADKDEFCRCELKLQKWYGDLRGKPFAIEAENSILDISGFSKQYNCAFIWQKDGVKKLNLYLIINYFKGGKLRFKKIKPEAFEANRFYTVINKKSGEIVPMEVNFNFDDPNLIILPLAFGKRQGREFIWNDLLSLETGSLKLANGRVIEKTLYNRRTRQDEPALFVALTFERREVLDSSNIKPMNLIGVDRGENIPAVIALTDPEGCPLSRFKDSLGNPTHILRIGESYKEKQRTIQAKKEVEQRRAGGYSRKYASKAKNLADDMVRNTARDLLYYAVTQDAMLIFENLSRGFGRQGKRTFMAERQYTRMEDWLTAKLAYEGLPSKTYLSKTLAQYTSKTCSNCGFTITSADYDRVLEKLKKTATGWMTTINGKELKVEGQITYYNRYKRQNVVKDLSVELDRLSEESVNNDISSWTKGRSGEALSLLKKRFSHRPVQEKFVCLNCGFETHADEQAALNIARSWLFLRSQEYKKYQTNKTTGNTDKRAFVETWQSFYRKKLKEVWKPAV

SEQ ID NO: 32312 - protein, 980 aa, synthetic construct
  REGION 1..980: note = engineered CasX variant
QEIKGRINKIRRRLVKDSNTKKAGKTGPMKTLLVRVMTPDLRERLENLRKKPENIPQPISNTSRANLNKLLTDYTEMKKAILHVYWEEFQKDPVGLMSRVAQPASKKIDQNKLKPEMDEKGNLTTAGFACSQCGQPLFVYKLEQVSEKGKAYTNYFGRCNVAEHEKLILLAQLKPEKDSDEAVTYSLGKFGQRALDFYSIHVTKESTHPVKPLAQIAGNRYASVPVGKALSDACMGTIASFLSKYQDIIIEHQKVVKGNQKRLESLRELAGKENLEYPSVTLPPQPHTKEGVDAYNEVIARVRMWVNLNLWQKLKLSRDDAKPLLRLKGFPSFPLVERQANAEVDWWDMVCNVKKLINEKKEDGKVFWQNLAGYKRQEALRPYLSSEEDRKKGKKFARYQLGDLLLHLEKKHGEDWGKVYDEAWERIDKKVEGLSKHIKLEEERRSEDAQSKAALTDWLRAKASFVIEGLKEADKDEFCRCELKLQKWYGDLRGKPFAIEAENSILDISGFSKQYNCAFIWQKDGVKKLNLYLIINYFKGGKLRFKKIKPEAFEANRFYTVINKKSGEIVPMEVNFNFDDPNLIILPLAFGKRQGREFIWNDLLSLETGSLKLANGRVIEKTLYNRRTRQDEPALFVALTFERREVLDSSNIKPMNLIGVDRGENIPAVIALTDPEGCPLSRFKDSLGNPTHILRIGESYKEKQRTIQAKKEVEQRRAGGYSRKYASKAKNLADDMVRNTARDLLYYAVTQDAMLIFENLSRGFGRQGKRTFMAERQYTRMEDWLTAKLAYEGLPSKTYLSKTLAQYTSKTCSNCGFTITSADYDRVLEKLKKTATGWMTTINGKELKVEGQITYYNRYKRQNVVKDLSVELDRLSEESVNNDISSWTKGRSGEALSLLKKRFSHRPVQEKFVCLNCGFETHADEQAALNIARSWLFLRSQEYKKYQTNKTTGNTDKRAFVETWQSFYRKKLKEVWKPAV

SEQ ID NO: 32313 - protein, 980 aa, synthetic construct
  REGION 1..980: note = engineered CasX variant
QEIKGRINKIRRRLVKDSNTKKAGKTGPMKTLLVRVMTPDLRERLENLRKKPENIPQPISNTSRANLNKLLTDYTEMKKAILHVYWEEFQKDPVGLMSRVAQPASKKIDQNKLKPEMDEKGNLTTAGFACSQCGQPLFVYKLEQVSEKGKAYTNYFGRCNVAEHEKLIKLAQLKPEKDSDEAVTYSLGKFGQRALDFYSIHVTKESTHPVKPLAQIAGNRYASGPVGKALSDACMGTIASFLSKYQDIIIEHQKVVKGNQKRLESLRELAGKENLEYPSVTLPPQPHTKEGVDAYNEVIARVRMWVNLNLWQKLKLSRDDAKPLLRLKGFPSFPLVERQANAEVDWWDMVCNVKKLINEKKEDGKVFWQNLAGYKRQEALRPYLSSEEDRKKGKKFARYQLGDLLLHLEKKHGEDWGKVYDEAWERIDKKVEGLSKHIKLEEERRSEDAQSKAALTDWLRAKASFVIEGLKEADKDEFCRCELKLQKWYGDLRGKPFAIEAENSILDISGFSKQYNCAFIWQKDGVKKLNLYLIINYFKGGKLRFKKIKPEAFEANRFYTVINKKSGEIVPMEVNFNFDDPNLIILPLAFGKRQGREFIWNDLLSLETGSLKLANGRVIEKTLYNRRTRQDEPALFVALTFERREVLDSSNIKPMNLIGVDRGENIPAVIALTDPEGCPLSRFKDSLGNPTHILRIGESYKEKQRTIQAKKEVEQRRAGGYSRKYASKAKNLADDMVRNTARDLLYYAVTQDAMLIFENLSRGFGRQGKRTFMAERQYTRMEDWLTAKLAYEGLPSKTYLSKTLAQYTSKTCSNCGFTITSADYDRVLEKLKKTATGWMTTINGKELKVEGQITYYNRYKRQNVVKDLSVELDRLSEESVNNDISSWTKGRSGEALSLLKKRFSHRPVQEKFVCLNCGFETHADEQAALNIARSWLFLRSQEYKKYQTNKTTGNTDKRAFVETWQSFYRKKLKEVWKPAV

SEQ ID NO: 32314 - protein, 979 aa, synthetic construct
  REGION 1..979: note = engineered CasX variant
QEIKGRINKIRRRLVKDSNTKKAGKTGPMKTLLVRVMTPDLRERLENLRKKPENIPQPISNTSRANLNKLLTDYTEMKKAILHVYWEEFQKDPVGLMSRVAQPASKKIDQNKLKPEMDEKGNLTTAGFACSQCGQPLFVYKLEQVSEKGKAYTNYFGRCNVAEHEKLILLAQLKPEKDSDEAVTYSLGKFGQRALDFYSIHVTKESTHPVKPLAQIAGNRYASPVGKALSDACMGTIASFLSKYQDIIIEHQKVVKGNQKRLESLRELAGKENLEYPSVTLPPQPHTKEGVDAYNEVIARVRMWVNLNLWQKLKLSRDDAKPLLRLKGFPSFPLVERQANAEVDWWDMVCNVKKLINEKKEDGKVFWQNLAGYKRQEALRPYLSSEEDRKKGKKFARYQLGDLLLHLEKKHGEDWGKVYDEAWERIDKKVEGLSKHIKLEEERRSEDAQSKAALTDWLRAKASFVIEGLKEADKDEFCRCELKLQKWYGDLRGKPFAIEAENSILDISGFSKQYNCAFIWQKDGVKKLNLYLIINYFKGGKLRFKKIKPEAFEANRFYTVINKKSGEIVPMEVNFNFDDPNLIILPLAFGKRQGREFIWNDLLSLETGSLKLANGRVIEKTLYNRRTRQDEPALFVALTFERREVLDSSNIKPMNLIGVDRGENIPAVIALTDPEGCPLSRFKDSLGNPTHILRIGESYKEKQRTIQAKKEVEQRRAGGYSRKYASKAKNLADDMVRNTARDLLYYAVTQDAMLIFENLSRGFGRQGKRTFMAERQYTRMEDWLTAKLAYEGLPSKTYLSKTLAQYTSKTCSNCGFTITSADYDRVLEKLKKTATGWMTTINGKELKVEGQITYYNRYKRQNVVKDLSVELDRLSEESVNNDISSWTKGRSGEALSLLKKRFSHRPVQEKFVCLNCGFETHADEQAALNIARSWLFLRSQEYKKYQTNKTTGNTDKRAFVETWQSFYRKKLKEVWKPAV

SEQ ID NO: 32315 - protein, 979 aa, synthetic construct
  REGION 1..979: note = engineered CasX variant
QEIKGRINKIRRRLVKDSNTKKAGKTGPMKTLLVRVMTPDLRERLENLRKKPENIPQPISNTSRANLNKLLTDYTEMKKAILHVYWEEFQKDPVGLMSRVAQPASKKIDQNKLKPEMDEKGNLTTAGFACSQCGQPLFVYKLEQVSEKGKAYTNYFGRCNVAEHEKLILLAQLKPEKDSDEAVTYSLGKFGQRALDFYSIHVTKESTHPVKPLAQIAGNRYASYPVGKALSDACMGTIASFLSKYQDIIIEHQKVVKGNQKRLESLRELAGKENLEYPSVTLPPQPHTKEGVDAYNEVIARVRMWVNLNLWQKLKLSRDDAKPLLRLKGFPSFPLVERQANEVDWWDMVCNVKKLINEKKEDGKVFWQNLAGYKRQEALRPYLSSEEDRKKGKKFARTQLGDLLLHLEKKHGEDWGKVYDEAWERIDKKVEGLSKHIKLEEERRSEDAQSKAALTDWLRAKASFVIEGLKEADKDEFCRCELKLQKWYGDLRGKPFAIEAENSILDISGFSKQYNCAFIWQKDGVKKLNLYLIINYFKGGKLRFKKIKPEAFEANRFYTVINKKSGEIVPMEVNFNFDDPNLIILPLAFGKRQGREFIWNDLLSLETGSLKLANGRVIEKTLYNRRTRQDEPALFVALTFERREVLDSSNIKPMNLIGVDRGENIPAVIALTDPEGCPLSRFKDSLGNPTHILRIGESYKEKQRTIQAKKEVEQRRAGGYSRKYASKAKNLADDMVRNTARDLLYYAVTQDAMLIFENLSRGFGRQGKRTFMAERQYTRMEDWLTAKLAYEGLPSKTYLSKTLAQYTSKTCSNCGFTITSADYDRVLEKLKKTATGWMTTINGKELKVEGQITYYNRYKRQNVVKDLSVELDRLSEESVNNDISSWTKGRSGEALSLLKKRFSHRPVQEKFVCLNCGFETHADEQAALNIARSWLFLRSQEYKKYQTNKTTGNTDKRAFVETWQSFYRKKLKEVWKPAV

SEQ ID NO: 32316 - protein, 979 aa, synthetic construct
  REGION 1..979: note = engineered CasX variant
QEIKGRINKIRRRLVKDSNTKKAGKTGPMKTLLVRVMTPDLRERLENLRKKPENIPQPISNTSRANLNKLLTDYTEMKKAILHVYWEEFQKDPVGLMSRVAQPASKKIDQNKLKPEMDEKGNLTTAGFACSQCGQPLFVYKLEQVSEKGKAYTNYFGRCNVAEHEKLILLAQLKPEKDSDEAVTYSLGKFGQRALDFYSIHVTKESTHPVKPLAQIAGNRYASHPVGKALSDACMGTIASFLSKYQDIIIEHQKVVKGNQKRLESLRELAGKENLEYPSVTLPPQPHTKEGVDAYNEVIARVRMWVNLNLWQKLKLSRDDAKPLLRLKGFPSFPLVERQANEVDWWDMVCNVKKLINEKKEDGKVFWQNLAGYKRQEALRPYLSSEEDRKKGKKFARTQLGDLLLHLEKKHGEDWGKVYDEAWERIDKKVEGLSKHIKLEEERRSEDAQSKAALTDWLRAKASFVIEGLKEADKDEFCRCELKLQKWYGDLRGKPFAIEAENSILDISGFSKQYNCAFIWQKDGVKKLNLYLIINYFKGGKLRFKKIKPEAFEANRFYTVINKKSGEIVPMEVNFNFDDPNLIILPLAFGKRQGREFIWNDLLSLETGSLKLANGRVIEKTLYNRRTRQDEPALFVALTFERREVLDSSNIKPMNLIGVDRGENIPAVIALTDPEGCPLSRFKDSLGNPTHILRIGESYKEKQRTIQAKKEVEQRRAGGYSRKYASKAKNLADDMVRNTARDLLYYAVTQDAMLIFENLSRGFGRQGKRTFMAERQYTRMEDWLTAKLAYEGLPSKTYLSKTLAQYTSKTCSNCGFTITSADYDRVLEKLKKTATGWMTTINGKELKVEGQITYYNRYKRQNVVKDLSVELDRLSEESVNNDISSWTKGRSGEALSLLKKRFSHRPVQEKFVCLNCGFETHADEQAALNIARSWLFLRSQEYKKYQTNKTTGNTDKRAFVETWQSFYRKKLKEVWKPAV

SEQ ID NO: 32317 - protein, 979 aa, synthetic construct
  REGION 1..979: note = engineered CasX variant
QEIKGRINKIRRRLVKDSNTKKAGKTGPMKTLLVRVMTPDLRERLENLRKKPENIPQPISNTSRANLNKLLTDYTEMKKAILHVYWEEFQKDPVGLMSRVAQPASKKIDQNKLKPEMDEKGNLTTAGFACSQCGQPLFVYKLEQVSEKGKAYTNYFGRCNVAEHEKLILLAQLKPEKDSDEAVTYSLGKFGQRALDFYSIHVTKESTHPVKPLAQIAGNRYASSPVGKALSDACMGTIASFLSKYQDIIIEHQKVVKGNQKRLESLRELAGKENLEYPSVTLPPQPHTKEGVDAYNEVIARVRMWVNLNLWQKLKLSRDDAKPLLRLKGFPSFPLVERQANEVDWWDMVCNVKKLINEKKEDGKVFWQNLAGYKRQEALRPYLSSEEDRKKGKKFARTQLGDLLLHLEKKHGEDWGKVYDEAWERIDKKVEGLSKHIKLEEERRSEDAQSKAALTDWLRAKASFVIEGLKEADKDEFCRCELKLQKWYGDLRGKPFAIEAENSILDISGFSKQYNCAFIWQKDGVKKLNLYLIINYFKGGKLRFKKIKPEAFEANRFYTVINKKSGEIVPMEVNFNFDDPNLIILPLAFGKRQGREFIWNDLLSLETGSLKLANGRVIEKTLYNRRTRQDEPALFVALTFERREVLDSSNIKPMNLIGVDRGENIPAVIALTDPEGCPLSRFKDSLGNPTHILRIGESYKEKQRTIQAKKEVEQRRAGGYSRKYASKAKNLADDMVRNTARDLLYYAVTQDAMLIFENLSRGFGRQGKRTFMAERQYTRMEDWLTAKLAYEGLPSKTYLSKTLAQYTSKTCSNCGFTITSADYDRVLEKLKKTATGWMTTINGKELKVEGQITYYNRYKRQNVVKDLSVELDRLSEESVNNDISSWTKGRSGEALSLLKKRFSHRPVQEKFVCLNCGFETHADEQAALNIARSWLFLRSQEYKKYQTNKTTGNTDKRAFVETWQSFYRKKLKEVWKPAV

SEQ ID NO: 32318 - protein, 979 aa, synthetic construct
  REGION 1..979: note = engineered CasX variant
QEIKGRINKIRRRLVKDSNTKKAGKTGPMKTLLVRVMTPDLRERLENLRKKPENIPQPISNTSRANLNKLLTDYTEMKKAILHVYWEEFQKDPVGLMSRVAQPASKKIDQNKLKPEMDEKGNLTTAGFACSQCGQPLFVYKLEQVSEKGKAYTNYFGRCNVAEHEKLILLAQLKPEKDSDEAVTYSLGKFGQRALDFYSIHVTKESTHPVKPLAQIAGNRYASTPVGKALSDACMGTIASFLSKYQDIIIEHQKVVKGNQKRLESLRELAGKENLEYPSVTLPPQPHTKEGVDAYNEVIARVRMWVNLNLWQKLKLSRDDAKPLLRLKGFPSFPLVERQANEVDWWDMVCNVKKLINEKKEDGKVFWQNLAGYKRQEALRPYLSSEEDRKKGKKFARTQLGDLLLHLEKKHGEDWGKVYDEAWERIDKKVEGLSKHIKLEEERRSEDAQSKAALTDWLRAKASFVIEGLKEADKDEFCRCELKLQKWYGDLRGKPFAIEAENSILDISGFSKQYNCAFIWQKDGVKKLNLYLIINYFKGGKLRFKKIKPEAFEANRFYTVINKKSGEIVPMEVNFNFDDPNLIILPLAFGKRQGREFIWNDLLSLETGSLKLANGRVIEKTLYNRRTRQDEPALFVALTFERREVLDSSNIKPMNLIGVDRGENIPAVIALTDPEGCPLSRFKDSLGNPTHILRIGESYKEKQRTIQAKKEVEQRRAGGYSRKYASKAKNLADDMVRNTARDLLYYAVTQDAMLIFENLSRGFGRQGKRTFMAERQYTRMEDWLTAKLAYEGLPSKTYLSKTLAQYTSKTCSNCGFTITSADYDRVLEKLKKTATGWMTTINGKELKVEGQITYYNRYKRQNVVKDLSVELDRLSEESVNNDISSWTKGRSGEALSLLKKRFSHRPVQEKFVCLNCGFETHADEQAALNIARSWLFLRSQEYKKYQTNKTTGNTDKRAFVETWQSFYRKKLKEVWKPAV

SEQ ID NO: 32319 - protein, 979 aa, synthetic construct
  REGION 1..979: note = engineered CasX variant
QEIKGRINKIRRRLVKDSNTKKAGKTGPMKTLLVRVMTPDLRERLENLRKKPENIPQPISNTSRANLNKLLTDYTEMKKAILHVYWEEFQKDPVGLMSRVAQPASKKIDQNKLKPEMDEKGNLTTAGFACSQCGQPLFVYKLEQVSEKGKAYTNYFGRCNVAEHEKLILLAQLKPEKDSDEAVTYSLGKFGQRALDFYSIHVTKESTHPVKPLAQIAGNRYASAPVGKALSDACMGTIASFLSKYQDIIIEHQKVVKGNQKRLESLRELAGKENLEYPSVTLPPQPHTKEGVDAYNEVIARVRMWVNLNLWQKLKLSRDDAKPLLRLKGFPSFPLVERQANEVDWWDMVCNVKKLINEKKEDGKVFWQNLAGYKRQEALRPYLSSEEDRKKGKKFARTQLGDLLLHLEKKHGEDWGKVYDEAWERIDKKVEGLSKHIKLEEERRSEDAQSKAALTDWLRAKASFVIEGLKEADKDEFCRCELKLQKWYGDLRGKPFAIEAENSILDISGFSKQYNCAFIWQKDGVKKLNLYLIINYFKGGKLRFKKIKPEAFEANRFYTVINKKSGEIVPMEVNFNFDDPNLIILPLAFGKRQGREFIWNDLLSLETGSLKLANGRVIEKTLYNRRTRQDEPALFVALTFERREVLDSSNIKPMNLIGVDRGENIPAVIALTDPEGCPLSRFKDSLGNPTHILRIGESYKEKQRTIQAKKEVEQRRAGGYSRKYASKAKNLADDMVRNTARDLLYYAVTQDAMLIFENLSRGFGRQGKRTFMAERQYTRMEDWLTAKLAYEGLPSKTYLSKTLAQYTSKTCSNCGFTITSADYDRVLEKLKKTATGWMTTINGKELKVEGQITYYNRYKRQNVVKDLSVELDRLSEESVNNDISSWTKGRSGEALSLLKKRFSHRPVQEKFVCLNCGFETHADEQAALNIARSWLFLRSQEYKKYQTNKTTGNTDKRAFVETWQSFYRKKLKEVWKPAV

SEQ ID NO: 32320 - protein, 979 aa, synthetic construct
  REGION 1..979: note = engineered CasX variant
QEIKGRINKIRRRLVKDSNTKKAGKTGPMKTLLVRVMTPDLRERLENLRKKPENIPQPISNTSRANLNKLLTDYTEMKKAILHVYWEEFQKDPVGLMSRVAQPASKKIDQNKLKPEMDEKGNLTTAGFACSQCGQPLFVYKLEQVSEKGKAYTNYFGRCNVAEHEKLILLAQLKPEKDSDEAVTYSLGKFGQRALDFYSIHVTKESTHPVKPLAQIAGNRYASVPVGKALSDACMGTIASFLSKYQDIIIEHQKVVKGNQKRLESLRELAGKENLEYPSVTLPPQPHTKEGVDAYNEVIARVRMWVNLNLWQKLKLSRDDAKPLLRLKGFPSFPLVERQANEVDWWDMVCNVKKLINEKKEDGKVFWQNLAGYKRQEALRPYLSSEEDRKKGKKFARTQLGDLLLHLEKKHGEDWGKVYDEAWERIDKKVEGLSKHIKLEEERRSEDAQSKAALTDWLRAKASFVIEGLKEADKDEFCRCELKLQKWYGDLRGKPFAIEAENSILDISGFSKQYNCAFIWQKDGVKKLNLYLIINYFKGGKLRFKKIKPEAFEANRFYTVINKKSGEIVPMEVNFNFDDPNLIILPLAFGKRQGREFIWNDLLSLETGSLKLANGRVIEKTLYNRRTRQDEPALFVALTFERREVLDSSNIKPMNLIGVDRGENIPAVIALTDPEGCPLSRFKDSLGNPTHILRIGESYKEKQRTIQAKKEVEQRRAGGYSRKYASKAKNLADDMVRNTARDLLYYAVTQDAMLIFENLSRGFGRQGKRTFMAERQYTRMEDWLTAKLAYEGLPSKTYLSKTLAQYTSKTCSNCGFTITSADYDRVLEKLKKTATGWMTTINGKELKVEGQITYYNRYKRQNVVKDLSVELDRLSEESVNNDISSWTKGRSGEALSLLKKRFSHRPVQEKFVCLNCGFETHADEQAALNIARSWLFLRSQEYKKYQTNKTTGNTDKRAFVETWQSFYRKKLKEVWKPAV

SEQ ID NO: 32321 - protein, 979 aa, synthetic construct
  REGION 1..979: note = engineered CasX variant
QEIKGRINKIRRRLVKDSNTKKAGKTGPMKTLLVRVMTPDLRERLENLRKKPENIPQPISNTSRANLNKLLTDYTEMKKAILHVYWEEFQKDPVGLMSRVAQPASKKIDQNKLKPEMDEKGNLTTAGFACSQCGQPLFVYKLEQVSEKGKAYTNYFGRCNVAEHEKLIKLAQLKPEKDSDEAVTYSLGKFGQRALDFYSIHVTKESTHPVKPLAQIAGNRYASGPVGKALSDACMGTIASFLSKYQDIIIEHQKVVKGNQKRLESLRELAGKENLEYPSVTLPPQPHTKEGVDAYNEVIARVRMWVNLNLWQKLKLSRDDAKPLLRLKGFPSFPLVERQANEVDWWDMVCNVKKLINEKKEDGKVFWQNLAGYKRQEALRPYLSSEEDRKKGKKFARTQLGDLLLHLEKKHGEDWGKVYDEAWERIDKKVEGLSKHIKLEEERRSEDAQSKAALTDWLRAKASFVIEGLKEADKDEFCRCELKLQKWYGDLRGKPFAIEAENSILDISGFSKQYNCAFIWQKDGVKKLNLYLIINYFKGGKLRFKKIKPEAFEANRFYTVINKKSGEIVPMEVNFNFDDPNLIILPLAFGKRQGREFIWNDLLSLETGSLKLANGRVIEKTLYNRRTRQDEPALFVALTFERREVLDSSNIKPMNLIGVDRGENIPAVIALTDPEGCPLSRFKDSLGNPTHILRIGESYKEKQRTIQAKKEVEQRRAGGYSRKYASKAKNLADDMVRNTARDLLYYAVTQDAMLIFENLSRGFGRQGKRTFMAERQYTRMEDWLTAKLAYEGLPSKTYLSKTLAQYTSKTCSNCGFTITSADYDRVLEKLKKTATGWMTTINGKELKVEGQITYYNRYKRQNVVKDLSVELDRLSEESVNNDISSWTKGRSGEALSLLKKRFSHRPVQEKFVCLNCGFETHADEQAALNIARSWLFLRSQEYKKYQTNKTTGNTDKRAFVETWQSFYRKKLKEVWKPAV

SEQ ID NO: 32322 - protein, 978 aa, synthetic construct
  REGION 1..978: note = engineered CasX variant
QEIKGRINKIRRRLVKDSNTKKAGKTGPMKTLLVRVMTPDLRERLENLRKKPENIPQPISNTSRANLNKLLTDYTEMKKAILHVYWEEFQKDPVGLMSRVAQPASKKIDQNKLKPEMDEKGNLTTAGFACSQCGQPLFVYKLEQVSEKGKAYTNYFGRCNVAEHEKLILLAQLKPEKDSDEAVTYSLGKFGQRALDFYSIHVTKESTHPVKPLAQIAGNRYASPVGKALSDACMGTIASFLSKYQDIIIEHQKVVKGNQKRLESLRELAGKENLEYPSVTLPPQPHTKEGVDAYNEVIARVRMWVNLNLWQKLKLSRDDAKPLLRLKGFPSFPLVERQANEVDWWDMVCNVKKLINEKKEDGKVFWQNLAGYKRQEALRPYLSSEEDRKKGKKFARTQLGDLLLHLEKKHGEDWGKVYDEAWERIDKKVEGLSKHIKLEEERRSEDAQSKAALTDWLRAKASFVIEGLKEADKDEFCRCELKLQKWYGDLRGKPFAIEAENSILDISGFSKQYNCAFIWQKDGVKKLNLYLIINYFKGGKLRFKKIKPEAFEANRFYTVINKKSGEIVPMEVNFNFDDPNLIILPLAFGKRQGREFIWNDLLSLETGSLKLANGRVIEKTLYNRRTRQDEPALFVALTFERREVLDSSNIKPMNLIGVDRGENIPAVIALTDPEGCPLSRFKDSLGNPTHILRIGESYKEKQRTIQAKKEVEQRRAGGYSRKYASKAKNLADDMVRNTARDLLYYAVTQDAMLIFENLSRGFGRQGKRTFMAERQYTRMEDWLTAKLAYEGLPSKTYLSKTLAQYTSKTCSNCGFTITSADYDRVLEKLKKTATGWMTTINGKELKVEGQITYYNRYKRQNVVKDLSVELDRLSEESVNNDISSWTKGRSGEALSLLKKRFSHRPVQEKFVCLNCGFETHADEQAALNIARSWLFLRSQEYKKYQTNKTTGNTDKRAFVETWQSFYRKKLKEVWKPAV

SEQ ID NO: 32323 - protein, 980 aa, synthetic construct
  REGION 1..980: note = engineered CasX variant
QEIKGRINKIRRRLVKDSNTKKAGKTGPMKTLLVRVMTPDLRERLENLRKKPENIPQPISNTSRANLNKLLTDYTEMKKAILHVYWEEFQKDPVGLMSRVAQPASKKIDQNKLKPEMDEKGNLTTAGFACSQCGQPLFVYKLEQVSEKGKAYTNYFGRCNVAEHEKLILLAQLKPEKDSDEAVTYSLGKFGQRALDFYSIHVTKESTHPVKPLAQIAGNRYASYPVGKALSDACMGTIASFLSKYQDIIIEHQKVVKGNQKRLESLRELAGKENLEYPSVTLPPQPHTKEGVDAYNEVIARVRMWVNLNLWQKLKLSRDDAKPLLRLKGFPSFPLVERQANEVDWWDMVCNVKKLINEKKEDGKVFWQNLAGYKRQEALRPYLSSEEDRKKGKKFARYQLGDLLLHLEKKHEGEDWGKVYDEAWERIDKKVEGLSKHIKLEEERRSEDAQSKAALTDWLRAKASFVIEGLKEADKDEFCRCELKLQKWYGDLRGKPFAIEAENSILDISGFSKQYNCAFIWQKDGVKKLNLYLIINYFKGGKLRFKKIKPEAFEANRFYTVINKKSGEIVPMEVNFNFDDPNLIILPLAFGKRQGREFIWNDLLSLETGSLKLANGRVIEKTLYNRRTRQDEPALFVALTFERREVLDSSNIKPMNLIGVDRGENIPAVIALTDPEGCPLSRFKDSLGNPTHILRIGESYKEKQRTIQAKKEVEQRRAGGYSRKYASKAKNLADDMVRNTARDLLYYAVTQDAMLIFENLSRGFGRQGKRTFMAERQYTRMEDWLTAKLAYEGLPSKTYLSKTLAQYTSKTCSNCGFTITSADYDRVLEKLKKTATGWMTTINGKELKVEGQITYYNRYKRQNVVKDLSVELDRLSEESVNNDISSWTKGRSGEALSLLKKRFSHRPVQEKFVCLNCGFETHADEQAALNIARSWLFLRSQEYKKYQTNKTTGNTDKRAFVETWQSFYRKKLKEVWKPAV

SEQ ID NO: 32324 - protein, 980 aa, synthetic construct
  REGION 1..980: note = engineered CasX variant
QEIKGRINKIRRRLVKDSNTKKAGKTGPMKTLLVRVMTPDLRERLENLRKKPENIPQPISNTSRANLNKLLTDYTEMKKAILHVYWEEFQKDPVGLMSRVAQPASKKIDQNKLKPEMDEKGNLTTAGFACSQCGQPLFVYKLEQVSEKGKAYTNYFGRCNVAEHEKLILLAQLKPEKDSDEAVTYSLGKFGQRALDFYSIHVTKESTHPVKPLAQIAGNRYASHPVGKALSDACMGTIASFLSKYQDIIIEHQKVVKGNQKRLESLRELAGKENLEYPSVTLPPQPHTKEGVDAYNEVIARVRMWVNLNLWQKLKLSRDDAKPLLRLKGFPSFPLVERQANEVDWWDMVCNVKKLINEKKEDGKVFWQNLAGYKRQEALRPYLSSEEDRKKGKKFARYQLGDLLLHLEKKHEGEDWGKVYDEAWERIDKKVEGLSKHIKLEEERRSEDAQSKAALTDWLRAKASFVIEGLKEADKDEFCRCELKLQKWYGDLRGKPFAIEAENSILDISGFSKQYNCAFIWQKDGVKKLNLYLIINYFKGGKLRFKKIKPEAFEANRFYTVINKKSGEIVPMEVNFNFDDPNLIILPLAFGKRQGREFIWNDLLSLETGSLKLANGRVIEKTLYNRRTRQDEPALFVALTFERREVLDSSNIKPMNLIGVDRGENIPAVIALTDPEGCPLSRFKDSLGNPTHILRIGESYKEKQRTIQAKKEVEQRRAGGYSRKYASKAKNLADDMVRNTARDLLYYAVTQDAMLIFENLSRGFGRQGKRTFMAERQYTRMEDWLTAKLAYEGLPSKTYLSKTLAQYTSKTCSNCGFTITSADYDRVLEKLKKTATGWMTTINGKELKVEGQITYYNRYKRQNVVKDLSVELDRLSEESVNNDISSWTKGRSGEALSLLKKRFSHRPVQEKFVCLNCGFETHADEQAALNIARSWLFLRSQEYKKYQTNKTTGNTDKRAFVETWQSFYRKKLKEVWKPAV

SEQ ID NO: 32325 - protein, 980 aa, synthetic construct
  REGION 1..980: note = engineered CasX variant
QEIKGRINKIRRRLVKDSNTKKAGKTGPMKTLLVRVMTPDLRERLENLRKKPENIPQPISNTSRANLNKLLTDYTEMKKAILHVYWEEFQKDPVGLMSRVAQPASKKIDQNKLKPEMDEKGNLTTAGFACSQCGQPLFVYKLEQVSEKGKAYTNYFGRCNVAEHEKLILLAQLKPEKDSDEAVTYSLGKFGQRALDFYSIHVTKESTHPVKPLAQIAGNRYASSPVGKALSDACMGTIASFLSKYQDIIIEHQKVVKGNQKRLESLRELAGKENLEYPSVTLPPQPHTKEGVDAYNEVIARVRMWVNLNLWQKLKLSRDDAKPLLRLKGFPSFPLVERQANEVDWWDMVCNVKKLINEKKEDGKVFWQNLAGYKRQEALRPYLSSEEDRKKGKKFARYQLGDLLLHLEKKHEGEDWGKVYDEAWERIDKKVEGLSKHIKLEEERRSEDAQSKAALTDWLRAKASFVIEGLKEADKDEFCRCELKLQKWYGDLRGKPFAIEAENSILDISGFSKQYNCAFIWQKDGVKKLNLYLIINYFKGGKLRFKKIKPEAFEANRFYTVINKKSGEIVPMEVNFNFDDPNLIILPLAFGKRQGREFIWNDLLSLETGSLKLANGRVIEKTLYNRRTRQDEPALFVALTFERREVLDSSNIKPMNLIGVDRGENIPAVIALTDPEGCPLSRFKDSLGNPTHILRIGESYKEKQRTIQAKKEVEQRRAGGYSRKYASKAKNLADDMVRNTARDLLYYAVTQDAMLIFENLSRGFGRQGKRTFMAERQYTRMEDWLTAKLAYEGLPSKTYLSKTLAQYTSKTCSNCGFTITSADYDRVLEKLKKTATGWMTTINGKELKVEGQITYYNRYKRQNVVKDLSVELDRLSEESVNNDISSWTKGRSGEALSLLKKRFSHRPVQEKFVCLNCGFETHADEQAALNIARSWLFLRSQEYKKYQTNKTTGNTDKRAFVETWQSFYRKKLKEVWKPAV

SEQ ID NO: 32326 - protein, 980 aa, synthetic construct
  REGION 1..980: note = engineered CasX variant
QEIKGRINKIRRRLVKDSNTKKAGKTGPMKTLLVRVMTPDLRERLENLRKKPENIPQPISNTSRANLNKLLTDYTEMKKAILHVYWEEFQKDPVGLMSRVAQPASKKIDQNKLKPEMDEKGNLTTAGFACSQCGQPLFVYKLEQVSEKGKAYTNYFGRCNVAEHEKLILLAQLKPEKDSDEAVTYSLGKFGQRALDFYSIHVTKESTHPVKPLAQIAGNRYASTPVGKALSDACMGTIASFLSKYQDIIIEHQKVVKGNQKRLESLRELAGKENLEYPSVTLPPQPHTKEGVDAYNEVIARVRMWVNLNLWQKLKLSRDDAKPLLRLKGFPSFPLVERQANEVDWWDMVCNVKKLINEKKEDGKVFWQNLAGYKRQEALRPYLSSEEDRKKGKKFARYQLGDLLLHLEKKHEGEDWGKVYDEAWERIDKKVEGLSKHIKLEEERRSEDAQSKAALTDWLRAKASFVIEGLKEADKDEFCRCELKLQKWYGDLRGKPFAIEAENSILDISGFSKQYNCAFIWQKDGVKKLNLYLIINYFKGGKLRFKKIKPEAFEANRFYTVINKKSGEIVPMEVNFNFDDPNLIILPLAFGKRQGREFIWNDLLSLETGSLKLANGRVIEKTLYNRRTRQDEPALFVALTFERREVLDSSNIKPMNLIGVDRGENIPAVIALTDPEGCPLSRFKDSLGNPTHILRIGESYKEKQRTIQAKKEVEQRRAGGYSRKYASKAKNLADDMVRNTARDLLYYAVTQDAMLIFENLSRGFGRQGKRTFMAERQYTRMEDWLTAKLAYEGLPSKTYLSKTLAQYTSKTCSNCGFTITSADYDRVLEKLKKTATGWMTTINGKELKVEGQITYYNRYKRQNVVKDLSVELDRLSEESVNNDISSWTKGRSGEALSLLKKRFSHRPVQEKFVCLNCGFETHADEQAALNIARSWLFLRSQEYKKYQTNKTTGNTDKRAFVETWQSFYRKKLKEVWKPAV

SEQ ID NO: 32327 - protein, 980 aa, synthetic construct
  REGION 1..980: note = engineered CasX variant
QEIKGRINKIRRRLVKDSNTKKAGKTGPMKTLLVRVMTPDLRERLENLRKKPENIPQPISNTSRANLNKLLTDYTEMKKAILHVYWEEFQKDPVGLMSRVAQPASKKIDQNKLKPEMDEKGNLTTAGFACSQCGQPLFVYKLEQVSEKGKAYTNYFGRCNVAEHEKLILLAQLKPEKDSDEAVTYSLGKFGQRALDFYSIHVTKESTHPVKPLAQIAGNRYASAPVGKALSDACMGTIASFLSKYQDIIIEHQKVVKGNQKRLESLRELAGKENLEYPSVTLPPQPHTKEGVDAYNEVIARVRMWVNLNLWQKLKLSRDDAKPLLRLKGFPSFPLVERQANEVDWWDMVCNVKKLINEKKEDGKVFWQNLAGYKRQEALRPYLSSEEDRKKGKKFARYQLGDLLLHLEKKHEGEDWGKVYDEAWERIDKKVEGLSKHIKLEEERRSEDAQSKAALTDWLRAKASFVIEGLKEADKDEFCRCELKLQKWYGDLRGKPFAIEAENSILDISGFSKQYNCAFIWQKDGVKKLNLYLIINYFKGGKLRFKKIKPEAFEANRFYTVINKKSGEIVPMEVNFNFDDPNLIILPLAFGKRQGREFIWNDLLSLETGSLKLANGRVIEKTLYNRRTRQDEPALFVALTFERREVLDSSNIKPMNLIGVDRGENIPAVIALTDPEGCPLSRFKDSLGNPTHILRIGESYKEKQRTIQAKKEVEQRRAGGYSRKYASKAKNLADDMVRNTARDLLYYAVTQDAMLIFENLSRGFGRQGKRTFMAERQYTRMEDWLTAKLAYEGLPSKTYLSKTLAQYTSKTCSNCGFTITSADYDRVLEKLKKTATGWMTTINGKELKVEGQITYYNRYKRQNVVKDLSVELDRLSEESVNNDISSWTKGRSGEALSLLKKRFSHRPVQEKFVCLNCGFETHADEQAALNIARSWLFLRSQEYKKYQTNKTTGNTDKRAFVETWQSFYRKKLKEVWKPAV

SEQ ID NO: 32328 - protein, 980 aa, synthetic construct
  REGION 1..980: note = engineered CasX variant
QEIKGRINKIRRRLVKDSNTKKAGKTGPMKTLLVRVMTPDLRERLENLRKKPENIPQPISNTSRANLNKLLTDYTEMKKAILHVYWEEFQKDPVGLMSRVAQPASKKIDQNKLKPEMDEKGNLTTAGFACSQCGQPLFVYKLEQVSEKGKAYTNYFGRCNVAEHEKLILLAQLKPEKDSDEAVTYSLGKFGQRALDFYSIHVTKESTHPVKPLAQIAGNRYASVPVGKALSDACMGTIASFLSKYQDIIIEHQKVVKGNQKRLESLRELAGKENLEYPSVTLPPQPHTKEGVDAYNEVIARVRMWVNLNLWQKLKLSRDDAKPLLRLKGFPSFPLVERQANEVDWWDMVCNVKKLINEKKEDGKVFWQNLAGYKRQEALRPYLSSEEDRKKGKKFARYQLGDLLLHLEKKHEGEDWGKVYDEAWERIDKKVEGLSKHIKLEEERRSEDAQSKAALTDWLRAKASFVIEGLKEADKDEFCRCELKLQKWYGDLRGKPFAIEAENSILDISGFSKQYNCAFIWQKDGVKKLNLYLIINYFKGGKLRFKKIKPEAFEANRFYTVINKKSGEIVPMEVNFNFDDPNLIILPLAFGKRQGREFIWNDLLSLETGSLKLANGRVIEKTLYNRRTRQDEPALFVALTFERREVLDSSNIKPMNLIGVDRGENIPAVIALTDPEGCPLSRFKDSLGNPTHILRIGESYKEKQRTIQAKKEVEQRRAGGYSRKYASKAKNLADDMVRNTARDLLYYAVTQDAMLIFENLSRGFGRQGKRTFMAERQYTRMEDWLTAKLAYEGLPSKTYLSKTLAQYTSKTCSNCGFTITSADYDRVLEKLKKTATGWMTTINGKELKVEGQITYYNRYKRQNVVKDLSVELDRLSEESVNNDISSWTKGRSGEALSLLKKRFSHRPVQEKFVCLNCGFETHADEQAALNIARSWLFLRSQEYKKYQTNKTTGNTDKRAFVETWQSFYRKKLKEVWKPAV

SEQ ID NO: 32329 - protein, 980 aa, synthetic construct
  REGION 1..980: note = engineered CasX variant
QEIKGRINKIRRRLVKDSNTKKAGKTGPMKTLLVRVMTPDLRERLENLRKKPENIPQPISNTSRANLNKLLTDYTEMKKAILHVYWEEFQKDPVGLMSRVAQPASKKIDQNKLKPEMDEKGNLTTAGFACSQCGQPLFVYKLEQVSEKGKAYTNYFGRCNVAEHEKLIKLAQLKPEKDSDEAVTYSLGKFGQRALDFYSIHVTKESTHPVKPLAQIAGNRYASGPVGKALSDACMGTIASFLSKYQDIIIEHQKVVKGNQKRLESLRELAGKENLEYPSVTLPPQPHTKEGVDAYNEVIARVRMWVNLNLWQKLKLSRDDAKPLLRLKGFPSFPLVERQANEVDWWDMVCNVKKLINEKKEDGKVFWQNLAGYKRQEALRPYLSSEEDRKKGKKFARYQLGDLLLHLEKKHEGEDWGKVYDEAWERIDKKVEGLSKHIKLEEERRSEDAQSKAALTDWLRAKASFVIEGLKEADKDEFCRCELKLQKWYGDLRGKPFAIEAENSILDISGFSKQYNCAFIWQKDGVKKLNLYLIINYFKGGKLRFKKIKPEAFEANRFYTVINKKSGEIVPMEVNFNFDDPNLIILPLAFGKRQGREFIWNDLLSLETGSLKLANGRVIEKTLYNRRTRQDEPALFVALTFERREVLDSSNIKPMNLIGVDRGENIPAVIALTDPEGCPLSRFKDSLGNPTHILRIGESYKEKQRTIQAKKEVEQRRAGGYSRKYASKAKNLADDMVRNTARDLLYYAVTQDAMLIFENLSRGFGRQGKRTFMAERQYTRMEDWLTAKLAYEGLPSKTYLSKTLAQYTSKTCSNCGFTITSADYDRVLEKLKKTATGWMTTINGKELKVEGQITYYNRYKRQNVVKDLSVELDRLSEESVNNDISSWTKGRSGEALSLLKKRFSHRPVQEKFVCLNCGFETHADEQAALNIARSWLFLRSQEYKKYQTNKTTGNTDKRAFVETWQSFYRKKLKEVWKPAV

SEQ ID NO: 32330 - protein, 979 aa, synthetic construct
  REGION 1..979: note = engineered CasX variant
QEIKGRINKIRRRLVKDSNTKKAGKTGPMKTLLVRVMTPDLRERLENLRKKPENIPQPISNTSRANLNKLLTDYTEMKKAILHVYWEEFQKDPVGLMSRVAQPASKKIDQNKLKPEMDEKGNLTTAGFACSQCGQPLFVYKLEQVSEKGKAYTNYFGRCNVAEHEKLILLAQLKPEKDSDEAVTYSLGKFGQRALDFYSIHVTKESTHPVKPLAQIAGNRYASPVGKALSDACMGTIASFLSKYQDIIIEHQKVVKGNQKRLESLRELAGKENLEYPSVTLPPQPHTKEGVDAYNEVIARVRMWVNLNLWQKLKLSRDDAKPLLRLKGFPSFPLVERQANEVDWWDMVCNVKKLINEKKEDGKVFWQNLAGYKRQEALRPYLSSEEDRKKGKKFARYQLGDLLLHLEKKHEGEDWGKVYDEAWERIDKKVEGLSKHIKLEEERRSEDAQSKAALTDWLRAKASFVIEGLKEADKDEFCRCELKLQKWYGDLRGKPFAIEAENSILDISGFSKQYNCAFIWQKDGVKKLNLYLIINYFKGGKLRFKKIKPEAFEANRFYTVINKKSGEIVPMEVNFNFDDPNLIILPLAFGKRQGREFIWNDLLSLETGSLKLANGRVIEKTLYNRRTRQDEPALFVALTFERREVLDSSNIKPMNLIGVDRGENIPAVIALTDPEGCPLSRFKDSLGNPTHILRIGESYKEKQRTIQAKKEVEQRRAGGYSRKYASKAKNLADDMVRNTARDLLYYAVTQDAMLIFENLSRGFGRQGKRTFMAERQYTRMEDWLTAKLAYEGLPSKTYLSKTLAQYTSKTCSNCGFTITSADYDRVLEKLKKTATGWMTTINGKELKVEGQITYYNRYKRQNVVKDLSVELDRLSEESVNNDISSWTKGRSGEALSLLKKRFSHRPVQEKFVCLNCGFETHADEQAALNIARSWLFLRSQEYKKYQTNKTTGNTDKRAFVETWQSFYRKKLKEVWKPAV

SEQ ID NO: 32331 - protein, 979 aa, synthetic construct
  REGION 1..979: note = engineered CasX variant
QEIKGRINKIRRRLVKDSNTKKAGKTGPMKTLLVRVMTPDLRERLENLRKKPENIPQPISNTSRANLNKLLTDYTEMKKAILHVYWEEFQKDPVGLMSRVAQPASKKIDQNKLKPEMDEKGNLTTAGFACSQCGQPLFVYKLEQVSEKGKAYTNYFGRCNVAEHEKLILLAQLKPEKDSDEAVTYSLGKFGQRALDFYSIHVTKESTHPVKPLAQIAGNRYASYPVGKALSDACMGTIASFLSKYQDIIIEHQKVVKGNQKRLESLRELAGKENLEYPSVTLPPQPHTKEGVDAYNEVIARVRMWVNLNLWQKLKLSRDDAKPLLRLKGFPSFPLVERQANEVDWWDMVCNVKKLINEKKEDGKVFWQNLAGYKRQEALRPYLSSEEDRKKGKKFARYQLGDLLLHLEKKHGEDWGKVYDEAWERIDKKVEGLSKHIKLEEERRSEDAQSKAALTDWLRAKASFVIEGLKEADKDEFCRCDLKLQKWYGDLRGKPFAIEAENSILDISGFSKQYNCAFIWQKDGVKKLNLYLIINYFKGGKLRFKKIKPEAFEANRFYTVINKKSGEIVPMEVNFNFDDPNLIILPLAFGKRQGREFIWNDLLSLETGSLKLANGRVIEKTLYNRRTRQDEPALFVALTFERREVLDSSNIKPMNLIGVDRGENIPAVIALTDPEGCPLSRFKDSLGNPTHILRIGESYKEKQRTIQAKKEVEQRRAGGYSRKYASKAKNLADDMVRNTARDLLYYAVTQDAMLIFENLSRGFGRQGKRTFMAERQYTRMEDWLTAKLAYEGLPSKTYLSKTLAQYTSKTCSNCGFTITSADYDRVLEKLKKTATGWMTTINGKELKVEGQITYYNRYKRQNVVKDLSVELDRLSEESVNNDISSWTKGRSGEALSLLKKRFSHRPVQEKFVCLNCGFETHADEQAALNIARSWLFLRSQEYKKYQTNKTTGNTDKRAFVETWQSFYRKKLKEVWKPAV

SEQ ID NO: 32332 - protein, 979 aa, synthetic construct
  REGION 1..979: note = engineered CasX variant
QEIKGRINKIRRRLVKDSNTKKAGKTGPMKTLLVRVMTPDLRERLENLRKKPENIPQPISNTSRANLNKLLTDYTEMKKAILHVYWEEFQKDPVGLMSRVAQPASKKIDQNKLKPEMDEKGNLTTAGFACSQCGQPLFVYKLEQVSEKGKAYTNYFGRCNVAEHEKLILLAQLKPEKDSDEAVTYSLGKFGQRALDFYSIHVTKESTHPVKPLAQIAGNRYASHPVGKALSDACMGTIASFLSKYQDIIIEHQKVVKGNQKRLESLRELAGKENLEYPSVTLPPQPHTKEGVDAYNEVIARVRMWVNLNLWQKLKLSRDDAKPLLRLKGFPSFPLVERQANEVDWWDMVCNVKKLINEKKEDGKVFWQNLAGYKRQEALRPYLSSEEDRKKGKKFARYQLGDLLLHLEKKHGEDWGKVYDEAWERIDKKVEGLSKHIKLEEERRSEDAQSKAALTDWLRAKASFVIEGLKEADKDEFCRCDLKLQKWYGDLRGKPFAIEAENSILDISGFSKQYNCAFIWQKDGVKKLNLYLIINYFKGGKLRFKKIKPEAFEANRFYTVINKKSGEIVPMEVNFNFDDPNLIILPLAFGKRQGREFIWNDLLSLETGSLKLANGRVIEKTLYNRRTRQDEPALFVALTFERREVLDSSNIKPMNLIGVDRGENIPAVIALTDPEGCPLSRFKDSLGNPTHILRIGESYKEKQRTIQAKKEVEQRRAGGYSRKYASKAKNLADDMVRNTARDLLYYAVTQDAMLIFENLSRGFGRQGKRTFMAERQYTRMEDWLTAKLAYEGLPSKTYLSKTLAQYTSKTCSNCGFTITSADYDRVLEKLKKTATGWMTTINGKELKVEGQITYYNRYKRQNVVKDLSVELDRLSEESVNNDISSWTKGRSGEALSLLKKRFSHRPVQEKFVCLNCGFETHADEQAALNIARSWLFLRSQEYKKYQTNKTTGNTDKRAFVETWQSFYRKKLKEVWKPAV

SEQ ID NO: 32333 - protein, 979 aa, synthetic construct
  REGION 1..979: note = engineered CasX variant
QEIKGRINKIRRRLVKDSNTKKAGKTGPMKTLLVRVMTPDLRERLENLRKKPENIPQPISNTSRANLNKLLTDYTEMKKAILHVYWEEFQKDPVGLMSRVAQPASKKIDQNKLKPEMDEKGNLTTAGFACSQCGQPLFVYKLEQVSEKGKAYTNYFGRCNVAEHEKLILLAQLKPEKDSDEAVTYSLGKFGQRALDFYSIHVTKESTHPVKPLAQIAGNRYASSPVGKALSDACMGTIASFLSKYQDIIIEHQKVVKGNQKRLESLRELAGKENLEYPSVTLPPQPHTKEGVDAYNEVIARVRMWVNLNLWQKLKLSRDDAKPLLRLKGFPSFPLVERQANEVDWWDMVCNVKKLINEKKEDGKVFWQNLAGYKRQEALRPYLSSEEDRKKGKKFARYQLGDLLLHLEKKHGEDWGKVYDEAWERIDKKVEGLSKHIKLEEERRSEDAQSKAALTDWLRAKASFVIEGLKEADKDEFCRCDLKLQKWYGDLRGKPFAIEAENSILDISGFSKQYNCAFIWQKDGVKKLNLYLIINYFKGGKLRFKKIKPEAFEANRFYTVINKKSGEIVPMEVNFNFDDPNLIILPLAFGKRQGREFIWNDLLSLETGSLKLANGRVIEKTLYNRRTRQDEPALFVALTFERREVLDSSNIKPMNLIGVDRGENIPAVIALTDPEGCPLSRFKDSLGNPTHILRIGESYKEKQRTIQAKKEVEQRRAGGYSRKYASKAKNLADDMVRNTARDLLYYAVTQDAMLIFENLSRGFGRQGKRTFMAERQYTRMEDWLTAKLAYEGLPSKTYLSKTLAQYTSKTCSNCGFTITSADYDRVLEKLKKTATGWMTTINGKELKVEGQITYYNRYKRQNVVKDLSVELDRLSEESVNNDISSWTKGRSGEALSLLKKRFSHRPVQEKFVCLNCGFETHADEQAALNIARSWLFLRSQEYKKYQTNKTTGNTDKRAFVETWQSFYRKKLKEVWKPAV

SEQ ID NO: 32334 - protein, 979 aa, synthetic construct
  REGION 1..979: note = engineered CasX variant
QEIKGRINKIRRRLVKDSNTKKAGKTGPMKTLLVRVMTPDLRERLENLRKKPENIPQPISNTSRANLNKLLTDYTEMKKAILHVYWEEFQKDPVGLMSRVAQPASKKIDQNKLKPEMDEKGNLTTAGFACSQCGQPLFVYKLEQVSEKGKAYTNYFGRCNVAEHEKLILLAQLKPEKDSDEAVTYSLGKFGQRALDFYSIHVTKESTHPVKPLAQIAGNRYASTPVGKALSDACMGTIASFLSKYQDIIIEHQKVVKGNQKRLESLRELAGKENLEYPSVTLPPQPHTKEGVDAYNEVIARVRMWVNLNLWQKLKLSRDDAKPLLRLKGFPSFPLVERQANEVDWWDMVCNVKKLINEKKEDGKVFWQNLAGYKRQEALRPYLSSEEDRKKGKKFARYQLGDLLLHLEKKHGEDWGKVYDEAWERIDKKVEGLSKHIKLEEERRSEDAQSKAALTDWLRAKASFVIEGLKEADKDEFCRCDLKLQKWYGDLRGKPFAIEAENSILDISGFSKQYNCAFIWQKDGVKKLNLYLIINYFKGGKLRFKKIKPEAFEANRFYTVINKKSGEIVPMEVNFNFDDPNLIILPLAFGKRQGREFIWNDLLSLETGSLKLANGRVIEKTLYNRRTRQDEPALFVALTFERREVLDSSNIKPMNLIGVDRGENIPAVIALTDPEGCPLSRFKDSLGNPTHILRIGESYKEKQRTIQAKKEVEQRRAGGYSRKYASKAKNLADDMVRNTARDLLYYAVTQDAMLIFENLSRGFGRQGKRTFMAERQYTRMEDWLTAKLAYEGLPSKTYLSKTLAQYTSKTCSNCGFTITSADYDRVLEKLKKTATGWMTTINGKELKVEGQITYYNRYKRQNVVKDLSVELDRLSEESVNNDISSWTKGRSGEALSLLKKRFSHRPVQEKFVCLNCGFETHADEQAALNIARSWLFLRSQEYKKYQTNKTTGNTDKRAFVETWQSFYRKKLKEVWKPAV

SEQ ID NO: 32335 - protein, 979 aa, synthetic construct
  REGION 1..979: note = engineered CasX variant
QEIKGRINKIRRRLVKDSNTKKAGKTGPMKTLLVRVMTPDLRERLENLRKKPENIPQPISNTSRANLNKLLTDYTEMKKAILHVYWEEFQKDPVGLMSRVAQPASKKIDQNKLKPEMDEKGNLTTAGFACSQCGQPLFVYKLEQVSEKGKAYTNYFGRCNVAEHEKLILLAQLKPEKDSDEAVTYSLGKFGQRALDFYSIHVTKESTHPVKPLAQIAGNRYASAPVGKALSDACMGTIASFLSKYQDIIIEHQKVVKGNQKRLESLRELAGKENLEYPSVTLPPQPHTKEGVDAYNEVIARVRMWVNLNLWQKLKLSRDDAKPLLRLKGFPSFPLVERQANEVDWWDMVCNVKKLINEKKEDGKVFWQNLAGYKRQEALRPYLSSEEDRKKGKKFARYQLGDLLLHLEKKHGEDWGKVYDEAWERIDKKVEGLSKHIKLEEERRSEDAQSKAALTDWLRAKASFVIEGLKEADKDEFCRCDLKLQKWYGDLRGKPFAIEAENSILDISGFSKQYNCAFIWQKDGVKKLNLYLIINYFKGGKLRFKKIKPEAFEANRFYTVINKKSGEIVPMEVNFNFDDPNLIILPLAFGKRQGREFIWNDLLSLETGSLKLANGRVIEKTLYNRRTRQDEPALFVALTFERREVLDSSNIKPMNLIGVDRGENIPAVIALTDPEGCPLSRFKDSLGNPTHILRIGESYKEKQRTIQAKKEVEQRRAGGYSRKYASKAKNLADDMVRNTARDLLYYAVTQDAMLIFENLSRGFGRQGKRTFMAERQYTRMEDWLTAKLAYEGLPSKTYLSKTLAQYTSKTCSNCGFTITSADYDRVLEKLKKTATGWMTTINGKELKVEGQITYYNRYKRQNVVKDLSVELDRLSEESVNNDISSWTKGRSGEALSLLKKRFSHRPVQEKFVCLNCGFETHADEQAALNIARSWLFLRSQEYKKYQTNKTTGNTDKRAFVETWQSFYRKKLKEVWKPAV

SEQ ID NO: 32336 - protein, 979 aa, synthetic construct
  REGION 1..979: note = engineered CasX variant
QEIKGRINKIRRRLVKDSNTKKAGKTGPMKTLLVRVMTPDLRERLENLRKKPENIPQPISNTSRANLNKLLTDYTEMKKAILHVYWEEFQKDPVGLMSRVAQPASKKIDQNKLKPEMDEKGNLTTAGFACSQCGQPLFVYKLEQVSEKGKAYTNYFGRCNVAEHEKLILLAQLKPEKDSDEAVTYSLGKFGQRALDFYSIHVTKESTHPVKPLAQIAGNRYASVPVGKALSDACMGTIASFLSKYQDIIIEHQKVVKGNQKRLESLRELAGKENLEYPSVTLPPQPHTKEGVDAYNEVIARVRMWVNLNLWQKLKLSRDDAKPLLRLKGFPSFPLVERQANEVDWWDMVCNVKKLINEKKEDGKVFWQNLAGYKRQEALRPYLSSEEDRKKGKKFARYQLGDLLLHLEKKHGEDWGKVYDEAWERIDKKVEGLSKHIKLEEERRSEDAQSKAALTDWLRAKASFVIEGLKEADKDEFCRCDLKLQKWYGDLRGKPFAIEAENSILDISGFSKQYNCAFIWQKDGVKKLNLYLIINYFKGGKLRFKKIKPEAFEANRFYTVINKKSGEIVPMEVNFNFDDPNLIILPLAFGKRQGREFIWNDLLSLETGSLKLANGRVIEKTLYNRRTRQDEPALFVALTFERREVLDSSNIKPMNLIGVDRGENIPAVIALTDPEGCPLSRFKDSLGNPTHILRIGESYKEKQRTIQAKKEVEQRRAGGYSRKYASKAKNLADDMVRNTARDLLYYAVTQDAMLIFENLSRGFGRQGKRTFMAERQYTRMEDWLTAKLAYEGLPSKTYLSKTLAQYTSKTCSNCGFTITSADYDRVLEKLKKTATGWMTTINGKELKVEGQITYYNRYKRQNVVKDLSVELDRLSEESVNNDISSWTKGRSGEALSLLKKRFSHRPVQEKFVCLNCGFETHADEQAALNIARSWLFLRSQEYKKYQTNKTTGNTDKRAFVETWQSFYRKKLKEVWKPAV

SEQ ID NO: 32337 - protein, 979 aa, synthetic construct
  REGION 1..979: note = engineered CasX variant
QEIKGRINKIRRRLVKDSNTKKAGKTGPMKTLLVRVMTPDLRERLENLRKKPENIPQPISNTSRANLNKLLTDYTEMKKAILHVYWEEFQKDPVGLMSRVAQPASKKIDQNKLKPEMDEKGNLTTAGFACSQCGQPLFVYKLEQVSEKGKAYTNYFGRCNVAEHEKLIKLAQLKPEKDSDEAVTYSLGKFGQRALDFYSIHVTKESTHPVKPLAQIAGNRYASGPVGKALSDACMGTIASFLSKYQDIIIEHQKVVKGNQKRLESLRELAGKENLEYPSVTLPPQPHTKEGVDAYNEVIARVRMWVNLNLWQKLKLSRDDAKPLLRLKGFPSFPLVERQANEVDWWDMVCNVKKLINEKKEDGKVFWQNLAGYKRQEALRPYLSSEEDRKKGKKFARYQLGDLLLHLEKKHGEDWGKVYDEAWERIDKKVEGLSKHIKLEEERRSEDAQSKAALTDWLRAKASFVIEGLKEADKDEFCRCDLKLQKWYGDLRGKPFAIEAENSILDISGFSKQYNCAFIWQKDGVKKLNLYLIINYFKGGKLRFKKIKPEAFEANRFYTVINKKSGEIVPMEVNFNFDDPNLIILPLAFGKRQGREFIWNDLLSLETGSLKLANGRVIEKTLYNRRTRQDEPALFVALTFERREVLDSSNIKPMNLIGVDRGENIPAVIALTDPEGCPLSRFKDSLGNPTHILRIGESYKEKQRTIQAKKEVEQRRAGGYSRKYASKAKNLADDMVRNTARDLLYYAVTQDAMLIFENLSRGFGRQGKRTFMAERQYTRMEDWLTAKLAYEGLPSKTYLSKTLAQYTSKTCSNCGFTITSADYDRVLEKLKKTATGWMTTINGKELKVEGQITYYNRYKRQNVVKDLSVELDRLSEESVNNDISSWTKGRSGEALSLLKKRFSHRPVQEKFVCLNCGFETHADEQAALNIARSWLFLRSQEYKKYQTNKTTGNTDKRAFVETWQSFYRKKLKEVWKPAV

SEQ ID NO: 32338 - protein, 978 aa, synthetic construct
  REGION 1..978: note = engineered CasX variant
QEIKGRINKIRRRLVKDSNTKKAGKTGPMKTLLVRVMTPDLRERLENLRKKPENIPQPISNTSRANLNKLLTDYTEMKKAILHVYWEEFQKDPVGLMSRVAQPASKKIDQNKLKPEMDEKGNLTTAGFACSQCGQPLFVYKLEQVSEKGKAYTNYFGRCNVAEHEKLILLAQLKPEKDSDEAVTYSLGKFGQRALDFYSIHVTKESTHPVKPLAQIAGNRYASPVGKALSDACMGTIASFLSKYQDIIIEHQKVVKGNQKRLESLRELAGKENLEYPSVTLPPQPHTKEGVDAYNEVIARVRMWVNLNLWQKLKLSRDDAKPLLRLKGFPSFPLVERQANEVDWWDMVCNVKKLINEKKEDGKVFWQNLAGYKRQEALRPYLSSEEDRKKGKKFARYQLGDLLLHLEKKHGEDWGKVYDEAWERIDKKVEGLSKHIKLEEERRSEDAQSKAALTDWLRAKASFVIEGLKEADKDEFCRCDLKLQKWYGDLRGKPFAIEAENSILDISGFSKQYNCAFIWQKDGVKKLNLYLIINYFKGGKLRFKKIKPEAFEANRFYTVINKKSGEIVPMEVNFNFDDPNLIILPLAFGKRQGREFIWNDLLSLETGSLKLANGRVIEKTLYNRRTRQDEPALFVALTFERREVLDSSNIKPMNLIGVDRGENIPAVIALTDPEGCPLSRFKDSLGNPTHILRIGESYKEKQRTIQAKKEVEQRRAGGYSRKYASKAKNLADDMVRNTARDLLYYAVTQDAMLIFENLSRGFGRQGKRTFMAERQYTRMEDWLTAKLAYEGLPSKTYLSKTLAQYTSKTCSNCGFTITSADYDRVLEKLKKTATGWMTTINGKELKVEGQITYYNRYKRQNVVKDLSVELDRLSEESVNNDISSWTKGRSGEALSLLKKRFSHRPVQEKFVCLNCGFETHADEQAALNIARSWLFLRSQEYKKYQTNKTTGNTDKRAFVETWQSFYRKKLKEVWKPAV

SEQ ID NO: 32339 - protein, 979 aa, synthetic construct
  REGION 1..979: note = engineered CasX variant
QEIKGRINKIRRRLVKDSNTKKAGKTGPMKTLLVRVMTPDLRERLENLRKKPENIPQPISNTSRANLNKLLTDYTEMKKAILHVYWEEFQKDPVGLMSRVAQPASKKIDQNKLKPEMDEKGNLTTAGFACSQCGQPLFVYKLEQVSEKGKAYTNYFGRCNVAEHEKLILLAQLKPEKDSDEAVTYSLGKFGQRALDFYSIHVTKESTHPVKPLAQIAGNRYASYPVGKALSDACMGTIASFLSKYQDIIIEHQKVVKGNQKRLESLRELAGKENLEYPSVTLPPQPHTKEGVDAYNEVIARVRMWVNLNLWQKLKLSRDDAKPLLRLKGFPSFPLVERQANEVDWWDMVCNVKKLINEKKEDGKVFWQNLAGYKRQEALRPYLSSEEDRKKGKKFARYQLGDLLLHLEKKHGEDWGKVYDEAWERIDKKVEGLSKHIKLEEERRSEDAQSKAALTDWLRAKASFVIEGLKEADKDEFCRCELKLQKWYGDLRGKPFAIEAENSILDISGFSKQYNCAFIWQKDGVKKLNLYLIINYFKGGKLRFKKIKPEAFEANRFYTVINKKSGEIVPMEVNFNFDDPNLIILPLAFGKRFGREFIWNDLLSLETGSLKLANGRVIEKTLYNRRTRQDEPALFVALTFERREVLDSSNIKPMNLIGVDRGENIPAVIALTDPEGCPLSRFKDSLGNPTHILRIGESYKEKQRTIQAKKEVEQRRAGGYSRKYASKAKNLADDMVRNTARDLLYYAVTQDAMLIFENLSRGFGRQGKRTFMAERQYTRMEDWLTAKLAYEGLPSKTYLSKTLAQYTSKTCSNCGFTITSADYDRVLEKLKKTATGWMTTINGKELKVEGQITYYNRYKRQNVVKDLSVELDRLSEESVNNDISSWTKGRSGEALSLLKKRFSHRPVQEKFVCLNCGFETHADEQAALNIARSWLFLRSQEYKKYQTNKTTGNTDKRAFVETWQSFYRKKLKEVWKPAV

SEQ ID NO: 32340 - protein, 979 aa, synthetic construct
  REGION 1..979: note = engineered CasX variant
QEIKGRINKIRRRLVKDSNTKKAGKTGPMKTLLVRVMTPDLRERLENLRKKPENIPQPISNTSRANLNKLLTDYTEMKKAILHVYWEEFQKDPVGLMSRVAQPASKKIDQNKLKPEMDEKGNLTTAGFACSQCGQPLFVYKLEQVSEKGKAYTNYFGRCNVAEHEKLILLAQLKPEKDSDEAVTYSLGKFGQRALDFYSIHVTKESTHPVKPLAQIAGNRYASHPVGKALSDACMGTIASFLSKYQDIIIEHQKVVKGNQKRLESLRELAGKENLEYPSVTLPPQPHTKEGVDAYNEVIARVRMWVNLNLWQKLKLSRDDAKPLLRLKGFPSFPLVERQANEVDWWDMVCNVKKLINEKKEDGKVFWQNLAGYKRQEALRPYLSSEEDRKKGKKFARYQLGDLLLHLEKKHGEDWGKVYDEAWERIDKKVEGLSKHIKLEEERRSEDAQSKAALTDWLRAKASFVIEGLKEADKDEFCRCELKLQKWYGDLRGKPFAIEAENSILDISGFSKQYNCAFIWQKDGVKKLNLYLIINYFKGGKLRFKKIKPEAFEANRFYTVINKKSGEIVPMEVNFNFDDPNLIILPLAFGKRFGREFIWNDLLSLETGSLKLANGRVIEKTLYNRRTRQDEPALFVALTFERREVLDSSNIKPMNLIGVDRGENIPAVIALTDPEGCPLSRFKDSLGNPTHILRIGESYKEKQRTIQAKKEVEQRRAGGYSRKYASKAKNLADDMVRNTARDLLYYAVTQDAMLIFENLSRGFGRQGKRTFMAERQYTRMEDWLTAKLAYEGLPSKTYLSKTLAQYTSKTCSNCGFTITSADYDRVLEKLKKTATGWMTTINGKELKVEGQITYYNRYKRQNVVKDLSVELDRLSEESVNNDISSWTKGRSGEALSLLKKRFSHRPVQEKFVCLNCGFETHADEQAALNIARSWLFLRSQEYKKYQTNKTTGNTDKRAFVETWQSFYRKKLKEVWKPAV

SEQ ID NO: 32341 - protein, 979 aa, synthetic construct
  REGION 1..979: note = engineered CasX variant
QEIKGRINKIRRRLVKDSNTKKAGKTGPMKTLLVRVMTPDLRERLENLRKKPENIPQPISNTSRANLNKLLTDYTEMKKAILHVYWEEFQKDPVGLMSRVAQPASKKIDQNKLKPEMDEKGNLTTAGFACSQCGQPLFVYKLEQVSEKGKAYTNYFGRCNVAEHEKLILLAQLKPEKDSDEAVTYSLGKFGQRALDFYSIHVTKESTHPVKPLAQIAGNRYASSPVGKALSDACMGTIASFLSKYQDIIIEHQKVVKGNQKRLESLRELAGKENLEYPSVTLPPQPHTKEGVDAYNEVIARVRMWVNLNLWQKLKLSRDDAKPLLRLKGFPSFPLVERQANEVDWWDMVCNVKKLINEKKEDGKVFWQNLAGYKRQEALRPYLSSEEDRKKGKKFARYQLGDLLLHLEKKHGEDWGKVYDEAWERIDKKVEGLSKHIKLEEERRSEDAQSKAALTDWLRAKASFVIEGLKEADKDEFCRCELKLQKWYGDLRGKPFAIEAENSILDISGFSKQYNCAFIWQKDGVKKLNLYLIINYFKGGKLRFKKIKPEAFEANRFYTVINKKSGEIVPMEVNFNFDDPNLIILPLAFGKRFGREFIWNDLLSLETGSLKLANGRVIEKTLYNRRTRQDEPALFVALTFERREVLDSSNIKPMNLIGVDRGENIPAVIALTDPEGCPLSRFKDSLGNPTHILRIGESYKEKQRTIQAKKEVEQRRAGGYSRKYASKAKNLADDMVRNTARDLLYYAVTQDAMLIFENLSRGFGRQGKRTFMAERQYTRMEDWLTAKLAYEGLPSKTYLSKTLAQYTSKTCSNCGFTITSADYDRVLEKLKKTATGWMTTINGKELKVEGQITYYNRYKRQNVVKDLSVELDRLSEESVNNDISSWTKGRSGEALSLLKKRFSHRPVQEKFVCLNCGFETHADEQAALNIARSWLFLRSQEYKKYQTNKTTGNTDKRAFVETWQSFYRKKLKEVWKPAV

SEQ ID NO: 32342 - protein, 979 aa, synthetic construct
  REGION 1..979: note = engineered CasX variant
QEIKGRINKIRRRLVKDSNTKKAGKTGPMKTLLVRVMTPDLRERLENLRKKPENIPQPISNTSRANLNKLLTDYTEMKKAILHVYWEEFQKDPVGLMSRVAQPASKKIDQNKLKPEMDEKGNLTTAGFACSQCGQPLFVYKLEQVSEKGKAYTNYFGRCNVAEHEKLILLAQLKPEKDSDEAVTYSLGKFGQRALDFYSIHVTKESTHPVKPLAQIAGNRYASTPVGKALSDACMGTIASFLSKYQDIIIEHQKVVKGNQKRLESLRELAGKENLEYPSVTLPPQPHTKEGVDAYNEVIARVRMWVNLNLWQKLKLSRDDAKPLLRLKGFPSFPLVERQANEVDWWDMVCNVKKLINEKKEDGKVFWQNLAGYKRQEALRPYLSSEEDRKKGKKFARYQLGDLLLHLEKKHGEDWGKVYDEAWERIDKKVEGLSKHIKLEEERRSEDAQSKAALTDWLRAKASFVIEGLKEADKDEFCRCELKLQKWYGDLRGKPFAIEAENSILDISGFSKQYNCAFIWQKDGVKKLNLYLIINYFKGGKLRFKKIKPEAFEANRFYTVINKKSGEIVPMEVNFNFDDPNLIILPLAFGKRFGREFIWNDLLSLETGSLKLANGRVIEKTLYNRRTRQDEPALFVALTFERREVLDSSNIKPMNLIGVDRGENIPAVIALTDPEGCPLSRFKDSLGNPTHILRIGESYKEKQRTIQAKKEVEQRRAGGYSRKYASKAKNLADDMVRNTARDLLYYAVTQDAMLIFENLSRGFGRQGKRTFMAERQYTRMEDWLTAKLAYEGLPSKTYLSKTLAQYTSKTCSNCGFTITSADYDRVLEKLKKTATGWMTTINGKELKVEGQITYYNRYKRQNVVKDLSVELDRLSEESVNNDISSWTKGRSGEALSLLKKRFSHRPVQEKFVCLNCGFETHADEQAALNIARSWLFLRSQEYKKYQTNKTTGNTDKRAFVETWQSFYRKKLKEVWKPAV

SEQ ID NO: 32343 - protein, 979 aa, synthetic construct
  REGION 1..979: note = engineered CasX variant
QEIKGRINKIRRRLVKDSNTKKAGKTGPMKTLLVRVMTPDLRERLENLRKKPENIPQPISNTSRANLNKLLTDYTEMKKAILHVYWEEFQKDPVGLMSRVAQPASKKIDQNKLKPEMDEKGNLTTAGFACSQCGQPLFVYKLEQVSEKGKAYTNYFGRCNVAEHEKLILLAQLKPEKDSDEAVTYSLGKFGQRALDFYSIHVTKESTHPVKPLAQIAGNRYASAPVGKALSDACMGTIASFLSKYQDIIIEHQKVVKGNQKRLESLRELAGKENLEYPSVTLPPQPHTKEGVDAYNEVIARVRMWVNLNLWQKLKLSRDDAKPLLRLKGFPSFPLVERQANEVDWWDMVCNVKKLINEKKEDGKVFWQNLAGYKRQEALRPYLSSEEDRKKGKKFARYQLGDLLLHLEKKHGEDWGKVYDEAWERIDKKVEGLSKHIKLEEERRSEDAQSKAALTDWLRAKASFVIEGLKEADKDEFCRCELKLQKWYGDLRGKPFAIEAENSILDISGFSKQYNCAFIWQKDGVKKLNLYLIINYFKGGKLRFKKIKPEAFEANRFYTVINKKSGEIVPMEVNFNFDDPNLIILPLAFGKRFGREFIWNDLLSLETGSLKLANGRVIEKTLYNRRTRQDEPALFVALTFERREVLDSSNIKPMNLIGVDRGENIPAVIALTDPEGCPLSRFKDSLGNPTHILRIGESYKEKQRTIQAKKEVEQRRAGGYSRKYASKAKNLADDMVRNTARDLLYYAVTQDAMLIFENLSRGFGRQGKRTFMAERQYTRMEDWLTAKLAYEGLPSKTYLSKTLAQYTSKTCSNCGFTITSADYDRVLEKLKKTATGWMTTINGKELKVEGQITYYNRYKRQNVVKDLSVELDRLSEESVNNDISSWTKGRSGEALSLLKKRFSHRPVQEKFVCLNCGFETHADEQAALNIARSWLFLRSQEYKKYQTNKTTGNTDKRAFVETWQSFYRKKLKEVWKPAV

SEQ ID NO: 32344 - protein, 979 aa, synthetic construct
  REGION 1..979: note = engineered CasX variant
QEIKGRINKIRRRLVKDSNTKKAGKTGPMKTLLVRVMTPDLRERLENLRKKPENIPQPISNTSRANLNKLLTDYTEMKKAILHVYWEEFQKDPVGLMSRVAQPASKKIDQNKLKPEMDEKGNLTTAGFACSQCGQPLFVYKLEQVSEKGKAYTNYFGRCNVAEHEKLILLAQLKPEKDSDEAVTYSLGKFGQRALDFYSIHVTKESTHPVKPLAQIAGNRYASVPVGKALSDACMGTIASFLSKYQDIIIEHQKVVKGNQKRLESLRELAGKENLEYPSVTLPPQPHTKEGVDAYNEVIARVRMWVNLNLWQKLKLSRDDAKPLLRLKGFPSFPLVERQANEVDWWDMVCNVKKLINEKKEDGKVFWQNLAGYKRQEALRPYLSSEEDRKKGKKFARYQLGDLLLHLEKKHGEDWGKVYDEAWERIDKKVEGLSKHIKLEEERRSEDAQSKAALTDWLRAKASFVIEGLKEADKDEFCRCELKLQKWYGDLRGKPFAIEAENSILDISGFSKQYNCAFIWQKDGVKKLNLYLIINYFKGGKLRFKKIKPEAFEANRFYTVINKKSGEIVPMEVNFNFDDPNLIILPLAFGKRFGREFIWNDLLSLETGSLKLANGRVIEKTLYNRRTRQDEPALFVALTFERREVLDSSNIKPMNLIGVDRGENIPAVIALTDPEGCPLSRFKDSLGNPTHILRIGESYKEKQRTIQAKKEVEQRRAGGYSRKYASKAKNLADDMVRNTARDLLYYAVTQDAMLIFENLSRGFGRQGKRTFMAERQYTRMEDWLTAKLAYEGLPSKTYLSKTLAQYTSKTCSNCGFTITSADYDRVLEKLKKTATGWMTTINGKELKVEGQITYYNRYKRQNVVKDLSVELDRLSEESVNNDISSWTKGRSGEALSLLKKRFSHRPVQEKFVCLNCGFETHADEQAALNIARSWLFLRSQEYKKYQTNKTTGNTDKRAFVETWQSFYRKKLKEVWKPAV

SEQ ID NO: 32345 - protein, 979 aa, synthetic construct
  REGION 1..979: note = engineered CasX variant
QEIKGRINKIRRRLVKDSNTKKAGKTGPMKTLLVRVMTPDLRERLENLRKKPENIPQPISNTSRANLNKLLTDYTEMKKAILHVYWEEFQKDPVGLMSRVAQPASKKIDQNKLKPEMDEKGNLTTAGFACSQCGQPLFVYKLEQVSEKGKAYTNYFGRCNVAEHEKLIKLAQLKPEKDSDEAVTYSLGKFGQRALDFYSIHVTKESTHPVKPLAQIAGNRYASGPVGKALSDACMGTIASFLSKYQDIIIEHQKVVKGNQKRLESLRELAGKENLEYPSVTLPPQPHTKEGVDAYNEVIARVRMWVNLNLWQKLKLSRDDAKPLLRLKGFPSFPLVERQANEVDWWDMVCNVKKLINEKKEDGKVFWQNLAGYKRQEALRPYLSSEEDRKKGKKFARYQLGDLLLHLEKKHGEDWGKVYDEAWERIDKKVEGLSKHIKLEEERRSEDAQSKAALTDWLRAKASFVIEGLKEADKDEFCRCELKLQKWYGDLRGKPFAIEAENSILDISGFSKQYNCAFIWQKDGVKKLNLYLIINYFKGGKLRFKKIKPEAFEANRFYTVINKKSGEIVPMEVNFNFDDPNLIILPLAFGKRFGREFIWNDLLSLETGSLKLANGRVIEKTLYNRRTRQDEPALFVALTFERREVLDSSNIKPMNLIGVDRGENIPAVIALTDPEGCPLSRFKDSLGNPTHILRIGESYKEKQRTIQAKKEVEQRRAGGYSRKYASKAKNLADDMVRNTARDLLYYAVTQDAMLIFENLSRGFGRQGKRTFMAERQYTRMEDWLTAKLAYEGLPSKTYLSKTLAQYTSKTCSNCGFTITSADYDRVLEKLKKTATGWMTTINGKELKVEGQITYYNRYKRQNVVKDLSVELDRLSEESVNNDISSWTKGRSGEALSLLKKRFSHRPVQEKFVCLNCGFETHADEQAALNIARSWLFLRSQEYKKYQTNKTTGNTDKRAFVETWQSFYRKKLKEVWKPAV

SEQ ID NO: 32346 - protein, 978 aa, synthetic construct
  REGION 1..978: note = engineered CasX variant
QEIKGRINKIRRRLVKDSNTKKAGKTGPMKTLLVRVMTPDLRERLENLRKKPENIPQPISNTSRANLNKLLTDYTEMKKAILHVYWEEFQKDPVGLMSRVAQPASKKIDQNKLKPEMDEKGNLTTAGFACSQCGQPLFVYKLEQVSEKGKAYTNYFGRCNVAEHEKLILLAQLKPEKDSDEAVTYSLGKFGQRALDFYSIHVTKESTHPVKPLAQIAGNRYASPVGKALSDACMGTIASFLSKYQDIIIEHQKVVKGNQKRLESLRELAGKENLEYPSVTLPPQPHTKEGVDAYNEVIARVRMWVNLNLWQKLKLSRDDAKPLLRLKGFPSFPLVERQANEVDWWDMVCNVKKLINEKKEDGKVFWQNLAGYKRQEALRPYLSSEEDRKKGKKFARYQLGDLLLHLEKKHGEDWGKVYDEAWERIDKKVEGLSKHIKLEEERRSEDAQSKAALTDWLRAKASFVIEGLKEADKDEFCRCELKLQKWYGDLRGKPFAIEAENSILDISGFSKQYNCAFIWQKDGVKKLNLYLIINYFKGGKLRFKKIKPEAFEANRFYTVINKKSGEIVPMEVNFNFDDPNLIILPLAFGKRFGREFIWNDLLSLETGSLKLANGRVIEKTLYNRRTRQDEPALFVALTFERREVLDSSNIKPMNLIGVDRGENIPAVIALTDPEGCPLSRFKDSLGNPTHILRIGESYKEKQRTIQAKKEVEQRRAGGYSRKYASKAKNLADDMVRNTARDLLYYAVTQDAMLIFENLSRGFGRQGKRTFMAERQYTRMEDWLTAKLAYEGLPSKTYLSKTLAQYTSKTCSNCGFTITSADYDRVLEKLKKTATGWMTTINGKELKVEGQITYYNRYKRQNVVKDLSVELDRLSEESVNNDISSWTKGRSGEALSLLKKRFSHRPVQEKFVCLNCGFETHADEQAALNIARSWLFLRSQEYKKYQTNKTTGNTDKRAFVETWQSFYRKKLKEVWKPAV

SEQ ID NO: 32347 - protein, 979 aa, synthetic construct
  REGION 1..979: note = engineered CasX variant
QEIKGRINKIRRRLVKDSNTKKAGKTGPMKTLLVRVMTPDLRERLENLRKKPENIPQPISNTSRANLNKLLTDYTEMKKAILHVYWEEFQKDPVGLMSRVAQPASKKIDQNKLKPEMDEKGNLTTAGFACSQCGQPLFVYKLEQVSEKGKAYTNYFGRCNVAEHEKLILLAQLKPEKDSDEAVTYSLGKFGQRALDFYSIHVTKESTHPVKPLAQIAGNRYASYPVGKALSDACMGTIASFLSKYQDIIIEHQKVVKGNQKRLESLRELAGKENLEYPSVTLPPQPHTKEGVDAYNEVIARVRMWVNLNLWQKLKLSRDDAKPLLRLKGFPSFPLVERQANEVDWWDMVCNVKKLINEKKEDGKVFWQNLAGYKRQEALRPYLSSEEDRKKGKKFARYQLGDLLLHLEKKHGEDWGKVYDEAWERIDKKVEGLSKHIKLEEERRSEDAQSKAALTDWLRAKASFVIEGLKEADKDEFCRCELKLQKWYGDLRGKPFAIEAENSILDISGFSKQYNCAFIWQKDGVKKLNLYLIINYFKGGKLRFKKIKPEAFEANRFYTVINKKSGEIVPMEVNFNFDDPNLIILPLAFGKRVGREFIWNDLLSLETGSLKLANGRVIEKTLYNRRTRQDEPALFVALTFERREVLDSSNIKPMNLIGVDRGENIPAVIALTDPEGCPLSRFKDSLGNPTHILRIGESYKEKQRTIQAKKEVEQRRAGGYSRKYASKAKNLADDMVRNTARDLLYYAVTQDAMLIFENLSRGFGRQGKRTFMAERQYTRMEDWLTAKLAYEGLPSKTYLSKTLAQYTSKTCSNCGFTITSADYDRVLEKLKKTATGWMTTINGKELKVEGQITYYNRYKRQNVVKDLSVELDRLSEESVNNDISSWTKGRSGEALSLLKKRFSHRPVQEKFVCLNCGFETHADEQAALNIARSWLFLRSQEYKKYQTNKTTGNTDKRAFVETWQSFYRKKLKEVWKPAV

SEQ ID NO: 32348 - protein, 979 aa, synthetic construct
  REGION 1..979: note = engineered CasX variant
QEIKGRINKIRRRLVKDSNTKKAGKTGPMKTLLVRVMTPDLRERLENLRKKPENIPQPISNTSRANLNKLLTDYTEMKKAILHVYWEEFQKDPVGLMSRVAQPASKKIDQNKLKPEMDEKGNLTTAGFACSQCGQPLFVYKLEQVSEKGKAYTNYFGRCNVAEHEKLILLAQLKPEKDSDEAVTYSLGKFGQRALDFYSIHVTKESTHPVKPLAQIAGNRYASHPVGKALSDACMGTIASFLSKYQDIIIEHQKVVKGNQKRLESLRELAGKENLEYPSVTLPPQPHTKEGVDAYNEVIARVRMWVNLNLWQKLKLSRDDAKPLLRLKGFPSFPLVERQANEVDWWDMVCNVKKLINEKKEDGKVFWQNLAGYKRQEALRPYLSSEEDRKKGKKFARYQLGDLLLHLEKKHGEDWGKVYDEAWERIDKKVEGLSKHIKLEEERRSEDAQSKAALTDWLRAKASFVIEGLKEADKDEFCRCELKLQKWYGDLRGKPFAIEAENSILDISGFSKQYNCAFIWQKDGVKKLNLYLIINYFKGGKLRFKKIKPEAFEANRFYTVINKKSGEIVPMEVNFNFDDPNLIILPLAFGKRVGREFIWNDLLSLETGSLKLANGRVIEKTLYNRRTRQDEPALFVALTFERREVLDSSNIKPMNLIGVDRGENIPAVIALTDPEGCPLSRFKDSLGNPTHILRIGESYKEKQRTIQAKKEVEQRRAGGYSRKYASKAKNLADDMVRNTARDLLYYAVTQDAMLIFENLSRGFGRQGKRTFMAERQYTRMEDWLTAKLAYEGLPSKTYLSKTLAQYTSKTCSNCGFTITSADYDRVLEKLKKTATGWMTTINGKELKVEGQITYYNRYKRQNVVKDLSVELDRLSEESVNNDISSWTKGRSGEALSLLKKRFSHRPVQEKFVCLNCGFETHADEQAALNIARSWLFLRSQEYKKYQTNKTTGNTDKRAFVETWQSFYRKKLKEVWKPAV

SEQ ID NO: 32349 - protein, 979 aa, synthetic construct
  REGION 1..979: note = engineered CasX variant
QEIKGRINKIRRRLVKDSNTKKAGKTGPMKTLLVRVMTPDLRERLENLRKKPENIPQPISNTSRANLNKLLTDYTEMKKAILHVYWEEFQKDPVGLMSRVAQPASKKIDQNKLKPEMDEKGNLTTAGFACSQCGQPLFVYKLEQVSEKGKAYTNYFGRCNVAEHEKLILLAQLKPEKDSDEAVTYSLGKFGQRALDFYSIHVTKESTHPVKPLAQIAGNRYASSPVGKALSDACMGTIASFLSKYQDIIIEHQKVVKGNQKRLESLRELAGKENLEYPSVTLPPQPHTKEGVDAYNEVIARVRMWVNLNLWQKLKLSRDDAKPLLRLKGFPSFPLVERQANEVDWWDMVCNVKKLINEKKEDGKVFWQNLAGYKRQEALRPYLSSEEDRKKGKKFARYQLGDLLLHLEKKHGEDWGKVYDEAWERIDKKVEGLSKHIKLEEERRSEDAQSKAALTDWLRAKASFVIEGLKEADKDEFCRCELKLQKWYGDLRGKPFAIEAENSILDISGFSKQYNCAFIWQKDGVKKLNLYLIINYFKGGKLRFKKIKPEAFEANRFYTVINKKSGEIVPMEVNFNFDDPNLIILPLAFGKRVGREFIWNDLLSLETGSLKLANGRVIEKTLYNRRTRQDEPALFVALTFERREVLDSSNIKPMNLIGVDRGENIPAVIALTDPEGCPLSRFKDSLGNPTHILRIGESYKEKQRTIQAKKEVEQRRAGGYSRKYASKAKNLADDMVRNTARDLLYYAVTQDAMLIFENLSRGFGRQGKRTFMAERQYTRMEDWLTAKLAYEGLPSKTYLSKTLAQYTSKTCSNCGFTITSADYDRVLEKLKKTATGWMTTINGKELKVEGQITYYNRYKRQNVVKDLSVELDRLSEESVNNDISSWTKGRSGEALSLLKKRFSHRPVQEKFVCLNCGFETHADEQAALNIARSWLFLRSQEYKKYQTNKTTGNTDKRAFVETWQSFYRKKLKEVWKPAV

SEQ ID NO: 32350 - protein, 979 aa, synthetic construct
  REGION 1..979: note = engineered CasX variant
QEIKGRINKIRRRLVKDSNTKKAGKTGPMKTLLVRVMTPDLRERLENLRKKPENIPQPISNTSRANLNKLLTDYTEMKKAILHVYWEEFQKDPVGLMSRVAQPASKKIDQNKLKPEMDEKGNLTTAGFACSQCGQPLFVYKLEQVSEKGKAYTNYFGRCNVAEHEKLILLAQLKPEKDSDEAVTYSLGKFGQRALDFYSIHVTKESTHPVKPLAQIAGNRYASTPVGKALSDACMGTIASFLSKYQDIIIEHQKVVKGNQKRLESLRELAGKENLEYPSVTLPPQPHTKEGVDAYNEVIARVRMWVNLNLWQKLKLSRDDAKPLLRLKGFPSFPLVERQANEVDWWDMVCNVKKLINEKKEDGKVFWQNLAGYKRQEALRPYLSSEEDRKKGKKFARYQLGDLLLHLEKKHGEDWGKVYDEAWERIDKKVEGLSKHIKLEEERRSEDAQSKAALTDWLRAKASFVIEGLKEADKDEFCRCELKLQKWYGDLRGKPFAIEAENSILDISGFSKQYNCAFIWQKDGVKKLNLYLIINYFKGGKLRFKKIKPEAFEANRFYTVINKKSGEIVPMEVNFNFDDPNLIILPLAFGKRVGREFIWNDLLSLETGSLKLANGRVIEKTLYNRRTRQDEPALFVALTFERREVLDSSNIKPMNLIGVDRGENIPAVIALTDPEGCPLSRFKDSLGNPTHILRIGESYKEKQRTIQAKKEVEQRRAGGYSRKYASKAKNLADDMVRNTARDLLYYAVTQDAMLIFENLSRGFGRQGKRTFMAERQYTRMEDWLTAKLAYEGLPSKTYLSKTLAQYTSKTCSNCGFTITSADYDRVLEKLKKTATGWMTTINGKELKVEGQITYYNRYKRQNVVKDLSVELDRLSEESVNNDISSWTKGRSGEALSLLKKRFSHRPVQEKFVCLNCGFETHADEQAALNIARSWLFLRSQEYKKYQTNKTTGNTDKRAFVETWQSFYRKKLKEVWKPAV

SEQ ID NO: 32351 - protein, 979 aa, synthetic construct
  REGION 1..979: note = engineered CasX variant
QEIKGRINKIRRRLVKDSNTKKAGKTGPMKTLLVRVMTPDLRERLENLRKKPENIPQPISNTSRANLNKLLTDYTEMKKAILHVYWEEFQKDPVGLMSRVAQPASKKIDQNKLKPEMDEKGNLTTAGFACSQCGQPLFVYKLEQVSEKGKAYTNYFGRCNVAEHEKLILLAQLKPEKDSDEAVTYSLGKFGQRALDFYSIHVTKESTHPVKPLAQIAGNRYASAPVGKALSDACMGTIASFLSKYQDIIIEHQKVVKGNQKRLESLRELAGKENLEYPSVTLPPQPHTKEGVDAYNEVIARVRMWVNLNLWQKLKLSRDDAKPLLRLKGFPSFPLVERQANEVDWWDMVCNVKKLINEKKEDGKVFWQNLAGYKRQEALRPYLSSEEDRKKGKKFARYQLGDLLLHLEKKHGEDWGKVYDEAWERIDKKVEGLSKHIKLEEERRSEDAQSKAALTDWLRAKASFVIEGLKEADKDEFCRCELKLQKWYGDLRGKPFAIEAENSILDISGFSKQYNCAFIWQKDGVKKLNLYLIINYFKGGKLRFKKIKPEAFEANRFYTVINKKSGEIVPMEVNFNFDDPNLIILPLAFGKRVGREFIWNDLLSLETGSLKLANGRVIEKTLYNRRTRQDEPALFVALTFERREVLDSSNIKPMNLIGVDRGENIPAVIALTDPEGCPLSRFKDSLGNPTHILRIGESYKEKQRTIQAKKEVEQRRAGGYSRKYASKAKNLADDMVRNTARDLLYYAVTQDAMLIFENLSRGFGRQGKRTFMAERQYTRMEDWLTAKLAYEGLPSKTYLSKTLAQYTSKTCSNCGFTITSADYDRVLEKLKKTATGWMTTINGKELKVEGQITYYNRYKRQNVVKDLSVELDRLSEESVNNDISSWTKGRSGEALSLLKKRFSHRPVQEKFVCLNCGFETHADEQAALNIARSWLFLRSQEYKKYQTNKTTGNTDKRAFVETWQSFYRKKLKEVWKPAV

SEQ ID NO: 32352 - protein, 979 aa, synthetic construct
  REGION 1..979: note = engineered CasX variant
QEIKGRINKIRRRLVKDSNTKKAGKTGPMKTLLVRVMTPDLRERLENLRKKPENIPQPISNTSRANLNKLLTDYTEMKKAILHVYWEEFQKDPVGLMSRVAQPASKKIDQNKLKPEMDEKGNLTTAGFACSQCGQPLFVYKLEQVSEKGKAYTNYFGRCNVAEHEKLILLAQLKPEKDSDEAVTYSLGKFGQRALDFYSIHVTKESTHPVKPLAQIAGNRYASVPVGKALSDACMGTIASFLSKYQDIIIEHQKVVKGNQKRLESLRELAGKENLEYPSVTLPPQPHTKEGVDAYNEVIARVRMWVNLNLWQKLKLSRDDAKPLLRLKGFPSFPLVERQANEVDWWDMVCNVKKLINEKKEDGKVFWQNLAGYKRQEALRPYLSSEEDRKKGKKFARYQLGDLLLHLEKKHGEDWGKVYDEAWERIDKKVEGLSKHIKLEEERRSEDAQSKAALTDWLRAKASFVIEGLKEADKDEFCRCELKLQKWYGDLRGKPFAIEAENSILDISGFSKQYNCAFIWQKDGVKKLNLYLIINYFKGGKLRFKKIKPEAFEANRFYTVINKKSGEIVPMEVNFNFDDPNLIILPLAFGKRVGREFIWNDLLSLETGSLKLANGRVIEKTLYNRRTRQDEPALFVALTFERREVLDSSNIKPMNLIGVDRGENIPAVIALTDPEGCPLSRFKDSLGNPTHILRIGESYKEKQRTIQAKKEVEQRRAGGYSRKYASKAKNLADDMVRNTARDLLYYAVTQDAMLIFENLSRGFGRQGKRTFMAERQYTRMEDWLTAKLAYEGLPSKTYLSKTLAQYTSKTCSNCGFTITSADYDRVLEKLKKTATGWMTTINGKELKVEGQITYYNRYKRQNVVKDLSVELDRLSEESVNNDISSWTKGRSGEALSLLKKRFSHRPVQEKFVCLNCGFETHADEQAALNIARSWLFLRSQEYKKYQTNKTTGNTDKRAFVETWQSFYRKKLKEVWKPAV

SEQ ID NO: 32353 - protein, 979 aa, synthetic construct
  REGION 1..979: note = engineered CasX variant
QEIKGRINKIRRRLVKDSNTKKAGKTGPMKTLLVRVMTPDLRERLENLRKKPENIPQPISNTSRANLNKLLTDYTEMKKAILHVYWEEFQKDPVGLMSRVAQPASKKIDQNKLKPEMDEKGNLTTAGFACSQCGQPLFVYKLEQVSEKGKAYTNYFGRCNVAEHEKLIKLAQLKPEKDSDEAVTYSLGKFGQRALDFYSIHVTKESTHPVKPLAQIAGNRYASGPVGKALSDACMGTIASFLSKYQDIIIEHQKVVKGNQKRLESLRELAGKENLEYPSVTLPPQPHTKEGVDAYNEVIARVRMWVNLNLWQKLKLSRDDAKPLLRLKGFPSFPLVERQANEVDWWDMVCNVKKLINEKKEDGKVFWQNLAGYKRQEALRPYLSSEEDRKKGKKFARYQLGDLLLHLEKKHGEDWGKVYDEAWERIDKKVEGLSKHIKLEEERRSEDAQSKAALTDWLRAKASFVIEGLKEADKDEFCRCELKLQKWYGDLRGKPFAIEAENSILDISGFSKQYNCAFIWQKDGVKKLNLYLIINYFKGGKLRFKKIKPEAFEANRFYTVINKKSGEIVPMEVNFNFDDPNLIILPLAFGKRVGREFIWNDLLSLETGSLKLANGRVIEKTLYNRRTRQDEPALFVALTFERREVLDSSNIKPMNLIGVDRGENIPAVIALTDPEGCPLSRFKDSLGNPTHILRIGESYKEKQRTIQAKKEVEQRRAGGYSRKYASKAKNLADDMVRNTARDLLYYAVTQDAMLIFENLSRGFGRQGKRTFMAERQYTRMEDWLTAKLAYEGLPSKTYLSKTLAQYTSKTCSNCGFTITSADYDRVLEKLKKTATGWMTTINGKELKVEGQITYYNRYKRQNVVKDLSVELDRLSEESVNNDISSWTKGRSGEALSLLKKRFSHRPVQEKFVCLNCGFETHADEQAALNIARSWLFLRSQEYKKYQTNKTTGNTDKRAFVETWQSFYRKKLKEVWKPAV

SEQ ID NO: 32354 - protein, 978 aa, synthetic construct
  REGION 1..978: note = engineered CasX variant
QEIKGRINKIRRRLVKDSNTKKAGKTGPMKTLLVRVMTPDLRERLENLRKKPENIPQPISNTSRANLNKLLTDYTEMKKAILHVYWEEFQKDPVGLMSRVAQPASKKIDQNKLKPEMDEKGNLTTAGFACSQCGQPLFVYKLEQVSEKGKAYTNYFGRCNVAEHEKLILLAQLKPEKDSDEAVTYSLGKFGQRALDFYSIHVTKESTHPVKPLAQIAGNRYASPVGKALSDACMGTIASFLSKYQDIIIEHQKVVKGNQKRLESLRELAGKENLEYPSVTLPPQPHTKEGVDAYNEVIARVRMWVNLNLWQKLKLSRDDAKPLLRLKGFPSFPLVERQANEVDWWDMVCNVKKLINEKKEDGKVFWQNLAGYKRQEALRPYLSSEEDRKKGKKFARYQLGDLLLHLEKKHGEDWGKVYDEAWERIDKKVEGLSKHIKLEEERRSEDAQSKAALTDWLRAKASFVIEGLKEADKDEFCRCELKLQKWYGDLRGKPFAIEAENSILDISGFSKQYNCAFIWQKDGVKKLNLYLIINYFKGGKLRFKKIKPEAFEANRFYTVINKKSGEIVPMEVNFNFDDPNLIILPLAFGKRVGREFIWNDLLSLETGSLKLANGRVIEKTLYNRRTRQDEPALFVALTFERREVLDSSNIKPMNLIGVDRGENIPAVIALTDPEGCPLSRFKDSLGNPTHILRIGESYKEKQRTIQAKKEVEQRRAGGYSRKYASKAKNLADDMVRNTARDLLYYAVTQDAMLIFENLSRGFGRQGKRTFMAERQYTRMEDWLTAKLAYEGLPSKTYLSKTLAQYTSKTCSNCGFTITSADYDRVLEKLKKTATGWMTTINGKELKVEGQITYYNRYKRQNVVKDLSVELDRLSEESVNNDISSWTKGRSGEALSLLKKRFSHRPVQEKFVCLNCGFETHADEQAALNIARSWLFLRSQEYKKYQTNKTTGNTDKRAFVETWQSFYRKKLKEVWKPAV

SEQ ID NO: 32355 - protein, 980 aa, synthetic construct
  REGION 1..980: note = engineered CasX variant
QEIKGRINKIRRRLVKDSNTKKAGKTGPMKTLLVRVMTPDLRERLENLRKKPENIPQPISNTSRANLNKLLTDYTEMKKAILHVYWEEFQKDPVGLMSRVAQPASKKIDQNKLKPEMDEKGNLTTAGFACSQCGQPLFVYKLEQVSEKGKAYTNYFGRCNVAEHEKLILLAQLKPEKDSDEAVTYSLGKFGQRALDFYSIHVTKESTHPVKPLAQIAGNRYASYPVGKALSDACMGTIASFLSKYQDIIIEHQKVVKGNQKRLESLRELAGKENLEYPSVTLPPQPHTKEGVDAYNEVIARVRMWVNLNLWQKLKLSRDDAKPLLRLKGFPSFPLVERQANEVDWWDMVCNVKKLINEKKEDGKVFWQNLAGYKRQEALRPYLSSEEDRKKGKKFARYQLGDLLLHLEKKHGEDWGKVYDEAWERIDKKVEGLSKHIKLEEERRSEDAQSKAALTDWLRAKASFVIEGLKEADKDEFCRCELKLQKWYGDLRGKPFAIEAENSILDISGFSKQYNCAFIWQKDGVKKLNLYLIINYFKGGKLRFKKIKPEAFEANRFYTVINKKSGEIVPMEVNFNFDDPNLIILPLAFGKRQGREFIWNDLLSLETGSLKLANGRVIEKTLYNRRTRQDEPALFVALTFERREVLDSSNIKTPMNLIGVDRGENIPAVIALTDPEGCPLSRFKDSLGNPTHILRIGESYKEKQRTIQAKKEVEQRRAGGYSRKYASKAKNLADDMVRNTARDLLYYAVTQDAMLIFENLSRGFGRQGKRTFMAERQYTRMEDWLTAKLAYEGLPSKTYLSKTLAQYTSKTCSNCGFTITSADYDRVLEKLKKTATGWMTTINGKELKVEGQITYYNRYKRQNVVKDLSVELDRLSEESVNNDISSWTKGRSGEALSLLKKRFSHRPVQEKFVCLNCGFETHADEQAALNIARSWLFLRSQEYKKYQTNKTTGNTDKRAFVETWQSFYRKKLKEVWKPAV

SEQ ID NO: 32356 - protein, 980 aa, synthetic construct
  REGION 1..980: note = engineered CasX variant
QEIKGRINKIRRRLVKDSNTKKAGKTGPMKTLLVRVMTPDLRERLENLRKKPENIPQPISNTSRANLNKLLTDYTEMKKAILHVYWEEFQKDPVGLMSRVAQPASKKIDQNKLKPEMDEKGNLTTAGFACSQCGQPLFVYKLEQVSEKGKAYTNYFGRCNVAEHEKLILLAQLKPEKDSDEAVTYSLGKFGQRALDFYSIHVTKESTHPVKPLAQIAGNRYASHPVGKALSDACMGTIASFLSKYQDIIIEHQKVVKGNQKRLESLRELAGKENLEYPSVTLPPQPHTKEGVDAYNEVIARVRMWVNLNLWQKLKLSRDDAKPLLRLKGFPSFPLVERQANEVDWWDMVCNVKKLINEKKEDGKVFWQNLAGYKRQEALRPYLSSEEDRKKGKKFARYQLGDLLLHLEKKHGEDWGKVYDEAWERIDKKVEGLSKHIKLEEERRSEDAQSKAALTDWLRAKASFVIEGLKEADKDEFCRCELKLQKWYGDLRGKPFAIEAENSILDISGFSKQYNCAFIWQKDGVKKLNLYLIINYFKGGKLRFKKIKPEAFEANRFYTVINKKSGEIVPMEVNFNFDDPNLIILPLAFGKRQGREFIWNDLLSLETGSLKLANGRVIEKTLYNRRTRQDEPALFVALTFERREVLDSSNIKTPMNLIGVDRGENIPAVIALTDPEGCPLSRFKDSLGNPTHILRIGESYKEKQRTIQAKKEVEQRRAGGYSRKYASKAKNLADDMVRNTARDLLYYAVTQDAMLIFENLSRGFGRQGKRTFMAERQYTRMEDWLTAKLAYEGLPSKTYLSKTLAQYTSKTCSNCGFTITSADYDRVLEKLKKTATGWMTTINGKELKVEGQITYYNRYKRQNVVKDLSVELDRLSEESVNNDISSWTKGRSGEALSLLKKRFSHRPVQEKFVCLNCGFETHADEQAALNIARSWLFLRSQEYKKYQTNKTTGNTDKRAFVETWQSFYRKKLKEVWKPAV

SEQ ID NO: 32357 - protein, 980 aa, synthetic construct
  REGION 1..980: note = engineered CasX variant
QEIKGRINKIRRRLVKDSNTKKAGKTGPMKTLLVRVMTPDLRERLENLRKKPENIPQPISNTSRANLNKLLTDYTEMKKAILHVYWEEFQKDPVGLMSRVAQPASKKIDQNKLKPEMDEKGNLTTAGFACSQCGQPLFVYKLEQVSEKGKAYTNYFGRCNVAEHEKLILLAQLKPEKDSDEAVTYSLGKFGQRALDFYSIHVTKESTHPVKPLAQIAGNRYASSPVGKALSDACMGTIASFLSKYQDIIIEHQKVVKGNQKRLESLRELAGKENLEYPSVTLPPQPHTKEGVDAYNEVIARVRMWVNLNLWQKLKLSRDDAKPLLRLKGFPSFPLVERQANEVDWWDMVCNVKKLINEKKEDGKVFWQNLAGYKRQEALRPYLSSEEDRKKGKKFARYQLGDLLLHLEKKHGEDWGKVYDEAWERIDKKVEGLSKHIKLEEERRSEDAQSKAALTDWLRAKASFVIEGLKEADKDEFCRCELKLQKWYGDLRGKPFAIEAENSILDISGFSKQYNCAFIWQKDGVKKLNLYLIINYFKGGKLRFKKIKPEAFEANRFYTVINKKSGEIVPMEVNFNFDDPNLIILPLAFGKRQGREFIWNDLLSLETGSLKLANGRVIEKTLYNRRTRQDEPALFVALTFERREVLDSSNIKTPMNLIGVDRGENIPAVIALTDPEGCPLSRFKDSLGNPTHILRIGESYKEKQRTIQAKKEVEQRRAGGYSRKYASKAKNLADDMVRNTARDLLYYAVTQDAMLIFENLSRGFGRQGKRTFMAERQYTRMEDWLTAKLAYEGLPSKTYLSKTLAQYTSKTCSNCGFTITSADYDRVLEKLKKTATGWMTTINGKELKVEGQITYYNRYKRQNVVKDLSVELDRLSEESVNNDISSWTKGRSGEALSLLKKRFSHRPVQEKFVCLNCGFETHADEQAALNIARSWLFLRSQEYKKYQTNKTTGNTDKRAFVETWQSFYRKKLKEVWKPAV

SEQ ID NO: 32358 - protein, 980 aa, synthetic construct
  REGION 1..980: note = engineered CasX variant
QEIKGRINKIRRRLVKDSNTKKAGKTGPMKTLLVRVMTPDLRERLENLRKKPENIPQPISNTSRANLNKLLTDYTEMKKAILHVYWEEFQKDPVGLMSRVAQPASKKIDQNKLKPEMDEKGNLTTAGFACSQCGQPLFVYKLEQVSEKGKAYTNYFGRCNVAEHEKLILLAQLKPEKDSDEAVTYSLGKFGQRALDFYSIHVTKESTHPVKPLAQIAGNRYASTPVGKALSDACMGTIASFLSKYQDIIIEHQKVVKGNQKRLESLRELAGKENLEYPSVTLPPQPHTKEGVDAYNEVIARVRMWVNLNLWQKLKLSRDDAKPLLRLKGFPSFPLVERQANEVDWWDMVCNVKKLINEKKEDGKVFWQNLAGYKRQEALRPYLSSEEDRKKGKKFARYQLGDLLLHLEKKHGEDWGKVYDEAWERIDKKVEGLSKHIKLEEERRSEDAQSKAALTDWLRAKASFVIEGLKEADKDEFCRCELKLQKWYGDLRGKPFAIEAENSILDISGFSKQYNCAFIWQKDGVKKLNLYLIINYFKGGKLRFKKIKPEAFEANRFYTVINKKSGEIVPMEVNFNFDDPNLIILPLAFGKRQGREFIWNDLLSLETGSLKLANGRVIEKTLYNRRTRQDEPALFVALTFERREVLDSSNIKTPMNLIGVDRGENIPAVIALTDPEGCPLSRFKDSLGNPTHILRIGESYKEKQRTIQAKKEVEQRRAGGYSRKYASKAKNLADDMVRNTARDLLYYAVTQDAMLIFENLSRGFGRQGKRTFMAERQYTRMEDWLTAKLAYEGLPSKTYLSKTLAQYTSKTCSNCGFTITSADYDRVLEKLKKTATGWMTTINGKELKVEGQITYYNRYKRQNVVKDLSVELDRLSEESVNNDISSWTKGRSGEALSLLKKRFSHRPVQEKFVCLNCGFETHADEQAALNIARSWLFLRSQEYKKYQTNKTTGNTDKRAFVETWQSFYRKKLKEVWKPAV

SEQ ID NO: 32359 - protein, 980 aa, synthetic construct
  REGION 1..980: note = engineered CasX variant
QEIKGRINKIRRRLVKDSNTKKAGKTGPMKTLLVRVMTPDLRERLENLRKKPENIPQPISNTSRANLNKLLTDYTEMKKAILHVYWEEFQKDPVGLMSRVAQPASKKIDQNKLKPEMDEKGNLTTAGFACSQCGQPLFVYKLEQVSEKGKAYTNYFGRCNVAEHEKLILLAQLKPEKDSDEAVTYSLGKFGQRALDFYSIHVTKESTHPVKPLAQIAGNRYASAPVGKALSDACMGTIASFLSKYQDIIIEHQKVVKGNQKRLESLRELAGKENLEYPSVTLPPQPHTKEGVDAYNEVIARVRMWVNLNLWQKLKLSRDDAKPLLRLKGFPSFPLVERQANEVDWWDMVCNVKKLINEKKEDGKVFWQNLAGYKRQEALRPYLSSEEDRKKGKKFARYQLGDLLLHLEKKHGEDWGKVYDEAWERIDKKVEGLSKHIKLEEERRSEDAQSKAALTDWLRAKASFVIEGLKEADKDEFCRCELKLQKWYGDLRGKPFAIEAENSILDISGFSKQYNCAFIWQKDGVKKLNLYLIINYFKGGKLRFKKIKPEAFEANRFYTVINKKSGEIVPMEVNFNFDDPNLIILPLAFGKRQGREFIWNDLLSLETGSLKLANGRVIEKTLYNRRTRQDEPALFVALTFERREVLDSSNIKTPMNLIGVDRGENIPAVIALTDPEGCPLSRFKDSLGNPTHILRIGESYKEKQRTIQAKKEVEQRRAGGYSRKYASKAKNLADDMVRNTARDLLYYAVTQDAMLIFENLSRGFGRQGKRTFMAERQYTRMEDWLTAKLAYEGLPSKTYLSKTLAQYTSKTCSNCGFTITSADYDRVLEKLKKTATGWMTTINGKELKVEGQITYYNRYKRQNVVKDLSVELDRLSEESVNNDISSWTKGRSGEALSLLKKRFSHRPVQEKFVCLNCGFETHADEQAALNIARSWLFLRSQEYKKYQTNKTTGNTDKRAFVETWQSFYRKKLKEVWKPAV

SEQ ID NO: 32360 - protein, 980 aa, synthetic construct
  REGION 1..980: note = engineered CasX variant
QEIKGRINKIRRRLVKDSNTKKAGKTGPMKTLLVRVMTPDLRERLENLRKKPENIPQPISNTSRANLNKLLTDYTEMKKAILHVYWEEFQKDPVGLMSRVAQPASKKIDQNKLKPEMDEKGNLTTAGFACSQCGQPLFVYKLEQVSEKGKAYTNYFGRCNVAEHEKLILLAQLKPEKDSDEAVTYSLGKFGQRALDFYSIHVTKESTHPVKPLAQIAGNRYASVPVGKALSDACMGTIASFLSKYQDIIIEHQKVVKGNQKRLESLRELAGKENLEYPSVTLPPQPHTKEGVDAYNEVIARVRMWVNLNLWQKLKLSRDDAKPLLRLKGFPSFPLVERQANEVDWWDMVCNVKKLINEKKEDGKVFWQNLAGYKRQEALRPYLSSEEDRKKGKKFARYQLGDLLLHLEKKHGEDWGKVYDEAWERIDKKVEGLSKHIKLEEERRSEDAQSKAALTDWLRAKASFVIEGLKEADKDEFCRCELKLQKWYGDLRGKPFAIEAENSILDISGFSKQYNCAFIWQKDGVKKLNLYLIINYFKGGKLRFKKIKPEAFEANRFYTVINKKSGEIVPMEVNFNFDDPNLIILPLAFGKRQGREFIWNDLLSLETGSLKLANGRVIEKTLYNRRTRQDEPALFVALTFERREVLDSSNIKTPMNLIGVDRGENIPAVIALTDPEGCPLSRFKDSLGNPTHILRIGESYKEKQRTIQAKKEVEQRRAGGYSRKYASKAKNLADDMVRNTARDLLYYAVTQDAMLIFENLSRGFGRQGKRTFMAERQYTRMEDWLTAKLAYEGLPSKTYLSKTLAQYTSKTCSNCGFTITSADYDRVLEKLKKTATGWMTTINGKELKVEGQITYYNRYKRQNVVKDLSVELDRLSEESVNNDISSWTKGRSGEALSLLKKRFSHRPVQEKFVCLNCGFETHADEQAALNIARSWLFLRSQEYKKYQTNKTTGNTDKRAFVETWQSFYRKKLKEVWKPAV

SEQ ID NO: 32361 - protein, 980 aa, synthetic construct
  REGION 1..980: note = engineered CasX variant
QEIKGRINKIRRRLVKDSNTKKAGKTGPMKTLLVRVMTPDLRERLENLRKKPENIPQPISNTSRANLNKLLTDYTEMKKAILHVYWEEFQKDPVGLMSRVAQPASKKIDQNKLKPEMDEKGNLTTAGFACSQCGQPLFVYKLEQVSEKGKAYTNYFGRCNVAEHEKLIKLAQLKPEKDSDEAVTYSLGKFGQRALDFYSIHVTKESTHPVKPLAQIAGNRYASGPVGKALSDACMGTIASFLSKYQDIIIEHQKVVKGNQKRLESLRELAGKENLEYPSVTLPPQPHTKEGVDAYNEVIARVRMWVNLNLWQKLKLSRDDAKPLLRLKGFPSFPLVERQANEVDWWDMVCNVKKLINEKKEDGKVFWQNLAGYKRQEALRPYLSSEEDRKKGKKFARYQLGDLLLHLEKKHGEDWGKVYDEAWERIDKKVEGLSKHIKLEEERRSEDAQSKAALTDWLRAKASFVIEGLKEADKDEFCRCELKLQKWYGDLRGKPFAIEAENSILDISGFSKQYNCAFIWQKDGVKKLNLYLIINYFKGGKLRFKKIKPEAFEANRFYTVINKKSGEIVPMEVNFNFDDPNLIILPLAFGKRQGREFIWNDLLSLETGSLKLANGRVIEKTLYNRRTRQDEPALFVALTFERREVLDSSNIKTPMNLIGVDRGENIPAVIALTDPEGCPLSRFKDSLGNPTHILRIGESYKEKQRTIQAKKEVEQRRAGGYSRKYASKAKNLADDMVRNTARDLLYYAVTQDAMLIFENLSRGFGRQGKRTFMAERQYTRMEDWLTAKLAYEGLPSKTYLSKTLAQYTSKTCSNCGFTITSADYDRVLEKLKKTATGWMTTINGKELKVEGQITYYNRYKRQNVVKDLSVELDRLSEESVNNDISSWTKGRSGEALSLLKKRFSHRPVQEKFVCLNCGFETHADEQAALNIARSWLFLRSQEYKKYQTNKTTGNTDKRAFVETWQSFYRKKLKEVWKPAV

SEQ ID NO: 32362 - protein, 979 aa, synthetic construct
  REGION 1..979: note = engineered CasX variant
QEIKGRINKIRRRLVKDSNTKKAGKTGPMKTLLVRVMTPDLRERLENLRKKPENIPQPISNTSRANLNKLLTDYTEMKKAILHVYWEEFQKDPVGLMSRVAQPASKKIDQNKLKPEMDEKGNLTTAGFACSQCGQPLFVYKLEQVSEKGKAYTNYFGRCNVAEHEKLILLAQLKPEKDSDEAVTYSLGKFGQRALDFYSIHVTKESTHPVKPLAQIAGNRYASPVGKALSDACMGTIASFLSKYQDIIIEHQKVVKGNQKRLESLRELAGKENLEYPSVTLPPQPHTKEGVDAYNEVIARVRMWVNLNLWQKLKLSRDDAKPLLRLKGFPSFPLVERQANEVDWWDMVCNVKKLINEKKEDGKVFWQNLAGYKRQEALRPYLSSEEDRKKGKKFARYQLGDLLLHLEKKHGEDWGKVYDEAWERIDKKVEGLSKHIKLEEERRSEDAQSKAALTDWLRAKASFVIEGLKEADKDEFCRCELKLQKWYGDLRGKPFAIEAENSILDISGFSKQYNCAFIWQKDGVKKLNLYLIINYFKGGKLRFKKIKPEAFEANRFYTVINKKSGEIVPMEVNFNFDDPNLIILPLAFGKRQGREFIWNDLLSLETGSLKLANGRVIEKTLYNRRTRQDEPALFVALTFERREVLDSSNIKTPMNLIGVDRGENIPAVIALTDPEGCPLSRFKDSLGNPTHILRIGESYKEKQRTIQAKKEVEQRRAGGYSRKYASKAKNLADDMVRNTARDLLYYAVTQDAMLIFENLSRGFGRQGKRTFMAERQYTRMEDWLTAKLAYEGLPSKTYLSKTLAQYTSKTCSNCGFTITSADYDRVLEKLKKTATGWMTTINGKELKVEGQITYYNRYKRQNVVKDLSVELDRLSEESVNNDISSWTKGRSGEALSLLKKRFSHRPVQEKFVCLNCGFETHADEQAALNIARSWLFLRSQEYKKYQTNKTTGNTDKRAFVETWQSFYRKKLKEVWKPAV

SEQ ID NO: 32363 - protein, 980 aa, synthetic construct
  REGION 1..980: note = engineered CasX variant
QEIKGRINKIRRRLVKDSNTKKAGKTGPMKTLLVRVMTPDLRERLENLRKKPENIPQPISNTSRANLNKLLTDYTEMKKAILHVYWEEFQKDPVGLMSRVAQPASKKIDQNKLKPEMDEKGNLTTAGFACSQCGQPLFVYKLEQVSEKGKAYTNYFGRCNVAEHEKLILLAQLKPEKDSDEAVTYSLGKFGQRALDFYSIHVTKESTHPVKPLAQIAGNRYASYPVGKALSDACMGTIASFLSKYQDIIIEHQKVVKGNQKRLESLRELAGKENLEYPSVTLPPQPHTKEGVDAYNEVIARVRMWVNLNLWQKLKLSRDDAKPLLRLKGFPSFPLVERQANEVDWWDMVCNVKKLINEKKEDGKVFWQNLAGYKRQEALRPYLSSEEDRKKGKKFARYQLGDLLLHLEKKHGEDWGKVYDEAWERIDKKVEGLSKHIKLEEERRSEDAQSKAALTDWLRAKASFVIEGLKEADKDEFCRCELKLQKWYGDLRGKPFAIEAENSILDISGFSKQYNCAFIWQKDGVKKLNLYLIINYFKGGKLRFKKIKPEAFEANRFYTVINKKSGEIVPMEVNFNFDDPNLIILPLAFGKRQGREFIWNDLLSLETGSLKLANGRVIEKTLYNRRTRQDEPALFVALTFERREVLDSSNIKPMSNLIGVDRGENIPAVIALTDPEGCPLSRFKDSLGNPTHILRIGESYKEKQRTIQAKKEVEQRRAGGYSRKYASKAKNLADDMVRNTARDLLYYAVTQDAMLIFENLSRGFGRQGKRTFMAERQYTRMEDWLTAKLAYEGLPSKTYLSKTLAQYTSKTCSNCGFTITSADYDRVLEKLKKTATGWMTTINGKELKVEGQITYYNRYKRQNVVKDLSVELDRLSEESVNNDISSWTKGRSGEALSLLKKRFSHRPVQEKFVCLNCGFETHADEQAALNIARSWLFLRSQEYKKYQTNKTTGNTDKRAFVETWQSFYRKKLKEVWKPAV

SEQ ID NO: 32364 - protein, 980 aa, synthetic construct
  REGION 1..980: note = engineered CasX variant
QEIKGRINKIRRRLVKDSNTKKAGKTGPMKTLLVRVMTPDLRERLENLRKKPENIPQPISNTSRANLNKLLTDYTEMKKAILHVYWEEFQKDPVGLMSRVAQPASKKIDQNKLKPEMDEKGNLTTAGFACSQCGQPLFVYKLEQVSEKGKAYTNYFGRCNVAEHEKLILLAQLKPEKDSDEAVTYSLGKFGQRALDFYSIHVTKESTHPVKPLAQIAGNRYASHPVGKALSDACMGTIASFLSKYQDIIIEHQKVVKGNQKRLESLRELAGKENLEYPSVTLPPQPHTKEGVDAYNEVIARVRMWVNLNLWQKLKLSRDDAKPLLRLKGFPSFPLVERQANEVDWWDMVCNVKKLINEKKEDGKVFWQNLAGYKRQEALRPYLSSEEDRKKGKKFARYQLGDLLLHLEKKHGEDWGKVYDEAWERIDKKVEGLSKHIKLEEERRSEDAQSKAALTDWLRAKASFVIEGLKEADKDEFCRCELKLQKWYGDLRGKPFAIEAENSILDISGFSKQYNCAFIWQKDGVKKLNLYLIINYFKGGKLRFKKIKPEAFEANRFYTVINKKSGEIVPMEVNFNFDDPNLIILPLAFGKRQGREFIWNDLLSLETGSLKLANGRVIEKTLYNRRTRQDEPALFVALTFERREVLDSSNIKPMSNLIGVDRGENIPAVIALTDPEGCPLSRFKDSLGNPTHILRIGESYKEKQRTIQAKKEVEQRRAGGYSRKYASKAKNLADDMVRNTARDLLYYAVTQDAMLIFENLSRGFGRQGKRTFMAERQYTRMEDWLTAKLAYEGLPSKTYLSKTLAQYTSKTCSNCGFTITSADYDRVLEKLKKTATGWMTTINGKELKVEGQITYYNRYKRQNVVKDLSVELDRLSEESVNNDISSWTKGRSGEALSLLKKRFSHRPVQEKFVCLNCGFETHADEQAALNIARSWLFLRSQEYKKYQTNKTTGNTDKRAFVETWQSFYRKKLKEVWKPAV

SEQ ID NO: 32365 - protein, 980 aa, synthetic construct
  REGION 1..980: note = engineered CasX variant
QEIKGRINKIRRRLVKDSNTKKAGKTGPMKTLLVRVMTPDLRERLENLRKKPENIPQPISNTSRANLNKLLTDYTEMKKAILHVYWEEFQKDPVGLMSRVAQPASKKIDQNKLKPEMDEKGNLTTAGFACSQCGQPLFVYKLEQVSEKGKAYTNYFGRCNVAEHEKLILLAQLKPEKDSDEAVTYSLGKFGQRALDFYSIHVTKESTHPVKPLAQIAGNRYASSPVGKALSDACMGTIASFLSKYQDIIIEHQKVVKGNQKRLESLRELAGKENLEYPSVTLPPQPHTKEGVDAYNEVIARVRMWVNLNLWQKLKLSRDDAKPLLRLKGFPSFPLVERQANEVDWWDMVCNVKKLINEKKEDGKVFWQNLAGYKRQEALRPYLSSEEDRKKGKKFARYQLGDLLLHLEKKHGEDWGKVYDEAWERIDKKVEGLSKHIKLEEERRSEDAQSKAALTDWLRAKASFVIEGLKEADKDEFCRCELKLQKWYGDLRGKPFAIEAENSILDISGFSKQYNCAFIWQKDGVKKLNLYLIINYFKGGKLRFKKIKPEAFEANRFYTVINKKSGEIVPMEVNFNFDDPNLIILPLAFGKRQGREFIWNDLLSLETGSLKLANGRVIEKTLYNRRTRQDEPALFVALTFERREVLDSSNIKPMSNLIGVDRGENIPAVIALTDPEGCPLSRFKDSLGNPTHILRIGESYKEKQRTIQAKKEVEQRRAGGYSRKYASKAKNLADDMVRNTARDLLYYAVTQDAMLIFENLSRGFGRQGKRTFMAERQYTRMEDWLTAKLAYEGLPSKTYLSKTLAQYTSKTCSNCGFTITSADYDRVLEKLKKTATGWMTTINGKELKVEGQITYYNRYKRQNVVKDLSVELDRLSEESVNNDISSWTKGRSGEALSLLKKRFSHRPVQEKFVCLNCGFETHADEQAALNIARSWLFLRSQEYKKYQTNKTTGNTDKRAFVETWQSFYRKKLKEVWKPAV

SEQ ID NO: 32366 - protein, 980 aa, synthetic construct
  REGION 1..980: note = engineered CasX variant
QEIKGRINKIRRRLVKDSNTKKAGKTGPMKTLLVRVMTPDLRERLENLRKKPENIPQPISNTSRANLNKLLTDYTEMKKAILHVYWEEFQKDPVGLMSRVAQPASKKIDQNKLKPEMDEKGNLTTAGFACSQCGQPLFVYKLEQVSEKGKAYTNYFGRCNVAEHEKLILLAQLKPEKDSDEAVTYSLGKFGQRALDFYSIHVTKESTHPVKPLAQIAGNRYASTPVGKALSDACMGTIASFLSKYQDIIIEHQKVVKGNQKRLESLRELAGKENLEYPSVTLPPQPHTKEGVDAYNEVIARVRMWVNLNLWQKLKLSRDDAKPLLRLKGFPSFPLVERQANEVDWWDMVCNVKKLINEKKEDGKVFWQNLAGYKRQEALRPYLSSEEDRKKGKKFARYQLGDLLLHLEKKHGEDWGKVYDEAWERIDKKVEGLSKHIKLEEERRSEDAQSKAALTDWLRAKASFVIEGLKEADKDEFCRCELKLQKWYGDLRGKPFAIEAENSILDISGFSKQYNCAFIWQKDGVKKLNLYLIINYFKGGKLRFKKIKPEAFEANRFYTVINKKSGEIVPMEVNFNFDDPNLIILPLAFGKRQGREFIWNDLLSLETGSLKLANGRVIEKTLYNRRTRQDEPALFVALTFERREVLDSSNIKPMSNLIGVDRGENIPAVIALTDPEGCPLSRFKDSLGNPTHILRIGESYKEKQRTIQAKKEVEQRRAGGYSRKYASKAKNLADDMVRNTARDLLYYAVTQDAMLIFENLSRGFGRQGKRTFMAERQYTRMEDWLTAKLAYEGLPSKTYLSKTLAQYTSKTCSNCGFTITSADYDRVLEKLKKTATGWMTTINGKELKVEGQITYYNRYKRQNVVKDLSVELDRLSEESVNNDISSWTKGRSGEALSLLKKRFSHRPVQEKFVCLNCGFETHADEQAALNIARSWLFLRSQEYKKYQTNKTTGNTDKRAFVETWQSFYRKKLKEVWKPAV

SEQ ID NO: 32367 - protein, 980 aa, synthetic construct
  REGION 1..980: note = engineered CasX variant
QEIKGRINKIRRRLVKDSNTKKAGKTGPMKTLLVRVMTPDLRERLENLRKKPENIPQPISNTSRANLNKLLTDYTEMKKAILHVYWEEFQKDPVGLMSRVAQPASKKIDQNKLKPEMDEKGNLTTAGFACSQCGQPLFVYKLEQVSEKGKAYTNYFGRCNVAEHEKLILLAQLKPEKDSDEAVTYSLGKFGQRALDFYSIHVTKESTHPVKPLAQIAGNRYASAPVGKALSDACMGTIASFLSKYQDIIIEHQKVVKGNQKRLESLRELAGKENLEYPSVTLPPQPHTKEGVDAYNEVIARVRMWVNLNLWQKLKLSRDDAKPLLRLKGFPSFPLVERQANEVDWWDMVCNVKKLINEKKEDGKVFWQNLAGYKRQEALRPYLSSEEDRKKGKKFARYQLGDLLLHLEKKHGEDWGKVYDEAWERIDKKVEGLSKHIKLEEERRSEDAQSKAALTDWLRAKASFVIEGLKEADKDEFCRCELKLQKWYGDLRGKPFAIEAENSILDISGFSKQYNCAFIWQKDGVKKLNLYLIINYFKGGKLRFKKIKPEAFEANRFYTVINKKSGEIVPMEVNFNFDDPNLIILPLAFGKRQGREFIWNDLLSLETGSLKLANGRVIEKTLYNRRTRQDEPALFVALTFERREVLDSSNIKPMSNLIGVDRGENIPAVIALTDPEGCPLSRFKDSLGNPTHILRIGESYKEKQRTIQAKKEVEQRRAGGYSRKYASKAKNLADDMVRNTARDLLYYAVTQDAMLIFENLSRGFGRQGKRTFMAERQYTRMEDWLTAKLAYEGLPSKTYLSKTLAQYTSKTCSNCGFTITSADYDRVLEKLKKTATGWMTTINGKELKVEGQITYYNRYKRQNVVKDLSVELDRLSEESVNNDISSWTKGRSGEALSLLKKRFSHRPVQEKFVCLNCGFETHADEQAALNIARSWLFLRSQEYKKYQTNKTTGNTDKRAFVETWQSFYRKKLKEVWKPAV

SEQ ID NO: 32368 - protein, 980 aa, synthetic construct
  REGION 1..980: note = engineered CasX variant
QEIKGRINKIRRRLVKDSNTKKAGKTGPMKTLLVRVMTPDLRERLENLRKKPENIPQPISNTSRANLNKLLTDYTEMKKAILHVYWEEFQKDPVGLMSRVAQPASKKIDQNKLKPEMDEKGNLTTAGFACSQCGQPLFVYKLEQVSEKGKAYTNYFGRCNVAEHEKLILLAQLKPEKDSDEAVTYSLGKFGQRALDFYSIHVTKESTHPVKPLAQIAGNRYASVPVGKALSDACMGTIASFLSKYQDIIIEHQKVVKGNQKRLESLRELAGKENLEYPSVTLPPQPHTKEGVDAYNEVIARVRMWVNLNLWQKLKLSRDDAKPLLRLKGFPSFPLVERQANEVDWWDMVCNVKKLINEKKEDGKVFWQNLAGYKRQEALRPYLSSEEDRKKGKKFARYQLGDLLLHLEKKHGEDWGKVYDEAWERIDKKVEGLSKHIKLEEERRSEDAQSKAALTDWLRAKASFVIEGLKEADKDEFCRCELKLQKWYGDLRGKPFAIEAENSILDISGFSKQYNCAFIWQKDGVKKLNLYLIINYFKGGKLRFKKIKPEAFEANRFYTVINKKSGEIVPMEVNFNFDDPNLIILPLAFGKRQGREFIWNDLLSLETGSLKLANGRVIEKTLYNRRTRQDEPALFVALTFERREVLDSSNIKPMSNLIGVDRGENIPAVIALTDPEGCPLSRFKDSLGNPTHILRIGESYKEKQRTIQAKKEVEQRRAGGYSRKYASKAKNLADDMVRNTARDLLYYAVTQDAMLIFENLSRGFGRQGKRTFMAERQYTRMEDWLTAKLAYEGLPSKTYLSKTLAQYTSKTCSNCGFTITSADYDRVLEKLKKTATGWMTTINGKELKVEGQITYYNRYKRQNVVKDLSVELDRLSEESVNNDISSWTKGRSGEALSLLKKRFSHRPVQEKFVCLNCGFETHADEQAALNIARSWLFLRSQEYKKYQTNKTTGNTDKRAFVETWQSFYRKKLKEVWKPAV

SEQ ID NO: 32369 - protein, 980 aa, synthetic construct
  REGION 1..980: note = engineered CasX variant
QEIKGRINKIRRRLVKDSNTKKAGKTGPMKTLLVRVMTPDLRERLENLRKKPENIPQPISNTSRANLNKLLTDYTEMKKAILHVYWEEFQKDPVGLMSRVAQPASKKIDQNKLKPEMDEKGNLTTAGFACSQCGQPLFVYKLEQVSEKGKAYTNYFGRCNVAEHEKLIKLAQLKPEKDSDEAVTYSLGKFGQRALDFYSIHVTKESTHPVKPLAQIAGNRYASGPVGKALSDACMGTIASFLSKYQDIIIEHQKVVKGNQKRLESLRELAGKENLEYPSVTLPPQPHTKEGVDAYNEVIARVRMWVNLNLWQKLKLSRDDAKPLLRLKGFPSFPLVERQANEVDWWDMVCNVKKLINEKKEDGKVFWQNLAGYKRQEALRPYLSSEEDRKKGKKFARYQLGDLLLHLEKKHGEDWGKVYDEAWERIDKKVEGLSKHIKLEEERRSEDAQSKAALTDWLRAKASFVIEGLKEADKDEFCRCELKLQKWYGDLRGKPFAIEAENSILDISGFSKQYNCAFIWQKDGVKKLNLYLIINYFKGGKLRFKKIKPEAFEANRFYTVINKKSGEIVPMEVNFNFDDPNLIILPLAFGKRQGREFIWNDLLSLETGSLKLANGRVIEKTLYNRRTRQDEPALFVALTFERREVLDSSNIKPMSNLIGVDRGENIPAVIALTDPEGCPLSRFKDSLGNPTHILRIGESYKEKQRTIQAKKEVEQRRAGGYSRKYASKAKNLADDMVRNTARDLLYYAVTQDAMLIFENLSRGFGRQGKRTFMAERQYTRMEDWLTAKLAYEGLPSKTYLSKTLAQYTSKTCSNCGFTITSADYDRVLEKLKKTATGWMTTINGKELKVEGQITYYNRYKRQNVVKDLSVELDRLSEESVNNDISSWTKGRSGEALSLLKKRFSHRPVQEKFVCLNCGFETHADEQAALNIARSWLFLRSQEYKKYQTNKTTGNTDKRAFVETWQSFYRKKLKEVWKPAV

SEQ ID NO: 32370 - protein, 979 aa, synthetic construct
  REGION 1..979: note = engineered CasX variant
QEIKGRINKIRRRLVKDSNTKKAGKTGPMKTLLVRVMTPDLRERLENLRKKPENIPQPISNTSRANLNKLLTDYTEMKKAILHVYWEEFQKDPVGLMSRVAQPASKKIDQNKLKPEMDEKGNLTTAGFACSQCGQPLFVYKLEQVSEKGKAYTNYFGRCNVAEHEKLILLAQLKPEKDSDEAVTYSLGKFGQRALDFYSIHVTKESTHPVKPLAQIAGNRYASPVGKALSDACMGTIASFLSKYQDIIIEHQKVVKGNQKRLESLRELAGKENLEYPSVTLPPQPHTKEGVDAYNEVIARVRMWVNLNLWQKLKLSRDDAKPLLRLKGFPSFPLVERQANEVDWWDMVCNVKKLINEKKEDGKVFWQNLAGYKRQEALRPYLSSEEDRKKGKKFARYQLGDLLLHLEKKHGEDWGKVYDEAWERIDKKVEGLSKHIKLEEERRSEDAQSKAALTDWLRAKASFVIEGLKEADKDEFCRCELKLQKWYGDLRGKPFAIEAENSILDISGFSKQYNCAFIWQKDGVKKLNLYLIINYFKGGKLRFKKIKPEAFEANRFYTVINKKSGEIVPMEVNFNFDDPNLIILPLAFGKRQGREFIWNDLLSLETGSLKLANGRVIEKTLYNRRTRQDEPALFVALTFERREVLDSSNIKPMSNLIGVDRGENIPAVIALTDPEGCPLSRFKDSLGNPTHILRIGESYKEKQRTIQAKKEVEQRRAGGYSRKYASKAKNLADDMVRNTARDLLYYAVTQDAMLIFENLSRGFGRQGKRTFMAERQYTRMEDWLTAKLAYEGLPSKTYLSKTLAQYTSKTCSNCGFTITSADYDRVLEKLKKTATGWMTTINGKELKVEGQITYYNRYKRQNVVKDLSVELDRLSEESVNNDISSWTKGRSGEALSLLKKRFSHRPVQEKFVCLNCGFETHADEQAALNIARSWLFLRSQEYKKYQTNKTTGNTDKRAFVETWQSFYRKKLKEVWKPAV

SEQ ID NO: 32371 - protein, 979 aa, synthetic construct
  REGION 1..979: note = engineered CasX variant
QEIKGRINKIRRRLVKDSNTKKAGKTGPMKTLLVRVMTPDLRERLENLRKKPENIPQPISNTSRANLNKLLTDYTEMKKAILHVYWEEFQKDPVGLMSRVAQPASKKIDQNKLKPEMDEKGNLTTAGFACSQCGQPLFVYKLEQVSEKGKAYTNYFGRCNVAEHEKLILLAQLKPEKDSDEAVTYSLGKFGQRALDFYSIHVTKESTHPVKPLAQIAGNRYASYPVGKALSDACMGTIASFLSKYQDIIIEHQKVVKGNQKRLESLRELAGKENLEYPSVTLPPQPHTKEGVDAYNEVIARVRMWVNLNLWQKLKLSRDDAKPLLRLKGFPSFPLVERQANEVDWWDMVCNVKKLINEKKEDGKVFWQNLAGYKRQEALRPYLSSEEDRKKGKKFARYQLGDLLLHLEKKHGEDWGKVYDEAWERIDKKVEGLSKHIKLEEERRSEDAQSKAALTDWLRAKASFVIEGLKEADKDEFCRCELKLQKWYGDLRGKPFAIEAENSILDISGFSKQYNCAFIWQKDGVKKLNLYLIINYFKGGKLRFKKIKPEAFEANRFYTVINKKSGEIVPMEVNFNFDDPNLIILPLAFGKRQGREFIWNDLLSLETGSLKLANGRVIEKTLYNRRTRQDEPALFVALTFERREVLDSSNIKPMNLIGVDRGENIPAVIALTDPEGCPLSRFKDSLGNPTHILRIRESYKEKQRTIQAKKEVEQRRAGGYSRKYASKAKNLADDMVRNTARDLLYYAVTQDAMLIFENLSRGFGRQGKRTFMAERQYTRMEDWLTAKLAYEGLPSKTYLSKTLAQYTSKTCSNCGFTITSADYDRVLEKLKKTATGWMTTINGKELKVEGQITYYNRYKRQNVVKDLSVELDRLSEESVNNDISSWTKGRSGEALSLLKKRFSHRPVQEKFVCLNCGFETHADEQAALNIARSWLFLRSQEYKKYQTNKTTGNTDKRAFVETWQSFYRKKLKEVWKPAV

SEQ ID NO: 32372 - protein, 979 aa, synthetic construct
  REGION 1..979: note = engineered CasX variant
QEIKGRINKIRRRLVKDSNTKKAGKTGPMKTLLVRVMTPDLRERLENLRKKPENIPQPISNTSRANLNKLLTDYTEMKKAILHVYWEEFQKDPVGLMSRVAQPASKKIDQNKLKPEMDEKGNLTTAGFACSQCGQPLFVYKLEQVSEKGKAYTNYFGRCNVAEHEKLILLAQLKPEKDSDEAVTYSLGKFGQRALDFYSIHVTKESTHPVKPLAQIAGNRYASHPVGKALSDACMGTIASFLSKYQDIIIEHQKVVKGNQKRLESLRELAGKENLEYPSVTLPPQPHTKEGVDAYNEVIARVRMWVNLNLWQKLKLSRDDAKPLLRLKGFPSFPLVERQANEVDWWDMVCNVKKLINEKKEDGKVFWQNLAGYKRQEALRPYLSSEEDRKKGKKFARYQLGDLLLHLEKKHGEDWGKVYDEAWERIDKKVEGLSKHIKLEEERRSEDAQSKAALTDWLRAKASFVIEGLKEADKDEFCRCELKLQKWYGDLRGKPFAIEAENSILDISGFSKQYNCAFIWQKDGVKKLNLYLIINYFKGGKLRFKKIKPEAFEANRFYTVINKKSGEIVPMEVNFNFDDPNLIILPLAFGKRQGREFIWNDLLSLETGSLKLANGRVIEKTLYNRRTRQDEPALFVALTFERREVLDSSNIKPMNLIGVDRGENIPAVIALTDPEGCPLSRFKDSLGNPTHILRIRESYKEKQRTIQAKKEVEQRRAGGYSRKYASKAKNLADDMVRNTARDLLYYAVTQDAMLIFENLSRGFGRQGKRTFMAERQYTRMEDWLTAKLAYEGLPSKTYLSKTLAQYTSKTCSNCGFTITSADYDRVLEKLKKTATGWMTTINGKELKVEGQITYYNRYKRQNVVKDLSVELDRLSEESVNNDISSWTKGRSGEALSLLKKRFSHRPVQEKFVCLNCGFETHADEQAALNIARSWLFLRSQEYKKYQTNKTTGNTDKRAFVETWQSFYRKKLKEVWKPAV

SEQ ID NO: 32373 - protein, 979 aa, synthetic construct
  REGION 1..979: note = engineered CasX variant
QEIKGRINKIRRRLVKDSNTKKAGKTGPMKTLLVRVMTPDLRERLENLRKKPENIPQPISNTSRANLNKLLTDYTEMKKAILHVYWEEFQKDPVGLMSRVAQPASKKIDQNKLKPEMDEKGNLTTAGFACSQCGQPLFVYKLEQVSEKGKAYTNYFGRCNVAEHEKLILLAQLKPEKDSDEAVTYSLGKFGQRALDFYSIHVTKESTHPVKPLAQIAGNRYASSPVGKALSDACMGTIASFLSKYQDIIIEHQKVVKGNQKRLESLRELAGKENLEYPSVTLPPQPHTKEGVDAYNEVIARVRMWVNLNLWQKLKLSRDDAKPLLRLKGFPSFPLVERQANEVDWWDMVCNVKKLINEKKEDGKVFWQNLAGYKRQEALRPYLSSEEDRKKGKKFARYQLGDLLLHLEKKHGEDWGKVYDEAWERIDKKVEGLSKHIKLEEERRSEDAQSKAALTDWLRAKASFVIEGLKEADKDEFCRCELKLQKWYGDLRGKPFAIEAENSILDISGFSKQYNCAFIWQKDGVKKLNLYLIINYFKGGKLRFKKIKPEAFEANRFYTVINKKSGEIVPMEVNFNFDDPNLIILPLAFGKRQGREFIWNDLLSLETGSLKLANGRVIEKTLYNRRTRQDEPALFVALTFERREVLDSSNIKPMNLIGVDRGENIPAVIALTDPEGCPLSRFKDSLGNPTHILRIRESYKEKQRTIQAKKEVEQRRAGGYSRKYASKAKNLADDMVRNTARDLLYYAVTQDAMLIFENLSRGFGRQGKRTFMAERQYTRMEDWLTAKLAYEGLPSKTYLSKTLAQYTSKTCSNCGFTITSADYDRVLEKLKKTATGWMTTINGKELKVEGQITYYNRYKRQNVVKDLSVELDRLSEESVNNDISSWTKGRSGEALSLLKKRFSHRPVQEKFVCLNCGFETHADEQAALNIARSWLFLRSQEYKKYQTNKTTGNTDKRAFVETWQSFYRKKLKEVWKPAV

SEQ ID NO: 32374 - protein, 979 aa, synthetic construct
  REGION 1..979: note = engineered CasX variant
QEIKGRINKIRRRLVKDSNTKKAGKTGPMKTLLVRVMTPDLRERLENLRKKPENIPQPISNTSRANLNKLLTDYTEMKKAILHVYWEEFQKDPVGLMSRVAQPASKKIDQNKLKPEMDEKGNLTTAGFACSQCGQPLFVYKLEQVSEKGKAYTNYFGRCNVAEHEKLILLAQLKPEKDSDEAVTYSLGKFGQRALDFYSIHVTKESTHPVKPLAQIAGNRYASTPVGKALSDACMGTIASFLSKYQDIIIEHQKVVKGNQKRLESLRELAGKENLEYPSVTLPPQPHTKEGVDAYNEVIARVRMWVNLNLWQKLKLSRDDAKPLLRLKGFPSFPLVERQANEVDWWDMVCNVKKLINEKKEDGKVFWQNLAGYKRQEALRPYLSSEEDRKKGKKFARYQLGDLLLHLEKKHGEDWGKVYDEAWERIDKKVEGLSKHIKLEEERRSEDAQSKAALTDWLRAKASFVIEGLKEADKDEFCRCELKLQKWYGDLRGKPFAIEAENSILDISGFSKQYNCAFIWQKDGVKKLNLYLIINYFKGGKLRFKKIKPEAFEANRFYTVINKKSGEIVPMEVNFNFDDPNLIILPLAFGKRQGREFIWNDLLSLETGSLKLANGRVIEKTLYNRRTRQDEPALFVALTFERREVLDSSNIKPMNLIGVDRGENIPAVIALTDPEGCPLSRFKDSLGNPTHILRIRESYKEKQRTIQAKKEVEQRRAGGYSRKYASKAKNLADDMVRNTARDLLYYAVTQDAMLIFENLSRGFGRQGKRTFMAERQYTRMEDWLTAKLAYEGLPSKTYLSKTLAQYTSKTCSNCGFTITSADYDRVLEKLKKTATGWMTTINGKELKVEGQITYYNRYKRQNVVKDLSVELDRLSEESVNNDISSWTKGRSGEALSLLKKRFSHRPVQEKFVCLNCGFETHADEQAALNIARSWLFLRSQEYKKYQTNKTTGNTDKRAFVETWQSFYRKKLKEVWKPAV

SEQ ID NO: 32375 - protein, 979 aa, synthetic construct
  REGION 1..979: note = engineered CasX variant
QEIKGRINKIRRRLVKDSNTKKAGKTGPMKTLLVRVMTPDLRERLENLRKKPENIPQPISNTSRANLNKLLTDYTEMKKAILHVYWEEFQKDPVGLMSRVAQPASKKIDQNKLKPEMDEKGNLTTAGFACSQCGQPLFVYKLEQVSEKGKAYTNYFGRCNVAEHEKLILLAQLKPEKDSDEAVTYSLGKFGQRALDFYSIHVTKESTHPVKPLAQIAGNRYASAPVGKALSDACMGTIASFLSKYQDIIIEHQKVVKGNQKRLESLRELAGKENLEYPSVTLPPQPHTKEGVDAYNEVIARVRMWVNLNLWQKLKLSRDDAKPLLRLKGFPSFPLVERQANEVDWWDMVCNVKKLINEKKEDGKVFWQNLAGYKRQEALRPYLSSEEDRKKGKKFARYQLGDLLLHLEKKHGEDWGKVYDEAWERIDKKVEGLSKHIKLEEERRSEDAQSKAALTDWLRAKASFVIEGLKEADKDEFCRCELKLQKWYGDLRGKPFAIEAENSILDISGFSKQYNCAFIWQKDGVKKLNLYLIINYFKGGKLRFKKIKPEAFEANRFYTVINKKSGEIVPMEVNFNFDDPNLIILPLAFGKRQGREFIWNDLLSLETGSLKLANGRVIEKTLYNRRTRQDEPALFVALTFERREVLDSSNIKPMNLIGVDRGENIPAVIALTDPEGCPLSRFKDSLGNPTHILRIRESYKEKQRTIQAKKEVEQRRAGGYSRKYASKAKNLADDMVRNTARDLLYYAVTQDAMLIFENLSRGFGRQGKRTFMAERQYTRMEDWLTAKLAYEGLPSKTYLSKTLAQYTSKTCSNCGFTITSADYDRVLEKLKKTATGWMTTINGKELKVEGQITYYNRYKRQNVVKDLSVELDRLSEESVNNDISSWTKGRSGEALSLLKKRFSHRPVQEKFVCLNCGFETHADEQAALNIARSWLFLRSQEYKKYQTNKTTGNTDKRAFVETWQSFYRKKLKEVWKPAV

SEQ ID NO: 32376 - protein, 979 aa, synthetic construct
  REGION 1..979: note = engineered CasX variant
QEIKGRINKIRRRLVKDSNTKKAGKTGPMKTLLVRVMTPDLRERLENLRKKPENIPQPISNTSRANLNKLLTDYTEMKKAILHVYWEEFQKDPVGLMSRVAQPASKKIDQNKLKPEMDEKGNLTTAGFACSQCGQPLFVYKLEQVSEKGKAYTNYFGRCNVAEHEKLILLAQLKPEKDSDEAVTYSLGKFGQRALDFYSIHVTKESTHPVKPLAQIAGNRYASVPVGKALSDACMGTIASFLSKYQDIIIEHQKVVKGNQKRLESLRELAGKENLEYPSVTLPPQPHTKEGVDAYNEVIARVRMWVNLNLWQKLKLSRDDAKPLLRLKGFPSFPLVERQANEVDWWDMVCNVKKLINEKKEDGKVFWQNLAGYKRQEALRPYLSSEEDRKKGKKFARYQLGDLLLHLEKKHGEDWGKVYDEAWERIDKKVEGLSKHIKLEEERRSEDAQSKAALTDWLRAKASFVIEGLKEADKDEFCRCELKLQKWYGDLRGKPFAIEAENSILDISGFSKQYNCAFIWQKDGVKKLNLYLIINYFKGGKLRFKKIKPEAFEANRFYTVINKKSGEIVPMEVNFNFDDPNLIILPLAFGKRQGREFIWNDLLSLETGSLKLANGRVIEKTLYNRRTRQDEPALFVALTFERREVLDSSNIKPMNLIGVDRGENIPAVIALTDPEGCPLSRFKDSLGNPTHILRIRESYKEKQRTIQAKKEVEQRRAGGYSRKYASKAKNLADDMVRNTARDLLYYAVTQDAMLIFENLSRGFGRQGKRTFMAERQYTRMEDWLTAKLAYEGLPSKTYLSKTLAQYTSKTCSNCGFTITSADYDRVLEKLKKTATGWMTTINGKELKVEGQITYYNRYKRQNVVKDLSVELDRLSEESVNNDISSWTKGRSGEALSLLKKRFSHRPVQEKFVCLNCGFETHADEQAALNIARSWLFLRSQEYKKYQTNKTTGNTDKRAFVETWQSFYRKKLKEVWKPAV

SEQ ID NO: 32377 - protein, 979 aa, synthetic construct
  REGION 1..979: note = engineered CasX variant
QEIKGRINKIRRRLVKDSNTKKAGKTGPMKTLLVRVMTPDLRERLENLRKKPENIPQPISNTSRANLNKLLTDYTEMKKAILHVYWEEFQKDPVGLMSRVAQPASKKIDQNKLKPEMDEKGNLTTAGFACSQCGQPLFVYKLEQVSEKGKAYTNYFGRCNVAEHEKLIKLAQLKPEKDSDEAVTYSLGKFGQRALDFYSIHVTKESTHPVKPLAQIAGNRYASGPVGKALSDACMGTIASFLSKYQDIIIEHQKVVKGNQKRLESLRELAGKENLEYPSVTLPPQPHTKEGVDAYNEVIARVRMWVNLNLWQKLKLSRDDAKPLLRLKGFPSFPLVERQANEVDWWDMVCNVKKLINEKKEDGKVFWQNLAGYKRQEALRPYLSSEEDRKKGKKFARYQLGDLLLHLEKKHGEDWGKVYDEAWERIDKKVEGLSKHIKLEEERRSEDAQSKAALTDWLRAKASFVIEGLKEADKDEFCRCELKLQKWYGDLRGKPFAIEAENSILDISGFSKQYNCAFIWQKDGVKKLNLYLIINYFKGGKLRFKKIKPEAFEANRFYTVINKKSGEIVPMEVNFNFDDPNLIILPLAFGKRQGREFIWNDLLSLETGSLKLANGRVIEKTLYNRRTRQDEPALFVALTFERREVLDSSNIKPMNLIGVDRGENIPAVIALTDPEGCPLSRFKDSLGNPTHILRIRESYKEKQRTIQAKKEVEQRRAGGYSRKYASKAKNLADDMVRNTARDLLYYAVTQDAMLIFENLSRGFGRQGKRTFMAERQYTRMEDWLTAKLAYEGLPSKTYLSKTLAQYTSKTCSNCGFTITSADYDRVLEKLKKTATGWMTTINGKELKVEGQITYYNRYKRQNVVKDLSVELDRLSEESVNNDISSWTKGRSGEALSLLKKRFSHRPVQEKFVCLNCGFETHADEQAALNIARSWLFLRSQEYKKYQTNKTTGNTDKRAFVETWQSFYRKKLKEVWKPAV

SEQ ID NO: 32378 - protein, 978 aa, synthetic construct
  REGION 1..978: note = engineered CasX variant
QEIKGRINKIRRRLVKDSNTKKAGKTGPMKTLLVRVMTPDLRERLENLRKKPENIPQPISNTSRANLNKLLTDYTEMKKAILHVYWEEFQKDPVGLMSRVAQPASKKIDQNKLKPEMDEKGNLTTAGFACSQCGQPLFVYKLEQVSEKGKAYTNYFGRCNVAEHEKLILLAQLKPEKDSDEAVTYSLGKFGQRALDFYSIHVTKESTHPVKPLAQIAGNRYASPVGKALSDACMGTIASFLSKYQDIIIEHQKVVKGNQKRLESLRELAGKENLEYPSVTLPPQPHTKEGVDAYNEVIARVRMWVNLNLWQKLKLSRDDAKPLLRLKGFPSFPLVERQANEVDWWDMVCNVKKLINEKKEDGKVFWQNLAGYKRQEALRPYLSSEEDRKKGKKFARYQLGDLLLHLEKKHGEDWGKVYDEAWERIDKKVEGLSKHIKLEEERRSEDAQSKAALTDWLRAKASFVIEGLKEADKDEFCRCELKLQKWYGDLRGKPFAIEAENSILDISGFSKQYNCAFIWQKDGVKKLNLYLIINYFKGGKLRFKKIKPEAFEANRFYTVINKKSGEIVPMEVNFNFDDPNLIILPLAFGKRQGREFIWNDLLSLETGSLKLANGRVIEKTLYNRRTRQDEPALFVALTFERREVLDSSNIKPMNLIGVDRGENIPAVIALTDPEGCPLSRFKDSLGNPTHILRIRESYKEKQRTIQAKKEVEQRRAGGYSRKYASKAKNLADDMVRNTARDLLYYAVTQDAMLIFENLSRGFGRQGKRTFMAERQYTRMEDWLTAKLAYEGLPSKTYLSKTLAQYTSKTCSNCGFTITSADYDRVLEKLKKTATGWMTTINGKELKVEGQITYYNRYKRQNVVKDLSVELDRLSEESVNNDISSWTKGRSGEALSLLKKRFSHRPVQEKFVCLNCGFETHADEQAALNIARSWLFLRSQEYKKYQTNKTTGNTDKRAFVETWQSFYRKKLKEVWKPAV

SEQ ID NO: 32379 - protein, 979 aa, synthetic construct
  REGION 1..979: note = engineered CasX variant
QEIKGRINKIRRRLVKDSNTKKAGKTGPMKTLLVRVMTPDLRERLENLRKKPENIPQPISNTSRANLNKLLTDYTEMKKAILHVYWEEFQKDPVGLMSRVAQPASKKIDQNKLKPEMDEKGNLTTAGFACSQCGQPLFVYKLEQVSEKGKAYTNYFGRCNVAEHEKLILLAQLKPEKDSDEAVTYSLGKFGQRALDFYSIHVTKESTHPVKPLAQIAGNRYASYPVGKALSDACMGTIASFLSKYQDIIIEHQKVVKGNQKRLESLRELAGKENLEYPSVTLPPQPHTKEGVDAYNEVIARVRMWVNLNLWQKLKLSRDDAKPLLRLKGFPSFPLVERQANEVDWWDMVCNVKKLINEKKEDGKVFWQNLAGYKRQEALRPYLSSEEDRKKGKKFARYQLGDLLLHLEKKHGEDWGKVYDEAWERIDKKVEGLSKHIKLEEERRSEDAQSKAALTDWLRAKASFVIEGLKEADKDEFCRCELKLQKWYGDLRGKPFAIEAENSILDISGFSKQYNCAFIWQKDGVKKLNLYLIINYFKGGKLRFKKIKPEAFEANRFYTVINKKSGEIVPMEVNFNFDDPNLIILPLAFGKRQGREFIWNDLLSLETGSLKLANGRVIEKTLYNRRTRQDEPALFVALTFERREVLDSSNIKPMNLIGVDRGENIPAVIALTDPEGCPLSRFKDSLGNPTHILRIGESYKEKQRTIQAKKEVEQRRAGGYSRKYASKAKNLADDMVRNTARDLLYYAVTQDAMLIFENLSRGFGRQGKRTFSAERQYTRMEDWLTAKLAYEGLPSKTYLSKTLAQYTSKTCSNCGFTITSADYDRVLEKLKKTATGWMTTINGKELKVEGQITYYNRYKRQNVVKDLSVELDRLSEESVNNDISSWTKGRSGEALSLLKKRFSHRPVQEKFVCLNCGFETHADEQAALNIARSWLFLRSQEYKKYQTNKTTGNTDKRAFVETWQSFYRKKLKEVWKPAV

SEQ ID NO: 32380 - protein, 979 aa, synthetic construct
  REGION 1..979: note = engineered CasX variant
QEIKGRINKIRRRLVKDSNTKKAGKTGPMKTLLVRVMTPDLRERLENLRKKPENIPQPISNTSRANLNKLLTDYTEMKKAILHVYWEEFQKDPVGLMSRVAQPASKKIDQNKLKPEMDEKGNLTTAGFACSQCGQPLFVYKLEQVSEKGKAYTNYFGRCNVAEHEKLILLAQLKPEKDSDEAVTYSLGKFGQRALDFYSIHVTKESTHPVKPLAQIAGNRYASHPVGKALSDACMGTIASFLSKYQDIIIEHQKVVKGNQKRLESLRELAGKENLEYPSVTLPPQPHTKEGVDAYNEVIARVRMWVNLNLWQKLKLSRDDAKPLLRLKGFPSFPLVERQANEVDWWDMVCNVKKLINEKKEDGKVFWQNLAGYKRQEALRPYLSSEEDRKKGKKFARYQLGDLLLHLEKKHGEDWGKVYDEAWERIDKKVEGLSKHIKLEEERRSEDAQSKAALTDWLRAKASFVIEGLKEADKDEFCRCELKLQKWYGDLRGKPFAIEAENSILDISGFSKQYNCAFIWQKDGVKKLNLYLIINYFKGGKLRFKKIKPEAFEANRFYTVINKKSGEIVPMEVNFNFDDPNLIILPLAFGKRQGREFIWNDLLSLETGSLKLANGRVIEKTLYNRRTRQDEPALFVALTFERREVLDSSNIKPMNLIGVDRGENIPAVIALTDPEGCPLSRFKDSLGNPTHILRIGESYKEKQRTIQAKKEVEQRRAGGYSRKYASKAKNLADDMVRNTARDLLYYAVTQDAMLIFENLSRGFGRQGKRTFSAERQYTRMEDWLTAKLAYEGLPSKTYLSKTLAQYTSKTCSNCGFTITSADYDRVLEKLKKTATGWMTTINGKELKVEGQITYYNRYKRQNVVKDLSVELDRLSEESVNNDISSWTKGRSGEALSLLKKRFSHRPVQEKFVCLNCGFETHADEQAALNIARSWLFLRSQEYKKYQTNKTTGNTDKRAFVETWQSFYRKKLKEVWKPAV

SEQ ID NO: 32381 - protein, 979 aa, synthetic construct
  REGION 1..979: note = engineered CasX variant
QEIKGRINKIRRRLVKDSNTKKAGKTGPMKTLLVRVMTPDLRERLENLRKKPENIPQPISNTSRANLNKLLTDYTEMKKAILHVYWEEFQKDPVGLMSRVAQPASKKIDQNKLKPEMDEKGNLTTAGFACSQCGQPLFVYKLEQVSEKGKAYTNYFGRCNVAEHEKLILLAQLKPEKDSDEAVTYSLGKFGQRALDFYSIHVTKESTHPVKPLAQIAGNRYASSPVGKALSDACMGTIASFLSKYQDIIIEHQKVVKGNQKRLESLRELAGKENLEYPSVTLPPQPHTKEGVDAYNEVIARVRMWVNLNLWQKLKLSRDDAKPLLRLKGFPSFPLVERQANEVDWWDMVCNVKKLINEKKEDGKVFWQNLAGYKRQEALRPYLSSEEDRKKGKKFARYQLGDLLLHLEKKHGEDWGKVYDEAWERIDKKVEGLSKHIKLEEERRSEDAQSKAALTDWLRAKASFVIEGLKEADKDEFCRCELKLQKWYGDLRGKPFAIEAENSILDISGFSKQYNCAFIWQKDGVKKLNLYLIINYFKGGKLRFKKIKPEAFEANRFYTVINKKSGEIVPMEVNFNFDDPNLIILPLAFGKRQGREFIWNDLLSLETGSLKLANGRVIEKTLYNRRTRQDEPALFVALTFERREVLDSSNIKPMNLIGVDRGENIPAVIALTDPEGCPLSRFKDSLGNPTHILRIGESYKEKQRTIQAKKEVEQRRAGGYSRKYASKAKNLADDMVRNTARDLLYYAVTQDAMLIFENLSRGFGRQGKRTFSAERQYTRMEDWLTAKLAYEGLPSKTYLSKTLAQYTSKTCSNCGFTITSADYDRVLEKLKKTATGWMTTINGKELKVEGQITYYNRYKRQNVVKDLSVELDRLSEESVNNDISSWTKGRSGEALSLLKKRFSHRPVQEKFVCLNCGFETHADEQAALNIARSWLFLRSQEYKKYQTNKTTGNTDKRAFVETWQSFYRKKLKEVWKPAV

SEQ ID NO: 32382 - protein, 979 aa, synthetic construct
  REGION 1..979: note = engineered CasX variant
QEIKGRINKIRRRLVKDSNTKKAGKTGPMKTLLVRVMTPDLRERLENLRKKPENIPQPISNTSRANLNKLLTDYTEMKKAILHVYWEEFQKDPVGLMSRVAQPASKKIDQNKLKPEMDEKGNLTTAGFACSQCGQPLFVYKLEQVSEKGKAYTNYFGRCNVAEHEKLILLAQLKPEKDSDEAVTYSLGKFGQRALDFYSIHVTKESTHPVKPLAQIAGNRYASTPVGKALSDACMGTIASFLSKYQDIIIEHQKVVKGNQKRLESLRELAGKENLEYPSVTLPPQPHTKEGVDAYNEVIARVRMWVNLNLWQKLKLSRDDAKPLLRLKGFPSFPLVERQANEVDWWDMVCNVKKLINEKKEDGKVFWQNLAGYKRQEALRPYLSSEEDRKKGKKFARYQLGDLLLHLEKKHGEDWGKVYDEAWERIDKKVEGLSKHIKLEEERRSEDAQSKAALTDWLRAKASFVIEGLKEADKDEFCRCELKLQKWYGDLRGKPFAIEAENSILDISGFSKQYNCAFIWQKDGVKKLNLYLIINYFKGGKLRFKKIKPEAFEANRFYTVINKKSGEIVPMEVNFNFDDPNLIILPLAFGKRQGREFIWNDLLSLETGSLKLANGRVIEKTLYNRRTRQDEPALFVALTFERREVLDSSNIKPMNLIGVDRGENIPAVIALTDPEGCPLSRFKDSLGNPTHILRIGESYKEKQRTIQAKKEVEQRRAGGYSRKYASKAKNLADDMVRNTARDLLYYAVTQDAMLIFENLSRGFGRQGKRTFSAERQYTRMEDWLTAKLAYEGLPSKTYLSKTLAQYTSKTCSNCGFTITSADYDRVLEKLKKTATGWMTTINGKELKVEGQITYYNRYKRQNVVKDLSVELDRLSEESVNNDISSWTKGRSGEALSLLKKRFSHRPVQEKFVCLNCGFETHADEQAALNIARSWLFLRSQEYKKYQTNKTTGNTDKRAFVETWQSFYRKKLKEVWKPAV

SEQ ID NO: 32383 - protein, 979 aa, synthetic construct
  REGION 1..979: note = engineered CasX variant
QEIKGRINKIRRRLVKDSNTKKAGKTGPMKTLLVRVMTPDLRERLENLRKKPENIPQPISNTSRANLNKLLTDYTEMKKAILHVYWEEFQKDPVGLMSRVAQPASKKIDQNKLKPEMDEKGNLTTAGFACSQCGQPLFVYKLEQVSEKGKAYTNYFGRCNVAEHEKLILLAQLKPEKDSDEAVTYSLGKFGQRALDFYSIHVTKESTHPVKPLAQIAGNRYASAPVGKALSDACMGTIASFLSKYQDIIIEHQKVVKGNQKRLESLRELAGKENLEYPSVTLPPQPHTKEGVDAYNEVIARVRMWVNLNLWQKLKLSRDDAKPLLRLKGFPSFPLVERQANEVDWWDMVCNVKKLINEKKEDGKVFWQNLAGYKRQEALRPYLSSEEDRKKGKKFARYQLGDLLLHLEKKHGEDWGKVYDEAWERIDKKVEGLSKHIKLEEERRSEDAQSKAALTDWLRAKASFVIEGLKEADKDEFCRCELKLQKWYGDLRGKPFAIEAENSILDISGFSKQYNCAFIWQKDGVKKLNLYLIINYFKGGKLRFKKIKPEAFEANRFYTVINKKSGEIVPMEVNFNFDDPNLIILPLAFGKRQGREFIWNDLLSLETGSLKLANGRVIEKTLYNRRTRQDEPALFVALTFERREVLDSSNIKPMNLIGVDRGENIPAVIALTDPEGCPLSRFKDSLGNPTHILRIGESYKEKQRTIQAKKEVEQRRAGGYSRKYASKAKNLADDMVRNTARDLLYYAVTQDAMLIFENLSRGFGRQGKRTFSAERQYTRMEDWLTAKLAYEGLPSKTYLSKTLAQYTSKTCSNCGFTITSADYDRVLEKLKKTATGWMTTINGKELKVEGQITYYNRYKRQNVVKDLSVELDRLSEESVNNDISSWTKGRSGEALSLLKKRFSHRPVQEKFVCLNCGFETHADEQAALNIARSWLFLRSQEYKKYQTNKTTGNTDKRAFVETWQSFYRKKLKEVWKPAV

SEQ ID NO: 32384 - protein, 979 aa, synthetic construct
  REGION 1..979: note = engineered CasX variant
QEIKGRINKIRRRLVKDSNTKKAGKTGPMKTLLVRVMTPDLRERLENLRKKPENIPQPISNTSRANLNKLLTDYTEMKKAILHVYWEEFQKDPVGLMSRVAQPASKKIDQNKLKPEMDEKGNLTTAGFACSQCGQPLFVYKLEQVSEKGKAYTNYFGRCNVAEHEKLILLAQLKPEKDSDEAVTYSLGKFGQRALDFYSIHVTKESTHPVKPLAQIAGNRYASVPVGKALSDACMGTIASFLSKYQDIIIEHQKVVKGNQKRLESLRELAGKENLEYPSVTLPPQPHTKEGVDAYNEVIARVRMWVNLNLWQKLKLSRDDAKPLLRLKGFPSFPLVERQANEVDWWDMVCNVKKLINEKKEDGKVFWQNLAGYKRQEALRPYLSSEEDRKKGKKFARYQLGDLLLHLEKKHGEDWGKVYDEAWERIDKKVEGLSKHIKLEEERRSEDAQSKAALTDWLRAKASFVIEGLKEADKDEFCRCELKLQKWYGDLRGKPFAIEAENSILDISGFSKQYNCAFIWQKDGVKKLNLYLIINYFKGGKLRFKKIKPEAFEANRFYTVINKKSGEIVPMEVNFNFDDPNLIILPLAFGKRQGREFIWNDLLSLETGSLKLANGRVIEKTLYNRRTRQDEPALFVALTFERREVLDSSNIKPMNLIGVDRGENIPAVIALTDPEGCPLSRFKDSLGNPTHILRIGESYKEKQRTIQAKKEVEQRRAGGYSRKYASKAKNLADDMVRNTARDLLYYAVTQDAMLIFENLSRGFGRQGKRTFSAERQYTRMEDWLTAKLAYEGLPSKTYLSKTLAQYTSKTCSNCGFTITSADYDRVLEKLKKTATGWMTTINGKELKVEGQITYYNRYKRQNVVKDLSVELDRLSEESVNNDISSWTKGRSGEALSLLKKRFSHRPVQEKFVCLNCGFETHADEQAALNIARSWLFLRSQEYKKYQTNKTTGNTDKRAFVETWQSFYRKKLKEVWKPAV

SEQ ID NO: 32385 - protein, 979 aa, synthetic construct
  REGION 1..979: note = engineered CasX variant
QEIKGRINKIRRRLVKDSNTKKAGKTGPMKTLLVRVMTPDLRERLENLRKKPENIPQPISNTSRANLNKLLTDYTEMKKAILHVYWEEFQKDPVGLMSRVAQPASKKIDQNKLKPEMDEKGNLTTAGFACSQCGQPLFVYKLEQVSEKGKAYTNYFGRCNVAEHEKLIKLAQLKPEKDSDEAVTYSLGKFGQRALDFYSIHVTKESTHPVKPLAQIAGNRYASGPVGKALSDACMGTIASFLSKYQDIIIEHQKVVKGNQKRLESLRELAGKENLEYPSVTLPPQPHTKEGVDAYNEVIARVRMWVNLNLWQKLKLSRDDAKPLLRLKGFPSFPLVERQANEVDWWDMVCNVKKLINEKKEDGKVFWQNLAGYKRQEALRPYLSSEEDRKKGKKFARYQLGDLLLHLEKKHGEDWGKVYDEAWERIDKKVEGLSKHIKLEEERRSEDAQSKAALTDWLRAKASFVIEGLKEADKDEFCRCELKLQKWYGDLRGKPFAIEAENSILDISGFSKQYNCAFIWQKDGVKKLNLYLIINYFKGGKLRFKKIKPEAFEANRFYTVINKKSGEIVPMEVNFNFDDPNLIILPLAFGKRQGREFIWNDLLSLETGSLKLANGRVIEKTLYNRRTRQDEPALFVALTFERREVLDSSNIKPMNLIGVDRGENIPAVIALTDPEGCPLSRFKDSLGNPTHILRIGESYKEKQRTIQAKKEVEQRRAGGYSRKYASKAKNLADDMVRNTARDLLYYAVTQDAMLIFENLSRGFGRQGKRTFSAERQYTRMEDWLTAKLAYEGLPSKTYLSKTLAQYTSKTCSNCGFTITSADYDRVLEKLKKTATGWMTTINGKELKVEGQITYYNRYKRQNVVKDLSVELDRLSEESVNNDISSWTKGRSGEALSLLKKRFSHRPVQEKFVCLNCGFETHADEQAALNIARSWLFLRSQEYKKYQTNKTTGNTDKRAFVETWQSFYRKKLKEVWKPAV

SEQ ID NO: 32386 - protein, 978 aa, synthetic construct
  REGION 1..978: note = engineered CasX variant
QEIKGRINKIRRRLVKDSNTKKAGKTGPMKTLLVRVMTPDLRERLENLRKKPENIPQPISNTSRANLNKLLTDYTEMKKAILHVYWEEFQKDPVGLMSRVAQPASKKIDQNKLKPEMDEKGNLTTAGFACSQCGQPLFVYKLEQVSEKGKAYTNYFGRCNVAEHEKLILLAQLKPEKDSDEAVTYSLGKFGQRALDFYSIHVTKESTHPVKPLAQIAGNRYASPVGKALSDACMGTIASFLSKYQDIIIEHQKVVKGNQKRLESLRELAGKENLEYPSVTLPPQPHTKEGVDAYNEVIARVRMWVNLNLWQKLKLSRDDAKPLLRLKGFPSFPLVERQANEVDWWDMVCNVKKLINEKKEDGKVFWQNLAGYKRQEALRPYLSSEEDRKKGKKFARYQLGDLLLHLEKKHGEDWGKVYDEAWERIDKKVEGLSKHIKLEEERRSEDAQSKAALTDWLRAKASFVIEGLKEADKDEFCRCELKLQKWYGDLRGKPFAIEAENSILDISGFSKQYNCAFIWQKDGVKKLNLYLIINYFKGGKLRFKKIKPEAFEANRFYTVINKKSGEIVPMEVNFNFDDPNLIILPLAFGKRQGREFIWNDLLSLETGSLKLANGRVIEKTLYNRRTRQDEPALFVALTFERREVLDSSNIKPMNLIGVDRGENIPAVIALTDPEGCPLSRFKDSLGNPTHILRIGESYKEKQRTIQAKKEVEQRRAGGYSRKYASKAKNLADDMVRNTARDLLYYAVTQDAMLIFENLSRGFGRQGKRTFSAERQYTRMEDWLTAKLAYEGLPSKTYLSKTLAQYTSKTCSNCGFTITSADYDRVLEKLKKTATGWMTTINGKELKVEGQITYYNRYKRQNVVKDLSVELDRLSEESVNNDISSWTKGRSGEALSLLKKRFSHRPVQEKFVCLNCGFETHADEQAALNIARSWLFLRSQEYKKYQTNKTTGNTDKRAFVETWQSFYRKKLKEVWKPAV

SEQ ID NO: 32387 - protein, 979 aa, synthetic construct
  REGION 1..979: note = engineered CasX variant
QEIKGRINKIRRRLVKDSNTKKAGKTGPMKTLLVRVMTPDLRERLENLRKKPENIPQPISNTSRANLNKLLTDYTEMKKAILHVYWEEFQKDPVGLMSRVAQPASKKIDQNKLKPEMDEKGNLTTAGFACSQCGQPLFVYKLEQVSEKGKAYTNYFGRCNVAEHEKLILLAQLKPEKDSDEAVTYSLGKFGQRALDFYSIHVTKESTHPVKPLAQIAGNRYASYPVGKALSDACMGTIASFLSKYQDIIIEHQKVVKGNQKRLESLRELAGKENLEYPSVTLPPQPHTKEGVDAYNEVIARVRMWVNLNLWQKLKLSRDDAKPLLRLKGFPSFPLVERQANEVDWWDMVCNVKKLINEKKEDGKVFWQNLAGYKRQEALRPYLSSEEDRKKGKKFARYQLGDLLLHLEKKHGEDWGKVYDEAWERIDKKVEGLSKHIKLEEERRSEDAQSKAALTDWLRAKASFVIEGLKEADKDEFCRCELKLQKWYGDLRGKPFAIEAENSILDISGFSKQYNCAFIWQKDGVKKLNLYLIINYFKGGKLRFKKIKPEAFEANRFYTVINKKSGEIVPMEVNFNFDDPNLIILPLAFGKRQGREFIWNDLLSLETGSLKLANGRVIEKTLYNRRTRQDEPALFVALTFERREVLDSSNIKPMNLIGVDRGENIPAVIALTDPEGCPLSRFKDSLGNPTHILRIGESYKEKQRTIQAKKEVEQRRAGGYSRKYASKAKNLADDMVRNTARDLLYYAVTQDAMLIFENLSRGFGRQGKRTFMAERQYTRMEDWLTAKLAYEGLPSKTYLSKTLAQYTSKTCSNCGFTITSADYDRVLEKLKKTATGWMTTINGKELKVEGQITYYNRYKRQNVVKDLSVELDRLSEESVNNDISSWDKGRSGEALSLLKKRFSHRPVQEKFVCLNCGFETHADEQAALNIARSWLFLRSQEYKKYQTNKTTGNTDKRAFVETWQSFYRKKLKEVWKPAV

SEQ ID NO: 32388 - protein, 979 aa, synthetic construct
  REGION 1..979: note = engineered CasX variant
QEIKGRINKIRRRLVKDSNTKKAGKTGPMKTLLVRVMTPDLRERLENLRKKPENIPQPISNTSRANLNKLLTDYTEMKKAILHVYWEEFQKDPVGLMSRVAQPASKKIDQNKLKPEMDEKGNLTTAGFACSQCGQPLFVYKLEQVSEKGKAYTNYFGRCNVAEHEKLILLAQLKPEKDSDEAVTYSLGKFGQRALDFYSIHVTKESTHPVKPLAQIAGNRYASHPVGKALSDACMGTIASFLSKYQDIIIEHQKVVKGNQKRLESLRELAGKENLEYPSVTLPPQPHTKEGVDAYNEVIARVRMWVNLNLWQKLKLSRDDAKPLLRLKGFPSFPLVERQANEVDWWDMVCNVKKLINEKKEDGKVFWQNLAGYKRQEALRPYLSSEEDRKKGKKFARYQLGDLLLHLEKKHGEDWGKVYDEAWERIDKKVEGLSKHIKLEEERRSEDAQSKAALTDWLRAKASFVIEGLKEADKDEFCRCELKLQKWYGDLRGKPFAIEAENSILDISGFSKQYNCAFIWQKDGVKKLNLYLIINYFKGGKLRFKKIKPEAFEANRFYTVINKKSGEIVPMEVNFNFDDPNLIILPLAFGKRQGREFIWNDLLSLETGSLKLANGRVIEKTLYNRRTRQDEPALFVALTFERREVLDSSNIKPMNLIGVDRGENIPAVIALTDPEGCPLSRFKDSLGNPTHILRIGESYKEKQRTIQAKKEVEQRRAGGYSRKYASKAKNLADDMVRNTARDLLYYAVTQDAMLIFENLSRGFGRQGKRTFMAERQYTRMEDWLTAKLAYEGLPSKTYLSKTLAQYTSKTCSNCGFTITSADYDRVLEKLKKTATGWMTTINGKELKVEGQITYYNRYKRQNVVKDLSVELDRLSEESVNNDISSWDKGRSGEALSLLKKRFSHRPVQEKFVCLNCGFETHADEQAALNIARSWLFLRSQEYKKYQTNKTTGNTDKRAFVETWQSFYRKKLKEVWKPAV

SEQ ID NO: 32389 - protein, 979 aa, synthetic construct
  REGION 1..979: note = engineered CasX variant
QEIKGRINKIRRRLVKDSNTKKAGKTGPMKTLLVRVMTPDLRERLENLRKKPENIPQPISNTSRANLNKLLTDYTEMKKAILHVYWEEFQKDPVGLMSRVAQPASKKIDQNKLKPEMDEKGNLTTAGFACSQCGQPLFVYKLEQVSEKGKAYTNYFGRCNVAEHEKLILLAQLKPEKDSDEAVTYSLGKFGQRALDFYSIHVTKESTHPVKPLAQIAGNRYASSPVGKALSDACMGTIASFLSKYQDIIIEHQKVVKGNQKRLESLRELAGKENLEYPSVTLPPQPHTKEGVDAYNEVIARVRMWVNLNLWQKLKLSRDDAKPLLRLKGFPSFPLVERQANEVDWWDMVCNVKKLINEKKEDGKVFWQNLAGYKRQEALRPYLSSEEDRKKGKKFARYQLGDLLLHLEKKHGEDWGKVYDEAWERIDKKVEGLSKHIKLEEERRSEDAQSKAALTDWLRAKASFVIEGLKEADKDEFCRCELKLQKWYGDLRGKPFAIEAENSILDISGFSKQYNCAFIWQKDGVKKLNLYLIINYFKGGKLRFKKIKPEAFEANRFYTVINKKSGEIVPMEVNFNFDDPNLIILPLAFGKRQGREFIWNDLLSLETGSLKLANGRVIEKTLYNRRTRQDEPALFVALTFERREVLDSSNIKPMNLIGVDRGENIPAVIALTDPEGCPLSRFKDSLGNPTHILRIGESYKEKQRTIQAKKEVEQRRAGGYSRKYASKAKNLADDMVRNTARDLLYYAVTQDAMLIFENLSRGFGRQGKRTFMAERQYTRMEDWLTAKLAYEGLPSKTYLSKTLAQYTSKTCSNCGFTITSADYDRVLEKLKKTATGWMTTINGKELKVEGQITYYNRYKRQNVVKDLSVELDRLSEESVNNDISSWDKGRSGEALSLLKKRFSHRPVQEKFVCLNCGFETHADEQAALNIARSWLFLRSQEYKKYQTNKTTGNTDKRAFVETWQSFYRKKLKEVWKPAV

SEQ ID NO: 32390 - protein, 979 aa, synthetic construct
  REGION 1..979: note = engineered CasX variant
QEIKGRINKIRRRLVKDSNTKKAGKTGPMKTLLVRVMTPDLRERLENLRKKPENIPQPISNTSRANLNKLLTDYTEMKKAILHVYWEEFQKDPVGLMSRVAQPASKKIDQNKLKPEMDEKGNLTTAGFACSQCGQPLFVYKLEQVSEKGKAYTNYFGRCNVAEHEKLILLAQLKPEKDSDEAVTYSLGKFGQRALDFYSIHVTKESTHPVKPLAQIAGNRYASTPVGKALSDACMGTIASFLSKYQDIIIEHQKVVKGNQKRLESLRELAGKENLEYPSVTLPPQPHTKEGVDAYNEVIARVRMWVNLNLWQKLKLSRDDAKPLLRLKGFPSFPLVERQANEVDWWDMVCNVKKLINEKKEDGKVFWQNLAGYKRQEALRPYLSSEEDRKKGKKFARYQLGDLLLHLEKKHGEDWGKVYDEAWERIDKKVEGLSKHIKLEEERRSEDAQSKAALTDWLRAKASFVIEGLKEADKDEFCRCELKLQKWYGDLRGKPFAIEAENSILDISGFSKQYNCAFIWQKDGVKKLNLYLIINYFKGGKLRFKKIKPEAFEANRFYTVINKKSGEIVPMEVNFNFDDPNLIILPLAFGKRQGREFIWNDLLSLETGSLKLANGRVIEKTLYNRRTRQDEPALFVALTFERREVLDSSNIKPMNLIGVDRGENIPAVIALTDPEGCPLSRFKDSLGNPTHILRIGESYKEKQRTIQAKKEVEQRRAGGYSRKYASKAKNLADDMVRNTARDLLYYAVTQDAMLIFENLSRGFGRQGKRTFMAERQYTRMEDWLTAKLAYEGLPSKTYLSKTLAQYTSKTCSNCGFTITSADYDRVLEKLKKTATGWMTTINGKELKVEGQITYYNRYKRQNVVKDLSVELDRLSEESVNNDISSWDKGRSGEALSLLKKRFSHRPVQEKFVCLNCGFETHADEQAALNIARSWLFLRSQEYKKYQTNKTTGNTDKRAFVETWQSFYRKKLKEVWKPAV

SEQ ID NO: 32391 - protein, 979 aa, synthetic construct
  REGION 1..979: note = engineered CasX variant
QEIKGRINKIRRRLVKDSNTKKAGKTGPMKTLLVRVMTPDLRERLENLRKKPENIPQPISNTSRANLNKLLTDYTEMKKAILHVYWEEFQKDPVGLMSRVAQPASKKIDQNKLKPEMDEKGNLTTAGFACSQCGQPLFVYKLEQVSEKGKAYTNYFGRCNVAEHEKLILLAQLKPEKDSDEAVTYSLGKFGQRALDFYSIHVTKESTHPVKPLAQIAGNRYASAPVGKALSDACMGTIASFLSKYQDIIIEHQKVVKGNQKRLESLRELAGKENLEYPSVTLPPQPHTKEGVDAYNEVIARVRMWVNLNLWQKLKLSRDDAKPLLRLKGFPSFPLVERQANEVDWWDMVCNVKKLINEKKEDGKVFWQNLAGYKRQEALRPYLSSEEDRKKGKKFARYQLGDLLLHLEKKHGEDWGKVYDEAWERIDKKVEGLSKHIKLEEERRSEDAQSKAALTDWLRAKASFVIEGLKEADKDEFCRCELKLQKWYGDLRGKPFAIEAENSILDISGFSKQYNCAFIWQKDGVKKLNLYLIINYFKGGKLRFKKIKPEAFEANRFYTVINKKSGEIVPMEVNFNFDDPNLIILPLAFGKRQGREFIWNDLLSLETGSLKLANGRVIEKTLYNRRTRQDEPALFVALTFERREVLDSSNIKPMNLIGVDRGENIPAVIALTDPEGCPLSRFKDSLGNPTHILRIGESYKEKQRTIQAKKEVEQRRAGGYSRKYASKAKNLADDMVRNTARDLLYYAVTQDAMLIFENLSRGFGRQGKRTFMAERQYTRMEDWLTAKLAYEGLPSKTYLSKTLAQYTSKTCSNCGFTITSADYDRVLEKLKKTATGWMTTINGKELKVEGQITYYNRYKRQNVVKDLSVELDRLSEESVNNDISSWDKGRSGEALSLLKKRFSHRPVQEKFVCLNCGFETHADEQAALNIARSWLFLRSQEYKKYQTNKTTGNTDKRAFVETWQSFYRKKLKEVWKPAV

SEQ ID NO: 32392 - protein, 979 aa, synthetic construct
  REGION 1..979: note = engineered CasX variant
QEIKGRINKIRRRLVKDSNTKKAGKTGPMKTLLVRVMTPDLRERLENLRKKPENIPQPISNTSRANLNKLLTDYTEMKKAILHVYWEEFQKDPVGLMSRVAQPASKKIDQNKLKPEMDEKGNLTTAGFACSQCGQPLFVYKLEQVSEKGKAYTNYFGRCNVAEHEKLILLAQLKPEKDSDEAVTYSLGKFGQRALDFYSIHVTKESTHPVKPLAQIAGNRYASVPVGKALSDACMGTIASFLSKYQDIIIEHQKVVKGNQKRLESLRELAGKENLEYPSVTLPPQPHTKEGVDAYNEVIARVRMWVNLNLWQKLKLSRDDAKPLLRLKGFPSFPLVERQANEVDWWDMVCNVKKLINEKKEDGKVFWQNLAGYKRQEALRPYLSSEEDRKKGKKFARYQLGDLLLHLEKKHGEDWGKVYDEAWERIDKKVEGLSKHIKLEEERRSEDAQSKAALTDWLRAKASFVIEGLKEADKDEFCRCELKLQKWYGDLRGKPFAIEAENSILDISGFSKQYNCAFIWQKDGVKKLNLYLIINYFKGGKLRFKKIKPEAFEANRFYTVINKKSGEIVPMEVNFNFDDPNLIILPLAFGKRQGREFIWNDLLSLETGSLKLANGRVIEKTLYNRRTRQDEPALFVALTFERREVLDSSNIKPMNLIGVDRGENIPAVIALTDPEGCPLSRFKDSLGNPTHILRIGESYKEKQRTIQAKKEVEQRRAGGYSRKYASKAKNLADDMVRNTARDLLYYAVTQDAMLIFENLSRGFGRQGKRTFMAERQYTRMEDWLTAKLAYEGLPSKTYLSKTLAQYTSKTCSNCGFTITSADYDRVLEKLKKTATGWMTTINGKELKVEGQITYYNRYKRQNVVKDLSVELDRLSEESVNNDISSWDKGRSGEALSLLKKRFSHRPVQEKFVCLNCGFETHADEQAALNIARSWLFLRSQEYKKYQTNKTTGNTDKRAFVETWQSFYRKKLKEVWKPAV

SEQ ID NO: 32393 - protein, 979 aa, synthetic construct
  REGION 1..979: note = engineered CasX variant
QEIKGRINKIRRRLVKDSNTKKAGKTGPMKTLLVRVMTPDLRERLENLRKKPENIPQPISNTSRANLNKLLTDYTEMKKAILHVYWEEFQKDPVGLMSRVAQPASKKIDQNKLKPEMDEKGNLTTAGFACSQCGQPLFVYKLEQVSEKGKAYTNYFGRCNVAEHEKLIKLAQLKPEKDSDEAVTYSLGKFGQRALDFYSIHVTKESTHPVKPLAQIAGNRYASGPVGKALSDACMGTIASFLSKYQDIIIEHQKVVKGNQKRLESLRELAGKENLEYPSVTLPPQPHTKEGVDAYNEVIARVRMWVNLNLWQKLKLSRDDAKPLLRLKGFPSFPLVERQANEVDWWDMVCNVKKLINEKKEDGKVFWQNLAGYKRQEALRPYLSSEEDRKKGKKFARYQLGDLLLHLEKKHGEDWGKVYDEAWERIDKKVEGLSKHIKLEEERRSEDAQSKAALTDWLRAKASFVIEGLKEADKDEFCRCELKLQKWYGDLRGKPFAIEAENSILDISGFSKQYNCAFIWQKDGVKKLNLYLIINYFKGGKLRFKKIKPEAFEANRFYTVINKKSGEIVPMEVNFNFDDPNLIILPLAFGKRQGREFIWNDLLSLETGSLKLANGRVIEKTLYNRRTRQDEPALFVALTFERREVLDSSNIKPMNLIGVDRGENIPAVIALTDPEGCPLSRFKDSLGNPTHILRIGESYKEKQRTIQAKKEVEQRRAGGYSRKYASKAKNLADDMVRNTARDLLYYAVTQDAMLIFENLSRGFGRQGKRTFMAERQYTRMEDWLTAKLAYEGLPSKTYLSKTLAQYTSKTCSNCGFTITSADYDRVLEKLKKTATGWMTTINGKELKVEGQITYYNRYKRQNVVKDLSVELDRLSEESVNNDISSWDKGRSGEALSLLKKRFSHRPVQEKFVCLNCGFETHADEQAALNIARSWLFLRSQEYKKYQTNKTTGNTDKRAFVETWQSFYRKKLKEVWKPAV

SEQ ID NO: 32394 - protein, 978 aa, synthetic construct
  REGION 1..978: note = engineered CasX variant
QEIKGRINKIRRRLVKDSNTKKAGKTGPMKTLLVRVMTPDLRERLENLRKKPENIPQPISNTSRANLNKLLTDYTEMKKAILHVYWEEFQKDPVGLMSRVAQPASKKIDQNKLKPEMDEKGNLTTAGFACSQCGQPLFVYKLEQVSEKGKAYTNYFGRCNVAEHEKLILLAQLKPEKDSDEAVTYSLGKFGQRALDFYSIHVTKESTHPVKPLAQIAGNRYASPVGKALSDACMGTIASFLSKYQDIIIEHQKVVKGNQKRLESLRELAGKENLEYPSVTLPPQPHTKEGVDAYNEVIARVRMWVNLNLWQKLKLSRDDAKPLLRLKGFPSFPLVERQANEVDWWDMVCNVKKLINEKKEDGKVFWQNLAGYKRQEALRPYLSSEEDRKKGKKFARYQLGDLLLHLEKKHGEDWGKVYDEAWERIDKKVEGLSKHIKLEEERRSEDAQSKAALTDWLRAKASFVIEGLKEADKDEFCRCELKLQKWYGDLRGKPFAIEAENSILDISGFSKQYNCAFIWQKDGVKKLNLYLIINYFKGGKLRFKKIKPEAFEANRFYTVINKKSGEIVPMEVNFNFDDPNLIILPLAFGKRQGREFIWNDLLSLETGSLKLANGRVIEKTLYNRRTRQDEPALFVALTFERREVLDSSNIKPMNLIGVDRGENIPAVIALTDPEGCPLSRFKDSLGNPTHILRIGESYKEKQRTIQAKKEVEQRRAGGYSRKYASKAKNLADDMVRNTARDLLYYAVTQDAMLIFENLSRGFGRQGKRTFMAERQYTRMEDWLTAKLAYEGLPSKTYLSKTLAQYTSKTCSNCGFTITSADYDRVLEKLKKTATGWMTTINGKELKVEGQITYYNRYKRQNVVKDLSVELDRLSEESVNNDISSWDKGRSGEALSLLKKRFSHRPVQEKFVCLNCGFETHADEQAALNIARSWLFLRSQEYKKYQTNKTTGNTDKRAFVETWQSFYRKKLKEVWKPAV

SEQ ID NO: 32395 - protein, 979 aa, synthetic construct
  REGION 1..979: note = engineered CasX variant
QEIKGRINKIRRRLVKDSNTKKAGKTGPMKTLLVRVMTPDLRERLENLRKKPENIPQPISNTSRANLNKLLTDYTEMKKAILHVYWEEFQVDPVGLMSRVAQPASKKIDQNKLKPEMDEKGNLTTAGFACSQCGQPLFVYKLEQVSEKGKAYTNYFGRCNVAEHEKLILLAQLKPEKDSDEAVTYSLGKFGQRALDFYSIHVTKESTHPVKPLAQIAGNRYASYPVGKALSDACMGTIASFLSKYQDIIIEHQKVVKGNQKRLESLRELAGKENLEYPSVTLPPQPHTKEGVDAYNEVIARVRMWVNLNLWQKLKLSRDDAKPLLRLKGFPSFPLVERQANEVDWWDMVCNVKKLINEKKEDGKVFWQNLAGYKRQEALRPYLSSEEDRKKGKKFARYQLGDLLLHLEKKHGEDWGKVYDEAWERIDKKVEGLSKHIKLEEERRSEDAQSKAALTDWLRAKASFVIEGLKEADKDEFCRCELKLQKWYGDLRGKPFAIEAENSILDISGFSKQYNCAFIWQKDGVKKLNLYLIINYFKGGKLRFKKIKPEAFEANRFYTVINKKSGEIVPMEVNFNFDDPNLIILPLAFGKRQGREFIWNDLLSLETGSLKLANGRVIEKTLYNRRTRQDEPALFVALTFERREVLDSSNIKPMNLIGVDRGENIPAVIALTDPEGCPLSRFKDSLGNPTHILRIGESYKEKQRTIQAKKEVEQRRAGGYSRKYASKAKNLADDMVRNTARDLLYYAVTQDAMLIFENLSRGFGRQGKRTFMAERQYTRMEDWLTAKLAYEGLPSKTYLSKTLAQYTSKTCSNCGFTITSADYDRVLEKLKKTATGWMTTINGKELKVEGQITYYNRYKRQNVVKDLSVELDRLSEESVNNDISSWTKGRSGEALSLLKKRFSHRPVQEKFVCLNCGFETHADEQAALNIARSWLFLRSQEYKKYQTNKTTGNTDKRAFVETWQSFYRKKLKEVWKPAV

SEQ ID NO: 32396 - protein, 979 aa, synthetic construct
  REGION 1..979: note = engineered CasX variant
QEIKGRINKIRRRLVKDSNTKKAGKTGPMKTLLVRVMTPDLRERLENLRKKPENIPQPISNTSRANLNKLLTDYTEMKKAILHVYWEEFQVDPVGLMSRVAQPASKKIDQNKLKPEMDEKGNLTTAGFACSQCGQPLFVYKLEQVSEKGKAYTNYFGRCNVAEHEKLILLAQLKPEKDSDEAVTYSLGKFGQRALDFYSIHVTKESTHPVKPLAQIAGNRYASHPVGKALSDACMGTIASFLSKYQDIIIEHQKVVKGNQKRLESLRELAGKENLEYPSVTLPPQPHTKEGVDAYNEVIARVRMWVNLNLWQKLKLSRDDAKPLLRLKGFPSFPLVERQANEVDWWDMVCNVKKLINEKKEDGKVFWQNLAGYKRQEALRPYLSSEEDRKKGKKFARYQLGDLLLHLEKKHGEDWGKVYDEAWERIDKKVEGLSKHIKLEEERRSEDAQSKAALTDWLRAKASFVIEGLKEADKDEFCRCELKLQKWYGDLRGKPFAIEAENSILDISGFSKQYNCAFIWQKDGVKKLNLYLIINYFKGGKLRFKKIKPEAFEANRFYTVINKKSGEIVPMEVNFNFDDPNLIILPLAFGKRQGREFIWNDLLSLETGSLKLANGRVIEKTLYNRRTRQDEPALFVALTFERREVLDSSNIKPMNLIGVDRGENIPAVIALTDPEGCPLSRFKDSLGNPTHILRIGESYKEKQRTIQAKKEVEQRRAGGYSRKYASKAKNLADDMVRNTARDLLYYAVTQDAMLIFENLSRGFGRQGKRTFMAERQYTRMEDWLTAKLAYEGLPSKTYLSKTLAQYTSKTCSNCGFTITSADYDRVLEKLKKTATGWMTTINGKELKVEGQITYYNRYKRQNVVKDLSVELDRLSEESVNNDISSWTKGRSGEALSLLKKRFSHRPVQEKFVCLNCGFETHADEQAALNIARSWLFLRSQEYKKYQTNKTTGNTDKRAFVETWQSFYRKKLKEVWKPAV

SEQ ID NO: 32397 - protein, 979 aa, synthetic construct
  REGION 1..979: note = engineered CasX variant
QEIKGRINKIRRRLVKDSNTKKAGKTGPMKTLLVRVMTPDLRERLENLRKKPENIPQPISNTSRANLNKLLTDYTEMKKAILHVYWEEFQVDPVGLMSRVAQPASKKIDQNKLKPEMDEKGNLTTAGFACSQCGQPLFVYKLEQVSEKGKAYTNYFGRCNVAEHEKLILLAQLKPEKDSDEAVTYSLGKFGQRALDFYSIHVTKESTHPVKPLAQIAGNRYASSPVGKALSDACMGTIASFLSKYQDIIIEHQKVVKGNQKRLESLRELAGKENLEYPSVTLPPQPHTKEGVDAYNEVIARVRMWVNLNLWQKLKLSRDDAKPLLRLKGFPSFPLVERQANEVDWWDMVCNVKKLINEKKEDGKVFWQNLAGYKRQEALRPYLSSEEDRKKGKKFARYQLGDLLLHLEKKHGEDWGKVYDEAWERIDKKVEGLSKHIKLEEERRSEDAQSKAALTDWLRAKASFVIEGLKEADKDEFCRCELKLQKWYGDLRGKPFAIEAENSILDISGFSKQYNCAFIWQKDGVKKLNLYLIINYFKGGKLRFKKIKPEAFEANRFYTVINKKSGEIVPMEVNFNFDDPNLIILPLAFGKRQGREFIWNDLLSLETGSLKLANGRVIEKTLYNRRTRQDEPALFVALTFERREVLDSSNIKPMNLIGVDRGENIPAVIALTDPEGCPLSRFKDSLGNPTHILRIGESYKEKQRTIQAKKEVEQRRAGGYSRKYASKAKNLADDMVRNTARDLLYYAVTQDAMLIFENLSRGFGRQGKRTFMAERQYTRMEDWLTAKLAYEGLPSKTYLSKTLAQYTSKTCSNCGFTITSADYDRVLEKLKKTATGWMTTINGKELKVEGQITYYNRYKRQNVVKDLSVELDRLSEESVNNDISSWTKGRSGEALSLLKKRFSHRPVQEKFVCLNCGFETHADEQAALNIARSWLFLRSQEYKKYQTNKTTGNTDKRAFVETWQSFYRKKLKEVWKPAV

SEQ ID NO: 32398 - protein, 979 aa, synthetic construct
  REGION 1..979: note = engineered CasX variant
QEIKGRINKIRRRLVKDSNTKKAGKTGPMKTLLVRVMTPDLRERLENLRKKPENIPQPISNTSRANLNKLLTDYTEMKKAILHVYWEEFQVDPVGLMSRVAQPASKKIDQNKLKPEMDEKGNLTTAGFACSQCGQPLFVYKLEQVSEKGKAYTNYFGRCNVAEHEKLILLAQLKPEKDSDEAVTYSLGKFGQRALDFYSIHVTKESTHPVKPLAQIAGNRYASTPVGKALSDACMGTIASFLSKYQDIIIEHQKVVKGNQKRLESLRELAGKENLEYPSVTLPPQPHTKEGVDAYNEVIARVRMWVNLNLWQKLKLSRDDAKPLLRLKGFPSFPLVERQANEVDWWDMVCNVKKLINEKKEDGKVFWQNLAGYKRQEALRPYLSSEEDRKKGKKFARYQLGDLLLHLEKKHGEDWGKVYDEAWERIDKKVEGLSKHIKLEEERRSEDAQSKAALTDWLRAKASFVIEGLKEADKDEFCRCELKLQKWYGDLRGKPFAIEAENSILDISGFSKQYNCAFIWQKDGVKKLNLYLIINYFKGGKLRFKKIKPEAFEANRFYTVINKKSGEIVPMEVNFNFDDPNLIILPLAFGKRQGREFIWNDLLSLETGSLKLANGRVIEKTLYNRRTRQDEPALFVALTFERREVLDSSNIKPMNLIGVDRGENIPAVIALTDPEGCPLSRFKDSLGNPTHILRIGESYKEKQRTIQAKKEVEQRRAGGYSRKYASKAKNLADDMVRNTARDLLYYAVTQDAMLIFENLSRGFGRQGKRTFMAERQYTRMEDWLTAKLAYEGLPSKTYLSKTLAQYTSKTCSNCGFTITSADYDRVLEKLKKTATGWMTTINGKELKVEGQITYYNRYKRQNVVKDLSVELDRLSEESVNNDISSWTKGRSGEALSLLKKRFSHRPVQEKFVCLNCGFETHADEQAALNIARSWLFLRSQEYKKYQTNKTTGNTDKRAFVETWQSFYRKKLKEVWKPAV

SEQ ID NO: 32399 - protein, 979 aa, synthetic construct
  REGION 1..979: note = engineered CasX variant
QEIKGRINKIRRRLVKDSNTKKAGKTGPMKTLLVRVMTPDLRERLENLRKKPENIPQPISNTSRANLNKLLTDYTEMKKAILHVYWEEFQVDPVGLMSRVAQPASKKIDQNKLKPEMDEKGNLTTAGFACSQCGQPLFVYKLEQVSEKGKAYTNYFGRCNVAEHEKLILLAQLKPEKDSDEAVTYSLGKFGQRALDFYSIHVTKESTHPVKPLAQIAGNRYASAPVGKALSDACMGTIASFLSKYQDIIIEHQKVVKGNQKRLESLRELAGKENLEYPSVTLPPQPHTKEGVDAYNEVIARVRMWVNLNLWQKLKLSRDDAKPLLRLKGFPSFPLVERQANEVDWWDMVCNVKKLINEKKEDGKVFWQNLAGYKRQEALRPYLSSEEDRKKGKKFARYQLGDLLLHLEKKHGEDWGKVYDEAWERIDKKVEGLSKHIKLEEERRSEDAQSKAALTDWLRAKASFVIEGLKEADKDEFCRCELKLQKWYGDLRGKPFAIEAENSILDISGFSKQYNCAFIWQKDGVKKLNLYLIINYFKGGKLRFKKIKPEAFEANRFYTVINKKSGEIVPMEVNFNFDDPNLIILPLAFGKRQGREFIWNDLLSLETGSLKLANGRVIEKTLYNRRTRQDEPALFVALTFERREVLDSSNIKPMNLIGVDRGENIPAVIALTDPEGCPLSRFKDSLGNPTHILRIGESYKEKQRTIQAKKEVEQRRAGGYSRKYASKAKNLADDMVRNTARDLLYYAVTQDAMLIFENLSRGFGRQGKRTFMAERQYTRMEDWLTAKLAYEGLPSKTYLSKTLAQYTSKTCSNCGFTITSADYDRVLEKLKKTATGWMTTINGKELKVEGQITYYNRYKRQNVVKDLSVELDRLSEESVNNDISSWTKGRSGEALSLLKKRFSHRPVQEKFVCLNCGFETHADEQAALNIARSWLFLRSQEYKKYQTNKTTGNTDKRAFVETWQSFYRKKLKEVWKPAV

SEQ ID NO: 32400 - protein, 979 aa, synthetic construct
  REGION 1..979: note = engineered CasX variant
QEIKGRINKIRRRLVKDSNTKKAGKTGPMKTLLVRVMTPDLRERLENLRKKPENIPQPISNTSRANLNKLLTDYTEMKKAILHVYWEEFQVDPVGLMSRVAQPASKKIDQNKLKPEMDEKGNLTTAGFACSQCGQPLFVYKLEQVSEKGKAYTNYFGRCNVAEHEKLILLAQLKPEKDSDEAVTYSLGKFGQRALDFYSIHVTKESTHPVKPLAQIAGNRYASVPVGKALSDACMGTIASFLSKYQDIIIEHQKVVKGNQKRLESLRELAGKENLEYPSVTLPPQPHTKEGVDAYNEVIARVRMWVNLNLWQKLKLSRDDAKPLLRLKGFPSFPLVERQANEVDWWDMVCNVKKLINEKKEDGKVFWQNLAGYKRQEALRPYLSSEEDRKKGKKFARYQLGDLLLHLEKKHGEDWGKVYDEAWERIDKKVEGLSKHIKLEEERRSEDAQSKAALTDWLRAKASFVIEGLKEADKDEFCRCELKLQKWYGDLRGKPFAIEAENSILDISGFSKQYNCAFIWQKDGVKKLNLYLIINYFKGGKLRFKKIKPEAFEANRFYTVINKKSGEIVPMEVNFNFDDPNLIILPLAFGKRQGREFIWNDLLSLETGSLKLANGRVIEKTLYNRRTRQDEPALFVALTFERREVLDSSNIKPMNLIGVDRGENIPAVIALTDPEGCPLSRFKDSLGNPTHILRIGESYKEKQRTIQAKKEVEQRRAGGYSRKYASKAKNLADDMVRNTARDLLYYAVTQDAMLIFENLSRGFGRQGKRTFMAERQYTRMEDWLTAKLAYEGLPSKTYLSKTLAQYTSKTCSNCGFTITSADYDRVLEKLKKTATGWMTTINGKELKVEGQITYYNRYKRQNVVKDLSVELDRLSEESVNNDISSWTKGRSGEALSLLKKRFSHRPVQEKFVCLNCGFETHADEQAALNIARSWLFLRSQEYKKYQTNKTTGNTDKRAFVETWQSFYRKKLKEVWKPAV

SEQ ID NO: 32401 - protein, 979 aa, synthetic construct
  REGION 1..979: note = engineered CasX variant
QEIKGRINKIRRRLVKDSNTKKAGKTGPMKTLLVRVMTPDLRERLENLRKKPENIPQPISNTSRANLNKLLTDYTEMKKAILHVYWEEFQVDPVGLMSRVAQPASKKIDQNKLKPEMDEKGNLTTAGFACSQCGQPLFVYKLEQVSEKGKAYTNYFGRCNVAEHEKLIKLAQLKPEKDSDEAVTYSLGKFGQRALDFYSIHVTKESTHPVKPLAQIAGNRYASGPVGKALSDACMGTIASFLSKYQDIIIEHQKVVKGNQKRLESLRELAGKENLEYPSVTLPPQPHTKEGVDAYNEVIARVRMWVNLNLWQKLKLSRDDAKPLLRLKGFPSFPLVERQANEVDWWDMVCNVKKLINEKKEDGKVFWQNLAGYKRQEALRPYLSSEEDRKKGKKFARYQLGDLLLHLEKKHGEDWGKVYDEAWERIDKKVEGLSKHIKLEEERRSEDAQSKAALTDWLRAKASFVIEGLKEADKDEFCRCELKLQKWYGDLRGKPFAIEAENSILDISGFSKQYNCAFIWQKDGVKKLNLYLIINYFKGGKLRFKKIKPEAFEANRFYTVINKKSGEIVPMEVNFNFDDPNLIILPLAFGKRQGREFIWNDLLSLETGSLKLANGRVIEKTLYNRRTRQDEPALFVALTFERREVLDSSNIKPMNLIGVDRGENIPAVIALTDPEGCPLSRFKDSLGNPTHILRIGESYKEKQRTIQAKKEVEQRRAGGYSRKYASKAKNLADDMVRNTARDLLYYAVTQDAMLIFENLSRGFGRQGKRTFMAERQYTRMEDWLTAKLAYEGLPSKTYLSKTLAQYTSKTCSNCGFTITSADYDRVLEKLKKTATGWMTTINGKELKVEGQITYYNRYKRQNVVKDLSVELDRLSEESVNNDISSWTKGRSGEALSLLKKRFSHRPVQEKFVCLNCGFETHADEQAALNIARSWLFLRSQEYKKYQTNKTTGNTDKRAFVETWQSFYRKKLKEVWKPAV

SEQ ID NO: 32402 - protein, 978 aa, synthetic construct
  REGION 1..978: note = engineered CasX variant
QEIKGRINKIRRRLVKDSNTKKAGKTGPMKTLLVRVMTPDLRERLENLRKKPENIPQPISNTSRANLNKLLTDYTEMKKAILHVYWEEFQVDPVGLMSRVAQPASKKIDQNKLKPEMDEKGNLTTAGFACSQCGQPLFVYKLEQVSEKGKAYTNYFGRCNVAEHEKLILLAQLKPEKDSDEAVTYSLGKFGQRALDFYSIHVTKESTHPVKPLAQIAGNRYASPVGKALSDACMGTIASFLSKYQDIIIEHQKVVKGNQKRLESLRELAGKENLEYPSVTLPPQPHTKEGVDAYNEVIARVRMWVNLNLWQKLKLSRDDAKPLLRLKGFPSFPLVERQANEVDWWDMVCNVKKLINEKKEDGKVFWQNLAGYKRQEALRPYLSSEEDRKKGKKFARYQLGDLLLHLEKKHGEDWGKVYDEAWERIDKKVEGLSKHIKLEEERRSEDAQSKAALTDWLRAKASFVIEGLKEADKDEFCRCELKLQKWYGDLRGKPFAIEAENSILDISGFSKQYNCAFIWQKDGVKKLNLYLIINYFKGGKLRFKKIKPEAFEANRFYTVINKKSGEIVPMEVNFNFDDPNLIILPLAFGKRQGREFIWNDLLSLETGSLKLANGRVIEKTLYNRRTRQDEPALFVALTFERREVLDSSNIKPMNLIGVDRGENIPAVIALTDPEGCPLSRFKDSLGNPTHILRIGESYKEKQRTIQAKKEVEQRRAGGYSRKYASKAKNLADDMVRNTARDLLYYAVTQDAMLIFENLSRGFGRQGKRTFMAERQYTRMEDWLTAKLAYEGLPSKTYLSKTLAQYTSKTCSNCGFTITSADYDRVLEKLKKTATGWMTTINGKELKVEGQITYYNRYKRQNVVKDLSVELDRLSEESVNNDISSWTKGRSGEALSLLKKRFSHRPVQEKFVCLNCGFETHADEQAALNIARSWLFLRSQEYKKYQTNKTTGNTDKRAFVETWQSFYRKKLKEVWKPAV

SEQ ID NO: 32403 - protein, 979 aa, synthetic construct
  REGION 1..979: note = engineered CasX variant
QEIKGRLNKIRRRLVKDSNTKKAGKTGPMKTLLVRVMTPDLRERLENLRKKPENIPQPISNTSRANLNKLLTDYTEMKKAILHVYWEEFQKDPVGLMSRVAQPASKKIDQNKLKPEMDEKGNLTTAGFACSQCGQPLFVYKLEQVSEKGKAYTNYFGRCNVAEHEKLILLAQLKPEKDSDEAVTYSLGKFGQRALDFYSIHVTKESTHPVKPLAQIAGNRYASYPVGKALSDACMGTIASFLSKYQDIIIEHQKVVKGNQKRLESLRELAGKENLEYPSVTLPPQPHTKEGVDAYNEVIARVRMWVNLNLWQKLKLSRDDAKPLLRLKGFPSFPLVERQANEVDWWDMVCNVKKLINEKKEDGKVFWQNLAGYKRQEALRPYLSSEEDRKKGKKFARYQLGDLLLHLEKKHGEDWGKVYDEAWERIDKKVEGLSKHIKLEEERRSEDAQSKAALTDWLRAKASFVIEGLKEADKDEFCRCELKLQKWYGDLRGKPFAIEAENSILDISGFSKQYNCAFIWQKDGVKKLNLYLIINYFKGGKLRFKKIKPEAFEANRFYTVINKKSGEIVPMEVNFNFDDPNLIILPLAFGKRQGREFIWNDLLSLETGSLKLANGRVIEKTLYNRRTRQDEPALFVALTFERREVLDSSNIKPMNLIGVDRGENIPAVIALTDPEGCPLSRFKDSLGNPTHILRIGESYKEKQRTIQAKKEVEQRRAGGYSRKYASKAKNLADDMVRNTARDLLYYAVTQDAMLIFENLSRGFGRQGKRTFMAERQYTRMEDWLTAKLAYEGLPSKTYLSKTLAQYTSKTCSNCGFTITSADYDRVLEKLKKTATGWMTTINGKELKVEGQITYYNRYKRQNVVKDLSVELDRLSEESVNNDISSWTKGRSGEALSLLKKRFSHRPVQEKFVCLNCGFETHADEQAALNIARSWLFLRSQEYKKYQTNKTTGNTDKRAFVETWQSFYRKKLKEVWKPAV

SEQ ID NO: 32404 - protein, 979 aa, synthetic construct
  REGION 1..979: note = engineered CasX variant
QEIKGRLNKIRRRLVKDSNTKKAGKTGPMKTLLVRVMTPDLRERLENLRKKPENIPQPISNTSRANLNKLLTDYTEMKKAILHVYWEEFQKDPVGLMSRVAQPASKKIDQNKLKPEMDEKGNLTTAGFACSQCGQPLFVYKLEQVSEKGKAYTNYFGRCNVAEHEKLILLAQLKPEKDSDEAVTYSLGKFGQRALDFYSIHVTKESTHPVKPLAQIAGNRYASHPVGKALSDACMGTIASFLSKYQDIIIEHQKVVKGNQKRLESLRELAGKENLEYPSVTLPPQPHTKEGVDAYNEVIARVRMWVNLNLWQKLKLSRDDAKPLLRLKGFPSFPLVERQANEVDWWDMVCNVKKLINEKKEDGKVFWQNLAGYKRQEALRPYLSSEEDRKKGKKFARYQLGDLLLHLEKKHGEDWGKVYDEAWERIDKKVEGLSKHIKLEEERRSEDAQSKAALTDWLRAKASFVIEGLKEADKDEFCRCELKLQKWYGDLRGKPFAIEAENSILDISGFSKQYNCAFIWQKDGVKKLNLYLIINYFKGGKLRFKKIKPEAFEANRFYTVINKKSGEIVPMEVNFNFDDPNLIILPLAFGKRQGREFIWNDLLSLETGSLKLANGRVIEKTLYNRRTRQDEPALFVALTFERREVLDSSNIKPMNLIGVDRGENIPAVIALTDPEGCPLSRFKDSLGNPTHILRIGESYKEKQRTIQAKKEVEQRRAGGYSRKYASKAKNLADDMVRNTARDLLYYAVTQDAMLIFENLSRGFGRQGKRTFMAERQYTRMEDWLTAKLAYEGLPSKTYLSKTLAQYTSKTCSNCGFTITSADYDRVLEKLKKTATGWMTTINGKELKVEGQITYYNRYKRQNVVKDLSVELDRLSEESVNNDISSWTKGRSGEALSLLKKRFSHRPVQEKFVCLNCGFETHADEQAALNIARSWLFLRSQEYKKYQTNKTTGNTDKRAFVETWQSFYRKKLKEVWKPAV

SEQ ID NO: 32405 - protein, 979 aa, synthetic construct
  REGION 1..979: note = engineered CasX variant
QEIKGRLNKIRRRLVKDSNTKKAGKTGPMKTLLVRVMTPDLRERLENLRKKPENIPQPISNTSRANLNKLLTDYTEMKKAILHVYWEEFQKDPVGLMSRVAQPASKKIDQNKLKPEMDEKGNLTTAGFACSQCGQPLFVYKLEQVSEKGKAYTNYFGRCNVAEHEKLILLAQLKPEKDSDEAVTYSLGKFGQRALDFYSIHVTKESTHPVKPLAQIAGNRYASSPVGKALSDACMGTIASFLSKYQDIIIEHQKVVKGNQKRLESLRELAGKENLEYPSVTLPPQPHTKEGVDAYNEVIARVRMWVNLNLWQKLKLSRDDAKPLLRLKGFPSFPLVERQANEVDWWDMVCNVKKLINEKKEDGKVFWQNLAGYKRQEALRPYLSSEEDRKKGKKFARYQLGDLLLHLEKKHGEDWGKVYDEAWERIDKKVEGLSKHIKLEEERRSEDAQSKAALTDWLRAKASFVIEGLKEADKDEFCRCELKLQKWYGDLRGKPFAIEAENSILDISGFSKQYNCAFIWQKDGVKKLNLYLIINYFKGGKLRFKKIKPEAFEANRFYTVINKKSGEIVPMEVNFNFDDPNLIILPLAFGKRQGREFIWNDLLSLETGSLKLANGRVIEKTLYNRRTRQDEPALFVALTFERREVLDSSNIKPMNLIGVDRGENIPAVIALTDPEGCPLSRFKDSLGNPTHILRIGESYKEKQRTIQAKKEVEQRRAGGYSRKYASKAKNLADDMVRNTARDLLYYAVTQDAMLIFENLSRGFGRQGKRTFMAERQYTRMEDWLTAKLAYEGLPSKTYLSKTLAQYTSKTCSNCGFTITSADYDRVLEKLKKTATGWMTTINGKELKVEGQITYYNRYKRQNVVKDLSVELDRLSEESVNNDISSWTKGRSGEALSLLKKRFSHRPVQEKFVCLNCGFETHADEQAALNIARSWLFLRSQEYKKYQTNKTTGNTDKRAFVETWQSFYRKKLKEVWKPAV

SEQ ID NO: 32406 - protein, 979 aa, synthetic construct
  REGION 1..979: note = engineered CasX variant
QEIKGRLNKIRRRLVKDSNTKKAGKTGPMKTLLVRVMTPDLRERLENLRKKPENIPQPISNTSRANLNKLLTDYTEMKKAILHVYWEEFQKDPVGLMSRVAQPASKKIDQNKLKPEMDEKGNLTTAGFACSQCGQPLFVYKLEQVSEKGKAYTNYFGRCNVAEHEKLILLAQLKPEKDSDEAVTYSLGKFGQRALDFYSIHVTKESTHPVKPLAQIAGNRYASTPVGKALSDACMGTIASFLSKYQDIIIEHQKVVKGNQKRLESLRELAGKENLEYPSVTLPPQPHTKEGVDAYNEVIARVRMWVNLNLWQKLKLSRDDAKPLLRLKGFPSFPLVERQANEVDWWDMVCNVKKLINEKKEDGKVFWQNLAGYKRQEALRPYLSSEEDRKKGKKFARYQLGDLLLHLEKKHGEDWGKVYDEAWERIDKKVEGLSKHIKLEEERRSEDAQSKAALTDWLRAKASFVIEGLKEADKDEFCRCELKLQKWYGDLRGKPFAIEAENSILDISGFSKQYNCAFIWQKDGVKKLNLYLIINYFKGGKLRFKKIKPEAFEANRFYTVINKKSGEIVPMEVNFNFDDPNLIILPLAFGKRQGREFIWNDLLSLETGSLKLANGRVIEKTLYNRRTRQDEPALFVALTFERREVLDSSNIKPMNLIGVDRGENIPAVIALTDPEGCPLSRFKDSLGNPTHILRIGESYKEKQRTIQAKKEVEQRRAGGYSRKYASKAKNLADDMVRNTARDLLYYAVTQDAMLIFENLSRGFGRQGKRTFMAERQYTRMEDWLTAKLAYEGLPSKTYLSKTLAQYTSKTCSNCGFTITSADYDRVLEKLKKTATGWMTTINGKELKVEGQITYYNRYKRQNVVKDLSVELDRLSEESVNNDISSWTKGRSGEALSLLKKRFSHRPVQEKFVCLNCGFETHADEQAALNIARSWLFLRSQEYKKYQTNKTTGNTDKRAFVETWQSFYRKKLKEVWKPAV

SEQ ID NO: 32407 - protein, 979 aa, synthetic construct
  REGION 1..979: note = engineered CasX variant
QEIKGRLNKIRRRLVKDSNTKKAGKTGPMKTLLVRVMTPDLRERLENLRKKPENIPQPISNTSRANLNKLLTDYTEMKKAILHVYWEEFQKDPVGLMSRVAQPASKKIDQNKLKPEMDEKGNLTTAGFACSQCGQPLFVYKLEQVSEKGKAYTNYFGRCNVAEHEKLILLAQLKPEKDSDEAVTYSLGKFGQRALDFYSIHVTKESTHPVKPLAQIAGNRYASAPVGKALSDACMGTIASFLSKYQDIIIEHQKVVKGNQKRLESLRELAGKENLEYPSVTLPPQPHTKEGVDAYNEVIARVRMWVNLNLWQKLKLSRDDAKPLLRLKGFPSFPLVERQANEVDWWDMVCNVKKLINEKKEDGKVFWQNLAGYKRQEALRPYLSSEEDRKKGKKFARYQLGDLLLHLEKKHGEDWGKVYDEAWERIDKKVEGLSKHIKLEEERRSEDAQSKAALTDWLRAKASFVIEGLKEADKDEFCRCELKLQKWYGDLRGKPFAIEAENSILDISGFSKQYNCAFIWQKDGVKKLNLYLIINYFKGGKLRFKKIKPEAFEANRFYTVINKKSGEIVPMEVNFNFDDPNLIILPLAFGKRQGREFIWNDLLSLETGSLKLANGRVIEKTLYNRRTRQDEPALFVALTFERREVLDSSNIKPMNLIGVDRGENIPAVIALTDPEGCPLSRFKDSLGNPTHILRIGESYKEKQRTIQAKKEVEQRRAGGYSRKYASKAKNLADDMVRNTARDLLYYAVTQDAMLIFENLSRGFGRQGKRTFMAERQYTRMEDWLTAKLAYEGLPSKTYLSKTLAQYTSKTCSNCGFTITSADYDRVLEKLKKTATGWMTTINGKELKVEGQITYYNRYKRQNVVKDLSVELDRLSEESVNNDISSWTKGRSGEALSLLKKRFSHRPVQEKFVCLNCGFETHADEQAALNIARSWLFLRSQEYKKYQTNKTTGNTDKRAFVETWQSFYRKKLKEVWKPAV

SEQ ID NO: 32408 - protein, 979 aa, synthetic construct
  REGION 1..979: note = engineered CasX variant
QEIKGRLNKIRRRLVKDSNTKKAGKTGPMKTLLVRVMTPDLRERLENLRKKPENIPQPISNTSRANLNKLLTDYTEMKKAILHVYWEEFQKDPVGLMSRVAQPASKKIDQNKLKPEMDEKGNLTTAGFACSQCGQPLFVYKLEQVSEKGKAYTNYFGRCNVAEHEKLILLAQLKPEKDSDEAVTYSLGKFGQRALDFYSIHVTKESTHPVKPLAQIAGNRYASVPVGKALSDACMGTIASFLSKYQDIIIEHQKVVKGNQKRLESLRELAGKENLEYPSVTLPPQPHTKEGVDAYNEVIARVRMWVNLNLWQKLKLSRDDAKPLLRLKGFPSFPLVERQANEVDWWDMVCNVKKLINEKKEDGKVFWQNLAGYKRQEALRPYLSSEEDRKKGKKFARYQLGDLLLHLEKKHGEDWGKVYDEAWERIDKKVEGLSKHIKLEEERRSEDAQSKAALTDWLRAKASFVIEGLKEADKDEFCRCELKLQKWYGDLRGKPFAIEAENSILDISGFSKQYNCAFIWQKDGVKKLNLYLIINYFKGGKLRFKKIKPEAFEANRFYTVINKKSGEIVPMEVNFNFDDPNLIILPLAFGKRQGREFIWNDLLSLETGSLKLANGRVIEKTLYNRRTRQDEPALFVALTFERREVLDSSNIKPMNLIGVDRGENIPAVIALTDPEGCPLSRFKDSLGNPTHILRIGESYKEKQRTIQAKKEVEQRRAGGYSRKYASKAKNLADDMVRNTARDLLYYAVTQDAMLIFENLSRGFGRQGKRTFMAERQYTRMEDWLTAKLAYEGLPSKTYLSKTLAQYTSKTCSNCGFTITSADYDRVLEKLKKTATGWMTTINGKELKVEGQITYYNRYKRQNVVKDLSVELDRLSEESVNNDISSWTKGRSGEALSLLKKRFSHRPVQEKFVCLNCGFETHADEQAALNIARSWLFLRSQEYKKYQTNKTTGNTDKRAFVETWQSFYRKKLKEVWKPAV

SEQ ID NO: 32409 - protein, 979 aa, synthetic construct
  REGION 1..979: note = engineered CasX variant
QEIKGRLNKIRRRLVKDSNTKKAGKTGPMKTLLVRVMTPDLRERLENLRKKPENIPQPISNTSRANLNKLLTDYTEMKKAILHVYWEEFQKDPVGLMSRVAQPASKKIDQNKLKPEMDEKGNLTTAGFACSQCGQPLFVYKLEQVSEKGKAYTNYFGRCNVAEHEKLIKLAQLKPEKDSDEAVTYSLGKFGQRALDFYSIHVTKESTHPVKPLAQIAGNRYASGPVGKALSDACMGTIASFLSKYQDIIIEHQKVVKGNQKRLESLRELAGKENLEYPSVTLPPQPHTKEGVDAYNEVIARVRMWVNLNLWQKLKLSRDDAKPLLRLKGFPSFPLVERQANEVDWWDMVCNVKKLINEKKEDGKVFWQNLAGYKRQEALRPYLSSEEDRKKGKKFARYQLGDLLLHLEKKHGEDWGKVYDEAWERIDKKVEGLSKHIKLEEERRSEDAQSKAALTDWLRAKASFVIEGLKEADKDEFCRCELKLQKWYGDLRGKPFAIEAENSILDISGFSKQYNCAFIWQKDGVKKLNLYLIINYFKGGKLRFKKIKPEAFEANRFYTVINKKSGEIVPMEVNFNFDDPNLIILPLAFGKRQGREFIWNDLLSLETGSLKLANGRVIEKTLYNRRTRQDEPALFVALTFERREVLDSSNIKPMNLIGVDRGENIPAVIALTDPEGCPLSRFKDSLGNPTHILRIGESYKEKQRTIQAKKEVEQRRAGGYSRKYASKAKNLADDMVRNTARDLLYYAVTQDAMLIFENLSRGFGRQGKRTFMAERQYTRMEDWLTAKLAYEGLPSKTYLSKTLAQYTSKTCSNCGFTITSADYDRVLEKLKKTATGWMTTINGKELKVEGQITYYNRYKRQNVVKDLSVELDRLSEESVNNDISSWTKGRSGEALSLLKKRFSHRPVQEKFVCLNCGFETHADEQAALNIARSWLFLRSQEYKKYQTNKTTGNTDKRAFVETWQSFYRKKLKEVWKPAV

SEQ ID NO: 32410 - protein, 978 aa, synthetic construct
  REGION 1..978: note = engineered CasX variant
QEIKGRLNKIRRRLVKDSNTKKAGKTGPMKTLLVRVMTPDLRERLENLRKKPENIPQPISNTSRANLNKLLTDYTEMKKAILHVYWEEFQKDPVGLMSRVAQPASKKIDQNKLKPEMDEKGNLTTAGFACSQCGQPLFVYKLEQVSEKGKAYTNYFGRCNVAEHEKLILLAQLKPEKDSDEAVTYSLGKFGQRALDFYSIHVTKESTHPVKPLAQIAGNRYASPVGKALSDACMGTIASFLSKYQDIIIEHQKVVKGNQKRLESLRELAGKENLEYPSVTLPPQPHTKEGVDAYNEVIARVRMWVNLNLWQKLKLSRDDAKPLLRLKGFPSFPLVERQANEVDWWDMVCNVKKLINEKKEDGKVFWQNLAGYKRQEALRPYLSSEEDRKKGKKFARYQLGDLLLHLEKKHGEDWGKVYDEAWERIDKKVEGLSKHIKLEEERRSEDAQSKAALTDWLRAKASFVIEGLKEADKDEFCRCELKLQKWYGDLRGKPFAIEAENSILDISGFSKQYNCAFIWQKDGVKKLNLYLIINYFKGGKLRFKKIKPEAFEANRFYTVINKKSGEIVPMEVNFNFDDPNLIILPLAFGKRQGREFIWNDLLSLETGSLKLANGRVIEKTLYNRRTRQDEPALFVALTFERREVLDSSNIKPMNLIGVDRGENIPAVIALTDPEGCPLSRFKDSLGNPTHILRIGESYKEKQRTIQAKKEVEQRRAGGYSRKYASKAKNLADDMVRNTARDLLYYAVTQDAMLIFENLSRGFGRQGKRTFMAERQYTRMEDWLTAKLAYEGLPSKTYLSKTLAQYTSKTCSNCGFTITSADYDRVLEKLKKTATGWMTTINGKELKVEGQITYYNRYKRQNVVKDLSVELDRLSEESVNNDISSWTKGRSGEALSLLKKRFSHRPVQEKFVCLNCGFETHADEQAALNIARSWLFLRSQEYKKYQTNKTTGNTDKRAFVETWQSFYRKKLKEVWKPAV

SEQ ID NO: 32411 - protein, 979 aa, synthetic construct
  REGION 1..979: note = engineered CasX variant
QEIKGRINKIRRRLVKDSNTKKAGKTGPMKTLLVRVMTPDLRERLENLRKKPENIPQPISNTSRANLNKLLTDYTEMKKAILHVYWEEFQKDPVGLMSRVAQPASKKIDQNKLKPEMDEKGNLTTAGFACSQCGQPLFVYKLEQVSEKGKAYTNYVGRCNVAEHEKLILLAQLKPEKDSDEAVTYSLGKFGQRALDFYSIHVTKESTHPVKPLAQIAGNRYASYPVGKALSDACMGTIASFLSKYQDIIIEHQKVVKGNQKRLESLRELAGKENLEYPSVTLPPQPHTKEGVDAYNEVIARVRMWVNLNLWQKLKLSRDDAKPLLRLKGFPSFPLVERQANEVDWWDMVCNVKKLINEKKEDGKVFWQNLAGYKRQEALRPYLSSEEDRKKGKKFARYQLGDLLLHLEKKHGEDWGKVYDEAWERIDKKVEGLSKHIKLEEERRSEDAQSKAALTDWLRAKASFVIEGLKEADKDEFCRCELKLQKWYGDLRGKPFAIEAENSILDISGFSKQYNCAFIWQKDGVKKLNLYLIINYFKGGKLRFKKIKPEAFEANRFYTVINKKSGEIVPMEVNFNFDDPNLIILPLAFGKRQGREFIWNDLLSLETGSLKLANGRVIEKTLYNRRTRQDEPALFVALTFERREVLDSSNIKPMNLIGVDRGENIPAVIALTDPEGCPLSRFKDSLGNPTHILRIGESYKEKQRTIQAKKEVEQRRAGGYSRKYASKAKNLADDMVRNTARDLLYYAVTQDAMLIFENLSRGFGRQGKRTFMAERQYTRMEDWLTAKLAYEGLPSKTYLSKTLAQYTSKTCSNCGFTITSADYDRVLEKLKKTATGWMTTINGKELKVEGQITYYNRYKRQNVVKDLSVELDRLSEESVNNDISSWTKGRSGEALSLLKKRFSHRPVQEKFVCLNCGFETHADEQAALNIARSWLFLRSQEYKKYQTNKTTGNTDKRAFVETWQSFYRKKLKEVWKPAV

SEQ ID NO: 32412 - protein, 979 aa, synthetic construct
  REGION 1..979: note = engineered CasX variant
QEIKGRINKIRRRLVKDSNTKKAGKTGPMKTLLVRVMTPDLRERLENLRKKPENIPQPISNTSRANLNKLLTDYTEMKKAILHVYWEEFQKDPVGLMSRVAQPASKKIDQNKLKPEMDEKGNLTTAGFACSQCGQPLFVYKLEQVSEKGKAYTNYVGRCNVAEHEKLILLAQLKPEKDSDEAVTYSLGKFGQRALDFYSIHVTKESTHPVKPLAQIAGNRYASHPVGKALSDACMGTIASFLSKYQDIIIEHQKVVKGNQKRLESLRELAGKENLEYPSVTLPPQPHTKEGVDAYNEVIARVRMWVNLNLWQKLKLSRDDAKPLLRLKGFPSFPLVERQANEVDWWDMVCNVKKLINEKKEDGKVFWQNLAGYKRQEALRPYLSSEEDRKKGKKFARYQLGDLLLHLEKKHGEDWGKVYDEAWERIDKKVEGLSKHIKLEEERRSEDAQSKAALTDWLRAKASFVIEGLKEADKDEFCRCELKLQKWYGDLRGKPFAIEAENSILDISGFSKQYNCAFIWQKDGVKKLNLYLIINYFKGGKLRFKKIKPEAFEANRFYTVINKKSGEIVPMEVNFNFDDPNLIILPLAFGKRQGREFIWNDLLSLETGSLKLANGRVIEKTLYNRRTRQDEPALFVALTFERREVLDSSNIKPMNLIGVDRGENIPAVIALTDPEGCPLSRFKDSLGNPTHILRIGESYKEKQRTIQAKKEVEQRRAGGYSRKYASKAKNLADDMVRNTARDLLYYAVTQDAMLIFENLSRGFGRQGKRTFMAERQYTRMEDWLTAKLAYEGLPSKTYLSKTLAQYTSKTCSNCGFTITSADYDRVLEKLKKTATGWMTTINGKELKVEGQITYYNRYKRQNVVKDLSVELDRLSEESVNNDISSWTKGRSGEALSLLKKRFSHRPVQEKFVCLNCGFETHADEQAALNIARSWLFLRSQEYKKYQTNKTTGNTDKRAFVETWQSFYRKKLKEVWKPAV

SEQ ID NO: 32413 - protein, 979 aa, synthetic construct
  REGION 1..979: note = engineered CasX variant
QEIKGRINKIRRRLVKDSNTKKAGKTGPMKTLLVRVMTPDLRERLENLRKKPENIPQPISNTSRANLNKLLTDYTEMKKAILHVYWEEFQKDPVGLMSRVAQPASKKIDQNKLKPEMDEKGNLTTAGFACSQCGQPLFVYKLEQVSEKGKAYTNYVGRCNVAEHEKLILLAQLKPEKDSDEAVTYSLGKFGQRALDFYSIHVTKESTHPVKPLAQIAGNRYASSPVGKALSDACMGTIASFLSKYQDIIIEHQKVVKGNQKRLESLRELAGKENLEYPSVTLPPQPHTKEGVDAYNEVIARVRMWVNLNLWQKLKLSRDDAKPLLRLKGFPSFPLVERQANEVDWWDMVCNVKKLINEKKEDGKVFWQNLAGYKRQEALRPYLSSEEDRKKGKKFARYQLGDLLLHLEKKHGEDWGKVYDEAWERIDKKVEGLSKHIKLEEERRSEDAQSKAALTDWLRAKASFVIEGLKEADKDEFCRCELKLQKWYGDLRGKPFAIEAENSILDISGFSKQYNCAFIWQKDGVKKLNLYLIINYFKGGKLRFKKIKPEAFEANRFYTVINKKSGEIVPMEVNFNFDDPNLIILPLAFGKRQGREFIWNDLLSLETGSLKLANGRVIEKTLYNRRTRQDEPALFVALTFERREVLDSSNIKPMNLIGVDRGENIPAVIALTDPEGCPLSRFKDSLGNPTHILRIGESYKEKQRTIQAKKEVEQRRAGGYSRKYASKAKNLADDMVRNTARDLLYYAVTQDAMLIFENLSRGFGRQGKRTFMAERQYTRMEDWLTAKLAYEGLPSKTYLSKTLAQYTSKTCSNCGFTITSADYDRVLEKLKKTATGWMTTINGKELKVEGQITYYNRYKRQNVVKDLSVELDRLSEESVNNDISSWTKGRSGEALSLLKKRFSHRPVQEKFVCLNCGFETHADEQAALNIARSWLFLRSQEYKKYQTNKTTGNTDKRAFVETWQSFYRKKLKEVWKPAV

SEQ ID NO: 32414 - protein, 979 aa, synthetic construct
  REGION 1..979: note = engineered CasX variant
QEIKGRINKIRRRLVKDSNTKKAGKTGPMKTLLVRVMTPDLRERLENLRKKPENIPQPISNTSRANLNKLLTDYTEMKKAILHVYWEEFQKDPVGLMSRVAQPASKKIDQNKLKPEMDEKGNLTTAGFACSQCGQPLFVYKLEQVSEKGKAYTNYVGRCNVAEHEKLILLAQLKPEKDSDEAVTYSLGKFGQRALDFYSIHVTKESTHPVKPLAQIAGNRYASTPVGKALSDACMGTIASFLSKYQDIIIEHQKVVKGNQKRLESLRELAGKENLEYPSVTLPPQPHTKEGVDAYNEVIARVRMWVNLNLWQKLKLSRDDAKPLLRLKGFPSFPLVERQANEVDWWDMVCNVKKLINEKKEDGKVFWQNLAGYKRQEALRPYLSSEEDRKKGKKFARYQLGDLLLHLEKKHGEDWGKVYDEAWERIDKKVEGLSKHIKLEEERRSEDAQSKAALTDWLRAKASFVIEGLKEADKDEFCRCELKLQKWYGDLRGKPFAIEAENSILDISGFSKQYNCAFIWQKDGVKKLNLYLIINYFKGGKLRFKKIKPEAFEANRFYTVINKKSGEIVPMEVNFNFDDPNLIILPLAFGKRQGREFIWNDLLSLETGSLKLANGRVIEKTLYNRRTRQDEPALFVALTFERREVLDSSNIKPMNLIGVDRGENIPAVIALTDPEGCPLSRFKDSLGNPTHILRIGESYKEKQRTIQAKKEVEQRRAGGYSRKYASKAKNLADDMVRNTARDLLYYAVTQDAMLIFENLSRGFGRQGKRTFMAERQYTRMEDWLTAKLAYEGLPSKTYLSKTLAQYTSKTCSNCGFTITSADYDRVLEKLKKTATGWMTTINGKELKVEGQITYYNRYKRQNVVKDLSVELDRLSEESVNNDISSWTKGRSGEALSLLKKRFSHRPVQEKFVCLNCGFETHADEQAALNIARSWLFLRSQEYKKYQTNKTTGNTDKRAFVETWQSFYRKKLKEVWKPAV

SEQ ID NO: 32415 - protein, 979 aa, synthetic construct
  REGION 1..979: note = engineered CasX variant
QEIKGRINKIRRRLVKDSNTKKAGKTGPMKTLLVRVMTPDLRERLENLRKKPENIPQPISNTSRANLNKLLTDYTEMKKAILHVYWEEFQKDPVGLMSRVAQPASKKIDQNKLKPEMDEKGNLTTAGFACSQCGQPLFVYKLEQVSEKGKAYTNYVGRCNVAEHEKLILLAQLKPEKDSDEAVTYSLGKFGQRALDFYSIHVTKESTHPVKPLAQIAGNRYASAPVGKALSDACMGTIASFLSKYQDIIIEHQKVVKGNQKRLESLRELAGKENLEYPSVTLPPQPHTKEGVDAYNEVIARVRMWVNLNLWQKLKLSRDDAKPLLRLKGFPSFPLVERQANEVDWWDMVCNVKKLINEKKEDGKVFWQNLAGYKRQEALRPYLSSEEDRKKGKKFARYQLGDLLLHLEKKHGEDWGKVYDEAWERIDKKVEGLSKHIKLEEERRSEDAQSKAALTDWLRAKASFVIEGLKEADKDEFCRCELKLQKWYGDLRGKPFAIEAENSILDISGFSKQYNCAFIWQKDGVKKLNLYLIINYFKGGKLRFKKIKPEAFEANRFYTVINKKSGEIVPMEVNFNFDDPNLIILPLAFGKRQGREFIWNDLLSLETGSLKLANGRVIEKTLYNRRTRQDEPALFVALTFERREVLDSSNIKPMNLIGVDRGENIPAVIALTDPEGCPLSRFKDSLGNPTHILRIGESYKEKQRTIQAKKEVEQRRAGGYSRKYASKAKNLADDMVRNTARDLLYYAVTQDAMLIFENLSRGFGRQGKRTFMAERQYTRMEDWLTAKLAYEGLPSKTYLSKTLAQYTSKTCSNCGFTITSADYDRVLEKLKKTATGWMTTINGKELKVEGQITYYNRYKRQNVVKDLSVELDRLSEESVNNDISSWTKGRSGEALSLLKKRFSHRPVQEKFVCLNCGFETHADEQAALNIARSWLFLRSQEYKKYQTNKTTGNTDKRAFVETWQSFYRKKLKEVWKPAV

SEQ ID NO: 32416 - protein, 979 aa, synthetic construct
  REGION 1..979: note = engineered CasX variant
QEIKGRINKIRRRLVKDSNTKKAGKTGPMKTLLVRVMTPDLRERLENLRKKPENIPQPISNTSRANLNKLLTDYTEMKKAILHVYWEEFQKDPVGLMSRVAQPASKKIDQNKLKPEMDEKGNLTTAGFACSQCGQPLFVYKLEQVSEKGKAYTNYVGRCNVAEHEKLILLAQLKPEKDSDEAVTYSLGKFGQRALDFYSIHVTKESTHPVKPLAQIAGNRYASVPVGKALSDACMGTIASFLSKYQDIIIEHQKVVKGNQKRLESLRELAGKENLEYPSVTLPPQPHTKEGVDAYNEVIARVRMWVNLNLWQKLKLSRDDAKPLLRLKGFPSFPLVERQANEVDWWDMVCNVKKLINEKKEDGKVFWQNLAGYKRQEALRPYLSSEEDRKKGKKFARYQLGDLLLHLEKKHGEDWGKVYDEAWERIDKKVEGLSKHIKLEEERRSEDAQSKAALTDWLRAKASFVIEGLKEADKDEFCRCELKLQKWYGDLRGKPFAIEAENSILDISGFSKQYNCAFIWQKDGVKKLNLYLIINYFKGGKLRFKKIKPEAFEANRFYTVINKKSGEIVPMEVNFNFDDPNLIILPLAFGKRQGREFIWNDLLSLETGSLKLANGRVIEKTLYNRRTRQDEPALFVALTFERREVLDSSNIKPMNLIGVDRGENIPAVIALTDPEGCPLSRFKDSLGNPTHILRIGESYKEKQRTIQAKKEVEQRRAGGYSRKYASKAKNLADDMVRNTARDLLYYAVTQDAMLIFENLSRGFGRQGKRTFMAERQYTRMEDWLTAKLAYEGLPSKTYLSKTLAQYTSKTCSNCGFTITSADYDRVLEKLKKTATGWMTTINGKELKVEGQITYYNRYKRQNVVKDLSVELDRLSEESVNNDISSWTKGRSGEALSLLKKRFSHRPVQEKFVCLNCGFETHADEQAALNIARSWLFLRSQEYKKYQTNKTTGNTDKRAFVETWQSFYRKKLKEVWKPAV

SEQ ID NO: 32417 - protein, 979 aa, synthetic construct
  REGION 1..979: note = engineered CasX variant
QEIKGRINKIRRRLVKDSNTKKAGKTGPMKTLLVRVMTPDLRERLENLRKKPENIPQPISNTSRANLNKLLTDYTEMKKAILHVYWEEFQKDPVGLMSRVAQPASKKIDQNKLKPEMDEKGNLTTAGFACSQCGQPLFVYKLEQVSEKGKAYTNYVGRCNVAEHEKLIKLAQLKPEKDSDEAVTYSLGKFGQRALDFYSIHVTKESTHPVKPLAQIAGNRYASGPVGKALSDACMGTIASFLSKYQDIIIEHQKVVKGNQKRLESLRELAGKENLEYPSVTLPPQPHTKEGVDAYNEVIARVRMWVNLNLWQKLKLSRDDAKPLLRLKGFPSFPLVERQANEVDWWDMVCNVKKLINEKKEDGKVFWQNLAGYKRQEALRPYLSSEEDRKKGKKFARYQLGDLLLHLEKKHGEDWGKVYDEAWERIDKKVEGLSKHIKLEEERRSEDAQSKAALTDWLRAKASFVIEGLKEADKDEFCRCELKLQKWYGDLRGKPFAIEAENSILDISGFSKQYNCAFIWQKDGVKKLNLYLIINYFKGGKLRFKKIKPEAFEANRFYTVINKKSGEIVPMEVNFNFDDPNLIILPLAFGKRQGREFIWNDLLSLETGSLKLANGRVIEKTLYNRRTRQDEPALFVALTFERREVLDSSNIKPMNLIGVDRGENIPAVIALTDPEGCPLSRFKDSLGNPTHILRIGESYKEKQRTIQAKKEVEQRRAGGYSRKYASKAKNLADDMVRNTARDLLYYAVTQDAMLIFENLSRGFGRQGKRTFMAERQYTRMEDWLTAKLAYEGLPSKTYLSKTLAQYTSKTCSNCGFTITSADYDRVLEKLKKTATGWMTTINGKELKVEGQITYYNRYKRQNVVKDLSVELDRLSEESVNNDISSWTKGRSGEALSLLKKRFSHRPVQEKFVCLNCGFETHADEQAALNIARSWLFLRSQEYKKYQTNKTTGNTDKRAFVETWQSFYRKKLKEVWKPAV

SEQ ID NO: 32418 - protein, 978 aa, synthetic construct
  REGION 1..978: note = engineered CasX variant
QEIKGRINKIRRRLVKDSNTKKAGKTGPMKTLLVRVMTPDLRERLENLRKKPENIPQPISNTSRANLNKLLTDYTEMKKAILHVYWEEFQKDPVGLMSRVAQPASKKIDQNKLKPEMDEKGNLTTAGFACSQCGQPLFVYKLEQVSEKGKAYTNYVGRCNVAEHEKLILLAQLKPEKDSDEAVTYSLGKFGQRALDFYSIHVTKESTHPVKPLAQIAGNRYASPVGKALSDACMGTIASFLSKYQDIIIEHQKVVKGNQKRLESLRELAGKENLEYPSVTLPPQPHTKEGVDAYNEVIARVRMWVNLNLWQKLKLSRDDAKPLLRLKGFPSFPLVERQANEVDWWDMVCNVKKLINEKKEDGKVFWQNLAGYKRQEALRPYLSSEEDRKKGKKFARYQLGDLLLHLEKKHGEDWGKVYDEAWERIDKKVEGLSKHIKLEEERRSEDAQSKAALTDWLRAKASFVIEGLKEADKDEFCRCELKLQKWYGDLRGKPFAIEAENSILDISGFSKQYNCAFIWQKDGVKKLNLYLIINYFKGGKLRFKKIKPEAFEANRFYTVINKKSGEIVPMEVNFNFDDPNLIILPLAFGKRQGREFIWNDLLSLETGSLKLANGRVIEKTLYNRRTRQDEPALFVALTFERREVLDSSNIKPMNLIGVDRGENIPAVIALTDPEGCPLSRFKDSLGNPTHILRIGESYKEKQRTIQAKKEVEQRRAGGYSRKYASKAKNLADDMVRNTARDLLYYAVTQDAMLIFENLSRGFGRQGKRTFMAERQYTRMEDWLTAKLAYEGLPSKTYLSKTLAQYTSKTCSNCGFTITSADYDRVLEKLKKTATGWMTTINGKELKVEGQITYYNRYKRQNVVKDLSVELDRLSEESVNNDISSWTKGRSGEALSLLKKRFSHRPVQEKFVCLNCGFETHADEQAALNIARSWLFLRSQEYKKYQTNKTTGNTDKRAFVETWQSFYRKKLKEVWKPAV

SEQ ID NO: 32419 - protein, 979 aa, synthetic construct
  REGION 1..979: note = engineered CasX variant
QEIKGRINKIRRRLVKDSNTKKAGKTGPMKTLLVRVMTPDLRERLENLRKKPENIPQPISNTSRANLNKLLTDYTEMKKAILHVYWEEFQKDPVGLMSRVAQPASKKIDQNKLKPEMDEKGNLTTAGFACSQCGQPLFVYKLEQVSEKGKAYTNYFGRCNVAEHEKLILLAQLKPEKDSDEAVTYSLGKFGQRALDFYSIHVTKESTHPVKPLAQIAGNRYASYPVGKALSDACMGTIASFLSKYQDIIIEHQKVVKGNQKRLESLRELAGKENLEYPSVTLPPQPHTKEGVDAYNEVIARVRMWVNLNLWQKLKLSRDDAKPLLRLKGFPSFPLVERQANEVDWWDMVCNVKKLINEKKEDGKVFWQNLAGYKRQEALRPYLSSEEDRKKGKKFARYQLGDLLLHLEKKHGEDWGKVYDEAWERIDKKVEGLSKHIKLEEERRSEDAQSKAALTDWLRAKASFVIEGLKEADKDEFCRCELKLQKWYGDLRGKPFAIEAENSILDISGFSKQYNCAFIWQKDGVKKLNLYLIINYFKGGKLRFKKIKPEAFEANRFYTVINKKSGEIVPMEVNFNFDDPNLIILPLAFGKRQGREFIWNDLLSLETGSLKLANGRVIEKTLYNRRTRQDEPALFVALTFERREVLDSSNIKPMNLIGVDRGENIPAVIALTDPEGCPLSRFKDSLGNPTHILRIGESYKEKQRTIQAKKEVEQRRAGGYSRKYASKAKNLADDMVRNTARDLLYYAVTQDAMLIFENLSRGFGRQGKRTFMAERQYTRMEDWLTAKLAYEGLASKTYLSKTLAQYTSKTCSNCGFTITSADYDRVLEKLKKTATGWMTTINGKELKVEGQITYYNRYKRQNVVKDLSVELDRLSEESVNNDISSWTKGRSGEALSLLKKRFSHRPVQEKFVCLNCGFETHADEQAALNIARSWLFLRSQEYKKYQTNKTTGNTDKRAFVETWQSFYRKKLKEVWKPAV

SEQ ID NO: 32420 - protein, 979 aa, synthetic construct
  REGION 1..979: note = engineered CasX variant
QEIKGRINKIRRRLVKDSNTKKAGKTGPMKTLLVRVMTPDLRERLENLRKKPENIPQPISNTSRANLNKLLTDYTEMKKAILHVYWEEFQKDPVGLMSRVAQPASKKIDQNKLKPEMDEKGNLTTAGFACSQCGQPLFVYKLEQVSEKGKAYTNYFGRCNVAEHEKLILLAQLKPEKDSDEAVTYSLGKFGQRALDFYSIHVTKESTHPVKPLAQIAGNRYASHPVGKALSDACMGTIASFLSKYQDIIIEHQKVVKGNQKRLESLRELAGKENLEYPSVTLPPQPHTKEGVDAYNEVIARVRMWVNLNLWQKLKLSRDDAKPLLRLKGFPSFPLVERQANEVDWWDMVCNVKKLINEKKEDGKVFWQNLAGYKRQEALRPYLSSEEDRKKGKKFARYQLGDLLLHLEKKHGEDWGKVYDEAWERIDKKVEGLSKHIKLEEERRSEDAQSKAALTDWLRAKASFVIEGLKEADKDEFCRCELKLQKWYGDLRGKPFAIEAENSILDISGFSKQYNCAFIWQKDGVKKLNLYLIINYFKGGKLRFKKIKPEAFEANRFYTVINKKSGEIVPMEVNFNFDDPNLIILPLAFGKRQGREFIWNDLLSLETGSLKLANGRVIEKTLYNRRTRQDEPALFVALTFERREVLDSSNIKPMNLIGVDRGENIPAVIALTDPEGCPLSRFKDSLGNPTHILRIGESYKEKQRTIQAKKEVEQRRAGGYSRKYASKAKNLADDMVRNTARDLLYYAVTQDAMLIFENLSRGFGRQGKRTFMAERQYTRMEDWLTAKLAYEGLASKTYLSKTLAQYTSKTCSNCGFTITSADYDRVLEKLKKTATGWMTTINGKELKVEGQITYYNRYKRQNVVKDLSVELDRLSEESVNNDISSWTKGRSGEALSLLKKRFSHRPVQEKFVCLNCGFETHADEQAALNIARSWLFLRSQEYKKYQTNKTTGNTDKRAFVETWQSFYRKKLKEVWKPAV

SEQ ID NO: 32421 - protein, 979 aa, synthetic construct
  REGION 1..979: note = engineered CasX variant
QEIKGRINKIRRRLVKDSNTKKAGKTGPMKTLLVRVMTPDLRERLENLRKKPENIPQPISNTSRANLNKLLTDYTEMKKAILHVYWEEFQKDPVGLMSRVAQPASKKIDQNKLKPEMDEKGNLTTAGFACSQCGQPLFVYKLEQVSEKGKAYTNYFGRCNVAEHEKLILLAQLKPEKDSDEAVTYSLGKFGQRALDFYSIHVTKESTHPVKPLAQIAGNRYASSPVGKALSDACMGTIASFLSKYQDIIIEHQKVVKGNQKRLESLRELAGKENLEYPSVTLPPQPHTKEGVDAYNEVIARVRMWVNLNLWQKLKLSRDDAKPLLRLKGFPSFPLVERQANEVDWWDMVCNVKKLINEKKEDGKVFWQNLAGYKRQEALRPYLSSEEDRKKGKKFARYQLGDLLLHLEKKHGEDWGKVYDEAWERIDKKVEGLSKHIKLEEERRSEDAQSKAALTDWLRAKASFVIEGLKEADKDEFCRCELKLQKWYGDLRGKPFAIEAENSILDISGFSKQYNCAFIWQKDGVKKLNLYLIINYFKGGKLRFKKIKPEAFEANRFYTVINKKSGEIVPMEVNFNFDDPNLIILPLAFGKRQGREFIWNDLLSLETGSLKLANGRVIEKTLYNRRTRQDEPALFVALTFERREVLDSSNIKPMNLIGVDRGENIPAVIALTDPEGCPLSRFKDSLGNPTHILRIGESYKEKQRTIQAKKEVEQRRAGGYSRKYASKAKNLADDMVRNTARDLLYYAVTQDAMLIFENLSRGFGRQGKRTFMAERQYTRMEDWLTAKLAYEGLASKTYLSKTLAQYTSKTCSNCGFTITSADYDRVLEKLKKTATGWMTTINGKELKVEGQITYYNRYKRQNVVKDLSVELDRLSEESVNNDISSWTKGRSGEALSLLKKRFSHRPVQEKFVCLNCGFETHADEQAALNIARSWLFLRSQEYKKYQTNKTTGNTDKRAFVETWQSFYRKKLKEVWKPAV

SEQ ID NO: 32422 - protein, 979 aa, synthetic construct
  REGION 1..979: note = engineered CasX variant
QEIKGRINKIRRRLVKDSNTKKAGKTGPMKTLLVRVMTPDLRERLENLRKKPENIPQPISNTSRANLNKLLTDYTEMKKAILHVYWEEFQKDPVGLMSRVAQPASKKIDQNKLKPEMDEKGNLTTAGFACSQCGQPLFVYKLEQVSEKGKAYTNYFGRCNVAEHEKLILLAQLKPEKDSDEAVTYSLGKFGQRALDFYSIHVTKESTHPVKPLAQIAGNRYASTPVGKALSDACMGTIASFLSKYQDIIIEHQKVVKGNQKRLESLRELAGKENLEYPSVTLPPQPHTKEGVDAYNEVIARVRMWVNLNLWQKLKLSRDDAKPLLRLKGFPSFPLVERQANEVDWWDMVCNVKKLINEKKEDGKVFWQNLAGYKRQEALRPYLSSEEDRKKGKKFARYQLGDLLLHLEKKHGEDWGKVYDEAWERIDKKVEGLSKHIKLEEERRSEDAQSKAALTDWLRAKASFVIEGLKEADKDEFCRCELKLQKWYGDLRGKPFAIEAENSILDISGFSKQYNCAFIWQKDGVKKLNLYLIINYFKGGKLRFKKIKPEAFEANRFYTVINKKSGEIVPMEVNFNFDDPNLIILPLAFGKRQGREFIWNDLLSLETGSLKLANGRVIEKTLYNRRTRQDEPALFVALTFERREVLDSSNIKPMNLIGVDRGENIPAVIALTDPEGCPLSRFKDSLGNPTHILRIGESYKEKQRTIQAKKEVEQRRAGGYSRKYASKAKNLADDMVRNTARDLLYYAVTQDAMLIFENLSRGFGRQGKRTFMAERQYTRMEDWLTAKLAYEGLASKTYLSKTLAQYTSKTCSNCGFTITSADYDRVLEKLKKTATGWMTTINGKELKVEGQITYYNRYKRQNVVKDLSVELDRLSEESVNNDISSWTKGRSGEALSLLKKRFSHRPVQEKFVCLNCGFETHADEQAALNIARSWLFLRSQEYKKYQTNKTTGNTDKRAFVETWQSFYRKKLKEVWKPAV

SEQ ID NO: 32423 - protein, 979 aa, synthetic construct
  REGION 1..979: note = engineered CasX variant
QEIKGRINKIRRRLVKDSNTKKAGKTGPMKTLLVRVMTPDLRERLENLRKKPENIPQPISNTSRANLNKLLTDYTEMKKAILHVYWEEFQKDPVGLMSRVAQPASKKIDQNKLKPEMDEKGNLTTAGFACSQCGQPLFVYKLEQVSEKGKAYTNYFGRCNVAEHEKLILLAQLKPEKDSDEAVTYSLGKFGQRALDFYSIHVTKESTHPVKPLAQIAGNRYASAPVGKALSDACMGTIASFLSKYQDIIIEHQKVVKGNQKRLESLRELAGKENLEYPSVTLPPQPHTKEGVDAYNEVIARVRMWVNLNLWQKLKLSRDDAKPLLRLKGFPSFPLVERQANEVDWWDMVCNVKKLINEKKEDGKVFWQNLAGYKRQEALRPYLSSEEDRKKGKKFARYQLGDLLLHLEKKHGEDWGKVYDEAWERIDKKVEGLSKHIKLEEERRSEDAQSKAALTDWLRAKASFVIEGLKEADKDEFCRCELKLQKWYGDLRGKPFAIEAENSILDISGFSKQYNCAFIWQKDGVKKLNLYLIINYFKGGKLRFKKIKPEAFEANRFYTVINKKSGEIVPMEVNFNFDDPNLIILPLAFGKRQGREFIWNDLLSLETGSLKLANGRVIEKTLYNRRTRQDEPALFVALTFERREVLDSSNIKPMNLIGVDRGENIPAVIALTDPEGCPLSRFKDSLGNPTHILRIGESYKEKQRTIQAKKEVEQRRAGGYSRKYASKAKNLADDMVRNTARDLLYYAVTQDAMLIFENLSRGFGRQGKRTFMAERQYTRMEDWLTAKLAYEGLASKTYLSKTLAQYTSKTCSNCGFTITSADYDRVLEKLKKTATGWMTTINGKELKVEGQITYYNRYKRQNVVKDLSVELDRLSEESVNNDISSWTKGRSGEALSLLKKRFSHRPVQEKFVCLNCGFETHADEQAALNIARSWLFLRSQEYKKYQTNKTTGNTDKRAFVETWQSFYRKKLKEVWKPAV

SEQ ID NO: 32424 - protein, 979 aa, synthetic construct
  REGION 1..979: note = engineered CasX variant
QEIKGRINKIRRRLVKDSNTKKAGKTGPMKTLLVRVMTPDLRERLENLRKKPENIPQPISNTSRANLNKLLTDYTEMKKAILHVYWEEFQKDPVGLMSRVAQPASKKIDQNKLKPEMDEKGNLTTAGFACSQCGQPLFVYKLEQVSEKGKAYTNYFGRCNVAEHEKLILLAQLKPEKDSDEAVTYSLGKFGQRALDFYSIHVTKESTHPVKPLAQIAGNRYASVPVGKALSDACMGTIASFLSKYQDIIIEHQKVVKGNQKRLESLRELAGKENLEYPSVTLPPQPHTKEGVDAYNEVIARVRMWVNLNLWQKLKLSRDDAKPLLRLKGFPSFPLVERQANEVDWWDMVCNVKKLINEKKEDGKVFWQNLAGYKRQEALRPYLSSEEDRKKGKKFARYQLGDLLLHLEKKHGEDWGKVYDEAWERIDKKVEGLSKHIKLEEERRSEDAQSKAALTDWLRAKASFVIEGLKEADKDEFCRCELKLQKWYGDLRGKPFAIEAENSILDISGFSKQYNCAFIWQKDGVKKLNLYLIINYFKGGKLRFKKIKPEAFEANRFYTVINKKSGEIVPMEVNFNFDDPNLIILPLAFGKRQGREFIWNDLLSLETGSLKLANGRVIEKTLYNRRTRQDEPALFVALTFERREVLDSSNIKPMNLIGVDRGENIPAVIALTDPEGCPLSRFKDSLGNPTHILRIGESYKEKQRTIQAKKEVEQRRAGGYSRKYASKAKNLADDMVRNTARDLLYYAVTQDAMLIFENLSRGFGRQGKRTFMAERQYTRMEDWLTAKLAYEGLASKTYLSKTLAQYTSKTCSNCGFTITSADYDRVLEKLKKTATGWMTTINGKELKVEGQITYYNRYKRQNVVKDLSVELDRLSEESVNNDISSWTKGRSGEALSLLKKRFSHRPVQEKFVCLNCGFETHADEQAALNIARSWLFLRSQEYKKYQTNKTTGNTDKRAFVETWQSFYRKKLKEVWKPAV

SEQ ID NO: 32425 - protein, 979 aa, synthetic construct
  REGION 1..979: note = engineered CasX variant
QEIKGRINKIRRRLVKDSNTKKAGKTGPMKTLLVRVMTPDLRERLENLRKKPENIPQPISNTSRANLNKLLTDYTEMKKAILHVYWEEFQKDPVGLMSRVAQPASKKIDQNKLKPEMDEKGNLTTAGFACSQCGQPLFVYKLEQVSEKGKAYTNYFGRCNVAEHEKLIKLAQLKPEKDSDEAVTYSLGKFGQRALDFYSIHVTKESTHPVKPLAQIAGNRYASGPVGKALSDACMGTIASFLSKYQDIIIEHQKVVKGNQKRLESLRELAGKENLEYPSVTLPPQPHTKEGVDAYNEVIARVRMWVNLNLWQKLKLSRDDAKPLLRLKGFPSFPLVERQANEVDWWDMVCNVKKLINEKKEDGKVFWQNLAGYKRQEALRPYLSSEEDRKKGKKFARYQLGDLLLHLEKKHGEDWGKVYDEAWERIDKKVEGLSKHIKLEEERRSEDAQSKAALTDWLRAKASFVIEGLKEADKDEFCRCELKLQKWYGDLRGKPFAIEAENSILDISGFSKQYNCAFIWQKDGVKKLNLYLIINYFKGGKLRFKKIKPEAFEANRFYTVINKKSGEIVPMEVNFNFDDPNLIILPLAFGKRQGREFIWNDLLSLETGSLKLANGRVIEKTLYNRRTRQDEPALFVALTFERREVLDSSNIKPMNLIGVDRGENIPAVIALTDPEGCPLSRFKDSLGNPTHILRIGESYKEKQRTIQAKKEVEQRRAGGYSRKYASKAKNLADDMVRNTARDLLYYAVTQDAMLIFENLSRGFGRQGKRTFMAERQYTRMEDWLTAKLAYEGLASKTYLSKTLAQYTSKTCSNCGFTITSADYDRVLEKLKKTATGWMTTINGKELKVEGQITYYNRYKRQNVVKDLSVELDRLSEESVNNDISSWTKGRSGEALSLLKKRFSHRPVQEKFVCLNCGFETHADEQAALNIARSWLFLRSQEYKKYQTNKTTGNTDKRAFVETWQSFYRKKLKEVWKPAV

SEQ ID NO: 32426 - protein, 978 aa, synthetic construct
  REGION 1..978: note = engineered CasX variant
QEIKGRINKIRRRLVKDSNTKKAGKTGPMKTLLVRVMTPDLRERLENLRKKPENIPQPISNTSRANLNKLLTDYTEMKKAILHVYWEEFQKDPVGLMSRVAQPASKKIDQNKLKPEMDEKGNLTTAGFACSQCGQPLFVYKLEQVSEKGKAYTNYFGRCNVAEHEKLILLAQLKPEKDSDEAVTYSLGKFGQRALDFYSIHVTKESTHPVKPLAQIAGNRYASPVGKALSDACMGTIASFLSKYQDIIIEHQKVVKGNQKRLESLRELAGKENLEYPSVTLPPQPHTKEGVDAYNEVIARVRMWVNLNLWQKLKLSRDDAKPLLRLKGFPSFPLVERQANEVDWWDMVCNVKKLINEKKEDGKVFWQNLAGYKRQEALRPYLSSEEDRKKGKKFARYQLGDLLLHLEKKHGEDWGKVYDEAWERIDKKVEGLSKHIKLEEERRSEDAQSKAALTDWLRAKASFVIEGLKEADKDEFCRCELKLQKWYGDLRGKPFAIEAENSILDISGFSKQYNCAFIWQKDGVKKLNLYLIINYFKGGKLRFKKIKPEAFEANRFYTVINKKSGEIVPMEVNFNFDDPNLIILPLAFGKRQGREFIWNDLLSLETGSLKLANGRVIEKTLYNRRTRQDEPALFVALTFERREVLDSSNIKPMNLIGVDRGENIPAVIALTDPEGCPLSRFKDSLGNPTHILRIGESYKEKQRTIQAKKEVEQRRAGGYSRKYASKAKNLADDMVRNTARDLLYYAVTQDAMLIFENLSRGFGRQGKRTFMAERQYTRMEDWLTAKLAYEGLASKTYLSKTLAQYTSKTCSNCGFTITSADYDRVLEKLKKTATGWMTTINGKELKVEGQITYYNRYKRQNVVKDLSVELDRLSEESVNNDISSWTKGRSGEALSLLKKRFSHRPVQEKFVCLNCGFETHADEQAALNIARSWLFLRSQEYKKYQTNKTTGNTDKRAFVETWQSFYRKKLKEVWKPAV

SEQ ID NO: 32427 - protein, 979 aa, synthetic construct
  REGION 1..979: note = engineered CasX variant
QEIKGRINKIRRRLVKDSNTKKAGKTGPMKTLLVRVMTPDLRERLENLRKKPENIPQPISNTSRANLNKLLTDYTEMKKAILHVYWEEFQKDPVGLMSRVAQPASKKIDQNKLKPEMDEKGNLTTAGFACSQCGQPLFVYKLEQVSEKGKAYTNYFGRCNVAEHEKLILLAQLKPEKDSDEAVTYSLGKFGQRALDFYSIHVTKESTHPVKPLAQIAGNRYASYPVGKALSDACMGTIASFLSKYQDIIIEHQKVVKGNQKRLESLRELAGKENLEYPSVTLPPQPHTKEGVDAYNEVIARVRMWVNLNLWQKLKLSRDDAKPLLRLKGFPSFPLVERQANEVDWWDMVCNVKKLINEKKEDGKVFWQNLAGYKRQEALRPYLSSEEDRKKGKKFARYQLGDLLLHLEKKHGEDWGKVYDEAWERIDKKVEGLSKHIKLEEERRSEDAQSKAALTDWLRAKASFVIEGLKEADKDEFCRCELKLQKWYGDLRGKPFAIEAENSILDISGFSKQYNCAFIWQKDGVKKLNLYLIINYFKGGKLRFKKIKPEAFEANRFYTVINKKSGEIVPMEVNFNFDDPNLIILPLAFGKRQGREFIWNDLLSLETGSLKLANGRVIEKTLYNRRTRQDEPALFVALTFERREVLDSSNIKPMNLIGVDRGENIPAVIALTDPEGCPLSRFKDSLGNPTHILRIGESYKEKQRTIQAKKEVEQRRAGGYSRKYASKAKNLADDMVRNTARDLLYYAVTQDAMLIFENLSRGFGRQGKRTFMAERQYTRMEDWLTAKLAYEGLPSKVYLSKTLAQYTSKTCSNCGFTITSADYDRVLEKLKKTATGWMTTINGKELKVEGQITYYNRYKRQNVVKDLSVELDRLSEESVNNDISSWTKGRSGEALSLLKKRFSHRPVQEKFVCLNCGFETHADEQAALNIARSWLFLRSQEYKKYQTNKTTGNTDKRAFVETWQSFYRKKLKEVWKPAV

SEQ ID NO: 32428 - protein, 979 aa, synthetic construct
  REGION 1..979: note = engineered CasX variant
QEIKGRINKIRRRLVKDSNTKKAGKTGPMKTLLVRVMTPDLRERLENLRKKPENIPQPISNTSRANLNKLLTDYTEMKKAILHVYWEEFQKDPVGLMSRVAQPASKKIDQNKLKPEMDEKGNLTTAGFACSQCGQPLFVYKLEQVSEKGKAYTNYFGRCNVAEHEKLILLAQLKPEKDSDEAVTYSLGKFGQRALDFYSIHVTKESTHPVKPLAQIAGNRYASHPVGKALSDACMGTIASFLSKYQDIIIEHQKVVKGNQKRLESLRELAGKENLEYPSVTLPPQPHTKEGVDAYNEVIARVRMWVNLNLWQKLKLSRDDAKPLLRLKGFPSFPLVERQANEVDWWDMVCNVKKLINEKKEDGKVFWQNLAGYKRQEALRPYLSSEEDRKKGKKFARYQLGDLLLHLEKKHGEDWGKVYDEAWERIDKKVEGLSKHIKLEEERRSEDAQSKAALTDWLRAKASFVIEGLKEADKDEFCRCELKLQKWYGDLRGKPFAIEAENSILDISGFSKQYNCAFIWQKDGVKKLNLYLIINYFKGGKLRFKKIKPEAFEANRFYTVINKKSGEIVPMEVNFNFDDPNLIILPLAFGKRQGREFIWNDLLSLETGSLKLANGRVIEKTLYNRRTRQDEPALFVALTFERREVLDSSNIKPMNLIGVDRGENIPAVIALTDPEGCPLSRFKDSLGNPTHILRIGESYKEKQRTIQAKKEVEQRRAGGYSRKYASKAKNLADDMVRNTARDLLYYAVTQDAMLIFENLSRGFGRQGKRTFMAERQYTRMEDWLTAKLAYEGLPSKVYLSKTLAQYTSKTCSNCGFTITSADYDRVLEKLKKTATGWMTTINGKELKVEGQITYYNRYKRQNVVKDLSVELDRLSEESVNNDISSWTKGRSGEALSLLKKRFSHRPVQEKFVCLNCGFETHADEQAALNIARSWLFLRSQEYKKYQTNKTTGNTDKRAFVETWQSFYRKKLKEVWKPAV

SEQ ID NO: 32429 - protein, 979 aa, synthetic construct
  REGION 1..979: note = engineered CasX variant
QEIKGRINKIRRRLVKDSNTKKAGKTGPMKTLLVRVMTPDLRERLENLRKKPENIPQPISNTSRANLNKLLTDYTEMKKAILHVYWEEFQKDPVGLMSRVAQPASKKIDQNKLKPEMDEKGNLTTAGFACSQCGQPLFVYKLEQVSEKGKAYTNYFGRCNVAEHEKLILLAQLKPEKDSDEAVTYSLGKFGQRALDFYSIHVTKESTHPVKPLAQIAGNRYASSPVGKALSDACMGTIASFLSKYQDIIIEHQKVVKGNQKRLESLRELAGKENLEYPSVTLPPQPHTKEGVDAYNEVIARVRMWVNLNLWQKLKLSRDDAKPLLRLKGFPSFPLVERQANEVDWWDMVCNVKKLINEKKEDGKVFWQNLAGYKRQEALRPYLSSEEDRKKGKKFARYQLGDLLLHLEKKHGEDWGKVYDEAWERIDKKVEGLSKHIKLEEERRSEDAQSKAALTDWLRAKASFVIEGLKEADKDEFCRCELKLQKWYGDLRGKPFAIEAENSILDISGFSKQYNCAFIWQKDGVKKLNLYLIINYFKGGKLRFKKIKPEAFEANRFYTVINKKSGEIVPMEVNFNFDDPNLIILPLAFGKRQGREFIWNDLLSLETGSLKLANGRVIEKTLYNRRTRQDEPALFVALTFERREVLDSSNIKPMNLIGVDRGENIPAVIALTDPEGCPLSRFKDSLGNPTHILRIGESYKEKQRTIQAKKEVEQRRAGGYSRKYASKAKNLADDMVRNTARDLLYYAVTQDAMLIFENLSRGFGRQGKRTFMAERQYTRMEDWLTAKLAYEGLPSKVYLSKTLAQYTSKTCSNCGFTITSADYDRVLEKLKKTATGWMTTINGKELKVEGQITYYNRYKRQNVVKDLSVELDRLSEESVNNDISSWTKGRSGEALSLLKKRFSHRPVQEKFVCLNCGFETHADEQAALNIARSWLFLRSQEYKKYQTNKTTGNTDKRAFVETWQSFYRKKLKEVWKPAV

SEQ ID NO: 32430 - protein, 979 aa, synthetic construct
  REGION 1..979: note = engineered CasX variant
QEIKGRINKIRRRLVKDSNTKKAGKTGPMKTLLVRVMTPDLRERLENLRKKPENIPQPISNTSRANLNKLLTDYTEMKKAILHVYWEEFQKDPVGLMSRVAQPASKKIDQNKLKPEMDEKGNLTTAGFACSQCGQPLFVYKLEQVSEKGKAYTNYFGRCNVAEHEKLILLAQLKPEKDSDEAVTYSLGKFGQRALDFYSIHVTKESTHPVKPLAQIAGNRYASTPVGKALSDACMGTIASFLSKYQDIIIEHQKVVKGNQKRLESLRELAGKENLEYPSVTLPPQPHTKEGVDAYNEVIARVRMWVNLNLWQKLKLSRDDAKPLLRLKGFPSFPLVERQANEVDWWDMVCNVKKLINEKKEDGKVFWQNLAGYKRQEALRPYLSSEEDRKKGKKFARYQLGDLLLHLEKKHGEDWGKVYDEAWERIDKKVEGLSKHIKLEEERRSEDAQSKAALTDWLRAKASFVIEGLKEADKDEFCRCELKLQKWYGDLRGKPFAIEAENSILDISGFSKQYNCAFIWQKDGVKKLNLYLIINYFKGGKLRFKKIKPEAFEANRFYTVINKKSGEIVPMEVNFNFDDPNLIILPLAFGKRQGREFIWNDLLSLETGSLKLANGRVIEKTLYNRRTRQDEPALFVALTFERREVLDSSNIKPMNLIGVDRGENIPAVIALTDPEGCPLSRFKDSLGNPTHILRIGESYKEKQRTIQAKKEVEQRRAGGYSRKYASKAKNLADDMVRNTARDLLYYAVTQDAMLIFENLSRGFGRQGKRTFMAERQYTRMEDWLTAKLAYEGLPSKVYLSKTLAQYTSKTCSNCGFTITSADYDRVLEKLKKTATGWMTTINGKELKVEGQITYYNRYKRQNVVKDLSVELDRLSEESVNNDISSWTKGRSGEALSLLKKRFSHRPVQEKFVCLNCGFETHADEQAALNIARSWLFLRSQEYKKYQTNKTTGNTDKRAFVETWQSFYRKKLKEVWKPAV

SEQ ID NO: 32431 - protein, 979 aa, synthetic construct
  REGION 1..979: note = engineered CasX variant
QEIKGRINKIRRRLVKDSNTKKAGKTGPMKTLLVRVMTPDLRERLENLRKKPENIPQPISNTSRANLNKLLTDYTEMKKAILHVYWEEFQKDPVGLMSRVAQPASKKIDQNKLKPEMDEKGNLTTAGFACSQCGQPLFVYKLEQVSEKGKAYTNYFGRCNVAEHEKLILLAQLKPEKDSDEAVTYSLGKFGQRALDFYSIHVTKESTHPVKPLAQIAGNRYASAPVGKALSDACMGTIASFLSKYQDIIIEHQKVVKGNQKRLESLRELAGKENLEYPSVTLPPQPHTKEGVDAYNEVIARVRMWVNLNLWQKLKLSRDDAKPLLRLKGFPSFPLVERQANEVDWWDMVCNVKKLINEKKEDGKVFWQNLAGYKRQEALRPYLSSEEDRKKGKKFARYQLGDLLLHLEKKHGEDWGKVYDEAWERIDKKVEGLSKHIKLEEERRSEDAQSKAALTDWLRAKASFVIEGLKEADKDEFCRCELKLQKWYGDLRGKPFAIEAENSILDISGFSKQYNCAFIWQKDGVKKLNLYLIINYFKGGKLRFKKIKPEAFEANRFYTVINKKSGEIVPMEVNFNFDDPNLIILPLAFGKRQGREFIWNDLLSLETGSLKLANGRVIEKTLYNRRTRQDEPALFVALTFERREVLDSSNIKPMNLIGVDRGENIPAVIALTDPEGCPLSRFKDSLGNPTHILRIGESYKEKQRTIQAKKEVEQRRAGGYSRKYASKAKNLADDMVRNTARDLLYYAVTQDAMLIFENLSRGFGRQGKRTFMAERQYTRMEDWLTAKLAYEGLPSKVYLSKTLAQYTSKTCSNCGFTITSADYDRVLEKLKKTATGWMTTINGKELKVEGQITYYNRYKRQNVVKDLSVELDRLSEESVNNDISSWTKGRSGEALSLLKKRFSHRPVQEKFVCLNCGFETHADEQAALNIARSWLFLRSQEYKKYQTNKTTGNTDKRAFVETWQSFYRKKLKEVWKPAV

SEQ ID NO: 32432 - protein, 979 aa, synthetic construct
  REGION 1..979: note = engineered CasX variant
QEIKGRINKIRRRLVKDSNTKKAGKTGPMKTLLVRVMTPDLRERLENLRKKPENIPQPISNTSRANLNKLLTDYTEMKKAILHVYWEEFQKDPVGLMSRVAQPASKKIDQNKLKPEMDEKGNLTTAGFACSQCGQPLFVYKLEQVSEKGKAYTNYFGRCNVAEHEKLILLAQLKPEKDSDEAVTYSLGKFGQRALDFYSIHVTKESTHPVKPLAQIAGNRYASVPVGKALSDACMGTIASFLSKYQDIIIEHQKVVKGNQKRLESLRELAGKENLEYPSVTLPPQPHTKEGVDAYNEVIARVRMWVNLNLWQKLKLSRDDAKPLLRLKGFPSFPLVERQANEVDWWDMVCNVKKLINEKKEDGKVFWQNLAGYKRQEALRPYLSSEEDRKKGKKFARYQLGDLLLHLEKKHGEDWGKVYDEAWERIDKKVEGLSKHIKLEEERRSEDAQSKAALTDWLRAKASFVIEGLKEADKDEFCRCELKLQKWYGDLRGKPFAIEAENSILDISGFSKQYNCAFIWQKDGVKKLNLYLIINYFKGGKLRFKKIKPEAFEANRFYTVINKKSGEIVPMEVNFNFDDPNLIILPLAFGKRQGREFIWNDLLSLETGSLKLANGRVIEKTLYNRRTRQDEPALFVALTFERREVLDSSNIKPMNLIGVDRGENIPAVIALTDPEGCPLSRFKDSLGNPTHILRIGESYKEKQRTIQAKKEVEQRRAGGYSRKYASKAKNLADDMVRNTARDLLYYAVTQDAMLIFENLSRGFGRQGKRTFMAERQYTRMEDWLTAKLAYEGLPSKVYLSKTLAQYTSKTCSNCGFTITSADYDRVLEKLKKTATGWMTTINGKELKVEGQITYYNRYKRQNVVKDLSVELDRLSEESVNNDISSWTKGRSGEALSLLKKRFSHRPVQEKFVCLNCGFETHADEQAALNIARSWLFLRSQEYKKYQTNKTTGNTDKRAFVETWQSFYRKKLKEVWKPAV

SEQ ID NO: 32433 - protein, 979 aa, synthetic construct
  REGION 1..979: note = engineered CasX variant
QEIKGRINKIRRRLVKDSNTKKAGKTGPMKTLLVRVMTPDLRERLENLRKKPENIPQPISNTSRANLNKLLTDYTEMKKAILHVYWEEFQKDPVGLMSRVAQPASKKIDQNKLKPEMDEKGNLTTAGFACSQCGQPLFVYKLEQVSEKGKAYTNYFGRCNVAEHEKLIKLAQLKPEKDSDEAVTYSLGKFGQRALDFYSIHVTKESTHPVKPLAQIAGNRYASGPVGKALSDACMGTIASFLSKYQDIIIEHQKVVKGNQKRLESLRELAGKENLEYPSVTLPPQPHTKEGVDAYNEVIARVRMWVNLNLWQKLKLSRDDAKPLLRLKGFPSFPLVERQANEVDWWDMVCNVKKLINEKKEDGKVFWQNLAGYKRQEALRPYLSSEEDRKKGKKFARYQLGDLLLHLEKKHGEDWGKVYDEAWERIDKKVEGLSKHIKLEEERRSEDAQSKAALTDWLRAKASFVIEGLKEADKDEFCRCELKLQKWYGDLRGKPFAIEAENSILDISGFSKQYNCAFIWQKDGVKKLNLYLIINYFKGGKLRFKKIKPEAFEANRFYTVINKKSGEIVPMEVNFNFDDPNLIILPLAFGKRQGREFIWNDLLSLETGSLKLANGRVIEKTLYNRRTRQDEPALFVALTFERREVLDSSNIKPMNLIGVDRGENIPAVIALTDPEGCPLSRFKDSLGNPTHILRIGESYKEKQRTIQAKKEVEQRRAGGYSRKYASKAKNLADDMVRNTARDLLYYAVTQDAMLIFENLSRGFGRQGKRTFMAERQYTRMEDWLTAKLAYEGLPSKVYLSKTLAQYTSKTCSNCGFTITSADYDRVLEKLKKTATGWMTTINGKELKVEGQITYYNRYKRQNVVKDLSVELDRLSEESVNNDISSWTKGRSGEALSLLKKRFSHRPVQEKFVCLNCGFETHADEQAALNIARSWLFLRSQEYKKYQTNKTTGNTDKRAFVETWQSFYRKKLKEVWKPAV

SEQ ID NO: 32434 - protein, 978 aa, synthetic construct
  REGION 1..978: note = engineered CasX variant
QEIKGRINKIRRRLVKDSNTKKAGKTGPMKTLLVRVMTPDLRERLENLRKKPENIPQPISNTSRANLNKLLTDYTEMKKAILHVYWEEFQKDPVGLMSRVAQPASKKIDQNKLKPEMDEKGNLTTAGFACSQCGQPLFVYKLEQVSEKGKAYTNYFGRCNVAEHEKLILLAQLKPEKDSDEAVTYSLGKFGQRALDFYSIHVTKESTHPVKPLAQIAGNRYASPVGKALSDACMGTIASFLSKYQDIIIEHQKVVKGNQKRLESLRELAGKENLEYPSVTLPPQPHTKEGVDAYNEVIARVRMWVNLNLWQKLKLSRDDAKPLLRLKGFPSFPLVERQANEVDWWDMVCNVKKLINEKKEDGKVFWQNLAGYKRQEALRPYLSSEEDRKKGKKFARYQLGDLLLHLEKKHGEDWGKVYDEAWERIDKKVEGLSKHIKLEEERRSEDAQSKAALTDWLRAKASFVIEGLKEADKDEFCRCELKLQKWYGDLRGKPFAIEAENSILDISGFSKQYNCAFIWQKDGVKKLNLYLIINYFKGGKLRFKKIKPEAFEANRFYTVINKKSGEIVPMEVNFNFDDPNLIILPLAFGKRQGREFIWNDLLSLETGSLKLANGRVIEKTLYNRRTRQDEPALFVALTFERREVLDSSNIKPMNLIGVDRGENIPAVIALTDPEGCPLSRFKDSLGNPTHILRIGESYKEKQRTIQAKKEVEQRRAGGYSRKYASKAKNLADDMVRNTARDLLYYAVTQDAMLIFENLSRGFGRQGKRTFMAERQYTRMEDWLTAKLAYEGLPSKVYLSKTLAQYTSKTCSNCGFTITSADYDRVLEKLKKTATGWMTTINGKELKVEGQITYYNRYKRQNVVKDLSVELDRLSEESVNNDISSWTKGRSGEALSLLKKRFSHRPVQEKFVCLNCGFETHADEQAALNIARSWLFLRSQEYKKYQTNKTTGNTDKRAFVETWQSFYRKKLKEVWKPAV

SEQ ID NO: 32435 - protein, 980 aa, synthetic construct
  REGION 1..980: note = engineered CasX variant
QEIKGRINKIRRRLVKDSNTKKAGKTGPMKTLLVRVMTPDLRERLENLRKKPENIPQPISNTSRANLNKLLTDYTEMKKAILHVYWEEFQKDPVGLMSRVAQPASKKIDQNKLKPEMDEKGNLTTAGFACSQCGQPLFVYKLEQVSEKGKAYTNYFGRCNVAEHEKLILLAQLKPEKDSDEAVTYSLGKFGQRALDFYSIHVTKESTHPVKPLAQIAGNRYASYPVGKALSDACMGTIASFLSKYQDIIIEHQKVVKGNQKRLESLRELAGKENLEYPSVTLPPQPHTKEGVDAYNEVIARVRMWVNLNLWQKLKLSRDDAKPLLRLKGFPSFPLVERQANEVDWWDMVCNVKKLINEKKEDGKVFWQNLAGYKRQEALRPYLSSEEDRKKGKKFARYQLGDLLLHLEKKHGEDWGKVYDEAWERIDKKVEGLSKHIKLEEERRSEDAQSKAALTDWLRAKASFVIEGLKEADKDEFCRCELKLQKWYGDLRGKPFAIEAENSILDISGFSKQYNCAFIWQKDGVKKLNLYLIINYFKGGKLRFKKIKPEAFEANRFYTVINKKSGEIVPMEVNFNFDDPNLIILPLAFGKRQGREFIWNDLLSLETGSLKLANGRVIEKTLYNRRTRQDEPALFVALTFERREVLDSSNIKPMNLIGVDRGENIPAVIALTDPEGCPLSRFKDSLGNPTHILRIGESYKEKQRTIQAKKEVEQRRAGGYSRKYASKAKNLADDMVRNTARDLLYYAVTQDAMLIFENLSRGFGRQGKRTFMAERQYTRMEDWLTAKLAYEGPLPSKTYLSKTLAQYTSKTCSNCGFTITSADYDRVLEKLKKTATGWMTTINGKELKVEGQITYYNRYKRQNVVKDLSVELDRLSEESVNNDISSWTKGRSGEALSLLKKRFSHRPVQEKFVCLNCGFETHADEQAALNIARSWLFLRSQEYKKYQTNKTTGNTDKRAFVETWQSFYRKKLKEVWKPAV

SEQ ID NO: 32436 - protein, 980 aa, synthetic construct
  REGION 1..980: note = engineered CasX variant
QEIKGRINKIRRRLVKDSNTKKAGKTGPMKTLLVRVMTPDLRERLENLRKKPENIPQPISNTSRANLNKLLTDYTEMKKAILHVYWEEFQKDPVGLMSRVAQPASKKIDQNKLKPEMDEKGNLTTAGFACSQCGQPLFVYKLEQVSEKGKAYTNYFGRCNVAEHEKLILLAQLKPEKDSDEAVTYSLGKFGQRALDFYSIHVTKESTHPVKPLAQIAGNRYASHPVGKALSDACMGTIASFLSKYQDIIIEHQKVVKGNQKRLESLRELAGKENLEYPSVTLPPQPHTKEGVDAYNEVIARVRMWVNLNLWQKLKLSRDDAKPLLRLKGFPSFPLVERQANEVDWWDMVCNVKKLINEKKEDGKVFWQNLAGYKRQEALRPYLSSEEDRKKGKKFARYQLGDLLLHLEKKHGEDWGKVYDEAWERIDKKVEGLSKHIKLEEERRSEDAQSKAALTDWLRAKASFVIEGLKEADKDEFCRCELKLQKWYGDLRGKPFAIEAENSILDISGFSKQYNCAFIWQKDGVKKLNLYLIINYFKGGKLRFKKIKPEAFEANRFYTVINKKSGEIVPMEVNFNFDDPNLIILPLAFGKRQGREFIWNDLLSLETGSLKLANGRVIEKTLYNRRTRQDEPALFVALTFERREVLDSSNIKPMNLIGVDRGENIPAVIALTDPEGCPLSRFKDSLGNPTHILRIGESYKEKQRTIQAKKEVEQRRAGGYSRKYASKAKNLADDMVRNTARDLLYYAVTQDAMLIFENLSRGFGRQGKRTFMAERQYTRMEDWLTAKLAYEGPLPSKTYLSKTLAQYTSKTCSNCGFTITSADYDRVLEKLKKTATGWMTTINGKELKVEGQITYYNRYKRQNVVKDLSVELDRLSEESVNNDISSWTKGRSGEALSLLKKRFSHRPVQEKFVCLNCGFETHADEQAALNIARSWLFLRSQEYKKYQTNKTTGNTDKRAFVETWQSFYRKKLKEVWKPAV

SEQ ID NO: 32437 - protein, 980 aa, synthetic construct
  REGION 1..980: note = engineered CasX variant
QEIKGRINKIRRRLVKDSNTKKAGKTGPMKTLLVRVMTPDLRERLENLRKKPENIPQPISNTSRANLNKLLTDYTEMKKAILHVYWEEFQKDPVGLMSRVAQPASKKIDQNKLKPEMDEKGNLTTAGFACSQCGQPLFVYKLEQVSEKGKAYTNYFGRCNVAEHEKLILLAQLKPEKDSDEAVTYSLGKFGQRALDFYSIHVTKESTHPVKPLAQIAGNRYASSPVGKALSDACMGTIASFLSKYQDIIIEHQKVVKGNQKRLESLRELAGKENLEYPSVTLPPQPHTKEGVDAYNEVIARVRMWVNLNLWQKLKLSRDDAKPLLRLKGFPSFPLVERQANEVDWWDMVCNVKKLINEKKEDGKVFWQNLAGYKRQEALRPYLSSEEDRKKGKKFARYQLGDLLLHLEKKHGEDWGKVYDEAWERIDKKVEGLSKHIKLEEERRSEDAQSKAALTDWLRAKASFVIEGLKEADKDEFCRCELKLQKWYGDLRGKPFAIEAENSILDISGFSKQYNCAFIWQKDGVKKLNLYLIINYFKGGKLRFKKIKPEAFEANRFYTVINKKSGEIVPMEVNFNFDDPNLIILPLAFGKRQGREFIWNDLLSLETGSLKLANGRVIEKTLYNRRTRQDEPALFVALTFERREVLDSSNIKPMNLIGVDRGENIPAVIALTDPEGCPLSRFKDSLGNPTHILRIGESYKEKQRTIQAKKEVEQRRAGGYSRKYASKAKNLADDMVRNTARDLLYYAVTQDAMLIFENLSRGFGRQGKRTFMAERQYTRMEDWLTAKLAYEGPLPSKTYLSKTLAQYTSKTCSNCGFTITSADYDRVLEKLKKTATGWMTTINGKELKVEGQITYYNRYKRQNVVKDLSVELDRLSEESVNNDISSWTKGRSGEALSLLKKRFSHRPVQEKFVCLNCGFETHADEQAALNIARSWLFLRSQEYKKYQTNKTTGNTDKRAFVETWQSFYRKKLKEVWKPAV

SEQ ID NO: 32438 - protein, 980 aa, synthetic construct
  REGION 1..980: note = engineered CasX variant
QEIKGRINKIRRRLVKDSNTKKAGKTGPMKTLLVRVMTPDLRERLENLRKKPENIPQPISNTSRANLNKLLTDYTEMKKAILHVYWEEFQKDPVGLMSRVAQPASKKIDQNKLKPEMDEKGNLTTAGFACSQCGQPLFVYKLEQVSEKGKAYTNYFGRCNVAEHEKLILLAQLKPEKDSDEAVTYSLGKFGQRALDFYSIHVTKESTHPVKPLAQIAGNRYASTPVGKALSDACMGTIASFLSKYQDIIIEHQKVVKGNQKRLESLRELAGKENLEYPSVTLPPQPHTKEGVDAYNEVIARVRMWVNLNLWQKLKLSRDDAKPLLRLKGFPSFPLVERQANEVDWWDMVCNVKKLINEKKEDGKVFWQNLAGYKRQEALRPYLSSEEDRKKGKKFARYQLGDLLLHLEKKHGEDWGKVYDEAWERIDKKVEGLSKHIKLEEERRSEDAQSKAALTDWLRAKASFVIEGLKEADKDEFCRCELKLQKWYGDLRGKPFAIEAENSILDISGFSKQYNCAFIWQKDGVKKLNLYLIINYFKGGKLRFKKIKPEAFEANRFYTVINKKSGEIVPMEVNFNFDDPNLIILPLAFGKRQGREFIWNDLLSLETGSLKLANGRVIEKTLYNRRTRQDEPALFVALTFERREVLDSSNIKPMNLIGVDRGENIPAVIALTDPEGCPLSRFKDSLGNPTHILRIGESYKEKQRTIQAKKEVEQRRAGGYSRKYASKAKNLADDMVRNTARDLLYYAVTQDAMLIFENLSRGFGRQGKRTFMAERQYTRMEDWLTAKLAYEGPLPSKTYLSKTLAQYTSKTCSNCGFTITSADYDRVLEKLKKTATGWMTTINGKELKVEGQITYYNRYKRQNVVKDLSVELDRLSEESVNNDISSWTKGRSGEALSLLKKRFSHRPVQEKFVCLNCGFETHADEQAALNIARSWLFLRSQEYKKYQTNKTTGNTDKRAFVETWQSFYRKKLKEVWKPAV

SEQ ID NO: 32439 - protein, 980 aa, synthetic construct
  REGION 1..980: note = engineered CasX variant
QEIKGRINKIRRRLVKDSNTKKAGKTGPMKTLLVRVMTPDLRERLENLRKKPENIPQPISNTSRANLNKLLTDYTEMKKAILHVYWEEFQKDPVGLMSRVAQPASKKIDQNKLKPEMDEKGNLTTAGFACSQCGQPLFVYKLEQVSEKGKAYTNYFGRCNVAEHEKLILLAQLKPEKDSDEAVTYSLGKFGQRALDFYSIHVTKESTHPVKPLAQIAGNRYASAPVGKALSDACMGTIASFLSKYQDIIIEHQKVVKGNQKRLESLRELAGKENLEYPSVTLPPQPHTKEGVDAYNEVIARVRMWVNLNLWQKLKLSRDDAKPLLRLKGFPSFPLVERQANEVDWWDMVCNVKKLINEKKEDGKVFWQNLAGYKRQEALRPYLSSEEDRKKGKKFARYQLGDLLLHLEKKHGEDWGKVYDEAWERIDKKVEGLSKHIKLEEERRSEDAQSKAALTDWLRAKASFVIEGLKEADKDEFCRCELKLQKWYGDLRGKPFAIEAENSILDISGFSKQYNCAFIWQKDGVKKLNLYLIINYFKGGKLRFKKIKPEAFEANRFYTVINKKSGEIVPMEVNFNFDDPNLIILPLAFGKRQGREFIWNDLLSLETGSLKLANGRVIEKTLYNRRTRQDEPALFVALTFERREVLDSSNIKPMNLIGVDRGENIPAVIALTDPEGCPLSRFKDSLGNPTHILRIGESYKEKQRTIQAKKEVEQRRAGGYSRKYASKAKNLADDMVRNTARDLLYYAVTQDAMLIFENLSRGFGRQGKRTFMAERQYTRMEDWLTAKLAYEGPLPSKTYLSKTLAQYTSKTCSNCGFTITSADYDRVLEKLKKTATGWMTTINGKELKVEGQITYYNRYKRQNVVKDLSVELDRLSEESVNNDISSWTKGRSGEALSLLKKRFSHRPVQEKFVCLNCGFETHADEQAALNIARSWLFLRSQEYKKYQTNKTTGNTDKRAFVETWQSFYRKKLKEVWKPAV

SEQ ID NO: 32440 - protein, 980 aa, synthetic construct
  REGION 1..980: note = engineered CasX variant
QEIKGRINKIRRRLVKDSNTKKAGKTGPMKTLLVRVMTPDLRERLENLRKKPENIPQPISNTSRANLNKLLTDYTEMKKAILHVYWEEFQKDPVGLMSRVAQPASKKIDQNKLKPEMDEKGNLTTAGFACSQCGQPLFVYKLEQVSEKGKAYTNYFGRCNVAEHEKLILLAQLKPEKDSDEAVTYSLGKFGQRALDFYSIHVTKESTHPVKPLAQIAGNRYASVPVGKALSDACMGTIASFLSKYQDIIIEHQKVVKGNQKRLESLRELAGKENLEYPSVTLPPQPHTKEGVDAYNEVIARVRMWVNLNLWQKLKLSRDDAKPLLRLKGFPSFPLVERQANEVDWWDMVCNVKKLINEKKEDGKVFWQNLAGYKRQEALRPYLSSEEDRKKGKKFARYQLGDLLLHLEKKHGEDWGKVYDEAWERIDKKVEGLSKHIKLEEERRSEDAQSKAALTDWLRAKASFVIEGLKEADKDEFCRCELKLQKWYGDLRGKPFAIEAENSILDISGFSKQYNCAFIWQKDGVKKLNLYLIINYFKGGKLRFKKIKPEAFEANRFYTVINKKSGEIVPMEVNFNFDDPNLIILPLAFGKRQGREFIWNDLLSLETGSLKLANGRVIEKTLYNRRTRQDEPALFVALTFERREVLDSSNIKPMNLIGVDRGENIPAVIALTDPEGCPLSRFKDSLGNPTHILRIGESYKEKQRTIQAKKEVEQRRAGGYSRKYASKAKNLADDMVRNTARDLLYYAVTQDAMLIFENLSRGFGRQGKRTFMAERQYTRMEDWLTAKLAYEGPLPSKTYLSKTLAQYTSKTCSNCGFTITSADYDRVLEKLKKTATGWMTTINGKELKVEGQITYYNRYKRQNVVKDLSVELDRLSEESVNNDISSWTKGRSGEALSLLKKRFSHRPVQEKFVCLNCGFETHADEQAALNIARSWLFLRSQEYKKYQTNKTTGNTDKRAFVETWQSFYRKKLKEVWKPAV

SEQ ID NO: 32441 - protein, 980 aa, synthetic construct
  REGION 1..980: note = engineered CasX variant
QEIKGRINKIRRRLVKDSNTKKAGKTGPMKTLLVRVMTPDLRERLENLRKKPENIPQPISNTSRANLNKLLTDYTEMKKAILHVYWEEFQKDPVGLMSRVAQPASKKIDQNKLKPEMDEKGNLTTAGFACSQCGQPLFVYKLEQVSEKGKAYTNYFGRCNVAEHEKLIKLAQLKPEKDSDEAVTYSLGKFGQRALDFYSIHVTKESTHPVKPLAQIAGNRYASGPVGKALSDACMGTIASFLSKYQDIIIEHQKVVKGNQKRLESLRELAGKENLEYPSVTLPPQPHTKEGVDAYNEVIARVRMWVNLNLWQKLKLSRDDAKPLLRLKGFPSFPLVERQANEVDWWDMVCNVKKLINEKKEDGKVFWQNLAGYKRQEALRPYLSSEEDRKKGKKFARYQLGDLLLHLEKKHGEDWGKVYDEAWERIDKKVEGLSKHIKLEEERRSEDAQSKAALTDWLRAKASFVIEGLKEADKDEFCRCELKLQKWYGDLRGKPFAIEAENSILDISGFSKQYNCAFIWQKDGVKKLNLYLIINYFKGGKLRFKKIKPEAFEANRFYTVINKKSGEIVPMEVNFNFDDPNLIILPLAFGKRQGREFIWNDLLSLETGSLKLANGRVIEKTLYNRRTRQDEPALFVALTFERREVLDSSNIKPMNLIGVDRGENIPAVIALTDPEGCPLSRFKDSLGNPTHILRIGESYKEKQRTIQAKKEVEQRRAGGYSRKYASKAKNLADDMVRNTARDLLYYAVTQDAMLIFENLSRGFGRQGKRTFMAERQYTRMEDWLTAKLAYEGPLPSKTYLSKTLAQYTSKTCSNCGFTITSADYDRVLEKLKKTATGWMTTINGKELKVEGQITYYNRYKRQNVVKDLSVELDRLSEESVNNDISSWTKGRSGEALSLLKKRFSHRPVQEKFVCLNCGFETHADEQAALNIARSWLFLRSQEYKKYQTNKTTGNTDKRAFVETWQSFYRKKLKEVWKPAV

SEQ ID NO: 32442 - protein, 979 aa, synthetic construct
  REGION 1..979: note = engineered CasX variant
QEIKGRINKIRRRLVKDSNTKKAGKTGPMKTLLVRVMTPDLRERLENLRKKPENIPQPISNTSRANLNKLLTDYTEMKKAILHVYWEEFQKDPVGLMSRVAQPASKKIDQNKLKPEMDEKGNLTTAGFACSQCGQPLFVYKLEQVSEKGKAYTNYFGRCNVAEHEKLILLAQLKPEKDSDEAVTYSLGKFGQRALDFYSIHVTKESTHPVKPLAQIAGNRYASPVGKALSDACMGTIASFLSKYQDIIIEHQKVVKGNQKRLESLRELAGKENLEYPSVTLPPQPHTKEGVDAYNEVIARVRMWVNLNLWQKLKLSRDDAKPLLRLKGFPSFPLVERQANEVDWWDMVCNVKKLINEKKEDGKVFWQNLAGYKRQEALRPYLSSEEDRKKGKKFARYQLGDLLLHLEKKHGEDWGKVYDEAWERIDKKVEGLSKHIKLEEERRSEDAQSKAALTDWLRAKASFVIEGLKEADKDEFCRCELKLQKWYGDLRGKPFAIEAENSILDISGFSKQYNCAFIWQKDGVKKLNLYLIINYFKGGKLRFKKIKPEAFEANRFYTVINKKSGEIVPMEVNFNFDDPNLIILPLAFGKRQGREFIWNDLLSLETGSLKLANGRVIEKTLYNRRTRQDEPALFVALTFERREVLDSSNIKPMNLIGVDRGENIPAVIALTDPEGCPLSRFKDSLGNPTHILRIGESYKEKQRTIQAKKEVEQRRAGGYSRKYASKAKNLADDMVRNTARDLLYYAVTQDAMLIFENLSRGFGRQGKRTFMAERQYTRMEDWLTAKLAYEGPLPSKTYLSKTLAQYTSKTCSNCGFTITSADYDRVLEKLKKTATGWMTTINGKELKVEGQITYYNRYKRQNVVKDLSVELDRLSEESVNNDISSWTKGRSGEALSLLKKRFSHRPVQEKFVCLNCGFETHADEQAALNIARSWLFLRSQEYKKYQTNKTTGNTDKRAFVETWQSFYRKKLKEVWKPAV

SEQ ID NO: 32443 - protein, 980 aa, synthetic construct
  REGION 1..980: note = engineered CasX variant
QEIKGRINKIRRRLVKDSNTKKAGKTGPMKTLLVRVMTPDLRERLENLRKKPENIPQPISNTSRANLNKLLTDYTEMKKAILHVYWEEFQKDPVGLMSRVAQPASKKIDQNKLKPEMDEKGNLTTAGFACSQCGQPLFVYKLEQVSEKGKAYTNYFGRCNVAEHEKLILLAQLKPEKDSDEAVTYSLGKFGQRALDFYSIHVTKESTHPVKPLAQIAGNRYASYPVGKALSDACMGTIASFLSKYQDIIIEHQKVVKGNQKRLESLRELAGKENLEYPSVTLPPQPHTKEGVDAYNEVIARVRMWVNLNLWQKLKLSRDDAKPLLRLKGFPSFPLVERQANEVDWWDMVCNVKKLINEKKEDGKVFWQNLAGYKRQEALRPYLSSEEDVRKKGKKFARYQLGDLLLHLEKKHGEDWGKVYDEAWERIDKKVEGLSKHIKLEEERRSEDAQSKAALTDWLRAKASFVIEGLKEADKDEFCRCELKLQKWYGDLRGKPFAIEAENSILDISGFSKQYNCAFIWQKDGVKKLNLYLIINYFKGGKLRFKKIKPEAFEANRFYTVINKKSGEIVPMEVNFNFDDPNLIILPLAFGKRQGREFIWNDLLSLETGSLKLANGRVIEKTLYNRRTRQDEPALFVALTFERREVLDSSNIKPMNLIGVDRGENIPAVIALTDPEGCPLSRFKDSLGNPTHILRIGESYKEKQRTIQAKKEVEQRRAGGYSRKYASKAKNLADDMVRNTARDLLYYAVTQDAMLIFENLSRGFGRQGKRTFMAERQYTRMEDWLTAKLAYEGLPSKTYLSKTLAQYTSKTCSNCGFTITSADYDRVLEKLKKTATGWMTTINGKELKVEGQITYYNRYKRQNVVKDLSVELDRLSEESVNNDISSWTKGRSGEALSLLKKRFSHRPVQEKFVCLNCGFETHADEQAALNIARSWLFLRSQEYKKYQTNKTTGNTDKRAFVETWQSFYRKKLKEVWKPAV

SEQ ID NO: 32444 - protein, 980 aa, synthetic construct
  REGION 1..980: note = engineered CasX variant
QEIKGRINKIRRRLVKDSNTKKAGKTGPMKTLLVRVMTPDLRERLENLRKKPENIPQPISNTSRANLNKLLTDYTEMKKAILHVYWEEFQKDPVGLMSRVAQPASKKIDQNKLKPEMDEKGNLTTAGFACSQCGQPLFVYKLEQVSEKGKAYTNYFGRCNVAEHEKLILLAQLKPEKDSDEAVTYSLGKFGQRALDFYSIHVTKESTHPVKPLAQIAGNRYASHPVGKALSDACMGTIASFLSKYQDIIIEHQKVVKGNQKRLESLRELAGKENLEYPSVTLPPQPHTKEGVDAYNEVIARVRMWVNLNLWQKLKLSRDDAKPLLRLKGFPSFPLVERQANEVDWWDMVCNVKKLINEKKEDGKVFWQNLAGYKRQEALRPYLSSEEDVRKKGKKFARYQLGDLLLHLEKKHGEDWGKVYDEAWERIDKKVEGLSKHIKLEEERRSEDAQSKAALTDWLRAKASFVIEGLKEADKDEFCRCELKLQKWYGDLRGKPFAIEAENSILDISGFSKQYNCAFIWQKDGVKKLNLYLIINYFKGGKLRFKKIKPEAFEANRFYTVINKKSGEIVPMEVNFNFDDPNLIILPLAFGKRQGREFIWNDLLSLETGSLKLANGRVIEKTLYNRRTRQDEPALFVALTFERREVLDSSNIKPMNLIGVDRGENIPAVIALTDPEGCPLSRFKDSLGNPTHILRIGESYKEKQRTIQAKKEVEQRRAGGYSRKYASKAKNLADDMVRNTARDLLYYAVTQDAMLIFENLSRGFGRQGKRTFMAERQYTRMEDWLTAKLAYEGLPSKTYLSKTLAQYTSKTCSNCGFTITSADYDRVLEKLKKTATGWMTTINGKELKVEGQITYYNRYKRQNVVKDLSVELDRLSEESVNNDISSWTKGRSGEALSLLKKRFSHRPVQEKFVCLNCGFETHADEQAALNIARSWLFLRSQEYKKYQTNKTTGNTDKRAFVETWQSFYRKKLKEVWKPAV

SEQ ID NO: 32445 - protein, 980 aa, synthetic construct
  REGION 1..980: note = engineered CasX variant
QEIKGRINKIRRRLVKDSNTKKAGKTGPMKTLLVRVMTPDLRERLENLRKKPENIPQPISNTSRANLNKLLTDYTEMKKAILHVYWEEFQKDPVGLMSRVAQPASKKIDQNKLKPEMDEKGNLTTAGFACSQCGQPLFVYKLEQVSEKGKAYTNYFGRCNVAEHEKLILLAQLKPEKDSDEAVTYSLGKFGQRALDFYSIHVTKESTHPVKPLAQIAGNRYASSPVGKALSDACMGTIASFLSKYQDIIIEHQKVVKGNQKRLESLRELAGKENLEYPSVTLPPQPHTKEGVDAYNEVIARVRMWVNLNLWQKLKLSRDDAKPLLRLKGFPSFPLVERQANEVDWWDMVCNVKKLINEKKEDGKVFWQNLAGYKRQEALRPYLSSEEDVRKKGKKFARYQLGDLLLHLEKKHGEDWGKVYDEAWERIDKKVEGLSKHIKLEEERRSEDAQSKAALTDWLRAKASFVIEGLKEADKDEFCRCELKLQKWYGDLRGKPFAIEAENSILDISGFSKQYNCAFIWQKDGVKKLNLYLIINYFKGGKLRFKKIKPEAFEANRFYTVINKKSGEIVPMEVNFNFDDPNLIILPLAFGKRQGREFIWNDLLSLETGSLKLANGRVIEKTLYNRRTRQDEPALFVALTFERREVLDSSNIKPMNLIGVDRGENIPAVIALTDPEGCPLSRFKDSLGNPTHILRIGESYKEKQRTIQAKKEVEQRRAGGYSRKYASKAKNLADDMVRNTARDLLYYAVTQDAMLIFENLSRGFGRQGKRTFMAERQYTRMEDWLTAKLAYEGLPSKTYLSKTLAQYTSKTCSNCGFTITSADYDRVLEKLKKTATGWMTTINGKELKVEGQITYYNRYKRQNVVKDLSVELDRLSEESVNNDISSWTKGRSGEALSLLKKRFSHRPVQEKFVCLNCGFETHADEQAALNIARSWLFLRSQEYKKYQTNKTTGNTDKRAFVETWQSFYRKKLKEVWKPAV

SEQ ID NO: 32446 - protein, 980 aa, synthetic construct
  REGION 1..980: note = engineered CasX variant
QEIKGRINKIRRRLVKDSNTKKAGKTGPMKTLLVRVMTPDLRERLENLRKKPENIPQPISNTSRANLNKLLTDYTEMKKAILHVYWEEFQKDPVGLMSRVAQPASKKIDQNKLKPEMDEKGNLTTAGFACSQCGQPLFVYKLEQVSEKGKAYTNYFGRCNVAEHEKLILLAQLKPEKDSDEAVTYSLGKFGQRALDFYSIHVTKESTHPVKPLAQIAGNRYASTPVGKALSDACMGTIASFLSKYQDIIIEHQKVVKGNQKRLESLRELAGKENLEYPSVTLPPQPHTKEGVDAYNEVIARVRMWVNLNLWQKLKLSRDDAKPLLRLKGFPSFPLVERQANEVDWWDMVCNVKKLINEKKEDGKVFWQNLAGYKRQEALRPYLSSEEDVRKKGKKFARYQLGDLLLHLEKKHGEDWGKVYDEAWERIDKKVEGLSKHIKLEEERRSEDAQSKAALTDWLRAKASFVIEGLKEADKDEFCRCELKLQKWYGDLRGKPFAIEAENSILDISGFSKQYNCAFIWQKDGVKKLNLYLIINYFKGGKLRFKKIKPEAFEANRFYTVINKKSGEIVPMEVNFNFDDPNLIILPLAFGKRQGREFIWNDLLSLETGSLKLANGRVIEKTLYNRRTRQDEPALFVALTFERREVLDSSNIKPMNLIGVDRGENIPAVIALTDPEGCPLSRFKDSLGNPTHILRIGESYKEKQRTIQAKKEVEQRRAGGYSRKYASKAKNLADDMVRNTARDLLYYAVTQDAMLIFENLSRGFGRQGKRTFMAERQYTRMEDWLTAKLAYEGLPSKTYLSKTLAQYTSKTCSNCGFTITSADYDRVLEKLKKTATGWMTTINGKELKVEGQITYYNRYKRQNVVKDLSVELDRLSEESVNNDISSWTKGRSGEALSLLKKRFSHRPVQEKFVCLNCGFETHADEQAALNIARSWLFLRSQEYKKYQTNKTTGNTDKRAFVETWQSFYRKKLKEVWKPAV

SEQ ID NO: 32447 - protein, 980 aa, synthetic construct
  REGION 1..980: note = engineered CasX variant
QEIKGRINKIRRRLVKDSNTKKAGKTGPMKTLLVRVMTPDLRERLENLRKKPENIPQPISNTSRANLNKLLTDYTEMKKAILHVYWEEFQKDPVGLMSRVAQPASKKIDQNKLKPEMDEKGNLTTAGFACSQCGQPLFVYKLEQVSEKGKAYTNYFGRCNVAEHEKLILLAQLKPEKDSDEAVTYSLGKFGQRALDFYSIHVTKESTHPVKPLAQIAGNRYASAPVGKALSDACMGTIASFLSKYQDIIIEHQKVVKGNQKRLESLRELAGKENLEYPSVTLPPQPHTKEGVDAYNEVIARVRMWVNLNLWQKLKLSRDDAKPLLRLKGFPSFPLVERQANEVDWWDMVCNVKKLINEKKEDGKVFWQNLAGYKRQEALRPYLSSEEDVRKKGKKFARYQLGDLLLHLEKKHGEDWGKVYDEAWERIDKKVEGLSKHIKLEEERRSEDAQSKAALTDWLRAKASFVIEGLKEADKDEFCRCELKLQKWYGDLRGKPFAIEAENSILDISGFSKQYNCAFIWQKDGVKKLNLYLIINYFKGGKLRFKKIKPEAFEANRFYTVINKKSGEIVPMEVNFNFDDPNLIILPLAFGKRQGREFIWNDLLSLETGSLKLANGRVIEKTLYNRRTRQDEPALFVALTFERREVLDSSNIKPMNLIGVDRGENIPAVIALTDPEGCPLSRFKDSLGNPTHILRIGESYKEKQRTIQAKKEVEQRRAGGYSRKYASKAKNLADDMVRNTARDLLYYAVTQDAMLIFENLSRGFGRQGKRTFMAERQYTRMEDWLTAKLAYEGLPSKTYLSKTLAQYTSKTCSNCGFTITSADYDRVLEKLKKTATGWMTTINGKELKVEGQITYYNRYKRQNVVKDLSVELDRLSEESVNNDISSWTKGRSGEALSLLKKRFSHRPVQEKFVCLNCGFETHADEQAALNIARSWLFLRSQEYKKYQTNKTTGNTDKRAFVETWQSFYRKKLKEVWKPAV

SEQ ID NO: 32448 - protein, 980 aa, synthetic construct
  REGION 1..980: note = engineered CasX variant
QEIKGRINKIRRRLVKDSNTKKAGKTGPMKTLLVRVMTPDLRERLENLRKKPENIPQPISNTSRANLNKLLTDYTEMKKAILHVYWEEFQKDPVGLMSRVAQPASKKIDQNKLKPEMDEKGNLTTAGFACSQCGQPLFVYKLEQVSEKGKAYTNYFGRCNVAEHEKLILLAQLKPEKDSDEAVTYSLGKFGQRALDFYSIHVTKESTHPVKPLAQIAGNRYASVPVGKALSDACMGTIASFLSKYQDIIIEHQKVVKGNQKRLESLRELAGKENLEYPSVTLPPQPHTKEGVDAYNEVIARVRMWVNLNLWQKLKLSRDDAKPLLRLKGFPSFPLVERQANEVDWWDMVCNVKKLINEKKEDGKVFWQNLAGYKRQEALRPYLSSEEDVRKKGKKFARYQLGDLLLHLEKKHGEDWGKVYDEAWERIDKKVEGLSKHIKLEEERRSEDAQSKAALTDWLRAKASFVIEGLKEADKDEFCRCELKLQKWYGDLRGKPFAIEAENSILDISGFSKQYNCAFIWQKDGVKKLNLYLIINYFKGGKLRFKKIKPEAFEANRFYTVINKKSGEIVPMEVNFNFDDPNLIILPLAFGKRQGREFIWNDLLSLETGSLKLANGRVIEKTLYNRRTRQDEPALFVALTFERREVLDSSNIKPMNLIGVDRGENIPAVIALTDPEGCPLSRFKDSLGNPTHILRIGESYKEKQRTIQAKKEVEQRRAGGYSRKYASKAKNLADDMVRNTARDLLYYAVTQDAMLIFENLSRGFGRQGKRTFMAERQYTRMEDWLTAKLAYEGLPSKTYLSKTLAQYTSKTCSNCGFTITSADYDRVLEKLKKTATGWMTTINGKELKVEGQITYYNRYKRQNVVKDLSVELDRLSEESVNNDISSWTKGRSGEALSLLKKRFSHRPVQEKFVCLNCGFETHADEQAALNIARSWLFLRSQEYKKYQTNKTTGNTDKRAFVETWQSFYRKKLKEVWKPAV

SEQ ID NO: 32449 - protein, 980 aa, synthetic construct
  REGION 1..980: note = engineered CasX variant
QEIKGRINKIRRRLVKDSNTKKAGKTGPMKTLLVRVMTPDLRERLENLRKKPENIPQPISNTSRANLNKLLTDYTEMKKAILHVYWEEFQKDPVGLMSRVAQPASKKIDQNKLKPEMDEKGNLTTAGFACSQCGQPLFVYKLEQVSEKGKAYTNYFGRCNVAEHEKLIKLAQLKPEKDSDEAVTYSLGKFGQRALDFYSIHVTKESTHPVKPLAQIAGNRYASGPVGKALSDACMGTIASFLSKYQDIIIEHQKVVKGNQKRLESLRELAGKENLEYPSVTLPPQPHTKEGVDAYNEVIARVRMWVNLNLWQKLKLSRDDAKPLLRLKGFPSFPLVERQANEVDWWDMVCNVKKLINEKKEDGKVFWQNLAGYKRQEALRPYLSSEEDVRKKGKKFARYQLGDLLLHLEKKHGEDWGKVYDEAWERIDKKVEGLSKHIKLEEERRSEDAQSKAALTDWLRAKASFVIEGLKEADKDEFCRCELKLQKWYGDLRGKPFAIEAENSILDISGFSKQYNCAFIWQKDGVKKLNLYLIINYFKGGKLRFKKIKPEAFEANRFYTVINKKSGEIVPMEVNFNFDDPNLIILPLAFGKRQGREFIWNDLLSLETGSLKLANGRVIEKTLYNRRTRQDEPALFVALTFERREVLDSSNIKPMNLIGVDRGENIPAVIALTDPEGCPLSRFKDSLGNPTHILRIGESYKEKQRTIQAKKEVEQRRAGGYSRKYASKAKNLADDMVRNTARDLLYYAVTQDAMLIFENLSRGFGRQGKRTFMAERQYTRMEDWLTAKLAYEGLPSKTYLSKTLAQYTSKTCSNCGFTITSADYDRVLEKLKKTATGWMTTINGKELKVEGQITYYNRYKRQNVVKDLSVELDRLSEESVNNDISSWTKGRSGEALSLLKKRFSHRPVQEKFVCLNCGFETHADEQAALNIARSWLFLRSQEYKKYQTNKTTGNTDKRAFVETWQSFYRKKLKEVWKPAV

SEQ ID NO: 32450 - protein, 979 aa, synthetic construct
  REGION 1..979: note = engineered CasX variant
QEIKGRINKIRRRLVKDSNTKKAGKTGPMKTLLVRVMTPDLRERLENLRKKPENIPQPISNTSRANLNKLLTDYTEMKKAILHVYWEEFQKDPVGLMSRVAQPASKKIDQNKLKPEMDEKGNLTTAGFACSQCGQPLFVYKLEQVSEKGKAYTNYFGRCNVAEHEKLILLAQLKPEKDSDEAVTYSLGKFGQRALDFYSIHVTKESTHPVKPLAQIAGNRYASPVGKALSDACMGTIASFLSKYQDIIIEHQKVVKGNQKRLESLRELAGKENLEYPSVTLPPQPHTKEGVDAYNEVIARVRMWVNLNLWQKLKLSRDDAKPLLRLKGFPSFPLVERQANEVDWWDMVCNVKKLINEKKEDGKVFWQNLAGYKRQEALRPYLSSEEDVRKKGKKFARYQLGDLLLHLEKKHGEDWGKVYDEAWERIDKKVEGLSKHIKLEEERRSEDAQSKAALTDWLRAKASFVIEGLKEADKDEFCRCELKLQKWYGDLRGKPFAIEAENSILDISGFSKQYNCAFIWQKDGVKKLNLYLIINYFKGGKLRFKKIKPEAFEANRFYTVINKKSGEIVPMEVNFNFDDPNLIILPLAFGKRQGREFIWNDLLSLETGSLKLANGRVIEKTLYNRRTRQDEPALFVALTFERREVLDSSNIKPMNLIGVDRGENIPAVIALTDPEGCPLSRFKDSLGNPTHILRIGESYKEKQRTIQAKKEVEQRRAGGYSRKYASKAKNLADDMVRNTARDLLYYAVTQDAMLIFENLSRGFGRQGKRTFMAERQYTRMEDWLTAKLAYEGLPSKTYLSKTLAQYTSKTCSNCGFTITSADYDRVLEKLKKTATGWMTTINGKELKVEGQITYYNRYKRQNVVKDLSVELDRLSEESVNNDISSWTKGRSGEALSLLKKRFSHRPVQEKFVCLNCGFETHADEQAALNIARSWLFLRSQEYKKYQTNKTTGNTDKRAFVETWQSFYRKKLKEVWKPAV

SEQ ID NO: 32451 - protein, 979 aa, synthetic construct
  REGION 1..979: note = engineered CasX variant
QEIKGRINKIRRRLVKDSNTKKAGKTGPMKTLLVRVMTPDLRERLENLRKKPENIPQPISNTSRANLNKLLTDYTEMKKAILHVYWEEFQKDPVGLMSRVAQPASKKIDQNKLKPEMDEKGNLTTAGFACSQCGQPLFVYKLEQVSEKGKAYTNYFGRCNVAEHEKLILLAQLKPEKDSDEAVTYSLGKFGQRALDFYSIHVTKESTHPVKPLAQIAGNRYASYPVGKALSDACMGTIASFLSKYQDIIIEHQKVVKGNQKRLESLRELAGKENLEYPSVTLPPQPHTKEGVDAYNEVIARVRMWVNLNLWQKLKLSRDDAKPLLRLKGFPSFPLVERQANEVDWWDMVCNVKKLINEKKEDGKVFWQNLAGYKRQEALRPYLSSEEDRKKGKKFARYQLGDLLLHLEKKHGEDWGKVYDEAWERIDKKVEGLSKHIKLEEERRSEDAQSKAALTDWLRAKASFVIEGLKEADKDEFCRCELKLQKWYGDLRGKPFAIEAENSILDISGFSKQYNCAFIWQKDGVKKLNLYLIINYFKGGKLRFKKIKPEAFEANRFYTVINKKSGEIVPMEVNFNFDDPNLIILPLAFGKRQGREFIWNDLLSLETGSLKLANGRVIEKTLYNRRTRQDEPALFVALTFERREVLDSSNIKPMNLIGVDRGENIPAVIALTDPEGCPLSRFKDSLGNPTHILRIGESYKEKQRTIQAKKEVEQRRAGGYSRKYASKAKNLADDMVRNTARDLLYYAVTQDAMLIFENLSRGFGRQGKRTFMAERQYTRMEDWLTAKLAYEGLPSKTYLSKTLAQYTSKTCSNCGFTITSADYDRMLEKLKKTATGWMTTINGKELKVEGQITYYNRYKRQNVVKDLSVELDRLSEESVNNDISSWTKGRSGEALSLLKKRFSHRPVQEKFVCLNCGFETHADEQAALNIARSWLFLRSQEYKKYQTNKTTGNTDKRAFVETWQSFYRKKLKEVWKPAV

SEQ ID NO: 32452 - protein, 979 aa, synthetic construct
  REGION 1..979: note = engineered CasX variant
QEIKGRINKIRRRLVKDSNTKKAGKTGPMKTLLVRVMTPDLRERLENLRKKPENIPQPISNTSRANLNKLLTDYTEMKKAILHVYWEEFQKDPVGLMSRVAQPASKKIDQNKLKPEMDEKGNLTTAGFACSQCGQPLFVYKLEQVSEKGKAYTNYFGRCNVAEHEKLILLAQLKPEKDSDEAVTYSLGKFGQRALDFYSIHVTKESTHPVKPLAQIAGNRYASHPVGKALSDACMGTIASFLSKYQDIIIEHQKVVKGNQKRLESLRELAGKENLEYPSVTLPPQPHTKEGVDAYNEVIARVRMWVNLNLWQKLKLSRDDAKPLLRLKGFPSFPLVERQANEVDWWDMVCNVKKLINEKKEDGKVFWQNLAGYKRQEALRPYLSSEEDRKKGKKFARYQLGDLLLHLEKKHGEDWGKVYDEAWERIDKKVEGLSKHIKLEEERRSEDAQSKAALTDWLRAKASFVIEGLKEADKDEFCRCELKLQKWYGDLRGKPFAIEAENSILDISGFSKQYNCAFIWQKDGVKKLNLYLIINYFKGGKLRFKKIKPEAFEANRFYTVINKKSGEIVPMEVNFNFDDPNLIILPLAFGKRQGREFIWNDLLSLETGSLKLANGRVIEKTLYNRRTRQDEPALFVALTFERREVLDSSNIKPMNLIGVDRGENIPAVIALTDPEGCPLSRFKDSLGNPTHILRIGESYKEKQRTIQAKKEVEQRRAGGYSRKYASKAKNLADDMVRNTARDLLYYAVTQDAMLIFENLSRGFGRQGKRTFMAERQYTRMEDWLTAKLAYEGLPSKTYLSKTLAQYTSKTCSNCGFTITSADYDRMLEKLKKTATGWMTTINGKELKVEGQITYYNRYKRQNVVKDLSVELDRLSEESVNNDISSWTKGRSGEALSLLKKRFSHRPVQEKFVCLNCGFETHADEQAALNIARSWLFLRSQEYKKYQTNKTTGNTDKRAFVETWQSFYRKKLKEVWKPAV

SEQ ID NO: 32453 - protein, 979 aa, synthetic construct
  REGION 1..979: note = engineered CasX variant
QEIKGRINKIRRRLVKDSNTKKAGKTGPMKTLLVRVMTPDLRERLENLRKKPENIPQPISNTSRANLNKLLTDYTEMKKAILHVYWEEFQKDPVGLMSRVAQPASKKIDQNKLKPEMDEKGNLTTAGFACSQCGQPLFVYKLEQVSEKGKAYTNYFGRCNVAEHEKLILLAQLKPEKDSDEAVTYSLGKFGQRALDFYSIHVTKESTHPVKPLAQIAGNRYASSPVGKALSDACMGTIASFLSKYQDIIIEHQKVVKGNQKRLESLRELAGKENLEYPSVTLPPQPHTKEGVDAYNEVIARVRMWVNLNLWQKLKLSRDDAKPLLRLKGFPSFPLVERQANEVDWWDMVCNVKKLINEKKEDGKVFWQNLAGYKRQEALRPYLSSEEDRKKGKKFARYQLGDLLLHLEKKHGEDWGKVYDEAWERIDKKVEGLSKHIKLEEERRSEDAQSKAALTDWLRAKASFVIEGLKEADKDEFCRCELKLQKWYGDLRGKPFAIEAENSILDISGFSKQYNCAFIWQKDGVKKLNLYLIINYFKGGKLRFKKIKPEAFEANRFYTVINKKSGEIVPMEVNFNFDDPNLIILPLAFGKRQGREFIWNDLLSLETGSLKLANGRVIEKTLYNRRTRQDEPALFVALTFERREVLDSSNIKPMNLIGVDRGENIPAVIALTDPEGCPLSRFKDSLGNPTHILRIGESYKEKQRTIQAKKEVEQRRAGGYSRKYASKAKNLADDMVRNTARDLLYYAVTQDAMLIFENLSRGFGRQGKRTFMAERQYTRMEDWLTAKLAYEGLPSKTYLSKTLAQYTSKTCSNCGFTITSADYDRMLEKLKKTATGWMTTINGKELKVEGQITYYNRYKRQNVVKDLSVELDRLSEESVNNDISSWTKGRSGEALSLLKKRFSHRPVQEKFVCLNCGFETHADEQAALNIARSWLFLRSQEYKKYQTNKTTGNTDKRAFVETWQSFYRKKLKEVWKPAV

SEQ ID NO: 32454 - protein, 979 aa, synthetic construct
  REGION 1..979: note = engineered CasX variant
QEIKGRINKIRRRLVKDSNTKKAGKTGPMKTLLVRVMTPDLRERLENLRKKPENIPQPISNTSRANLNKLLTDYTEMKKAILHVYWEEFQKDPVGLMSRVAQPASKKIDQNKLKPEMDEKGNLTTAGFACSQCGQPLFVYKLEQVSEKGKAYTNYFGRCNVAEHEKLILLAQLKPEKDSDEAVTYSLGKFGQRALDFYSIHVTKESTHPVKPLAQIAGNRYASTPVGKALSDACMGTIASFLSKYQDIIIEHQKVVKGNQKRLESLRELAGKENLEYPSVTLPPQPHTKEGVDAYNEVIARVRMWVNLNLWQKLKLSRDDAKPLLRLKGFPSFPLVERQANEVDWWDMVCNVKKLINEKKEDGKVFWQNLAGYKRQEALRPYLSSEEDRKKGKKFARYQLGDLLLHLEKKHGEDWGKVYDEAWERIDKKVEGLSKHIKLEEERRSEDAQSKAALTDWLRAKASFVIEGLKEADKDEFCRCELKLQKWYGDLRGKPFAIEAENSILDISGFSKQYNCAFIWQKDGVKKLNLYLIINYFKGGKLRFKKIKPEAFEANRFYTVINKKSGEIVPMEVNFNFDDPNLIILPLAFGKRQGREFIWNDLLSLETGSLKLANGRVIEKTLYNRRTRQDEPALFVALTFERREVLDSSNIKPMNLIGVDRGENIPAVIALTDPEGCPLSRFKDSLGNPTHILRIGESYKEKQRTIQAKKEVEQRRAGGYSRKYASKAKNLADDMVRNTARDLLYYAVTQDAMLIFENLSRGFGRQGKRTFMAERQYTRMEDWLTAKLAYEGLPSKTYLSKTLAQYTSKTCSNCGFTITSADYDRMLEKLKKTATGWMTTINGKELKVEGQITYYNRYKRQNVVKDLSVELDRLSEESVNNDISSWTKGRSGEALSLLKKRFSHRPVQEKFVCLNCGFETHADEQAALNIARSWLFLRSQEYKKYQTNKTTGNTDKRAFVETWQSFYRKKLKEVWKPAV

SEQ ID NO: 32455 - protein, 979 aa, synthetic construct
  REGION 1..979: note = engineered CasX variant
QEIKGRINKIRRRLVKDSNTKKAGKTGPMKTLLVRVMTPDLRERLENLRKKPENIPQPISNTSRANLNKLLTDYTEMKKAILHVYWEEFQKDPVGLMSRVAQPASKKIDQNKLKPEMDEKGNLTTAGFACSQCGQPLFVYKLEQVSEKGKAYTNYFGRCNVAEHEKLILLAQLKPEKDSDEAVTYSLGKFGQRALDFYSIHVTKESTHPVKPLAQIAGNRYASAPVGKALSDACMGTIASFLSKYQDIIIEHQKVVKGNQKRLESLRELAGKENLEYPSVTLPPQPHTKEGVDAYNEVIARVRMWVNLNLWQKLKLSRDDAKPLLRLKGFPSFPLVERQANEVDWWDMVCNVKKLINEKKEDGKVFWQNLAGYKRQEALRPYLSSEEDRKKGKKFARYQLGDLLLHLEKKHGEDWGKVYDEAWERIDKKVEGLSKHIKLEEERRSEDAQSKAALTDWLRAKASFVIEGLKEADKDEFCRCELKLQKWYGDLRGKPFAIEAENSILDISGFSKQYNCAFIWQKDGVKKLNLYLIINYFKGGKLRFKKIKPEAFEANRFYTVINKKSGEIVPMEVNFNFDDPNLIILPLAFGKRQGREFIWNDLLSLETGSLKLANGRVIEKTLYNRRTRQDEPALFVALTFERREVLDSSNIKPMNLIGVDRGENIPAVIALTDPEGCPLSRFKDSLGNPTHILRIGESYKEKQRTIQAKKEVEQRRAGGYSRKYASKAKNLADDMVRNTARDLLYYAVTQDAMLIFENLSRGFGRQGKRTFMAERQYTRMEDWLTAKLAYEGLPSKTYLSKTLAQYTSKTCSNCGFTITSADYDRMLEKLKKTATGWMTTINGKELKVEGQITYYNRYKRQNVVKDLSVELDRLSEESVNNDISSWTKGRSGEALSLLKKRFSHRPVQEKFVCLNCGFETHADEQAALNIARSWLFLRSQEYKKYQTNKTTGNTDKRAFVETWQSFYRKKLKEVWKPAV

SEQ ID NO: 32456 - protein, 979 aa, synthetic construct
  REGION 1..979: note = engineered CasX variant
QEIKGRINKIRRRLVKDSNTKKAGKTGPMKTLLVRVMTPDLRERLENLRKKPENIPQPISNTSRANLNKLLTDYTEMKKAILHVYWEEFQKDPVGLMSRVAQPASKKIDQNKLKPEMDEKGNLTTAGFACSQCGQPLFVYKLEQVSEKGKAYTNYFGRCNVAEHEKLILLAQLKPEKDSDEAVTYSLGKFGQRALDFYSIHVTKESTHPVKPLAQIAGNRYASVPVGKALSDACMGTIASFLSKYQDIIIEHQKVVKGNQKRLESLRELAGKENLEYPSVTLPPQPHTKEGVDAYNEVIARVRMWVNLNLWQKLKLSRDDAKPLLRLKGFPSFPLVERQANEVDWWDMVCNVKKLINEKKEDGKVFWQNLAGYKRQEALRPYLSSEEDRKKGKKFARYQLGDLLLHLEKKHGEDWGKVYDEAWERIDKKVEGLSKHIKLEEERRSEDAQSKAALTDWLRAKASFVIEGLKEADKDEFCRCELKLQKWYGDLRGKPFAIEAENSILDISGFSKQYNCAFIWQKDGVKKLNLYLIINYFKGGKLRFKKIKPEAFEANRFYTVINKKSGEIVPMEVNFNFDDPNLIILPLAFGKRQGREFIWNDLLSLETGSLKLANGRVIEKTLYNRRTRQDEPALFVALTFERREVLDSSNIKPMNLIGVDRGENIPAVIALTDPEGCPLSRFKDSLGNPTHILRIGESYKEKQRTIQAKKEVEQRRAGGYSRKYASKAKNLADDMVRNTARDLLYYAVTQDAMLIFENLSRGFGRQGKRTFMAERQYTRMEDWLTAKLAYEGLPSKTYLSKTLAQYTSKTCSNCGFTITSADYDRMLEKLKKTATGWMTTINGKELKVEGQITYYNRYKRQNVVKDLSVELDRLSEESVNNDISSWTKGRSGEALSLLKKRFSHRPVQEKFVCLNCGFETHADEQAALNIARSWLFLRSQEYKKYQTNKTTGNTDKRAFVETWQSFYRKKLKEVWKPAV

SEQ ID NO: 32457 - protein, 979 aa, synthetic construct
  REGION 1..979: note = engineered CasX variant
QEIKGRINKIRRRLVKDSNTKKAGKTGPMKTLLVRVMTPDLRERLENLRKKPENIPQPISNTSRANLNKLLTDYTEMKKAILHVYWEEFQKDPVGLMSRVAQPASKKIDQNKLKPEMDEKGNLTTAGFACSQCGQPLFVYKLEQVSEKGKAYTNYFGRCNVAEHEKLIKLAQLKPEKDSDEAVTYSLGKFGQRALDFYSIHVTKESTHPVKPLAQIAGNRYASGPVGKALSDACMGTIASFLSKYQDIIIEHQKVVKGNQKRLESLRELAGKENLEYPSVTLPPQPHTKEGVDAYNEVIARVRMWVNLNLWQKLKLSRDDAKPLLRLKGFPSFPLVERQANEVDWWDMVCNVKKLINEKKEDGKVFWQNLAGYKRQEALRPYLSSEEDRKKGKKFARYQLGDLLLHLEKKHGEDWGKVYDEAWERIDKKVEGLSKHIKLEEERRSEDAQSKAALTDWLRAKASFVIEGLKEADKDEFCRCELKLQKWYGDLRGKPFAIEAENSILDISGFSKQYNCAFIWQKDGVKKLNLYLIINYFKGGKLRFKKIKPEAFEANRFYTVINKKSGEIVPMEVNFNFDDPNLIILPLAFGKRQGREFIWNDLLSLETGSLKLANGRVIEKTLYNRRTRQDEPALFVALTFERREVLDSSNIKPMNLIGVDRGENIPAVIALTDPEGCPLSRFKDSLGNPTHILRIGESYKEKQRTIQAKKEVEQRRAGGYSRKYASKAKNLADDMVRNTARDLLYYAVTQDAMLIFENLSRGFGRQGKRTFMAERQYTRMEDWLTAKLAYEGLPSKTYLSKTLAQYTSKTCSNCGFTITSADYDRMLEKLKKTATGWMTTINGKELKVEGQITYYNRYKRQNVVKDLSVELDRLSEESVNNDISSWTKGRSGEALSLLKKRFSHRPVQEKFVCLNCGFETHADEQAALNIARSWLFLRSQEYKKYQTNKTTGNTDKRAFVETWQSFYRKKLKEVWKPAV

SEQ ID NO: 32458 - protein, 978 aa, synthetic construct
  REGION 1..978: note = engineered CasX variant
QEIKGRINKIRRRLVKDSNTKKAGKTGPMKTLLVRVMTPDLRERLENLRKKPENIPQPISNTSRANLNKLLTDYTEMKKAILHVYWEEFQKDPVGLMSRVAQPASKKIDQNKLKPEMDEKGNLTTAGFACSQCGQPLFVYKLEQVSEKGKAYTNYFGRCNVAEHEKLILLAQLKPEKDSDEAVTYSLGKFGQRALDFYSIHVTKESTHPVKPLAQIAGNRYASPVGKALSDACMGTIASFLSKYQDIIIEHQKVVKGNQKRLESLRELAGKENLEYPSVTLPPQPHTKEGVDAYNEVIARVRMWVNLNLWQKLKLSRDDAKPLLRLKGFPSFPLVERQANEVDWWDMVCNVKKLINEKKEDGKVFWQNLAGYKRQEALRPYLSSEEDRKKGKKFARYQLGDLLLHLEKKHGEDWGKVYDEAWERIDKKVEGLSKHIKLEEERRSEDAQSKAALTDWLRAKASFVIEGLKEADKDEFCRCELKLQKWYGDLRGKPFAIEAENSILDISGFSKQYNCAFIWQKDGVKKLNLYLIINYFKGGKLRFKKIKPEAFEANRFYTVINKKSGEIVPMEVNFNFDDPNLIILPLAFGKRQGREFIWNDLLSLETGSLKLANGRVIEKTLYNRRTRQDEPALFVALTFERREVLDSSNIKPMNLIGVDRGENIPAVIALTDPEGCPLSRFKDSLGNPTHILRIGESYKEKQRTIQAKKEVEQRRAGGYSRKYASKAKNLADDMVRNTARDLLYYAVTQDAMLIFENLSRGFGRQGKRTFMAERQYTRMEDWLTAKLAYEGLPSKTYLSKTLAQYTSKTCSNCGFTITSADYDRMLEKLKKTATGWMTTINGKELKVEGQITYYNRYKRQNVVKDLSVELDRLSEESVNNDISSWTKGRSGEALSLLKKRFSHRPVQEKFVCLNCGFETHADEQAALNIARSWLFLRSQEYKKYQTNKTTGNTDKRAFVETWQSFYRKKLKEVWKPAV

SEQ ID NO: 32459 - protein, 979 aa, synthetic construct
  REGION 1..979: note = engineered CasX variant
QEIKGRINKIRRRLVKDSNTKKAGKTGPMKTLLVRVMTPDLRERLENLRKKPENIPQPISNTSRANLNKLLTDYTEMKKAILHVYWEEFQKDPVGLMSRVAQPASKKIDQNKLKPEMDEKGNLTTAGFACSQCGQPLFVYKLEQVSEKGKAYTNYFGRCNVAEHEKLILLAQLKPEKDSDEAVTYSLGKFGQRALDFYSIHVTKESTHPVKPLAQIAGNRYASYPVGKALSDACMGTIASFLSKYQDIIIEHQKVVKGNQKRLESLRELAGKENLEYPSVTLPPQPHTKEGVDAYNEVIARVRMWVNLNLWQKLKLSRDDAKPLLRLKGFPSFPLVERQANEVDWWDMVCNVKKLINEKKEDGKVFWQNLAGYKRQEALRPYLSSEEDRKKGKKFARYQLGDLLLHLEKKHGEDWGKVYDEAWERIDKKVEGLSKHIKLEEERRSEDAQSKAALTDWLRAKASFVIEGLKEADKDEFCRCELKLQKWYGDLRGKPFAIEAENSILDISGFSKQYNCAFIWQKDGVKKLNLYLIINYFKGGKLRFKKIKPEAFEANRFYTVINKKSGEIVPMEVNFNFDDPNLIILPLAFGKRQGREFIWNDLLSLETGSLKLANGRVIEKTLYNRRTRQDEPALFVALTFERREVLDSSNIKPMNLIGVDRGENIPAVIALTDPEGCPLSRFKDSLGNPTHILRIGESYKEKQRTIQAKKEVEQRRAGGYSRKYASKAKNLADDMVRNTARDLLYYAVTQDAMLIFENLSRGFGRQGKRTFMAERQYTRMEDWLTAKLAYEGLPSKTYLSKTLAQYTSKTCSNCGFTITSADYDRVLEKLKKTATGWMTTINGKELKVEGQITYYNRYKRQNVVKDLSVELDRLSEESVNNDISSWTKGRQGEALSLLKKRFSHRPVQEKFVCLNCGFETHADEQAALNIARSWLFLRSQEYKKYQTNKTTGNTDKRAFVETWQSFYRKKLKEVWKPAV

SEQ ID NO: 32460 - protein, 979 aa, synthetic construct
  REGION 1..979: note = engineered CasX variant
QEIKGRINKIRRRLVKDSNTKKAGKTGPMKTLLVRVMTPDLRERLENLRKKPENIPQPISNTSRANLNKLLTDYTEMKKAILHVYWEEFQKDPVGLMSRVAQPASKKIDQNKLKPEMDEKGNLTTAGFACSQCGQPLFVYKLEQVSEKGKAYTNYFGRCNVAEHEKLILLAQLKPEKDSDEAVTYSLGKFGQRALDFYSIHVTKESTHPVKPLAQIAGNRYASHPVGKALSDACMGTIASFLSKYQDIIIEHQKVVKGNQKRLESLRELAGKENLEYPSVTLPPQPHTKEGVDAYNEVIARVRMWVNLNLWQKLKLSRDDAKPLLRLKGFPSFPLVERQANEVDWWDMVCNVKKLINEKKEDGKVFWQNLAGYKRQEALRPYLSSEEDRKKGKKFARYQLGDLLLHLEKKHGEDWGKVYDEAWERIDKKVEGLSKHIKLEEERRSEDAQSKAALTDWLRAKASFVIEGLKEADKDEFCRCELKLQKWYGDLRGKPFAIEAENSILDISGFSKQYNCAFIWQKDGVKKLNLYLIINYFKGGKLRFKKIKPEAFEANRFYTVINKKSGEIVPMEVNFNFDDPNLIILPLAFGKRQGREFIWNDLLSLETGSLKLANGRVIEKTLYNRRTRQDEPALFVALTFERREVLDSSNIKPMNLIGVDRGENIPAVIALTDPEGCPLSRFKDSLGNPTHILRIGESYKEKQRTIQAKKEVEQRRAGGYSRKYASKAKNLADDMVRNTARDLLYYAVTQDAMLIFENLSRGFGRQGKRTFMAERQYTRMEDWLTAKLAYEGLPSKTYLSKTLAQYTSKTCSNCGFTITSADYDRVLEKLKKTATGWMTTINGKELKVEGQITYYNRYKRQNVVKDLSVELDRLSEESVNNDISSWTKGRQGEALSLLKKRFSHRPVQEKFVCLNCGFETHADEQAALNIARSWLFLRSQEYKKYQTNKTTGNTDKRAFVETWQSFYRKKLKEVWKPAV

SEQ ID NO: 32461 - protein, 979 aa, synthetic construct
  REGION 1..979: note = engineered CasX variant
QEIKGRINKIRRRLVKDSNTKKAGKTGPMKTLLVRVMTPDLRERLENLRKKPENIPQPISNTSRANLNKLLTDYTEMKKAILHVYWEEFQKDPVGLMSRVAQPASKKIDQNKLKPEMDEKGNLTTAGFACSQCGQPLFVYKLEQVSEKGKAYTNYFGRCNVAEHEKLILLAQLKPEKDSDEAVTYSLGKFGQRALDFYSIHVTKESTHPVKPLAQIAGNRYASSPVGKALSDACMGTIASFLSKYQDIIIEHQKVVKGNQKRLESLRELAGKENLEYPSVTLPPQPHTKEGVDAYNEVIARVRMWVNLNLWQKLKLSRDDAKPLLRLKGFPSFPLVERQANEVDWWDMVCNVKKLINEKKEDGKVFWQNLAGYKRQEALRPYLSSEEDRKKGKKFARYQLGDLLLHLEKKHGEDWGKVYDEAWERIDKKVEGLSKHIKLEEERRSEDAQSKAALTDWLRAKASFVIEGLKEADKDEFCRCELKLQKWYGDLRGKPFAIEAENSILDISGFSKQYNCAFIWQKDGVKKLNLYLIINYFKGGKLRFKKIKPEAFEANRFYTVINKKSGEIVPMEVNFNFDDPNLIILPLAFGKRQGREFIWNDLLSLETGSLKLANGRVIEKTLYNRRTRQDEPALFVALTFERREVLDSSNIKPMNLIGVDRGENIPAVIALTDPEGCPLSRFKDSLGNPTHILRIGESYKEKQRTIQAKKEVEQRRAGGYSRKYASKAKNLADDMVRNTARDLLYYAVTQDAMLIFENLSRGFGRQGKRTFMAERQYTRMEDWLTAKLAYEGLPSKTYLSKTLAQYTSKTCSNCGFTITSADYDRVLEKLKKTATGWMTTINGKELKVEGQITYYNRYKRQNVVKDLSVELDRLSEESVNNDISSWTKGRQGEALSLLKKRFSHRPVQEKFVCLNCGFETHADEQAALNIARSWLFLRSQEYKKYQTNKTTGNTDKRAFVETWQSFYRKKLKEVWKPAV

SEQ ID NO: 32462 - protein, 979 aa, synthetic construct
  REGION 1..979: note = engineered CasX variant
QEIKGRINKIRRRLVKDSNTKKAGKTGPMKTLLVRVMTPDLRERLENLRKKPENIPQPISNTSRANLNKLLTDYTEMKKAILHVYWEEFQKDPVGLMSRVAQPASKKIDQNKLKPEMDEKGNLTTAGFACSQCGQPLFVYKLEQVSEKGKAYTNYFGRCNVAEHEKLILLAQLKPEKDSDEAVTYSLGKFGQRALDFYSIHVTKESTHPVKPLAQIAGNRYASTPVGKALSDACMGTIASFLSKYQDIIIEHQKVVKGNQKRLESLRELAGKENLEYPSVTLPPQPHTKEGVDAYNEVIARVRMWVNLNLWQKLKLSRDDAKPLLRLKGFPSFPLVERQANEVDWWDMVCNVKKLINEKKEDGKVFWQNLAGYKRQEALRPYLSSEEDRKKGKKFARYQLGDLLLHLEKKHGEDWGKVYDEAWERIDKKVEGLSKHIKLEEERRSEDAQSKAALTDWLRAKASFVIEGLKEADKDEFCRCELKLQKWYGDLRGKPFAIEAENSILDISGFSKQYNCAFIWQKDGVKKLNLYLIINYFKGGKLRFKKIKPEAFEANRFYTVINKKSGEIVPMEVNFNFDDPNLIILPLAFGKRQGREFIWNDLLSLETGSLKLANGRVIEKTLYNRRTRQDEPALFVALTFERREVLDSSNIKPMNLIGVDRGENIPAVIALTDPEGCPLSRFKDSLGNPTHILRIGESYKEKQRTIQAKKEVEQRRAGGYSRKYASKAKNLADDMVRNTARDLLYYAVTQDAMLIFENLSRGFGRQGKRTFMAERQYTRMEDWLTAKLAYEGLPSKTYLSKTLAQYTSKTCSNCGFTITSADYDRVLEKLKKTATGWMTTINGKELKVEGQITYYNRYKRQNVVKDLSVELDRLSEESVNNDISSWTKGRQGEALSLLKKRFSHRPVQEKFVCLNCGFETHADEQAALNIARSWLFLRSQEYKKYQTNKTTGNTDKRAFVETWQSFYRKKLKEVWKPAV

SEQ ID NO: 32463 - protein, 979 aa, synthetic construct
  REGION 1..979: note = engineered CasX variant
QEIKGRINKIRRRLVKDSNTKKAGKTGPMKTLLVRVMTPDLRERLENLRKKPENIPQPISNTSRANLNKLLTDYTEMKKAILHVYWEEFQKDPVGLMSRVAQPASKKIDQNKLKPEMDEKGNLTTAGFACSQCGQPLFVYKLEQVSEKGKAYTNYFGRCNVAEHEKLILLAQLKPEKDSDEAVTYSLGKFGQRALDFYSIHVTKESTHPVKPLAQIAGNRYASAPVGKALSDACMGTIASFLSKYQDIIIEHQKVVKGNQKRLESLRELAGKENLEYPSVTLPPQPHTKEGVDAYNEVIARVRMWVNLNLWQKLKLSRDDAKPLLRLKGFPSFPLVERQANEVDWWDMVCNVKKLINEKKEDGKVFWQNLAGYKRQEALRPYLSSEEDRKKGKKFARYQLGDLLLHLEKKHGEDWGKVYDEAWERIDKKVEGLSKHIKLEEERRSEDAQSKAALTDWLRAKASFVIEGLKEADKDEFCRCELKLQKWYGDLRGKPFAIEAENSILDISGFSKQYNCAFIWQKDGVKKLNLYLIINYFKGGKLRFKKIKPEAFEANRFYTVINKKSGEIVPMEVNFNFDDPNLIILPLAFGKRQGREFIWNDLLSLETGSLKLANGRVIEKTLYNRRTRQDEPALFVALTFERREVLDSSNIKPMNLIGVDRGENIPAVIALTDPEGCPLSRFKDSLGNPTHILRIGESYKEKQRTIQAKKEVEQRRAGGYSRKYASKAKNLADDMVRNTARDLLYYAVTQDAMLIFENLSRGFGRQGKRTFMAERQYTRMEDWLTAKLAYEGLPSKTYLSKTLAQYTSKTCSNCGFTITSADYDRVLEKLKKTATGWMTTINGKELKVEGQITYYNRYKRQNVVKDLSVELDRLSEESVNNDISSWTKGRQGEALSLLKKRFSHRPVQEKFVCLNCGFETHADEQAALNIARSWLFLRSQEYKKYQTNKTTGNTDKRAFVETWQSFYRKKLKEVWKPAV

SEQ ID NO: 32464 - protein, 979 aa, synthetic construct
  REGION 1..979: note = engineered CasX variant
QEIKGRINKIRRRLVKDSNTKKAGKTGPMKTLLVRVMTPDLRERLENLRKKPENIPQPISNTSRANLNKLLTDYTEMKKAILHVYWEEFQKDPVGLMSRVAQPASKKIDQNKLKPEMDEKGNLTTAGFACSQCGQPLFVYKLEQVSEKGKAYTNYFGRCNVAEHEKLILLAQLKPEKDSDEAVTYSLGKFGQRALDFYSIHVTKESTHPVKPLAQIAGNRYASVPVGKALSDACMGTIASFLSKYQDIIIEHQKVVKGNQKRLESLRELAGKENLEYPSVTLPPQPHTKEGVDAYNEVIARVRMWVNLNLWQKLKLSRDDAKPLLRLKGFPSFPLVERQANEVDWWDMVCNVKKLINEKKEDGKVFWQNLAGYKRQEALRPYLSSEEDRKKGKKFARYQLGDLLLHLEKKHGEDWGKVYDEAWERIDKKVEGLSKHIKLEEERRSEDAQSKAALTDWLRAKASFVIEGLKEADKDEFCRCELKLQKWYGDLRGKPFAIEAENSILDISGFSKQYNCAFIWQKDGVKKLNLYLIINYFKGGKLRFKKIKPEAFEANRFYTVINKKSGEIVPMEVNFNFDDPNLIILPLAFGKRQGREFIWNDLLSLETGSLKLANGRVIEKTLYNRRTRQDEPALFVALTFERREVLDSSNIKPMNLIGVDRGENIPAVIALTDPEGCPLSRFKDSLGNPTHILRIGESYKEKQRTIQAKKEVEQRRAGGYSRKYASKAKNLADDMVRNTARDLLYYAVTQDAMLIFENLSRGFGRQGKRTFMAERQYTRMEDWLTAKLAYEGLPSKTYLSKTLAQYTSKTCSNCGFTITSADYDRVLEKLKKTATGWMTTINGKELKVEGQITYYNRYKRQNVVKDLSVELDRLSEESVNNDISSWTKGRQGEALSLLKKRFSHRPVQEKFVCLNCGFETHADEQAALNIARSWLFLRSQEYKKYQTNKTTGNTDKRAFVETWQSFYRKKLKEVWKPAV

SEQ ID NO: 32465 - protein, 979 aa, synthetic construct
  REGION 1..979: note = engineered CasX variant
QEIKGRINKIRRRLVKDSNTKKAGKTGPMKTLLVRVMTPDLRERLENLRKKPENIPQPISNTSRANLNKLLTDYTEMKKAILHVYWEEFQKDPVGLMSRVAQPASKKIDQNKLKPEMDEKGNLTTAGFACSQCGQPLFVYKLEQVSEKGKAYTNYFGRCNVAEHEKLIKLAQLKPEKDSDEAVTYSLGKFGQRALDFYSIHVTKESTHPVKPLAQIAGNRYASGPVGKALSDACMGTIASFLSKYQDIIIEHQKVVKGNQKRLESLRELAGKENLEYPSVTLPPQPHTKEGVDAYNEVIARVRMWVNLNLWQKLKLSRDDAKPLLRLKGFPSFPLVERQANEVDWWDMVCNVKKLINEKKEDGKVFWQNLAGYKRQEALRPYLSSEEDRKKGKKFARYQLGDLLLHLEKKHGEDWGKVYDEAWERIDKKVEGLSKHIKLEEERRSEDAQSKAALTDWLRAKASFVIEGLKEADKDEFCRCELKLQKWYGDLRGKPFAIEAENSILDISGFSKQYNCAFIWQKDGVKKLNLYLIINYFKGGKLRFKKIKPEAFEANRFYTVINKKSGEIVPMEVNFNFDDPNLIILPLAFGKRQGREFIWNDLLSLETGSLKLANGRVIEKTLYNRRTRQDEPALFVALTFERREVLDSSNIKPMNLIGVDRGENIPAVIALTDPEGCPLSRFKDSLGNPTHILRIGESYKEKQRTIQAKKEVEQRRAGGYSRKYASKAKNLADDMVRNTARDLLYYAVTQDAMLIFENLSRGFGRQGKRTFMAERQYTRMEDWLTAKLAYEGLPSKTYLSKTLAQYTSKTCSNCGFTITSADYDRVLEKLKKTATGWMTTINGKELKVEGQITYYNRYKRQNVVKDLSVELDRLSEESVNNDISSWTKGRQGEALSLLKKRFSHRPVQEKFVCLNCGFETHADEQAALNIARSWLFLRSQEYKKYQTNKTTGNTDKRAFVETWQSFYRKKLKEVWKPAV

SEQ ID NO: 32466 - protein, 978 aa, synthetic construct
  REGION 1..978: note = engineered CasX variant
QEIKGRINKIRRRLVKDSNTKKAGKTGPMKTLLVRVMTPDLRERLENLRKKPENIPQPISNTSRANLNKLLTDYTEMKKAILHVYWEEFQKDPVGLMSRVAQPASKKIDQNKLKPEMDEKGNLTTAGFACSQCGQPLFVYKLEQVSEKGKAYTNYFGRCNVAEHEKLILLAQLKPEKDSDEAVTYSLGKFGQRALDFYSIHVTKESTHPVKPLAQIAGNRYASPVGKALSDACMGTIASFLSKYQDIIIEHQKVVKGNQKRLESLRELAGKENLEYPSVTLPPQPHTKEGVDAYNEVIARVRMWVNLNLWQKLKLSRDDAKPLLRLKGFPSFPLVERQANEVDWWDMVCNVKKLINEKKEDGKVFWQNLAGYKRQEALRPYLSSEEDRKKGKKFARYQLGDLLLHLEKKHGEDWGKVYDEAWERIDKKVEGLSKHIKLEEERRSEDAQSKAALTDWLRAKASFVIEGLKEADKDEFCRCELKLQKWYGDLRGKPFAIEAENSILDISGFSKQYNCAFIWQKDGVKKLNLYLIINYFKGGKLRFKKIKPEAFEANRFYTVINKKSGEIVPMEVNFNFDDPNLIILPLAFGKRQGREFIWNDLLSLETGSLKLANGRVIEKTLYNRRTRQDEPALFVALTFERREVLDSSNIKPMNLIGVDRGENIPAVIALTDPEGCPLSRFKDSLGNPTHILRIGESYKEKQRTIQAKKEVEQRRAGGYSRKYASKAKNLADDMVRNTARDLLYYAVTQDAMLIFENLSRGFGRQGKRTFMAERQYTRMEDWLTAKLAYEGLPSKTYLSKTLAQYTSKTCSNCGFTITSADYDRVLEKLKKTATGWMTTINGKELKVEGQITYYNRYKRQNVVKDLSVELDRLSEESVNNDISSWTKGRQGEALSLLKKRFSHRPVQEKFVCLNCGFETHADEQAALNIARSWLFLRSQEYKKYQTNKTTGNTDKRAFVETWQSFYRKKLKEVWKPAV

SEQ ID NO: 32467 - protein, 979 aa, synthetic construct
  REGION 1..979: note = engineered CasX variant
QEIKGRINKIRRRLVKDSNTKKAGKTGPMKTLLVRVMTPDLRERLENLRKKPENIPQPISNTSRANLNKLLTDYTEMKKAILHVYWEEFQKDPVGLMSRVAQPASKKIDQNKLKPEMDEKGNLTTAGFACSQCGQPLFVYKLEQVSEKGKAYTNYFGRCNVAEHEKLILLAQLKPEKDSDEAVTYSLGKFGQRALDFYSIHVTKESTHPVKPLAQIAGNRYASYPVGKALSDACMGTIASFLSKYQDIIIEHQKVVKGNQKRLESLRELAGKENLEYPSVTLPPQPHTKEGVDAYNEVIARVRMWVNLNLWQKLKLSRDDAKPLLRLKGFPSFPLVERQANEVDWWDMVCNVKKLINEKKEDGKVFWQNLAGYKRQEALRPYLSSEEDRKKGKKFARYQLGDLLLHLEKKHGEDWGKVYDEAWERIDKKVEGLSKHIKLEEERRSEDAQSKAALTDWLRAKASFVIEGLKEADKDEFCRCELKLQKWYGDLRGKPFAIEAENSILDISGFSKQYNCAFIWQKDGVKKLNLYLIINYFKGGKLRFKKIKPEAFEANRFYTVINKKSGEIVPMEVNFNFDDPNLIILPLAFGKRQGREFIWNDLLSLETGSLKLANGRVIEKTLYNRRTRQDEPALFVALTFERREVLDSSNIKPMNLIGVDRGENIPAVIALTDPEGCPLSRFKDSLGNPTHILRIGESYKEKQRTIQAKKEVEQRRAGGYSRKYASKAKNLADDMVRNTARDLLYYAVTQDAMLIFENLSRGFGRQGKRTFMAERQYTRMEDWLTAKLAYEGLPSKTYLSKTLAQYTSKTCSNCGFTITSADYDRVLEKLKKTATGWMTTINGKELKVEGQITYYNRYKRQNVVKDLSVELDRLSEESVNNDISSWTKGRSGEALSLLKKRFSHRPVQEKFVCLNCEFETHADEQAALNIARSWLFLRSQEYKKYQTNKTTGNTDKRAFVETWQSFYRKKLKEVWKPAV

SEQ ID NO: 32468 - protein, 979 aa, synthetic construct
  REGION 1..979: note = engineered CasX variant
QEIKGRINKIRRRLVKDSNTKKAGKTGPMKTLLVRVMTPDLRERLENLRKKPENIPQPISNTSRANLNKLLTDYTEMKKAILHVYWEEFQKDPVGLMSRVAQPASKKIDQNKLKPEMDEKGNLTTAGFACSQCGQPLFVYKLEQVSEKGKAYTNYFGRCNVAEHEKLILLAQLKPEKDSDEAVTYSLGKFGQRALDFYSIHVTKESTHPVKPLAQIAGNRYASHPVGKALSDACMGTIASFLSKYQDIIIEHQKVVKGNQKRLESLRELAGKENLEYPSVTLPPQPHTKEGVDAYNEVIARVRMWVNLNLWQKLKLSRDDAKPLLRLKGFPSFPLVERQANEVDWWDMVCNVKKLINEKKEDGKVFWQNLAGYKRQEALRPYLSSEEDRKKGKKFARYQLGDLLLHLEKKHGEDWGKVYDEAWERIDKKVEGLSKHIKLEEERRSEDAQSKAALTDWLRAKASFVIEGLKEADKDEFCRCELKLQKWYGDLRGKPFAIEAENSILDISGFSKQYNCAFIWQKDGVKKLNLYLIINYFKGGKLRFKKIKPEAFEANRFYTVINKKSGEIVPMEVNFNFDDPNLIILPLAFGKRQGREFIWNDLLSLETGSLKLANGRVIEKTLYNRRTRQDEPALFVALTFERREVLDSSNIKPMNLIGVDRGENIPAVIALTDPEGCPLSRFKDSLGNPTHILRIGESYKEKQRTIQAKKEVEQRRAGGYSRKYASKAKNLADDMVRNTARDLLYYAVTQDAMLIFENLSRGFGRQGKRTFMAERQYTRMEDWLTAKLAYEGLPSKTYLSKTLAQYTSKTCSNCGFTITSADYDRVLEKLKKTATGWMTTINGKELKVEGQITYYNRYKRQNVVKDLSVELDRLSEESVNNDISSWTKGRSGEALSLLKKRFSHRPVQEKFVCLNCEFETHADEQAALNIARSWLFLRSQEYKKYQTNKTTGNTDKRAFVETWQSFYRKKLKEVWKPAV

SEQ ID NO: 32469 - protein, 979 aa, synthetic construct
  REGION 1..979: note = engineered CasX variant
QEIKGRINKIRRRLVKDSNTKKAGKTGPMKTLLVRVMTPDLRERLENLRKKPENIPQPISNTSRANLNKLLTDYTEMKKAILHVYWEEFQKDPVGLMSRVAQPASKKIDQNKLKPEMDEKGNLTTAGFACSQCGQPLFVYKLEQVSEKGKAYTNYFGRCNVAEHEKLILLAQLKPEKDSDEAVTYSLGKFGQRALDFYSIHVTKESTHPVKPLAQIAGNRYASSPVGKALSDACMGTIASFLSKYQDIIIEHQKVVKGNQKRLESLRELAGKENLEYPSVTLPPQPHTKEGVDAYNEVIARVRMWVNLNLWQKLKLSRDDAKPLLRLKGFPSFPLVERQANEVDWWDMVCNVKKLINEKKEDGKVFWQNLAGYKRQEALRPYLSSEEDRKKGKKFARYQLGDLLLHLEKKHGEDWGKVYDEAWERIDKKVEGLSKHIKLEEERRSEDAQSKAALTDWLRAKASFVIEGLKEADKDEFCRCELKLQKWYGDLRGKPFAIEAENSILDISGFSKQYNCAFIWQKDGVKKLNLYLIINYFKGGKLRFKKIKPEAFEANRFYTVINKKSGEIVPMEVNFNFDDPNLIILPLAFGKRQGREFIWNDLLSLETGSLKLANGRVIEKTLYNRRTRQDEPALFVALTFERREVLDSSNIKPMNLIGVDRGENIPAVIALTDPEGCPLSRFKDSLGNPTHILRIGESYKEKQRTIQAKKEVEQRRAGGYSRKYASKAKNLADDMVRNTARDLLYYAVTQDAMLIFENLSRGFGRQGKRTFMAERQYTRMEDWLTAKLAYEGLPSKTYLSKTLAQYTSKTCSNCGFTITSADYDRVLEKLKKTATGWMTTINGKELKVEGQITYYNRYKRQNVVKDLSVELDRLSEESVNNDISSWTKGRSGEALSLLKKRFSHRPVQEKFVCLNCEFETHADEQAALNIARSWLFLRSQEYKKYQTNKTTGNTDKRAFVETWQSFYRKKLKEVWKPAV

SEQ ID NO: 32470 - protein, 979 aa, synthetic construct
  REGION 1..979: note = engineered CasX variant
QEIKGRINKIRRRLVKDSNTKKAGKTGPMKTLLVRVMTPDLRERLENLRKKPENIPQPISNTSRANLNKLLTDYTEMKKAILHVYWEEFQKDPVGLMSRVAQPASKKIDQNKLKPEMDEKGNLTTAGFACSQCGQPLFVYKLEQVSEKGKAYTNYFGRCNVAEHEKLILLAQLKPEKDSDEAVTYSLGKFGQRALDFYSIHVTKESTHPVKPLAQIAGNRYASTPVGKALSDACMGTIASFLSKYQDIIIEHQKVVKGNQKRLESLRELAGKENLEYPSVTLPPQPHTKEGVDAYNEVIARVRMWVNLNLWQKLKLSRDDAKPLLRLKGFPSFPLVERQANEVDWWDMVCNVKKLINEKKEDGKVFWQNLAGYKRQEALRPYLSSEEDRKKGKKFARYQLGDLLLHLEKKHGEDWGKVYDEAWERIDKKVEGLSKHIKLEEERRSEDAQSKAALTDWLRAKASFVIEGLKEADKDEFCRCELKLQKWYGDLRGKPFAIEAENSILDISGFSKQYNCAFIWQKDGVKKLNLYLIINYFKGGKLRFKKIKPEAFEANRFYTVINKKSGEIVPMEVNFNFDDPNLIILPLAFGKRQGREFIWNDLLSLETGSLKLANGRVIEKTLYNRRTRQDEPALFVALTFERREVLDSSNIKPMNLIGVDRGENIPAVIALTDPEGCPLSRFKDSLGNPTHILRIGESYKEKQRTIQAKKEVEQRRAGGYSRKYASKAKNLADDMVRNTARDLLYYAVTQDAMLIFENLSRGFGRQGKRTFMAERQYTRMEDWLTAKLAYEGLPSKTYLSKTLAQYTSKTCSNCGFTITSADYDRVLEKLKKTATGWMTTINGKELKVEGQITYYNRYKRQNVVKDLSVELDRLSEESVNNDISSWTKGRSGEALSLLKKRFSHRPVQEKFVCLNCEFETHADEQAALNIARSWLFLRSQEYKKYQTNKTTGNTDKRAFVETWQSFYRKKLKEVWKPAV

SEQ ID NO: 32471 - protein, 979 aa, synthetic construct
  REGION 1..979: note = engineered CasX variant
QEIKGRINKIRRRLVKDSNTKKAGKTGPMKTLLVRVMTPDLRERLENLRKKPENIPQPISNTSRANLNKLLTDYTEMKKAILHVYWEEFQKDPVGLMSRVAQPASKKIDQNKLKPEMDEKGNLTTAGFACSQCGQPLFVYKLEQVSEKGKAYTNYFGRCNVAEHEKLILLAQLKPEKDSDEAVTYSLGKFGQRALDFYSIHVTKESTHPVKPLAQIAGNRYASAPVGKALSDACMGTIASFLSKYQDIIIEHQKVVKGNQKRLESLRELAGKENLEYPSVTLPPQPHTKEGVDAYNEVIARVRMWVNLNLWQKLKLSRDDAKPLLRLKGFPSFPLVERQANEVDWWDMVCNVKKLINEKKEDGKVFWQNLAGYKRQEALRPYLSSEEDRKKGKKFARYQLGDLLLHLEKKHGEDWGKVYDEAWERIDKKVEGLSKHIKLEEERRSEDAQSKAALTDWLRAKASFVIEGLKEADKDEFCRCELKLQKWYGDLRGKPFAIEAENSILDISGFSKQYNCAFIWQKDGVKKLNLYLIINYFKGGKLRFKKIKPEAFEANRFYTVINKKSGEIVPMEVNFNFDDPNLIILPLAFGKRQGREFIWNDLLSLETGSLKLANGRVIEKTLYNRRTRQDEPALFVALTFERREVLDSSNIKPMNLIGVDRGENIPAVIALTDPEGCPLSRFKDSLGNPTHILRIGESYKEKQRTIQAKKEVEQRRAGGYSRKYASKAKNLADDMVRNTARDLLYYAVTQDAMLIFENLSRGFGRQGKRTFMAERQYTRMEDWLTAKLAYEGLPSKTYLSKTLAQYTSKTCSNCGFTITSADYDRVLEKLKKTATGWMTTINGKELKVEGQITYYNRYKRQNVVKDLSVELDRLSEESVNNDISSWTKGRSGEALSLLKKRFSHRPVQEKFVCLNCEFETHADEQAALNIARSWLFLRSQEYKKYQTNKTTGNTDKRAFVETWQSFYRKKLKEVWKPAV

SEQ ID NO: 32472 - protein, 979 aa, synthetic construct
  REGION 1..979: note = engineered CasX variant
QEIKGRINKIRRRLVKDSNTKKAGKTGPMKTLLVRVMTPDLRERLENLRKKPENIPQPISNTSRANLNKLLTDYTEMKKAILHVYWEEFQKDPVGLMSRVAQPASKKIDQNKLKPEMDEKGNLTTAGFACSQCGQPLFVYKLEQVSEKGKAYTNYFGRCNVAEHEKLILLAQLKPEKDSDEAVTYSLGKFGQRALDFYSIHVTKESTHPVKPLAQIAGNRYASVPVGKALSDACMGTIASFLSKYQDIIIEHQKVVKGNQKRLESLRELAGKENLEYPSVTLPPQPHTKEGVDAYNEVIARVRMWVNLNLWQKLKLSRDDAKPLLRLKGFPSFPLVERQANEVDWWDMVCNVKKLINEKKEDGKVFWQNLAGYKRQEALRPYLSSEEDRKKGKKFARYQLGDLLLHLEKKHGEDWGKVYDEAWERIDKKVEGLSKHIKLEEERRSEDAQSKAALTDWLRAKASFVIEGLKEADKDEFCRCELKLQKWYGDLRGKPFAIEAENSILDISGFSKQYNCAFIWQKDGVKKLNLYLIINYFKGGKLRFKKIKPEAFEANRFYTVINKKSGEIVPMEVNFNFDDPNLIILPLAFGKRQGREFIWNDLLSLETGSLKLANGRVIEKTLYNRRTRQDEPALFVALTFERREVLDSSNIKPMNLIGVDRGENIPAVIALTDPEGCPLSRFKDSLGNPTHILRIGESYKEKQRTIQAKKEVEQRRAGGYSRKYASKAKNLADDMVRNTARDLLYYAVTQDAMLIFENLSRGFGRQGKRTFMAERQYTRMEDWLTAKLAYEGLPSKTYLSKTLAQYTSKTCSNCGFTITSADYDRVLEKLKKTATGWMTTINGKELKVEGQITYYNRYKRQNVVKDLSVELDRLSEESVNNDISSWTKGRSGEALSLLKKRFSHRPVQEKFVCLNCEFETHADEQAALNIARSWLFLRSQEYKKYQTNKTTGNTDKRAFVETWQSFYRKKLKEVWKPAV

SEQ ID NO: 32473 - protein, 979 aa, synthetic construct
  REGION 1..979: note = engineered CasX variant
QEIKGRINKIRRRLVKDSNTKKAGKTGPMKTLLVRVMTPDLRERLENLRKKPENIPQPISNTSRANLNKLLTDYTEMKKAILHVYWEEFQKDPVGLMSRVAQPASKKIDQNKLKPEMDEKGNLTTAGFACSQCGQPLFVYKLEQVSEKGKAYTNYFGRCNVAEHEKLIKLAQLKPEKDSDEAVTYSLGKFGQRALDFYSIHVTKESTHPVKPLAQIAGNRYASGPVGKALSDACMGTIASFLSKYQDIIIEHQKVVKGNQKRLESLRELAGKENLEYPSVTLPPQPHTKEGVDAYNEVIARVRMWVNLNLWQKLKLSRDDAKPLLRLKGFPSFPLVERQANEVDWWDMVCNVKKLINEKKEDGKVFWQNLAGYKRQEALRPYLSSEEDRKKGKKFARYQLGDLLLHLEKKHGEDWGKVYDEAWERIDKKVEGLSKHIKLEEERRSEDAQSKAALTDWLRAKASFVIEGLKEADKDEFCRCELKLQKWYGDLRGKPFAIEAENSILDISGFSKQYNCAFIWQKDGVKKLNLYLIINYFKGGKLRFKKIKPEAFEANRFYTVINKKSGEIVPMEVNFNFDDPNLIILPLAFGKRQGREFIWNDLLSLETGSLKLANGRVIEKTLYNRRTRQDEPALFVALTFERREVLDSSNIKPMNLIGVDRGENIPAVIALTDPEGCPLSRFKDSLGNPTHILRIGESYKEKQRTIQAKKEVEQRRAGGYSRKYASKAKNLADDMVRNTARDLLYYAVTQDAMLIFENLSRGFGRQGKRTFMAERQYTRMEDWLTAKLAYEGLPSKTYLSKTLAQYTSKTCSNCGFTITSADYDRVLEKLKKTATGWMTTINGKELKVEGQITYYNRYKRQNVVKDLSVELDRLSEESVNNDISSWTKGRSGEALSLLKKRFSHRPVQEKFVCLNCEFETHADEQAALNIARSWLFLRSQEYKKYQTNKTTGNTDKRAFVETWQSFYRKKLKEVWKPAV

SEQ ID NO: 32474 - protein, 978 aa, synthetic construct
  REGION 1..978: note = engineered CasX variant
QEIKGRINKIRRRLVKDSNTKKAGKTGPMKTLLVRVMTPDLRERLENLRKKPENIPQPISNTSRANLNKLLTDYTEMKKAILHVYWEEFQKDPVGLMSRVAQPASKKIDQNKLKPEMDEKGNLTTAGFACSQCGQPLFVYKLEQVSEKGKAYTNYFGRCNVAEHEKLILLAQLKPEKDSDEAVTYSLGKFGQRALDFYSIHVTKESTHPVKPLAQIAGNRYASPVGKALSDACMGTIASFLSKYQDIIIEHQKVVKGNQKRLESLRELAGKENLEYPSVTLPPQPHTKEGVDAYNEVIARVRMWVNLNLWQKLKLSRDDAKPLLRLKGFPSFPLVERQANEVDWWDMVCNVKKLINEKKEDGKVFWQNLAGYKRQEALRPYLSSEEDRKKGKKFARYQLGDLLLHLEKKHGEDWGKVYDEAWERIDKKVEGLSKHIKLEEERRSEDAQSKAALTDWLRAKASFVIEGLKEADKDEFCRCELKLQKWYGDLRGKPFAIEAENSILDISGFSKQYNCAFIWQKDGVKKLNLYLIINYFKGGKLRFKKIKPEAFEANRFYTVINKKSGEIVPMEVNFNFDDPNLIILPLAFGKRQGREFIWNDLLSLETGSLKLANGRVIEKTLYNRRTRQDEPALFVALTFERREVLDSSNIKPMNLIGVDRGENIPAVIALTDPEGCPLSRFKDSLGNPTHILRIGESYKEKQRTIQAKKEVEQRRAGGYSRKYASKAKNLADDMVRNTARDLLYYAVTQDAMLIFENLSRGFGRQGKRTFMAERQYTRMEDWLTAKLAYEGLPSKTYLSKTLAQYTSKTCSNCGFTITSADYDRVLEKLKKTATGWMTTINGKELKVEGQITYYNRYKRQNVVKDLSVELDRLSEESVNNDISSWTKGRSGEALSLLKKRFSHRPVQEKFVCLNCEFETHADEQAALNIARSWLFLRSQEYKKYQTNKTTGNTDKRAFVETWQSFYRKKLKEVWKPAV

SEQ ID NO: 32475 - protein, 980 aa, synthetic construct
  REGION 1..980: note = engineered CasX variant
QEIKGRINKIRRRLVKDSNTKKAGKTGPMKTLLVRVMTPDLRERLENLRKKPENIPQPISNTSRANLNKLLTDYTEMKKAILHVYWEEFQKDPVGLMSRVAQPASKKIDQNKLKPEMDEKGNLTTAGFACSQCGQPLFVYKLEQVSEKGKAYTNYFGRCNVAEHEKLILLAQLKPEKDSDEAVTYSLGKFGQRALDFYSIHVTKESTHPVKPLAQIAGNRYASYPVGKALSDACMGTIASFLSKYQDIIIEHQKVVKGNQKRLESLRELAGKENLEYPSVTLPPQPHTKEGVDAYNEVIARVRMWVNLNLWQKLKLSRDDAKPLLRLKGFPSFPLVERQANEVDWWDMVCNVKKLINEKKEDGKVFWQNLAGYKRQEALRPYLSSEEDRKKGKKFARYQLGDLLLHLEKKHGEDWGKVYDEAWERIDKKVEGLSKHIKLEEERRSEDAQSKAALTDWLRAKASFVIEGLKEADKDEFCRCELKLQKWYGDLRGKPFAIEAENSILDISGFSKQYNCAFIWQKDGVKKLNLYLIINYFKGGKLRFKKIKPEAFEANRFYTVINKKSGEIVPMEVNFNFDDPNLIILPLAFGKRQGREFIWNDLLSLETGSLKLANGRVIEKTLYNRRTRQDEPALFVALTFERREVLDSSNIKPMNLIGVDRGENIPAVIALTDPEGCPLSRFKDSLGNPTHILRIGESYKEKQRTIQAKKEVEQRRAGGYSRKYASKAKNLADDMVRNTARDLLYYAVTQDAMLIFENLSRGFGRQGKRTFMAERQYTRMEDWLTAKLAYEGLPSKTYLSKTLAQYTSKTCSNCGFTITSADYDRVLEKLKKTATGWMTTINGKELKVEGQITYYNRYKRQNVVKDLSVELDRLSEESVNNDISSWTKGRSGEALSLLKKRFSHRPVQEKFVCLNCGFETHADEQAALNIARSWLFLRSQEYKKYQTNKTSTGNTDKRAFVETWQSFYRKKLKEVWKPAV

SEQ ID NO: 32476 - protein, 980 aa, synthetic construct
  REGION 1..980: note = engineered CasX variant
QEIKGRINKIRRRLVKDSNTKKAGKTGPMKTLLVRVMTPDLRERLENLRKKPENIPQPISNTSRANLNKLLTDYTEMKKAILHVYWEEFQKDPVGLMSRVAQPASKKIDQNKLKPEMDEKGNLTTAGFACSQCGQPLFVYKLEQVSEKGKAYTNYFGRCNVAEHEKLILLAQLKPEKDSDEAVTYSLGKFGQRALDFYSIHVTKESTHPVKPLAQIAGNRYASHPVGKALSDACMGTIASFLSKYQDIIIEHQKVVKGNQKRLESLRELAGKENLEYPSVTLPPQPHTKEGVDAYNEVIARVRMWVNLNLWQKLKLSRDDAKPLLRLKGFPSFPLVERQANEVDWWDMVCNVKKLINEKKEDGKVFWQNLAGYKRQEALRPYLSSEEDRKKGKKFARYQLGDLLLHLEKKHGEDWGKVYDEAWERIDKKVEGLSKHIKLEEERRSEDAQSKAALTDWLRAKASFVIEGLKEADKDEFCRCELKLQKWYGDLRGKPFAIEAENSILDISGFSKQYNCAFIWQKDGVKKLNLYLIINYFKGGKLRFKKIKPEAFEANRFYTVINKKSGEIVPMEVNFNFDDPNLIILPLAFGKRQGREFIWNDLLSLETGSLKLANGRVIEKTLYNRRTRQDEPALFVALTFERREVLDSSNIKPMNLIGVDRGENIPAVIALTDPEGCPLSRFKDSLGNPTHILRIGESYKEKQRTIQAKKEVEQRRAGGYSRKYASKAKNLADDMVRNTARDLLYYAVTQDAMLIFENLSRGFGRQGKRTFMAERQYTRMEDWLTAKLAYEGLPSKTYLSKTLAQYTSKTCSNCGFTITSADYDRVLEKLKKTATGWMTTINGKELKVEGQITYYNRYKRQNVVKDLSVELDRLSEESVNNDISSWTKGRSGEALSLLKKRFSHRPVQEKFVCLNCGFETHADEQAALNIARSWLFLRSQEYKKYQTNKTSTGNTDKRAFVETWQSFYRKKLKEVWKPAV

SEQ ID NO: 32477 - protein, 980 aa, synthetic construct
  REGION 1..980: note = engineered CasX variant
QEIKGRINKIRRRLVKDSNTKKAGKTGPMKTLLVRVMTPDLRERLENLRKKPENIPQPISNTSRANLNKLLTDYTEMKKAILHVYWEEFQKDPVGLMSRVAQPASKKIDQNKLKPEMDEKGNLTTAGFACSQCGQPLFVYKLEQVSEKGKAYTNYFGRCNVAEHEKLILLAQLKPEKDSDEAVTYSLGKFGQRALDFYSIHVTKESTHPVKPLAQIAGNRYASSPVGKALSDACMGTIASFLSKYQDIIIEHQKVVKGNQKRLESLRELAGKENLEYPSVTLPPQPHTKEGVDAYNEVIARVRMWVNLNLWQKLKLSRDDAKPLLRLKGFPSFPLVERQANEVDWWDMVCNVKKLINEKKEDGKVFWQNLAGYKRQEALRPYLSSEEDRKKGKKFARYQLGDLLLHLEKKHGEDWGKVYDEAWERIDKKVEGLSKHIKLEEERRSEDAQSKAALTDWLRAKASFVIEGLKEADKDEFCRCELKLQKWYGDLRGKPFAIEAENSILDISGFSKQYNCAFIWQKDGVKKLNLYLIINYFKGGKLRFKKIKPEAFEANRFYTVINKKSGEIVPMEVNFNFDDPNLIILPLAFGKRQGREFIWNDLLSLETGSLKLANGRVIEKTLYNRRTRQDEPALFVALTFERREVLDSSNIKPMNLIGVDRGENIPAVIALTDPEGCPLSRFKDSLGNPTHILRIGESYKEKQRTIQAKKEVEQRRAGGYSRKYASKAKNLADDMVRNTARDLLYYAVTQDAMLIFENLSRGFGRQGKRTFMAERQYTRMEDWLTAKLAYEGLPSKTYLSKTLAQYTSKTCSNCGFTITSADYDRVLEKLKKTATGWMTTINGKELKVEGQITYYNRYKRQNVVKDLSVELDRLSEESVNNDISSWTKGRSGEALSLLKKRFSHRPVQEKFVCLNCGFETHADEQAALNIARSWLFLRSQEYKKYQTNKTSTGNTDKRAFVETWQSFYRKKLKEVWKPAV

SEQ ID NO: 32478 - protein, 980 aa, synthetic construct
  REGION 1..980: note = engineered CasX variant
QEIKGRINKIRRRLVKDSNTKKAGKTGPMKTLLVRVMTPDLRERLENLRKKPENIPQPISNTSRANLNKLLTDYTEMKKAILHVYWEEFQKDPVGLMSRVAQPASKKIDQNKLKPEMDEKGNLTTAGFACSQCGQPLFVYKLEQVSEKGKAYTNYFGRCNVAEHEKLILLAQLKPEKDSDEAVTYSLGKFGQRALDFYSIHVTKESTHPVKPLAQIAGNRYASTPVGKALSDACMGTIASFLSKYQDIIIEHQKVVKGNQKRLESLRELAGKENLEYPSVTLPPQPHTKEGVDAYNEVIARVRMWVNLNLWQKLKLSRDDAKPLLRLKGFPSFPLVERQANEVDWWDMVCNVKKLINEKKEDGKVFWQNLAGYKRQEALRPYLSSEEDRKKGKKFARYQLGDLLLHLEKKHGEDWGKVYDEAWERIDKKVEGLSKHIKLEEERRSEDAQSKAALTDWLRAKASFVIEGLKEADKDEFCRCELKLQKWYGDLRGKPFAIEAENSILDISGFSKQYNCAFIWQKDGVKKLNLYLIINYFKGGKLRFKKIKPEAFEANRFYTVINKKSGEIVPMEVNFNFDDPNLIILPLAFGKRQGREFIWNDLLSLETGSLKLANGRVIEKTLYNRRTRQDEPALFVALTFERREVLDSSNIKPMNLIGVDRGENIPAVIALTDPEGCPLSRFKDSLGNPTHILRIGESYKEKQRTIQAKKEVEQRRAGGYSRKYASKAKNLADDMVRNTARDLLYYAVTQDAMLIFENLSRGFGRQGKRTFMAERQYTRMEDWLTAKLAYEGLPSKTYLSKTLAQYTSKTCSNCGFTITSADYDRVLEKLKKTATGWMTTINGKELKVEGQITYYNRYKRQNVVKDLSVELDRLSEESVNNDISSWTKGRSGEALSLLKKRFSHRPVQEKFVCLNCGFETHADEQAALNIARSWLFLRSQEYKKYQTNKTSTGNTDKRAFVETWQSFYRKKLKEVWKPAV

SEQ ID NO: 32479 - protein, 980 aa, synthetic construct
  REGION 1..980: note = engineered CasX variant
QEIKGRINKIRRRLVKDSNTKKAGKTGPMKTLLVRVMTPDLRERLENLRKKPENIPQPISNTSRANLNKLLTDYTEMKKAILHVYWEEFQKDPVGLMSRVAQPASKKIDQNKLKPEMDEKGNLTTAGFACSQCGQPLFVYKLEQVSEKGKAYTNYFGRCNVAEHEKLILLAQLKPEKDSDEAVTYSLGKFGQRALDFYSIHVTKESTHPVKPLAQIAGNRYASAPVGKALSDACMGTIASFLSKYQDIIIEHQKVVKGNQKRLESLRELAGKENLEYPSVTLPPQPHTKEGVDAYNEVIARVRMWVNLNLWQKLKLSRDDAKPLLRLKGFPSFPLVERQANEVDWWDMVCNVKKLINEKKEDGKVFWQNLAGYKRQEALRPYLSSEEDRKKGKKFARYQLGDLLLHLEKKHGEDWGKVYDEAWERIDKKVEGLSKHIKLEEERRSEDAQSKAALTDWLRAKASFVIEGLKEADKDEFCRCELKLQKWYGDLRGKPFAIEAENSILDISGFSKQYNCAFIWQKDGVKKLNLYLIINYFKGGKLRFKKIKPEAFEANRFYTVINKKSGEIVPMEVNFNFDDPNLIILPLAFGKRQGREFIWNDLLSLETGSLKLANGRVIEKTLYNRRTRQDEPALFVALTFERREVLDSSNIKPMNLIGVDRGENIPAVIALTDPEGCPLSRFKDSLGNPTHILRIGESYKEKQRTIQAKKEVEQRRAGGYSRKYASKAKNLADDMVRNTARDLLYYAVTQDAMLIFENLSRGFGRQGKRTFMAERQYTRMEDWLTAKLAYEGLPSKTYLSKTLAQYTSKTCSNCGFTITSADYDRVLEKLKKTATGWMTTINGKELKVEGQITYYNRYKRQNVVKDLSVELDRLSEESVNNDISSWTKGRSGEALSLLKKRFSHRPVQEKFVCLNCGFETHADEQAALNIARSWLFLRSQEYKKYQTNKTSTGNTDKRAFVETWQSFYRKKLKEVWKPAV

SEQ ID NO: 32480 - protein, 980 aa, synthetic construct
  REGION 1..980: note = engineered CasX variant
QEIKGRINKIRRRLVKDSNTKKAGKTGPMKTLLVRVMTPDLRERLENLRKKPENIPQPISNTSRANLNKLLTDYTEMKKAILHVYWEEFQKDPVGLMSRVAQPASKKIDQNKLKPEMDEKGNLTTAGFACSQCGQPLFVYKLEQVSEKGKAYTNYFGRCNVAEHEKLILLAQLKPEKDSDEAVTYSLGKFGQRALDFYSIHVTKESTHPVKPLAQIAGNRYASVPVGKALSDACMGTIASFLSKYQDIIIEHQKVVKGNQKRLESLRELAGKENLEYPSVTLPPQPHTKEGVDAYNEVIARVRMWVNLNLWQKLKLSRDDAKPLLRLKGFPSFPLVERQANEVDWWDMVCNVKKLINEKKEDGKVFWQNLAGYKRQEALRPYLSSEEDRKKGKKFARYQLGDLLLHLEKKHGEDWGKVYDEAWERIDKKVEGLSKHIKLEEERRSEDAQSKAALTDWLRAKASFVIEGLKEADKDEFCRCELKLQKWYGDLRGKPFAIEAENSILDISGFSKQYNCAFIWQKDGVKKLNLYLIINYFKGGKLRFKKIKPEAFEANRFYTVINKKSGEIVPMEVNFNFDDPNLIILPLAFGKRQGREFIWNDLLSLETGSLKLANGRVIEKTLYNRRTRQDEPALFVALTFERREVLDSSNIKPMNLIGVDRGENIPAVIALTDPEGCPLSRFKDSLGNPTHILRIGESYKEKQRTIQAKKEVEQRRAGGYSRKYASKAKNLADDMVRNTARDLLYYAVTQDAMLIFENLSRGFGRQGKRTFMAERQYTRMEDWLTAKLAYEGLPSKTYLSKTLAQYTSKTCSNCGFTITSADYDRVLEKLKKTATGWMTTINGKELKVEGQITYYNRYKRQNVVKDLSVELDRLSEESVNNDISSWTKGRSGEALSLLKKRFSHRPVQEKFVCLNCGFETHADEQAALNIARSWLFLRSQEYKKYQTNKTSTGNTDKRAFVETWQSFYRKKLKEVWKPAV

SEQ ID NO: 32481 - protein, 980 aa, synthetic construct
  REGION 1..980: note = engineered CasX variant
QEIKGRINKIRRRLVKDSNTKKAGKTGPMKTLLVRVMTPDLRERLENLRKKPENIPQPISNTSRANLNKLLTDYTEMKKAILHVYWEEFQKDPVGLMSRVAQPASKKIDQNKLKPEMDEKGNLTTAGFACSQCGQPLFVYKLEQVSEKGKAYTNYFGRCNVAEHEKLIKLAQLKPEKDSDEAVTYSLGKFGQRALDFYSIHVTKESTHPVKPLAQIAGNRYASGPVGKALSDACMGTIASFLSKYQDIIIEHQKVVKGNQKRLESLRELAGKENLEYPSVTLPPQPHTKEGVDAYNEVIARVRMWVNLNLWQKLKLSRDDAKPLLRLKGFPSFPLVERQANEVDWWDMVCNVKKLINEKKEDGKVFWQNLAGYKRQEALRPYLSSEEDRKKGKKFARYQLGDLLLHLEKKHGEDWGKVYDEAWERIDKKVEGLSKHIKLEEERRSEDAQSKAALTDWLRAKASFVIEGLKEADKDEFCRCELKLQKWYGDLRGKPFAIEAENSILDISGFSKQYNCAFIWQKDGVKKLNLYLIINYFKGGKLRFKKIKPEAFEANRFYTVINKKSGEIVPMEVNFNFDDPNLIILPLAFGKRQGREFIWNDLLSLETGSLKLANGRVIEKTLYNRRTRQDEPALFVALTFERREVLDSSNIKPMNLIGVDRGENIPAVIALTDPEGCPLSRFKDSLGNPTHILRIGESYKEKQRTIQAKKEVEQRRAGGYSRKYASKAKNLADDMVRNTARDLLYYAVTQDAMLIFENLSRGFGRQGKRTFMAERQYTRMEDWLTAKLAYEGLPSKTYLSKTLAQYTSKTCSNCGFTITSADYDRVLEKLKKTATGWMTTINGKELKVEGQITYYNRYKRQNVVKDLSVELDRLSEESVNNDISSWTKGRSGEALSLLKKRFSHRPVQEKFVCLNCGFETHADEQAALNIARSWLFLRSQEYKKYQTNKTSTGNTDKRAFVETWQSFYRKKLKEVWKPAV

SEQ ID NO: 32482 - protein, 979 aa, synthetic construct
  REGION 1..979: note = engineered CasX variant
QEIKGRINKIRRRLVKDSNTKKAGKTGPMKTLLVRVMTPDLRERLENLRKKPENIPQPISNTSRANLNKLLTDYTEMKKAILHVYWEEFQKDPVGLMSRVAQPASKKIDQNKLKPEMDEKGNLTTAGFACSQCGQPLFVYKLEQVSEKGKAYTNYFGRCNVAEHEKLILLAQLKPEKDSDEAVTYSLGKFGQRALDFYSIHVTKESTHPVKPLAQIAGNRYASPVGKALSDACMGTIASFLSKYQDIIIEHQKVVKGNQKRLESLRELAGKENLEYPSVTLPPQPHTKEGVDAYNEVIARVRMWVNLNLWQKLKLSRDDAKPLLRLKGFPSFPLVERQANEVDWWDMVCNVKKLINEKKEDGKVFWQNLAGYKRQEALRPYLSSEEDRKKGKKFARYQLGDLLLHLEKKHGEDWGKVYDEAWERIDKKVEGLSKHIKLEEERRSEDAQSKAALTDWLRAKASFVIEGLKEADKDEFCRCELKLQKWYGDLRGKPFAIEAENSILDISGFSKQYNCAFIWQKDGVKKLNLYLIINYFKGGKLRFKKIKPEAFEANRFYTVINKKSGEIVPMEVNFNFDDPNLIILPLAFGKRQGREFIWNDLLSLETGSLKLANGRVIEKTLYNRRTRQDEPALFVALTFERREVLDSSNIKPMNLIGVDRGENIPAVIALTDPEGCPLSRFKDSLGNPTHILRIGESYKEKQRTIQAKKEVEQRRAGGYSRKYASKAKNLADDMVRNTARDLLYYAVTQDAMLIFENLSRGFGRQGKRTFMAERQYTRMEDWLTAKLAYEGLPSKTYLSKTLAQYTSKTCSNCGFTITSADYDRVLEKLKKTATGWMTTINGKELKVEGQITYYNRYKRQNVVKDLSVELDRLSEESVNNDISSWTKGRSGEALSLLKKRFSHRPVQEKFVCLNCGFETHADEQAALNIARSWLFLRSQEYKKYQTNKTSTGNTDKRAFVETWQSFYRKKLKEVWKPAV

SEQ ID NO: 32483 - protein, 980 aa, synthetic construct
  REGION 1..980: note = engineered CasX variant
QEIKGRINKIRRRLVKDSNTKKAGKTGPMKTLLVRVMTPDLRERLENLRKKPENIPQPISNTSRANLNKLLTDYTEMKKAILHVYWEEFQKDPVGLMSRVAQPASKKIDQNKLKPEMDEKGNLTTAGFACSQCGQPLFVYKLEQVSEKGKAYTNYFGRCNVAEHEKLILLAQLKPEKDSDEAVTYSLGKFGQRALDFYSIHVTKESTHPVKPLAQIAGNRYASYPVGKALSDACMGTIASFLSKYQDIIIEHQKVVKGNQKRLESLRELAGKENLEYPSVTLPPQPHTKEGVDAYNEVIARVRMWVNLNLWQKLKLSRDDAKPLLRLKGFPSFPLVERQANEVDWWDMVCNVKKLINEKKEDGKVFWQNLAGYKRQEALRPYLSSEEDRKKGKKFARYQLGDLLLHLEKKHGEDWGKVYDEAWERIDKKVEGLSKHIKLEEERRSEDAQSKAALTDWLRAKASFVIEGLKEADKDEFCRCELKLQKWYGDLRGKPFAIEAENSILDISGFSKQYNCAFIWQKDGVKKLNLYLIINYFKGGKLRFKKIKPEAFEANRFYTVINKKSGEIVPMEVNFNFDDPNLIILPLAFGKRQGREFIWNDLLSLETGSLKLANGRVIEKTLYNRRTRQDEPALFVALTFERREVLDSSNIKPMNLIGVDRGENIPAVIALTDPEGCPLSRFKDSLGNPTHILRIGESYKEKQRTIQAKKEVEQRRAGGYSRKYASKAKNLADDMVRNTARDLLYYAVTQDAMLIFENLSRGFGRQGKRTFMAERQYTRMEDWLTAKLAYEGLPSKTYLSKTLAQYTSKTCSNCGFTITSADYDRVLEKLKKTATGWMTTINGKELKVEGQITYYNRYKRQNVVKDLSVELDRLSEESVNNDISSWTKGRSGEALSLLKKRFSHRPVQEKFVCLNCGFETHADEQAALNIARSWLFLRSQEYKKYQTNKTTGKNTDKRAFVETWQSFYRKKLKEVWKPAV

SEQ ID NO: 32484 - protein, 980 aa, synthetic construct
  REGION 1..980: note = engineered CasX variant
QEIKGRINKIRRRLVKDSNTKKAGKTGPMKTLLVRVMTPDLRERLENLRKKPENIPQPISNTSRANLNKLLTDYTEMKKAILHVYWEEFQKDPVGLMSRVAQPASKKIDQNKLKPEMDEKGNLTTAGFACSQCGQPLFVYKLEQVSEKGKAYTNYFGRCNVAEHEKLILLAQLKPEKDSDEAVTYSLGKFGQRALDFYSIHVTKESTHPVKPLAQIAGNRYASHPVGKALSDACMGTIASFLSKYQDIIIEHQKVVKGNQKRLESLRELAGKENLEYPSVTLPPQPHTKEGVDAYNEVIARVRMWVNLNLWQKLKLSRDDAKPLLRLKGFPSFPLVERQANEVDWWDMVCNVKKLINEKKEDGKVFWQNLAGYKRQEALRPYLSSEEDRKKGKKFARYQLGDLLLHLEKKHGEDWGKVYDEAWERIDKKVEGLSKHIKLEEERRSEDAQSKAALTDWLRAKASFVIEGLKEADKDEFCRCELKLQKWYGDLRGKPFAIEAENSILDISGFSKQYNCAFIWQKDGVKKLNLYLIINYFKGGKLRFKKIKPEAFEANRFYTVINKKSGEIVPMEVNFNFDDPNLIILPLAFGKRQGREFIWNDLLSLETGSLKLANGRVIEKTLYNRRTRQDEPALFVALTFERREVLDSSNIKPMNLIGVDRGENIPAVIALTDPEGCPLSRFKDSLGNPTHILRIGESYKEKQRTIQAKKEVEQRRAGGYSRKYASKAKNLADDMVRNTARDLLYYAVTQDAMLIFENLSRGFGRQGKRTFMAERQYTRMEDWLTAKLAYEGLPSKTYLSKTLAQYTSKTCSNCGFTITSADYDRVLEKLKKTATGWMTTINGKELKVEGQITYYNRYKRQNVVKDLSVELDRLSEESVNNDISSWTKGRSGEALSLLKKRFSHRPVQEKFVCLNCGFETHADEQAALNIARSWLFLRSQEYKKYQTNKTTGKNTDKRAFVETWQSFYRKKLKEVWKPAV

SEQ ID NO: 32485 - protein, 980 aa, synthetic construct
  REGION 1..980: note = engineered CasX variant
QEIKGRINKIRRRLVKDSNTKKAGKTGPMKTLLVRVMTPDLRERLENLRKKPENIPQPISNTSRANLNKLLTDYTEMKKAILHVYWEEFQKDPVGLMSRVAQPASKKIDQNKLKPEMDEKGNLTTAGFACSQCGQPLFVYKLEQVSEKGKAYTNYFGRCNVAEHEKLILLAQLKPEKDSDEAVTYSLGKFGQRALDFYSIHVTKESTHPVKPLAQIAGNRYASSPVGKALSDACMGTIASFLSKYQDIIIEHQKVVKGNQKRLESLRELAGKENLEYPSVTLPPQPHTKEGVDAYNEVIARVRMWVNLNLWQKLKLSRDDAKPLLRLKGFPSFPLVERQANEVDWWDMVCNVKKLINEKKEDGKVFWQNLAGYKRQEALRPYLSSEEDRKKGKKFARYQLGDLLLHLEKKHGEDWGKVYDEAWERIDKKVEGLSKHIKLEEERRSEDAQSKAALTDWLRAKASFVIEGLKEADKDEFCRCELKLQKWYGDLRGKPFAIEAENSILDISGFSKQYNCAFIWQKDGVKKLNLYLIINYFKGGKLRFKKIKPEAFEANRFYTVINKKSGEIVPMEVNFNFDDPNLIILPLAFGKRQGREFIWNDLLSLETGSLKLANGRVIEKTLYNRRTRQDEPALFVALTFERREVLDSSNIKPMNLIGVDRGENIPAVIALTDPEGCPLSRFKDSLGNPTHILRIGESYKEKQRTIQAKKEVEQRRAGGYSRKYASKAKNLADDMVRNTARDLLYYAVTQDAMLIFENLSRGFGRQGKRTFMAERQYTRMEDWLTAKLAYEGLPSKTYLSKTLAQYTSKTCSNCGFTITSADYDRVLEKLKKTATGWMTTINGKELKVEGQITYYNRYKRQNVVKDLSVELDRLSEESVNNDISSWTKGRSGEALSLLKKRFSHRPVQEKFVCLNCGFETHADEQAALNIARSWLFLRSQEYKKYQTNKTTGKNTDKRAFVETWQSFYRKKLKEVWKPAV

SEQ ID NO: 32486 - protein, 980 aa, synthetic construct
  REGION 1..980: note = engineered CasX variant
QEIKGRINKIRRRLVKDSNTKKAGKTGPMKTLLVRVMTPDLRERLENLRKKPENIPQPISNTSRANLNKLLTDYTEMKKAILHVYWEEFQKDPVGLMSRVAQPASKKIDQNKLKPEMDEKGNLTTAGFACSQCGQPLFVYKLEQVSEKGKAYTNYFGRCNVAEHEKLILLAQLKPEKDSDEAVTYSLGKFGQRALDFYSIHVTKESTHPVKPLAQIAGNRYASTPVGKALSDACMGTIASFLSKYQDIIIEHQKVVKGNQKRLESLRELAGKENLEYPSVTLPPQPHTKEGVDAYNEVIARVRMWVNLNLWQKLKLSRDDAKPLLRLKGFPSFPLVERQANEVDWWDMVCNVKKLINEKKEDGKVFWQNLAGYKRQEALRPYLSSEEDRKKGKKFARYQLGDLLLHLEKKHGEDWGKVYDEAWERIDKKVEGLSKHIKLEEERRSEDAQSKAALTDWLRAKASFVIEGLKEADKDEFCRCELKLQKWYGDLRGKPFAIEAENSILDISGFSKQYNCAFIWQKDGVKKLNLYLIINYFKGGKLRFKKIKPEAFEANRFYTVINKKSGEIVPMEVNFNFDDPNLIILPLAFGKRQGREFIWNDLLSLETGSLKLANGRVIEKTLYNRRTRQDEPALFVALTFERREVLDSSNIKPMNLIGVDRGENIPAVIALTDPEGCPLSRFKDSLGNPTHILRIGESYKEKQRTIQAKKEVEQRRAGGYSRKYASKAKNLADDMVRNTARDLLYYAVTQDAMLIFENLSRGFGRQGKRTFMAERQYTRMEDWLTAKLAYEGLPSKTYLSKTLAQYTSKTCSNCGFTITSADYDRVLEKLKKTATGWMTTINGKELKVEGQITYYNRYKRQNVVKDLSVELDRLSEESVNNDISSWTKGRSGEALSLLKKRFSHRPVQEKFVCLNCGFETHADEQAALNIARSWLFLRSQEYKKYQTNKTTGKNTDKRAFVETWQSFYRKKLKEVWKPAV

SEQ ID NO: 32487 - protein, 980 aa, synthetic construct
  REGION 1..980: note = engineered CasX variant
QEIKGRINKIRRRLVKDSNTKKAGKTGPMKTLLVRVMTPDLRERLENLRKKPENIPQPISNTSRANLNKLLTDYTEMKKAILHVYWEEFQKDPVGLMSRVAQPASKKIDQNKLKPEMDEKGNLTTAGFACSQCGQPLFVYKLEQVSEKGKAYTNYFGRCNVAEHEKLILLAQLKPEKDSDEAVTYSLGKFGQRALDFYSIHVTKESTHPVKPLAQIAGNRYASAPVGKALSDACMGTIASFLSKYQDIIIEHQKVVKGNQKRLESLRELAGKENLEYPSVTLPPQPHTKEGVDAYNEVIARVRMWVNLNLWQKLKLSRDDAKPLLRLKGFPSFPLVERQANEVDWWDMVCNVKKLINEKKEDGKVFWQNLAGYKRQEALRPYLSSEEDRKKGKKFARYQLGDLLLHLEKKHGEDWGKVYDEAWERIDKKVEGLSKHIKLEEERRSEDAQSKAALTDWLRAKASFVIEGLKEADKDEFCRCELKLQKWYGDLRGKPFAIEAENSILDISGFSKQYNCAFIWQKDGVKKLNLYLIINYFKGGKLRFKKIKPEAFEANRFYTVINKKSGEIVPMEVNFNFDDPNLIILPLAFGKRQGREFIWNDLLSLETGSLKLANGRVIEKTLYNRRTRQDEPALFVALTFERREVLDSSNIKPMNLIGVDRGENIPAVIALTDPEGCPLSRFKDSLGNPTHILRIGESYKEKQRTIQAKKEVEQRRAGGYSRKYASKAKNLADDMVRNTARDLLYYAVTQDAMLIFENLSRGFGRQGKRTFMAERQYTRMEDWLTAKLAYEGLPSKTYLSKTLAQYTSKTCSNCGFTITSADYDRVLEKLKKTATGWMTTINGKELKVEGQITYYNRYKRQNVVKDLSVELDRLSEESVNNDISSWTKGRSGEALSLLKKRFSHRPVQEKFVCLNCGFETHADEQAALNIARSWLFLRSQEYKKYQTNKTTGKNTDKRAFVETWQSFYRKKLKEVWKPAV

SEQ ID NO: 32488 - protein, 980 aa, synthetic construct
  REGION 1..980: note = engineered CasX variant
QEIKGRINKIRRRLVKDSNTKKAGKTGPMKTLLVRVMTPDLRERLENLRKKPENIPQPISNTSRANLNKLLTDYTEMKKAILHVYWEEFQKDPVGLMSRVAQPASKKIDQNKLKPEMDEKGNLTTAGFACSQCGQPLFVYKLEQVSEKGKAYTNYFGRCNVAEHEKLILLAQLKPEKDSDEAVTYSLGKFGQRALDFYSIHVTKESTHPVKPLAQIAGNRYASVPVGKALSDACMGTIASFLSKYQDIIIEHQKVVKGNQKRLESLRELAGKENLEYPSVTLPPQPHTKEGVDAYNEVIARVRMWVNLNLWQKLKLSRDDAKPLLRLKGFPSFPLVERQANEVDWWDMVCNVKKLINEKKEDGKVFWQNLAGYKRQEALRPYLSSEEDRKKGKKFARYQLGDLLLHLEKKHGEDWGKVYDEAWERIDKKVEGLSKHIKLEEERRSEDAQSKAALTDWLRAKASFVIEGLKEADKDEFCRCELKLQKWYGDLRGKPFAIEAENSILDISGFSKQYNCAFIWQKDGVKKLNLYLIINYFKGGKLRFKKIKPEAFEANRFYTVINKKSGEIVPMEVNFNFDDPNLIILPLAFGKRQGREFIWNDLLSLETGSLKLANGRVIEKTLYNRRTRQDEPALFVALTFERREVLDSSNIKPMNLIGVDRGENIPAVIALTDPEGCPLSRFKDSLGNPTHILRIGESYKEKQRTIQAKKEVEQRRAGGYSRKYASKAKNLADDMVRNTARDLLYYAVTQDAMLIFENLSRGFGRQGKRTFMAERQYTRMEDWLTAKLAYEGLPSKTYLSKTLAQYTSKTCSNCGFTITSADYDRVLEKLKKTATGWMTTINGKELKVEGQITYYNRYKRQNVVKDLSVELDRLSEESVNNDISSWTKGRSGEALSLLKKRFSHRPVQEKFVCLNCGFETHADEQAALNIARSWLFLRSQEYKKYQTNKTTGKNTDKRAFVETWQSFYRKKLKEVWKPAV

SEQ ID NO: 32489 - protein, 980 aa, synthetic construct
  REGION 1..980: note = engineered CasX variant
QEIKGRINKIRRRLVKDSNTKKAGKTGPMKTLLVRVMTPDLRERLENLRKKPENIPQPISNTSRANLNKLLTDYTEMKKAILHVYWEEFQKDPVGLMSRVAQPASKKIDQNKLKPEMDEKGNLTTAGFACSQCGQPLFVYKLEQVSEKGKAYTNYFGRCNVAEHEKLIKLAQLKPEKDSDEAVTYSLGKFGQRALDFYSIHVTKESTHPVKPLAQIAGNRYASGPVGKALSDACMGTIASFLSKYQDIIIEHQKVVKGNQKRLESLRELAGKENLEYPSVTLPPQPHTKEGVDAYNEVIARVRMWVNLNLWQKLKLSRDDAKPLLRLKGFPSFPLVERQANEVDWWDMVCNVKKLINEKKEDGKVFWQNLAGYKRQEALRPYLSSEEDRKKGKKFARYQLGDLLLHLEKKHGEDWGKVYDEAWERIDKKVEGLSKHIKLEEERRSEDAQSKAALTDWLRAKASFVIEGLKEADKDEFCRCELKLQKWYGDLRGKPFAIEAENSILDISGFSKQYNCAFIWQKDGVKKLNLYLIINYFKGGKLRFKKIKPEAFEANRFYTVINKKSGEIVPMEVNFNFDDPNLIILPLAFGKRQGREFIWNDLLSLETGSLKLANGRVIEKTLYNRRTRQDEPALFVALTFERREVLDSSNIKPMNLIGVDRGENIPAVIALTDPEGCPLSRFKDSLGNPTHILRIGESYKEKQRTIQAKKEVEQRRAGGYSRKYASKAKNLADDMVRNTARDLLYYAVTQDAMLIFENLSRGFGRQGKRTFMAERQYTRMEDWLTAKLAYEGLPSKTYLSKTLAQYTSKTCSNCGFTITSADYDRVLEKLKKTATGWMTTINGKELKVEGQITYYNRYKRQNVVKDLSVELDRLSEESVNNDISSWTKGRSGEALSLLKKRFSHRPVQEKFVCLNCGFETHADEQAALNIARSWLFLRSQEYKKYQTNKTTGKNTDKRAFVETWQSFYRKKLKEVWKPAV

SEQ ID NO: 32490 - protein, 979 aa, synthetic construct
  REGION 1..979: note = engineered CasX variant
QEIKGRINKIRRRLVKDSNTKKAGKTGPMKTLLVRVMTPDLRERLENLRKKPENIPQPISNTSRANLNKLLTDYTEMKKAILHVYWEEFQKDPVGLMSRVAQPASKKIDQNKLKPEMDEKGNLTTAGFACSQCGQPLFVYKLEQVSEKGKAYTNYFGRCNVAEHEKLILLAQLKPEKDSDEAVTYSLGKFGQRALDFYSIHVTKESTHPVKPLAQIAGNRYASPVGKALSDACMGTIASFLSKYQDIIIEHQKVVKGNQKRLESLRELAGKENLEYPSVTLPPQPHTKEGVDAYNEVIARVRMWVNLNLWQKLKLSRDDAKPLLRLKGFPSFPLVERQANEVDWWDMVCNVKKLINEKKEDGKVFWQNLAGYKRQEALRPYLSSEEDRKKGKKFARYQLGDLLLHLEKKHGEDWGKVYDEAWERIDKKVEGLSKHIKLEEERRSEDAQSKAALTDWLRAKASFVIEGLKEADKDEFCRCELKLQKWYGDLRGKPFAIEAENSILDISGFSKQYNCAFIWQKDGVKKLNLYLIINYFKGGKLRFKKIKPEAFEANRFYTVINKKSGEIVPMEVNFNFDDPNLIILPLAFGKRQGREFIWNDLLSLETGSLKLANGRVIEKTLYNRRTRQDEPALFVALTFERREVLDSSNIKPMNLIGVDRGENIPAVIALTDPEGCPLSRFKDSLGNPTHILRIGESYKEKQRTIQAKKEVEQRRAGGYSRKYASKAKNLADDMVRNTARDLLYYAVTQDAMLIFENLSRGFGRQGKRTFMAERQYTRMEDWLTAKLAYEGLPSKTYLSKTLAQYTSKTCSNCGFTITSADYDRVLEKLKKTATGWMTTINGKELKVEGQITYYNRYKRQNVVKDLSVELDRLSEESVNNDISSWTKGRSGEALSLLKKRFSHRPVQEKFVCLNCGFETHADEQAALNIARSWLFLRSQEYKKYQTNKTTGKNTDKRAFVETWQSFYRKKLKEVWKPAV

SEQ ID NO: 32491 - protein, 979 aa, synthetic construct
  REGION 1..979: note = engineered CasX variant
QEIKGRINKIRRRLVKDSNTKKAGKTGPMKTLLVRVMTPDLRERLENLRKKPENIPQPISNTSRANLNKLLTDYTEMKKAILHVYWEEFQKDPVGLMSRVAQPASKKIDQNKLKPEMDEKGNLTTAGFACSQCGQPLFVYKLEQVSEKGKAYTNYFGRCNVAEHEKLILLAQLKPEKDSDEAVTYSLGKFGQRALDFYSIHVTKESTHPVKPLAQIAGNRYASYPVGKALSDACMGTIASFLSKYQDIIIEHQKVVKGNQKRLESLRELAGKENLEYPSVTLPPQPHTKEGVDAYNEVIARVRMWVNLNLWQKLKLSRDDAKPLLRLKKFPSFPLVERQANEVDWWDMVCNVKKLINEKKEDGKVFWQNLAGYKRQEALRPYLSSEEDRKKGKKFARYQLGDLLLHLEKKHGEDWGKVYDEAWERIDKKVEGLSKHIKLEEERRSEDAQSKAALTDWLRAKASFVIEGLKEADKDEFCRCELKLQKWYGDLRGKPFAIEAENSILDISGFSKQYNCAFIWQKDGVKKLNLYLIINYFKGGKLRFKKIKPEAFEANRFYTVINKKSGEIVPMEVNFNFDDPNLIILPLAFGKRQGREFIWNDLLSLETGSLKLANGRVIEKTLYNRRTRQDEPALFVALTFERREVLDSSNIKPMNLIGVDRGENIPAVIALTDPEGCPLSRFKDSLGNPTHILRIGESYKEKQRTIQAKKEVEQRRAGGYSRKYASKAKNLADDMVRNTARDLLYYAVTQDAMLIFENLSRGFGRQGKRTFMAERQYTRMEDWLTAKLAYEGLPSKTYLSKTLAQYTSKTCSNCGFTITSADYDRVLEKLKKTATGWMTTINGKELKVEGQITYYNRYKRQNVVKDLSVELDRLSEESVNNDISSWTKGRSGEALSLLKKRFSHRPVQEKFVCLNCGFETHADEQAALNIARSWLFLRSQEYKKYQTNKTTGNTDKRAFVETWQSFYRKKLKEVWKPAV

SEQ ID NO: 32492 - protein, 979 aa, synthetic construct
  REGION 1..979: note = engineered CasX variant
QEIKGRINKIRRRLVKDSNTKKAGKTGPMKTLLVRVMTPDLRERLENLRKKPENIPQPISNTSRANLNKLLTDYTEMKKAILHVYWEEFQKDPVGLMSRVAQPASKKIDQNKLKPEMDEKGNLTTAGFACSQCGQPLFVYKLEQVSEKGKAYTNYFGRCNVAEHEKLILLAQLKPEKDSDEAVTYSLGKFGQRALDFYSIHVTKESTHPVKPLAQIAGNRYASHPVGKALSDACMGTIASFLSKYQDIIIEHQKVVKGNQKRLESLRELAGKENLEYPSVTLPPQPHTKEGVDAYNEVIARVRMWVNLNLWQKLKLSRDDAKPLLRLKKFPSFPLVERQANEVDWWDMVCNVKKLINEKKEDGKVFWQNLAGYKRQEALRPYLSSEEDRKKGKKFARYQLGDLLLHLEKKHGEDWGKVYDEAWERIDKKVEGLSKHIKLEEERRSEDAQSKAALTDWLRAKASFVIEGLKEADKDEFCRCELKLQKWYGDLRGKPFAIEAENSILDISGFSKQYNCAFIWQKDGVKKLNLYLIINYFKGGKLRFKKIKPEAFEANRFYTVINKKSGEIVPMEVNFNFDDPNLIILPLAFGKRQGREFIWNDLLSLETGSLKLANGRVIEKTLYNRRTRQDEPALFVALTFERREVLDSSNIKPMNLIGVDRGENIPAVIALTDPEGCPLSRFKDSLGNPTHILRIGESYKEKQRTIQAKKEVEQRRAGGYSRKYASKAKNLADDMVRNTARDLLYYAVTQDAMLIFENLSRGFGRQGKRTFMAERQYTRMEDWLTAKLAYEGLPSKTYLSKTLAQYTSKTCSNCGFTITSADYDRVLEKLKKTATGWMTTINGKELKVEGQITYYNRYKRQNVVKDLSVELDRLSEESVNNDISSWTKGRSGEALSLLKKRFSHRPVQEKFVCLNCGFETHADEQAALNIARSWLFLRSQEYKKYQTNKTTGNTDKRAFVETWQSFYRKKLKEVWKPAV

SEQ ID NO: 32493 - protein, 979 aa, synthetic construct
  REGION 1..979: note = engineered CasX variant
QEIKGRINKIRRRLVKDSNTKKAGKTGPMKTLLVRVMTPDLRERLENLRKKPENIPQPISNTSRANLNKLLTDYTEMKKAILHVYWEEFQKDPVGLMSRVAQPASKKIDQNKLKPEMDEKGNLTTAGFACSQCGQPLFVYKLEQVSEKGKAYTNYFGRCNVAEHEKLILLAQLKPEKDSDEAVTYSLGKFGQRALDFYSIHVTKESTHPVKPLAQIAGNRYASSPVGKALSDACMGTIASFLSKYQDIIIEHQKVVKGNQKRLESLRELAGKENLEYPSVTLPPQPHTKEGVDAYNEVIARVRMWVNLNLWQKLKLSRDDAKPLLRLKKFPSFPLVERQANEVDWWDMVCNVKKLINEKKEDGKVFWQNLAGYKRQEALRPYLSSEEDRKKGKKFARYQLGDLLLHLEKKHGEDWGKVYDEAWERIDKKVEGLSKHIKLEEERRSEDAQSKAALTDWLRAKASFVIEGLKEADKDEFCRCELKLQKWYGDLRGKPFAIEAENSILDISGFSKQYNCAFIWQKDGVKKLNLYLIINYFKGGKLRFKKIKPEAFEANRFYTVINKKSGEIVPMEVNFNFDDPNLIILPLAFGKRQGREFIWNDLLSLETGSLKLANGRVIEKTLYNRRTRQDEPALFVALTFERREVLDSSNIKPMNLIGVDRGENIPAVIALTDPEGCPLSRFKDSLGNPTHILRIGESYKEKQRTIQAKKEVEQRRAGGYSRKYASKAKNLADDMVRNTARDLLYYAVTQDAMLIFENLSRGFGRQGKRTFMAERQYTRMEDWLTAKLAYEGLPSKTYLSKTLAQYTSKTCSNCGFTITSADYDRVLEKLKKTATGWMTTINGKELKVEGQITYYNRYKRQNVVKDLSVELDRLSEESVNNDISSWTKGRSGEALSLLKKRFSHRPVQEKFVCLNCGFETHADEQAALNIARSWLFLRSQEYKKYQTNKTTGNTDKRAFVETWQSFYRKKLKEVWKPAV

SEQ ID NO: 32494 - protein, 979 aa, synthetic construct
  REGION 1..979: note = engineered CasX variant
QEIKGRINKIRRRLVKDSNTKKAGKTGPMKTLLVRVMTPDLRERLENLRKKPENIPQPISNTSRANLNKLLTDYTEMKKAILHVYWEEFQKDPVGLMSRVAQPASKKIDQNKLKPEMDEKGNLTTAGFACSQCGQPLFVYKLEQVSEKGKAYTNYFGRCNVAEHEKLILLAQLKPEKDSDEAVTYSLGKFGQRALDFYSIHVTKESTHPVKPLAQIAGNRYASTPVGKALSDACMGTIASFLSKYQDIIIEHQKVVKGNQKRLESLRELAGKENLEYPSVTLPPQPHTKEGVDAYNEVIARVRMWVNLNLWQKLKLSRDDAKPLLRLKKFPSFPLVERQANEVDWWDMVCNVKKLINEKKEDGKVFWQNLAGYKRQEALRPYLSSEEDRKKGKKFARYQLGDLLLHLEKKHGEDWGKVYDEAWERIDKKVEGLSKHIKLEEERRSEDAQSKAALTDWLRAKASFVIEGLKEADKDEFCRCELKLQKWYGDLRGKPFAIEAENSILDISGFSKQYNCAFIWQKDGVKKLNLYLIINYFKGGKLRFKKIKPEAFEANRFYTVINKKSGEIVPMEVNFNFDDPNLIILPLAFGKRQGREFIWNDLLSLETGSLKLANGRVIEKTLYNRRTRQDEPALFVALTFERREVLDSSNIKPMNLIGVDRGENIPAVIALTDPEGCPLSRFKDSLGNPTHILRIGESYKEKQRTIQAKKEVEQRRAGGYSRKYASKAKNLADDMVRNTARDLLYYAVTQDAMLIFENLSRGFGRQGKRTFMAERQYTRMEDWLTAKLAYEGLPSKTYLSKTLAQYTSKTCSNCGFTITSADYDRVLEKLKKTATGWMTTINGKELKVEGQITYYNRYKRQNVVKDLSVELDRLSEESVNNDISSWTKGRSGEALSLLKKRFSHRPVQEKFVCLNCGFETHADEQAALNIARSWLFLRSQEYKKYQTNKTTGNTDKRAFVETWQSFYRKKLKEVWKPAV

SEQ ID NO: 32495 - protein, 979 aa, synthetic construct
  REGION 1..979: note = engineered CasX variant
QEIKGRINKIRRRLVKDSNTKKAGKTGPMKTLLVRVMTPDLRERLENLRKKPENIPQPISNTSRANLNKLLTDYTEMKKAILHVYWEEFQKDPVGLMSRVAQPASKKIDQNKLKPEMDEKGNLTTAGFACSQCGQPLFVYKLEQVSEKGKAYTNYFGRCNVAEHEKLILLAQLKPEKDSDEAVTYSLGKFGQRALDFYSIHVTKESTHPVKPLAQIAGNRYASAPVGKALSDACMGTIASFLSKYQDIIIEHQKVVKGNQKRLESLRELAGKENLEYPSVTLPPQPHTKEGVDAYNEVIARVRMWVNLNLWQKLKLSRDDAKPLLRLKKFPSFPLVERQANEVDWWDMVCNVKKLINEKKEDGKVFWQNLAGYKRQEALRPYLSSEEDRKKGKKFARYQLGDLLLHLEKKHGEDWGKVYDEAWERIDKKVEGLSKHIKLEEERRSEDAQSKAALTDWLRAKASFVIEGLKEADKDEFCRCELKLQKWYGDLRGKPFAIEAENSILDISGFSKQYNCAFIWQKDGVKKLNLYLIINYFKGGKLRFKKIKPEAFEANRFYTVINKKSGEIVPMEVNFNFDDPNLIILPLAFGKRQGREFIWNDLLSLETGSLKLANGRVIEKTLYNRRTRQDEPALFVALTFERREVLDSSNIKPMNLIGVDRGENIPAVIALTDPEGCPLSRFKDSLGNPTHILRIGESYKEKQRTIQAKKEVEQRRAGGYSRKYASKAKNLADDMVRNTARDLLYYAVTQDAMLIFENLSRGFGRQGKRTFMAERQYTRMEDWLTAKLAYEGLPSKTYLSKTLAQYTSKTCSNCGFTITSADYDRVLEKLKKTATGWMTTINGKELKVEGQITYYNRYKRQNVVKDLSVELDRLSEESVNNDISSWTKGRSGEALSLLKKRFSHRPVQEKFVCLNCGFETHADEQAALNIARSWLFLRSQEYKKYQTNKTTGNTDKRAFVETWQSFYRKKLKEVWKPAV

SEQ ID NO: 32496 - protein, 979 aa, synthetic construct
  REGION 1..979: note = engineered CasX variant
QEIKGRINKIRRRLVKDSNTKKAGKTGPMKTLLVRVMTPDLRERLENLRKKPENIPQPISNTSRANLNKLLTDYTEMKKAILHVYWEEFQKDPVGLMSRVAQPASKKIDQNKLKPEMDEKGNLTTAGFACSQCGQPLFVYKLEQVSEKGKAYTNYFGRCNVAEHEKLILLAQLKPEKDSDEAVTYSLGKFGQRALDFYSIHVTKESTHPVKPLAQIAGNRYASVPVGKALSDACMGTIASFLSKYQDIIIEHQKVVKGNQKRLESLRELAGKENLEYPSVTLPPQPHTKEGVDAYNEVIARVRMWVNLNLWQKLKLSRDDAKPLLRLKKFPSFPLVERQANEVDWWDMVCNVKKLINEKKEDGKVFWQNLAGYKRQEALRPYLSSEEDRKKGKKFARYQLGDLLLHLEKKHGEDWGKVYDEAWERIDKKVEGLSKHIKLEEERRSEDAQSKAALTDWLRAKASFVIEGLKEADKDEFCRCELKLQKWYGDLRGKPFAIEAENSILDISGFSKQYNCAFIWQKDGVKKLNLYLIINYFKGGKLRFKKIKPEAFEANRFYTVINKKSGEIVPMEVNFNFDDPNLIILPLAFGKRQGREFIWNDLLSLETGSLKLANGRVIEKTLYNRRTRQDEPALFVALTFERREVLDSSNIKPMNLIGVDRGENIPAVIALTDPEGCPLSRFKDSLGNPTHILRIGESYKEKQRTIQAKKEVEQRRAGGYSRKYASKAKNLADDMVRNTARDLLYYAVTQDAMLIFENLSRGFGRQGKRTFMAERQYTRMEDWLTAKLAYEGLPSKTYLSKTLAQYTSKTCSNCGFTITSADYDRVLEKLKKTATGWMTTINGKELKVEGQITYYNRYKRQNVVKDLSVELDRLSEESVNNDISSWTKGRSGEALSLLKKRFSHRPVQEKFVCLNCGFETHADEQAALNIARSWLFLRSQEYKKYQTNKTTGNTDKRAFVETWQSFYRKKLKEVWKPAV

SEQ ID NO: 32497 - protein, 979 aa, synthetic construct
  REGION 1..979: note = engineered CasX variant
QEIKGRINKIRRRLVKDSNTKKAGKTGPMKTLLVRVMTPDLRERLENLRKKPENIPQPISNTSRANLNKLLTDYTEMKKAILHVYWEEFQKDPVGLMSRVAQPASKKIDQNKLKPEMDEKGNLTTAGFACSQCGQPLFVYKLEQVSEKGKAYTNYFGRCNVAEHEKLIKLAQLKPEKDSDEAVTYSLGKFGQRALDFYSIHVTKESTHPVKPLAQIAGNRYASGPVGKALSDACMGTIASFLSKYQDIIIEHQKVVKGNQKRLESLRELAGKENLEYPSVTLPPQPHTKEGVDAYNEVIARVRMWVNLNLWQKLKLSRDDAKPLLRLKKFPSFPLVERQANEVDWWDMVCNVKKLINEKKEDGKVFWQNLAGYKRQEALRPYLSSEEDRKKGKKFARYQLGDLLLHLEKKHGEDWGKVYDEAWERIDKKVEGLSKHIKLEEERRSEDAQSKAALTDWLRAKASFVIEGLKEADKDEFCRCELKLQKWYGDLRGKPFAIEAENSILDISGFSKQYNCAFIWQKDGVKKLNLYLIINYFKGGKLRFKKIKPEAFEANRFYTVINKKSGEIVPMEVNFNFDDPNLIILPLAFGKRQGREFIWNDLLSLETGSLKLANGRVIEKTLYNRRTRQDEPALFVALTFERREVLDSSNIKPMNLIGVDRGENIPAVIALTDPEGCPLSRFKDSLGNPTHILRIGESYKEKQRTIQAKKEVEQRRAGGYSRKYASKAKNLADDMVRNTARDLLYYAVTQDAMLIFENLSRGFGRQGKRTFMAERQYTRMEDWLTAKLAYEGLPSKTYLSKTLAQYTSKTCSNCGFTITSADYDRVLEKLKKTATGWMTTINGKELKVEGQITYYNRYKRQNVVKDLSVELDRLSEESVNNDISSWTKGRSGEALSLLKKRFSHRPVQEKFVCLNCGFETHADEQAALNIARSWLFLRSQEYKKYQTNKTTGNTDKRAFVETWQSFYRKKLKEVWKPAV

SEQ ID NO: 32498 - protein, 978 aa, synthetic construct
  REGION 1..978: note = engineered CasX variant
QEIKGRINKIRRRLVKDSNTKKAGKTGPMKTLLVRVMTPDLRERLENLRKKPENIPQPISNTSRANLNKLLTDYTEMKKAILHVYWEEFQKDPVGLMSRVAQPASKKIDQNKLKPEMDEKGNLTTAGFACSQCGQPLFVYKLEQVSEKGKAYTNYFGRCNVAEHEKLILLAQLKPEKDSDEAVTYSLGKFGQRALDFYSIHVTKESTHPVKPLAQIAGNRYASPVGKALSDACMGTIASFLSKYQDIIIEHQKVVKGNQKRLESLRELAGKENLEYPSVTLPPQPHTKEGVDAYNEVIARVRMWVNLNLWQKLKLSRDDAKPLLRLKKFPSFPLVERQANEVDWWDMVCNVKKLINEKKEDGKVFWQNLAGYKRQEALRPYLSSEEDRKKGKKFARYQLGDLLLHLEKKHGEDWGKVYDEAWERIDKKVEGLSKHIKLEEERRSEDAQSKAALTDWLRAKASFVIEGLKEADKDEFCRCELKLQKWYGDLRGKPFAIEAENSILDISGFSKQYNCAFIWQKDGVKKLNLYLIINYFKGGKLRFKKIKPEAFEANRFYTVINKKSGEIVPMEVNFNFDDPNLIILPLAFGKRQGREFIWNDLLSLETGSLKLANGRVIEKTLYNRRTRQDEPALFVALTFERREVLDSSNIKPMNLIGVDRGENIPAVIALTDPEGCPLSRFKDSLGNPTHILRIGESYKEKQRTIQAKKEVEQRRAGGYSRKYASKAKNLADDMVRNTARDLLYYAVTQDAMLIFENLSRGFGRQGKRTFMAERQYTRMEDWLTAKLAYEGLPSKTYLSKTLAQYTSKTCSNCGFTITSADYDRVLEKLKKTATGWMTTINGKELKVEGQITYYNRYKRQNVVKDLSVELDRLSEESVNNDISSWTKGRSGEALSLLKKRFSHRPVQEKFVCLNCGFETHADEQAALNIARSWLFLRSQEYKKYQTNKTTGNTDKRAFVETWQSFYRKKLKEVWKPAV

SEQ ID NO: 32499 - protein, 979 aa, synthetic construct
  REGION 1..979: note = engineered CasX variant
QEIKGRINKIRRRLVKDSNTKKAGKTGPMKTLLVRVMTPDLRERLENLRKKPENIPQPISNTSRANLNKLLTDYTEMKKAILHVYWEEFQKDPVGLMSRVAQPASKKIDQNKLKPEMDEKGNLTTAGFACSQCGQPLFVYKLEQVSEKGKAYTNYFGRCNVAEHEKLILLAQLKPEKDSDEAVTYSLGKFGQRALDFYSIHVTKESTHPVKPLAQIAGNRYASYPVGKALSDACMGTIASFLSKYQDIIIEHQKVVKGNQKRLESLRELAGKENLEYPSVTLPPQPHTKEGVDAYNEVIARVRMWVNLNLWQKLKLSRDDAKPLLRLKGFPSFPLVERQANEVDWWDMVCNVKKLINEKKEDGKVFWQNLAGYKRQEALRPYLSSEEDRKKGKKFARYQLGDLLLHLEKKHGEDWGKVYDEAWERIDKKVEGLSKHIKLEEERRSEDAQSKAALTDWLRAKASFVIEGLKEADKDEFCRCELKLQKWYGDLRGKPFAIEAENSILDISGFSKQYNCAFIWQKDGVKKLNLYLIINYFKGGKLRFKKIKPEAFEANRFYTVINKKSGEIVPMEVNFNFDDPNLIILPLAFGKRQGREFIWNDLLSLETGSLKLANGRVIEKTLYNRRTRQDEPALFVALTFERREVLDSSNIKPMNLIGVDRGENIPAVIALTDPEGCPLSRFKDSLGNPTHILRIGERYKEKQRTIQAKKEVEQRRAGGYSRKYASKAKNLADDMVRNTARDLLYYAVTQDAMLIFENLSRGFGRQGKRTFMAERQYTRMEDWLTAKLAYEGLPSKTYLSKTLAQYTSKTCSNCGFTITSADYDRVLEKLKKTATGWMTTINGKELKVEGQITYYNRYKRQNVVKDLSVELDRLSEESVNNDISSWTKGRSGEALSLLKKRFSHRPVQEKFVCLNCGFETHADEQAALNIARSWLFLRSQEYKKYQTNKTTGNTDKRAFVETWQSFYRKKLKEVWKPAV

SEQ ID NO: 32500 - protein, 979 aa, synthetic construct
  REGION 1..979: note = engineered CasX variant
QEIKGRINKIRRRLVKDSNTKKAGKTGPMKTLLVRVMTPDLRERLENLRKKPENIPQPISNTSRANLNKLLTDYTEMKKAILHVYWEEFQKDPVGLMSRVAQPASKKIDQNKLKPEMDEKGNLTTAGFACSQCGQPLFVYKLEQVSEKGKAYTNYFGRCNVAEHEKLILLAQLKPEKDSDEAVTYSLGKFGQRALDFYSIHVTKESTHPVKPLAQIAGNRYASHPVGKALSDACMGTIASFLSKYQDIIIEHQKVVKGNQKRLESLRELAGKENLEYPSVTLPPQPHTKEGVDAYNEVIARVRMWVNLNLWQKLKLSRDDAKPLLRLKGFPSFPLVERQANEVDWWDMVCNVKKLINEKKEDGKVFWQNLAGYKRQEALRPYLSSEEDRKKGKKFARYQLGDLLLHLEKKHGEDWGKVYDEAWERIDKKVEGLSKHIKLEEERRSEDAQSKAALTDWLRAKASFVIEGLKEADKDEFCRCELKLQKWYGDLRGKPFAIEAENSILDISGFSKQYNCAFIWQKDGVKKLNLYLIINYFKGGKLRFKKIKPEAFEANRFYTVINKKSGEIVPMEVNFNFDDPNLIILPLAFGKRQGREFIWNDLLSLETGSLKLANGRVIEKTLYNRRTRQDEPALFVALTFERREVLDSSNIKPMNLIGVDRGENIPAVIALTDPEGCPLSRFKDSLGNPTHILRIGERYKEKQRTIQAKKEVEQRRAGGYSRKYASKAKNLADDMVRNTARDLLYYAVTQDAMLIFENLSRGFGRQGKRTFMAERQYTRMEDWLTAKLAYEGLPSKTYLSKTLAQYTSKTCSNCGFTITSADYDRVLEKLKKTATGWMTTINGKELKVEGQITYYNRYKRQNVVKDLSVELDRLSEESVNNDISSWTKGRSGEALSLLKKRFSHRPVQEKFVCLNCGFETHADEQAALNIARSWLFLRSQEYKKYQTNKTTGNTDKRAFVETWQSFYRKKLKEVWKPAV

SEQ ID NO: 32501 - protein, 979 aa, synthetic construct
  REGION 1..979: note = engineered CasX variant
QEIKGRINKIRRRLVKDSNTKKAGKTGPMKTLLVRVMTPDLRERLENLRKKPENIPQPISNTSRANLNKLLTDYTEMKKAILHVYWEEFQKDPVGLMSRVAQPASKKIDQNKLKPEMDEKGNLTTAGFACSQCGQPLFVYKLEQVSEKGKAYTNYFGRCNVAEHEKLILLAQLKPEKDSDEAVTYSLGKFGQRALDFYSIHVTKESTHPVKPLAQIAGNRYASSPVGKALSDACMGTIASFLSKYQDIIIEHQKVVKGNQKRLESLRELAGKENLEYPSVTLPPQPHTKEGVDAYNEVIARVRMWVNLNLWQKLKLSRDDAKPLLRLKGFPSFPLVERQANEVDWWDMVCNVKKLINEKKEDGKVFWQNLAGYKRQEALRPYLSSEEDRKKGKKFARYQLGDLLLHLEKKHGEDWGKVYDEAWERIDKKVEGLSKHIKLEEERRSEDAQSKAALTDWLRAKASFVIEGLKEADKDEFCRCELKLQKWYGDLRGKPFAIEAENSILDISGFSKQYNCAFIWQKDGVKKLNLYLIINYFKGGKLRFKKIKPEAFEANRFYTVINKKSGEIVPMEVNFNFDDPNLIILPLAFGKRQGREFIWNDLLSLETGSLKLANGRVIEKTLYNRRTRQDEPALFVALTFERREVLDSSNIKPMNLIGVDRGENIPAVIALTDPEGCPLSRFKDSLGNPTHILRIGERYKEKQRTIQAKKEVEQRRAGGYSRKYASKAKNLADDMVRNTARDLLYYAVTQDAMLIFENLSRGFGRQGKRTFMAERQYTRMEDWLTAKLAYEGLPSKTYLSKTLAQYTSKTCSNCGFTITSADYDRVLEKLKKTATGWMTTINGKELKVEGQITYYNRYKRQNVVKDLSVELDRLSEESVNNDISSWTKGRSGEALSLLKKRFSHRPVQEKFVCLNCGFETHADEQAALNIARSWLFLRSQEYKKYQTNKTTGNTDKRAFVETWQSFYRKKLKEVWKPAV

SEQ ID NO: 32502 - protein, 979 aa, synthetic construct
  REGION 1..979: note = engineered CasX variant
QEIKGRINKIRRRLVKDSNTKKAGKTGPMKTLLVRVMTPDLRERLENLRKKPENIPQPISNTSRANLNKLLTDYTEMKKAILHVYWEEFQKDPVGLMSRVAQPASKKIDQNKLKPEMDEKGNLTTAGFACSQCGQPLFVYKLEQVSEKGKAYTNYFGRCNVAEHEKLILLAQLKPEKDSDEAVTYSLGKFGQRALDFYSIHVTKESTHPVKPLAQIAGNRYASTPVGKALSDACMGTIASFLSKYQDIIIEHQKVVKGNQKRLESLRELAGKENLEYPSVTLPPQPHTKEGVDAYNEVIARVRMWVNLNLWQKLKLSRDDAKPLLRLKGFPSFPLVERQANEVDWWDMVCNVKKLINEKKEDGKVFWQNLAGYKRQEALRPYLSSEEDRKKGKKFARYQLGDLLLHLEKKHGEDWGKVYDEAWERIDKKVEGLSKHIKLEEERRSEDAQSKAALTDWLRAKASFVIEGLKEADKDEFCRCELKLQKWYGDLRGKPFAIEAENSILDISGFSKQYNCAFIWQKDGVKKLNLYLIINYFKGGKLRFKKIKPEAFEANRFYTVINKKSGEIVPMEVNFNFDDPNLIILPLAFGKRQGREFIWNDLLSLETGSLKLANGRVIEKTLYNRRTRQDEPALFVALTFERREVLDSSNIKPMNLIGVDRGENIPAVIALTDPEGCPLSRFKDSLGNPTHILRIGERYKEKQRTIQAKKEVEQRRAGGYSRKYASKAKNLADDMVRNTARDLLYYAVTQDAMLIFENLSRGFGRQGKRTFMAERQYTRMEDWLTAKLAYEGLPSKTYLSKTLAQYTSKTCSNCGFTITSADYDRVLEKLKKTATGWMTTINGKELKVEGQITYYNRYKRQNVVKDLSVELDRLSEESVNNDISSWTKGRSGEALSLLKKRFSHRPVQEKFVCLNCGFETHADEQAALNIARSWLFLRSQEYKKYQTNKTTGNTDKRAFVETWQSFYRKKLKEVWKPAV

SEQ ID NO: 32503 - protein, 979 aa, synthetic construct
  REGION 1..979: note = engineered CasX variant
QEIKGRINKIRRRLVKDSNTKKAGKTGPMKTLLVRVMTPDLRERLENLRKKPENIPQPISNTSRANLNKLLTDYTEMKKAILHVYWEEFQKDPVGLMSRVAQPASKKIDQNKLKPEMDEKGNLTTAGFACSQCGQPLFVYKLEQVSEKGKAYTNYFGRCNVAEHEKLILLAQLKPEKDSDEAVTYSLGKFGQRALDFYSIHVTKESTHPVKPLAQIAGNRYASAPVGKALSDACMGTIASFLSKYQDIIIEHQKVVKGNQKRLESLRELAGKENLEYPSVTLPPQPHTKEGVDAYNEVIARVRMWVNLNLWQKLKLSRDDAKPLLRLKGFPSFPLVERQANEVDWWDMVCNVKKLINEKKEDGKVFWQNLAGYKRQEALRPYLSSEEDRKKGKKFARYQLGDLLLHLEKKHGEDWGKVYDEAWERIDKKVEGLSKHIKLEEERRSEDAQSKAALTDWLRAKASFVIEGLKEADKDEFCRCELKLQKWYGDLRGKPFAIEAENSILDISGFSKQYNCAFIWQKDGVKKLNLYLIINYFKGGKLRFKKIKPEAFEANRFYTVINKKSGEIVPMEVNFNFDDPNLIILPLAFGKRQGREFIWNDLLSLETGSLKLANGRVIEKTLYNRRTRQDEPALFVALTFERREVLDSSNIKPMNLIGVDRGENIPAVIALTDPEGCPLSRFKDSLGNPTHILRIGERYKEKQRTIQAKKEVEQRRAGGYSRKYASKAKNLADDMVRNTARDLLYYAVTQDAMLIFENLSRGFGRQGKRTFMAERQYTRMEDWLTAKLAYEGLPSKTYLSKTLAQYTSKTCSNCGFTITSADYDRVLEKLKKTATGWMTTINGKELKVEGQITYYNRYKRQNVVKDLSVELDRLSEESVNNDISSWTKGRSGEALSLLKKRFSHRPVQEKFVCLNCGFETHADEQAALNIARSWLFLRSQEYKKYQTNKTTGNTDKRAFVETWQSFYRKKLKEVWKPAV

SEQ ID NO: 32504 - protein, 979 aa, synthetic construct
  REGION 1..979: note = engineered CasX variant
QEIKGRINKIRRRLVKDSNTKKAGKTGPMKTLLVRVMTPDLRERLENLRKKPENIPQPISNTSRANLNKLLTDYTEMKKAILHVYWEEFQKDPVGLMSRVAQPASKKIDQNKLKPEMDEKGNLTTAGFACSQCGQPLFVYKLEQVSEKGKAYTNYFGRCNVAEHEKLILLAQLKPEKDSDEAVTYSLGKFGQRALDFYSIHVTKESTHPVKPLAQIAGNRYASVPVGKALSDACMGTIASFLSKYQDIIIEHQKVVKGNQKRLESLRELAGKENLEYPSVTLPPQPHTKEGVDAYNEVIARVRMWVNLNLWQKLKLSRDDAKPLLRLKGFPSFPLVERQANEVDWWDMVCNVKKLINEKKEDGKVFWQNLAGYKRQEALRPYLSSEEDRKKGKKFARYQLGDLLLHLEKKHGEDWGKVYDEAWERIDKKVEGLSKHIKLEEERRSEDAQSKAALTDWLRAKASFVIEGLKEADKDEFCRCELKLQKWYGDLRGKPFAIEAENSILDISGFSKQYNCAFIWQKDGVKKLNLYLIINYFKGGKLRFKKIKPEAFEANRFYTVINKKSGEIVPMEVNFNFDDPNLIILPLAFGKRQGREFIWNDLLSLETGSLKLANGRVIEKTLYNRRTRQDEPALFVALTFERREVLDSSNIKPMNLIGVDRGENIPAVIALTDPEGCPLSRFKDSLGNPTHILRIGERYKEKQRTIQAKKEVEQRRAGGYSRKYASKAKNLADDMVRNTARDLLYYAVTQDAMLIFENLSRGFGRQGKRTFMAERQYTRMEDWLTAKLAYEGLPSKTYLSKTLAQYTSKTCSNCGFTITSADYDRVLEKLKKTATGWMTTINGKELKVEGQITYYNRYKRQNVVKDLSVELDRLSEESVNNDISSWTKGRSGEALSLLKKRFSHRPVQEKFVCLNCGFETHADEQAALNIARSWLFLRSQEYKKYQTNKTTGNTDKRAFVETWQSFYRKKLKEVWKPAV

SEQ ID NO: 32505 - protein, 979 aa, synthetic construct
  REGION 1..979: note = engineered CasX variant
QEIKGRINKIRRRLVKDSNTKKAGKTGPMKTLLVRVMTPDLRERLENLRKKPENIPQPISNTSRANLNKLLTDYTEMKKAILHVYWEEFQKDPVGLMSRVAQPASKKIDQNKLKPEMDEKGNLTTAGFACSQCGQPLFVYKLEQVSEKGKAYTNYFGRCNVAEHEKLIKLAQLKPEKDSDEAVTYSLGKFGQRALDFYSIHVTKESTHPVKPLAQIAGNRYASGPVGKALSDACMGTIASFLSKYQDIIIEHQKVVKGNQKRLESLRELAGKENLEYPSVTLPPQPHTKEGVDAYNEVIARVRMWVNLNLWQKLKLSRDDAKPLLRLKGFPSFPLVERQANEVDWWDMVCNVKKLINEKKEDGKVFWQNLAGYKRQEALRPYLSSEEDRKKGKKFARYQLGDLLLHLEKKHGEDWGKVYDEAWERIDKKVEGLSKHIKLEEERRSEDAQSKAALTDWLRAKASFVIEGLKEADKDEFCRCELKLQKWYGDLRGKPFAIEAENSILDISGFSKQYNCAFIWQKDGVKKLNLYLIINYFKGGKLRFKKIKPEAFEANRFYTVINKKSGEIVPMEVNFNFDDPNLIILPLAFGKRQGREFIWNDLLSLETGSLKLANGRVIEKTLYNRRTRQDEPALFVALTFERREVLDSSNIKPMNLIGVDRGENIPAVIALTDPEGCPLSRFKDSLGNPTHILRIGERYKEKQRTIQAKKEVEQRRAGGYSRKYASKAKNLADDMVRNTARDLLYYAVTQDAMLIFENLSRGFGRQGKRTFMAERQYTRMEDWLTAKLAYEGLPSKTYLSKTLAQYTSKTCSNCGFTITSADYDRVLEKLKKTATGWMTTINGKELKVEGQITYYNRYKRQNVVKDLSVELDRLSEESVNNDISSWTKGRSGEALSLLKKRFSHRPVQEKFVCLNCGFETHADEQAALNIARSWLFLRSQEYKKYQTNKTTGNTDKRAFVETWQSFYRKKLKEVWKPAV

SEQ ID NO: 32506 - protein, 978 aa, synthetic construct
  REGION 1..978: note = engineered CasX variant
QEIKGRINKIRRRLVKDSNTKKAGKTGPMKTLLVRVMTPDLRERLENLRKKPENIPQPISNTSRANLNKLLTDYTEMKKAILHVYWEEFQKDPVGLMSRVAQPASKKIDQNKLKPEMDEKGNLTTAGFACSQCGQPLFVYKLEQVSEKGKAYTNYFGRCNVAEHEKLILLAQLKPEKDSDEAVTYSLGKFGQRALDFYSIHVTKESTHPVKPLAQIAGNRYASPVGKALSDACMGTIASFLSKYQDIIIEHQKVVKGNQKRLESLRELAGKENLEYPSVTLPPQPHTKEGVDAYNEVIARVRMWVNLNLWQKLKLSRDDAKPLLRLKGFPSFPLVERQANEVDWWDMVCNVKKLINEKKEDGKVFWQNLAGYKRQEALRPYLSSEEDRKKGKKFARYQLGDLLLHLEKKHGEDWGKVYDEAWERIDKKVEGLSKHIKLEEERRSEDAQSKAALTDWLRAKASFVIEGLKEADKDEFCRCELKLQKWYGDLRGKPFAIEAENSILDISGFSKQYNCAFIWQKDGVKKLNLYLIINYFKGGKLRFKKIKPEAFEANRFYTVINKKSGEIVPMEVNFNFDDPNLIILPLAFGKRQGREFIWNDLLSLETGSLKLANGRVIEKTLYNRRTRQDEPALFVALTFERREVLDSSNIKPMNLIGVDRGENIPAVIALTDPEGCPLSRFKDSLGNPTHILRIGERYKEKQRTIQAKKEVEQRRAGGYSRKYASKAKNLADDMVRNTARDLLYYAVTQDAMLIFENLSRGFGRQGKRTFMAERQYTRMEDWLTAKLAYEGLPSKTYLSKTLAQYTSKTCSNCGFTITSADYDRVLEKLKKTATGWMTTINGKELKVEGQITYYNRYKRQNVVKDLSVELDRLSEESVNNDISSWTKGRSGEALSLLKKRFSHRPVQEKFVCLNCGFETHADEQAALNIARSWLFLRSQEYKKYQTNKTTGNTDKRAFVETWQSFYRKKLKEVWKPAV

SEQ ID NO: 32507 - protein, 979 aa, synthetic construct
  REGION 1..979: note = engineered CasX variant
QEIKGRINKIRRRLVKDSNTKKAGKTGPMKTLLVRVMTPDLRERLENLRKKPENIPQPISNTSRANLNKLLTDYTEMKKAILHVYWEEFQKDPVGLMSRVAQPASKKIDQNKLKPEMDEKGNLTTAGFACSQCGQPLFVYKLEQVSEKGKAYTNYFGRCNVAEHEKLILLAQLKPEKDSDEAVTYSLGKFGQRALDFYSIHVTKESTHPVKPLAQIAGNRYASYPVGKALSDACMGTIASFLSKYQDIIIEHQKVVKGNQKRLESLRELAGKENLEYPSVTLPPQPHTKEGVDAYNEVIARVRMWVNLNLWQKLKLSRDDAKPLLRLKGFPSFPLVERQANEVDWWDMVCNVKKLINEKKEDGKVFWQNLAGYKRQEALRPYLSSEEDRKKGKKFARYQLGDLLLHLEKKHGEDWGKVYDEAWERIDKKVEGLSKHIKLEEERRSEDAQSKAALTDWLRAKASFVIEGLKEADKDEFCRCELKLQKWYGDLRGKPFAIEAENSILDISGFSKQYNCAFIWQKDGVKKLNLYLIINYFKGGKLRFKKIKPEAFEANRFYTVINKKSGEIVPMEVNFNFDDPNLIILPLAFGKRQGREFIWNDLLSLETGSLQLANGRVIEKTLYNRRTRQDEPALFVALTFERREVLDSSNIKPMNLIGVDRGENIPAVIALTDPEGCPLSRFKDSLGNPTHILRIGESYKEKQRTIQAKKEVEQRRAGGYSRKYASKAKNLADDMVRNTARDLLYYAVTQDAMLIFENLSRGFGRQGKRTFMAERQYTRMEDWLTAKLAYEGLPSKTYLSKTLAQYTSKTCSNCGFTITSADYDRVLEKLKKTATGWMTTINGKELKVEGQITYYNRYKRQNVVKDLSVELDRLSEESVNNDISSWTKGRSGEALSLLKKRFSHRPVQEKFVCLNCGFETHADEQAALNIARSWLFLRSQEYKKYQTNKTTGNTDKRAFVETWQSFYRKKLKEVWKPAV

SEQ ID NO: 32508 - protein, 979 aa, synthetic construct
  REGION 1..979: note = engineered CasX variant
QEIKGRINKIRRRLVKDSNTKKAGKTGPMKTLLVRVMTPDLRERLENLRKKPENIPQPISNTSRANLNKLLTDYTEMKKAILHVYWEEFQKDPVGLMSRVAQPASKKIDQNKLKPEMDEKGNLTTAGFACSQCGQPLFVYKLEQVSEKGKAYTNYFGRCNVAEHEKLILLAQLKPEKDSDEAVTYSLGKFGQRALDFYSIHVTKESTHPVKPLAQIAGNRYASHPVGKALSDACMGTIASFLSKYQDIIIEHQKVVKGNQKRLESLRELAGKENLEYPSVTLPPQPHTKEGVDAYNEVIARVRMWVNLNLWQKLKLSRDDAKPLLRLKGFPSFPLVERQANEVDWWDMVCNVKKLINEKKEDGKVFWQNLAGYKRQEALRPYLSSEEDRKKGKKFARYQLGDLLLHLEKKHGEDWGKVYDEAWERIDKKVEGLSKHIKLEEERRSEDAQSKAALTDWLRAKASFVIEGLKEADKDEFCRCELKLQKWYGDLRGKPFAIEAENSILDISGFSKQYNCAFIWQKDGVKKLNLYLIINYFKGGKLRFKKIKPEAFEANRFYTVINKKSGEIVPMEVNFNFDDPNLIILPLAFGKRQGREFIWNDLLSLETGSLQLANGRVIEKTLYNRRTRQDEPALFVALTFERREVLDSSNIKPMNLIGVDRGENIPAVIALTDPEGCPLSRFKDSLGNPTHILRIGESYKEKQRTIQAKKEVEQRRAGGYSRKYASKAKNLADDMVRNTARDLLYYAVTQDAMLIFENLSRGFGRQGKRTFMAERQYTRMEDWLTAKLAYEGLPSKTYLSKTLAQYTSKTCSNCGFTITSADYDRVLEKLKKTATGWMTTINGKELKVEGQITYYNRYKRQNVVKDLSVELDRLSEESVNNDISSWTKGRSGEALSLLKKRFSHRPVQEKFVCLNCGFETHADEQAALNIARSWLFLRSQEYKKYQTNKTTGNTDKRAFVETWQSFYRKKLKEVWKPAV

SEQ ID NO: 32509 - protein, 979 aa, synthetic construct
  REGION 1..979: note = engineered CasX variant
QEIKGRINKIRRRLVKDSNTKKAGKTGPMKTLLVRVMTPDLRERLENLRKKPENIPQPISNTSRANLNKLLTDYTEMKKAILHVYWEEFQKDPVGLMSRVAQPASKKIDQNKLKPEMDEKGNLTTAGFACSQCGQPLFVYKLEQVSEKGKAYTNYFGRCNVAEHEKLILLAQLKPEKDSDEAVTYSLGKFGQRALDFYSIHVTKESTHPVKPLAQIAGNRYASSPVGKALSDACMGTIASFLSKYQDIIIEHQKVVKGNQKRLESLRELAGKENLEYPSVTLPPQPHTKEGVDAYNEVIARVRMWVNLNLWQKLKLSRDDAKPLLRLKGFPSFPLVERQANEVDWWDMVCNVKKLINEKKEDGKVFWQNLAGYKRQEALRPYLSSEEDRKKGKKFARYQLGDLLLHLEKKHGEDWGKVYDEAWERIDKKVEGLSKHIKLEEERRSEDAQSKAALTDWLRAKASFVIEGLKEADKDEFCRCELKLQKWYGDLRGKPFAIEAENSILDISGFSKQYNCAFIWQKDGVKKLNLYLIINYFKGGKLRFKKIKPEAFEANRFYTVINKKSGEIVPMEVNFNFDDPNLIILPLAFGKRQGREFIWNDLLSLETGSLQLANGRVIEKTLYNRRTRQDEPALFVALTFERREVLDSSNIKPMNLIGVDRGENIPAVIALTDPEGCPLSRFKDSLGNPTHILRIGESYKEKQRTIQAKKEVEQRRAGGYSRKYASKAKNLADDMVRNTARDLLYYAVTQDAMLIFENLSRGFGRQGKRTFMAERQYTRMEDWLTAKLAYEGLPSKTYLSKTLAQYTSKTCSNCGFTITSADYDRVLEKLKKTATGWMTTINGKELKVEGQITYYNRYKRQNVVKDLSVELDRLSEESVNNDISSWTKGRSGEALSLLKKRFSHRPVQEKFVCLNCGFETHADEQAALNIARSWLFLRSQEYKKYQTNKTTGNTDKRAFVETWQSFYRKKLKEVWKPAV

SEQ ID NO: 32510 - protein, 979 aa, synthetic construct
  REGION 1..979: note = engineered CasX variant
QEIKGRINKIRRRLVKDSNTKKAGKTGPMKTLLVRVMTPDLRERLENLRKKPENIPQPISNTSRANLNKLLTDYTEMKKAILHVYWEEFQKDPVGLMSRVAQPASKKIDQNKLKPEMDEKGNLTTAGFACSQCGQPLFVYKLEQVSEKGKAYTNYFGRCNVAEHEKLILLAQLKPEKDSDEAVTYSLGKFGQRALDFYSIHVTKESTHPVKPLAQIAGNRYASTPVGKALSDACMGTIASFLSKYQDIIIEHQKVVKGNQKRLESLRELAGKENLEYPSVTLPPQPHTKEGVDAYNEVIARVRMWVNLNLWQKLKLSRDDAKPLLRLKGFPSFPLVERQANEVDWWDMVCNVKKLINEKKEDGKVFWQNLAGYKRQEALRPYLSSEEDRKKGKKFARYQLGDLLLHLEKKHGEDWGKVYDEAWERIDKKVEGLSKHIKLEEERRSEDAQSKAALTDWLRAKASFVIEGLKEADKDEFCRCELKLQKWYGDLRGKPFAIEAENSILDISGFSKQYNCAFIWQKDGVKKLNLYLIINYFKGGKLRFKKIKPEAFEANRFYTVINKKSGEIVPMEVNFNFDDPNLIILPLAFGKRQGREFIWNDLLSLETGSLQLANGRVIEKTLYNRRTRQDEPALFVALTFERREVLDSSNIKPMNLIGVDRGENIPAVIALTDPEGCPLSRFKDSLGNPTHILRIGESYKEKQRTIQAKKEVEQRRAGGYSRKYASKAKNLADDMVRNTARDLLYYAVTQDAMLIFENLSRGFGRQGKRTFMAERQYTRMEDWLTAKLAYEGLPSKTYLSKTLAQYTSKTCSNCGFTITSADYDRVLEKLKKTATGWMTTINGKELKVEGQITYYNRYKRQNVVKDLSVELDRLSEESVNNDISSWTKGRSGEALSLLKKRFSHRPVQEKFVCLNCGFETHADEQAALNIARSWLFLRSQEYKKYQTNKTTGNTDKRAFVETWQSFYRKKLKEVWKPAV

SEQ ID NO: 32511 - protein, 979 aa, synthetic construct
  REGION 1..979: note = engineered CasX variant
QEIKGRINKIRRRLVKDSNTKKAGKTGPMKTLLVRVMTPDLRERLENLRKKPENIPQPISNTSRANLNKLLTDYTEMKKAILHVYWEEFQKDPVGLMSRVAQPASKKIDQNKLKPEMDEKGNLTTAGFACSQCGQPLFVYKLEQVSEKGKAYTNYFGRCNVAEHEKLILLAQLKPEKDSDEAVTYSLGKFGQRALDFYSIHVTKESTHPVKPLAQIAGNRYASAPVGKALSDACMGTIASFLSKYQDIIIEHQKVVKGNQKRLESLRELAGKENLEYPSVTLPPQPHTKEGVDAYNEVIARVRMWVNLNLWQKLKLSRDDAKPLLRLKGFPSFPLVERQANEVDWWDMVCNVKKLINEKKEDGKVFWQNLAGYKRQEALRPYLSSEEDRKKGKKFARYQLGDLLLHLEKKHGEDWGKVYDEAWERIDKKVEGLSKHIKLEEERRSEDAQSKAALTDWLRAKASFVIEGLKEADKDEFCRCELKLQKWYGDLRGKPFAIEAENSILDISGFSKQYNCAFIWQKDGVKKLNLYLIINYFKGGKLRFKKIKPEAFEANRFYTVINKKSGEIVPMEVNFNFDDPNLIILPLAFGKRQGREFIWNDLLSLETGSLQLANGRVIEKTLYNRRTRQDEPALFVALTFERREVLDSSNIKPMNLIGVDRGENIPAVIALTDPEGCPLSRFKDSLGNPTHILRIGESYKEKQRTIQAKKEVEQRRAGGYSRKYASKAKNLADDMVRNTARDLLYYAVTQDAMLIFENLSRGFGRQGKRTFMAERQYTRMEDWLTAKLAYEGLPSKTYLSKTLAQYTSKTCSNCGFTITSADYDRVLEKLKKTATGWMTTINGKELKVEGQITYYNRYKRQNVVKDLSVELDRLSEESVNNDISSWTKGRSGEALSLLKKRFSHRPVQEKFVCLNCGFETHADEQAALNIARSWLFLRSQEYKKYQTNKTTGNTDKRAFVETWQSFYRKKLKEVWKPAV

SEQ ID NO: 32512 - protein, 979 aa, synthetic construct
  REGION 1..979: note = engineered CasX variant
QEIKGRINKIRRRLVKDSNTKKAGKTGPMKTLLVRVMTPDLRERLENLRKKPENIPQPISNTSRANLNKLLTDYTEMKKAILHVYWEEFQKDPVGLMSRVAQPASKKIDQNKLKPEMDEKGNLTTAGFACSQCGQPLFVYKLEQVSEKGKAYTNYFGRCNVAEHEKLILLAQLKPEKDSDEAVTYSLGKFGQRALDFYSIHVTKESTHPVKPLAQIAGNRYASVPVGKALSDACMGTIASFLSKYQDIIIEHQKVVKGNQKRLESLRELAGKENLEYPSVTLPPQPHTKEGVDAYNEVIARVRMWVNLNLWQKLKLSRDDAKPLLRLKGFPSFPLVERQANEVDWWDMVCNVKKLINEKKEDGKVFWQNLAGYKRQEALRPYLSSEEDRKKGKKFARYQLGDLLLHLEKKHGEDWGKVYDEAWERIDKKVEGLSKHIKLEEERRSEDAQSKAALTDWLRAKASFVIEGLKEADKDEFCRCELKLQKWYGDLRGKPFAIEAENSILDISGFSKQYNCAFIWQKDGVKKLNLYLIINYFKGGKLRFKKIKPEAFEANRFYTVINKKSGEIVPMEVNFNFDDPNLIILPLAFGKRQGREFIWNDLLSLETGSLQLANGRVIEKTLYNRRTRQDEPALFVALTFERREVLDSSNIKPMNLIGVDRGENIPAVIALTDPEGCPLSRFKDSLGNPTHILRIGESYKEKQRTIQAKKEVEQRRAGGYSRKYASKAKNLADDMVRNTARDLLYYAVTQDAMLIFENLSRGFGRQGKRTFMAERQYTRMEDWLTAKLAYEGLPSKTYLSKTLAQYTSKTCSNCGFTITSADYDRVLEKLKKTATGWMTTINGKELKVEGQITYYNRYKRQNVVKDLSVELDRLSEESVNNDISSWTKGRSGEALSLLKKRFSHRPVQEKFVCLNCGFETHADEQAALNIARSWLFLRSQEYKKYQTNKTTGNTDKRAFVETWQSFYRKKLKEVWKPAV

SEQ ID NO: 32513 - protein, 979 aa, synthetic construct
  REGION 1..979: note = engineered CasX variant
QEIKGRINKIRRRLVKDSNTKKAGKTGPMKTLLVRVMTPDLRERLENLRKKPENIPQPISNTSRANLNKLLTDYTEMKKAILHVYWEEFQKDPVGLMSRVAQPASKKIDQNKLKPEMDEKGNLTTAGFACSQCGQPLFVYKLEQVSEKGKAYTNYFGRCNVAEHEKLIKLAQLKPEKDSDEAVTYSLGKFGQRALDFYSIHVTKESTHPVKPLAQIAGNRYASGPVGKALSDACMGTIASFLSKYQDIIIEHQKVVKGNQKRLESLRELAGKENLEYPSVTLPPQPHTKEGVDAYNEVIARVRMWVNLNLWQKLKLSRDDAKPLLRLKGFPSFPLVERQANEVDWWDMVCNVKKLINEKKEDGKVFWQNLAGYKRQEALRPYLSSEEDRKKGKKFARYQLGDLLLHLEKKHGEDWGKVYDEAWERIDKKVEGLSKHIKLEEERRSEDAQSKAALTDWLRAKASFVIEGLKEADKDEFCRCELKLQKWYGDLRGKPFAIEAENSILDISGFSKQYNCAFIWQKDGVKKLNLYLIINYFKGGKLRFKKIKPEAFEANRFYTVINKKSGEIVPMEVNFNFDDPNLIILPLAFGKRQGREFIWNDLLSLETGSLQLANGRVIEKTLYNRRTRQDEPALFVALTFERREVLDSSNIKPMNLIGVDRGENIPAVIALTDPEGCPLSRFKDSLGNPTHILRIGESYKEKQRTIQAKKEVEQRRAGGYSRKYASKAKNLADDMVRNTARDLLYYAVTQDAMLIFENLSRGFGRQGKRTFMAERQYTRMEDWLTAKLAYEGLPSKTYLSKTLAQYTSKTCSNCGFTITSADYDRVLEKLKKTATGWMTTINGKELKVEGQITYYNRYKRQNVVKDLSVELDRLSEESVNNDISSWTKGRSGEALSLLKKRFSHRPVQEKFVCLNCGFETHADEQAALNIARSWLFLRSQEYKKYQTNKTTGNTDKRAFVETWQSFYRKKLKEVWKPAV

SEQ ID NO: 32514 - protein, 978 aa, synthetic construct
  REGION 1..978: note = engineered CasX variant
QEIKGRINKIRRRLVKDSNTKKAGKTGPMKTLLVRVMTPDLRERLENLRKKPENIPQPISNTSRANLNKLLTDYTEMKKAILHVYWEEFQKDPVGLMSRVAQPASKKIDQNKLKPEMDEKGNLTTAGFACSQCGQPLFVYKLEQVSEKGKAYTNYFGRCNVAEHEKLILLAQLKPEKDSDEAVTYSLGKFGQRALDFYSIHVTKESTHPVKPLAQIAGNRYASPVGKALSDACMGTIASFLSKYQDIIIEHQKVVKGNQKRLESLRELAGKENLEYPSVTLPPQPHTKEGVDAYNEVIARVRMWVNLNLWQKLKLSRDDAKPLLRLKGFPSFPLVERQANEVDWWDMVCNVKKLINEKKEDGKVFWQNLAGYKRQEALRPYLSSEEDRKKGKKFARYQLGDLLLHLEKKHGEDWGKVYDEAWERIDKKVEGLSKHIKLEEERRSEDAQSKAALTDWLRAKASFVIEGLKEADKDEFCRCELKLQKWYGDLRGKPFAIEAENSILDISGFSKQYNCAFIWQKDGVKKLNLYLIINYFKGGKLRFKKIKPEAFEANRFYTVINKKSGEIVPMEVNFNFDDPNLIILPLAFGKRQGREFIWNDLLSLETGSLQLANGRVIEKTLYNRRTRQDEPALFVALTFERREVLDSSNIKPMNLIGVDRGENIPAVIALTDPEGCPLSRFKDSLGNPTHILRIGESYKEKQRTIQAKKEVEQRRAGGYSRKYASKAKNLADDMVRNTARDLLYYAVTQDAMLIFENLSRGFGRQGKRTFMAERQYTRMEDWLTAKLAYEGLPSKTYLSKTLAQYTSKTCSNCGFTITSADYDRVLEKLKKTATGWMTTINGKELKVEGQITYYNRYKRQNVVKDLSVELDRLSEESVNNDISSWTKGRSGEALSLLKKRFSHRPVQEKFVCLNCGFETHADEQAALNIARSWLFLRSQEYKKYQTNKTTGNTDKRAFVETWQSFYRKKLKEVWKPAV

SEQ ID NO: 32515 - protein, 978 aa, synthetic construct
  REGION 1..978: note = engineered CasX variant
QEIKRASKIRRRLVKDSNTKKAGKTGPMKTLLVRVMTPDLRERLENLRKKPENIPQPISNTSRANLNKLLTDYTEMKKAILHVYWEEFQKDPVGLMSRVAQPASKKIDQNKLKPEMDEKGNLTTAGFACSQCGQPLFVYKLEQVSEKGKAYTNYFGRCNVAEHEKLILLAQLKPEKDSDEAVTYSLGKFGQRALDFYSIHVTKESTHPVKPLAQIAGNRYASYPVGKALSDACMGTIASFLSKYQDIIIEHQKVVKGNQKRLESLRELAGKENLEYPSVTLPPQPHTKEGVDAYNEVIARVRMWVNLNLWQKLKLSRDDAKPLLRLKGFPSFPLVERQANEVDWWDMVCNVKKLINEKKEDGKVFWQNLAGYKRQEALRPYLSSEEDRKKGKKFARYQLGDLLLHLEKKHGEDWGKVYDEAWERIDKKVEGLSKHIKLEEERRSEDAQSKAALTDWLRAKASFVIEGLKEADKDEFCRCELKLQKWYGDLRGKPFAIEAENSILDISGFSKQYNCAFIWQKDGVKKLNLYLIINYFKGGKLRFKKIKPEAFEANRFYTVINKKSGEIVPMEVNFNFDDPNLIILPLAFGKRQGREFIWNDLLSLETGSLKLANGRVIEKTLYNRRTRQDEPALFVALTFERREVLDSSNIKPMNLIGVDRGENIPAVIALTDPEGCPLSRFKDSLGNPTHILRIGESYKEKQRTIQAKKEVEQRRAGGYSRKYASKAKNLADDMVRNTARDLLYYAVTQDAMLIFENLSRGFGRQGKRTFMAERQYTRMEDWLTAKLAYEGLPSKTYLSKTLAQYTSKTCSNCGFTITSADYDRVLEKLKKTATGWMTTINGKELKVEGQITYYNRYKRQNVVKDLSVELDRLSEESVNNDISSWTKGRSGEALSLLKKRFSHRPVQEKFVCLNCGFETHADEQAALNIARSWLFLRSQEYKKYQTNKTTGNTDKRAFVETWQSFYRKKLKEVWKPAV

SEQ ID NO: 32516 - protein, 978 aa, synthetic construct
  REGION 1..978: note = engineered CasX variant
QEIKRASKIRRRLVKDSNTKKAGKTGPMKTLLVRVMTPDLRERLENLRKKPENIPQPISNTSRANLNKLLTDYTEMKKAILHVYWEEFQKDPVGLMSRVAQPASKKIDQNKLKPEMDEKGNLTTAGFACSQCGQPLFVYKLEQVSEKGKAYTNYFGRCNVAEHEKLILLAQLKPEKDSDEAVTYSLGKFGQRALDFYSIHVTKESTHPVKPLAQIAGNRYASHPVGKALSDACMGTIASFLSKYQDIIIEHQKVVKGNQKRLESLRELAGKENLEYPSVTLPPQPHTKEGVDAYNEVIARVRMWVNLNLWQKLKLSRDDAKPLLRLKGFPSFPLVERQANEVDWWDMVCNVKKLINEKKEDGKVFWQNLAGYKRQEALRPYLSSEEDRKKGKKFARYQLGDLLLHLEKKHGEDWGKVYDEAWERIDKKVEGLSKHIKLEEERRSEDAQSKAALTDWLRAKASFVIEGLKEADKDEFCRCELKLQKWYGDLRGKPFAIEAENSILDISGFSKQYNCAFIWQKDGVKKLNLYLIINYFKGGKLRFKKIKPEAFEANRFYTVINKKSGEIVPMEVNFNFDDPNLIILPLAFGKRQGREFIWNDLLSLETGSLKLANGRVIEKTLYNRRTRQDEPALFVALTFERREVLDSSNIKPMNLIGVDRGENIPAVIALTDPEGCPLSRFKDSLGNPTHILRIGESYKEKQRTIQAKKEVEQRRAGGYSRKYASKAKNLADDMVRNTARDLLYYAVTQDAMLIFENLSRGFGRQGKRTFMAERQYTRMEDWLTAKLAYEGLPSKTYLSKTLAQYTSKTCSNCGFTITSADYDRVLEKLKKTATGWMTTINGKELKVEGQITYYNRYKRQNVVKDLSVELDRLSEESVNNDISSWTKGRSGEALSLLKKRFSHRPVQEKFVCLNCGFETHADEQAALNIARSWLFLRSQEYKKYQTNKTTGNTDKRAFVETWQSFYRKKLKEVWKPAV

SEQ ID NO: 32517 - protein, 978 aa, synthetic construct
  REGION 1..978: note = engineered CasX variant
QEIKRASKIRRRLVKDSNTKKAGKTGPMKTLLVRVMTPDLRERLENLRKKPENIPQPISNTSRANLNKLLTDYTEMKKAILHVYWEEFQKDPVGLMSRVAQPASKKIDQNKLKPEMDEKGNLTTAGFACSQCGQPLFVYKLEQVSEKGKAYTNYFGRCNVAEHEKLILLAQLKPEKDSDEAVTYSLGKFGQRALDFYSIHVTKESTHPVKPLAQIAGNRYASSPVGKALSDACMGTIASFLSKYQDIIIEHQKVVKGNQKRLESLRELAGKENLEYPSVTLPPQPHTKEGVDAYNEVIARVRMWVNLNLWQKLKLSRDDAKPLLRLKGFPSFPLVERQANEVDWWDMVCNVKKLINEKKEDGKVFWQNLAGYKRQEALRPYLSSEEDRKKGKKFARYQLGDLLLHLEKKHGEDWGKVYDEAWERIDKKVEGLSKHIKLEEERRSEDAQSKAALTDWLRAKASFVIEGLKEADKDEFCRCELKLQKWYGDLRGKPFAIEAENSILDISGFSKQYNCAFIWQKDGVKKLNLYLIINYFKGGKLRFKKIKPEAFEANRFYTVINKKSGEIVPMEVNFNFDDPNLIILPLAFGKRQGREFIWNDLLSLETGSLKLANGRVIEKTLYNRRTRQDEPALFVALTFERREVLDSSNIKPMNLIGVDRGENIPAVIALTDPEGCPLSRFKDSLGNPTHILRIGESYKEKQRTIQAKKEVEQRRAGGYSRKYASKAKNLADDMVRNTARDLLYYAVTQDAMLIFENLSRGFGRQGKRTFMAERQYTRMEDWLTAKLAYEGLPSKTYLSKTLAQYTSKTCSNCGFTITSADYDRVLEKLKKTATGWMTTINGKELKVEGQITYYNRYKRQNVVKDLSVELDRLSEESVNNDISSWTKGRSGEALSLLKKRFSHRPVQEKFVCLNCGFETHADEQAALNIARSWLFLRSQEYKKYQTNKTTGNTDKRAFVETWQSFYRKKLKEVWKPAV

SEQ ID NO: 32518 - protein, 978 aa, synthetic construct
  REGION 1..978: note = engineered CasX variant
QEIKRASKIRRRLVKDSNTKKAGKTGPMKTLLVRVMTPDLRERLENLRKKPENIPQPISNTSRANLNKLLTDYTEMKKAILHVYWEEFQKDPVGLMSRVAQPASKKIDQNKLKPEMDEKGNLTTAGFACSQCGQPLFVYKLEQVSEKGKAYTNYFGRCNVAEHEKLILLAQLKPEKDSDEAVTYSLGKFGQRALDFYSIHVTKESTHPVKPLAQIAGNRYASTPVGKALSDACMGTIASFLSKYQDIIIEHQKVVKGNQKRLESLRELAGKENLEYPSVTLPPQPHTKEGVDAYNEVIARVRMWVNLNLWQKLKLSRDDAKPLLRLKGFPSFPLVERQANEVDWWDMVCNVKKLINEKKEDGKVFWQNLAGYKRQEALRPYLSSEEDRKKGKKFARYQLGDLLLHLEKKHGEDWGKVYDEAWERIDKKVEGLSKHIKLEEERRSEDAQSKAALTDWLRAKASFVIEGLKEADKDEFCRCELKLQKWYGDLRGKPFAIEAENSILDISGFSKQYNCAFIWQKDGVKKLNLYLIINYFKGGKLRFKKIKPEAFEANRFYTVINKKSGEIVPMEVNFNFDDPNLIILPLAFGKRQGREFIWNDLLSLETGSLKLANGRVIEKTLYNRRTRQDEPALFVALTFERREVLDSSNIKPMNLIGVDRGENIPAVIALTDPEGCPLSRFKDSLGNPTHILRIGESYKEKQRTIQAKKEVEQRRAGGYSRKYASKAKNLADDMVRNTARDLLYYAVTQDAMLIFENLSRGFGRQGKRTFMAERQYTRMEDWLTAKLAYEGLPSKTYLSKTLAQYTSKTCSNCGFTITSADYDRVLEKLKKTATGWMTTINGKELKVEGQITYYNRYKRQNVVKDLSVELDRLSEESVNNDISSWTKGRSGEALSLLKKRFSHRPVQEKFVCLNCGFETHADEQAALNIARSWLFLRSQEYKKYQTNKTTGNTDKRAFVETWQSFYRKKLKEVWKPAV

SEQ ID NO: 32519 - protein, 978 aa, synthetic construct
  REGION 1..978: note = engineered CasX variant
QEIKRASKIRRRLVKDSNTKKAGKTGPMKTLLVRVMTPDLRERLENLRKKPENIPQPISNTSRANLNKLLTDYTEMKKAILHVYWEEFQKDPVGLMSRVAQPASKKIDQNKLKPEMDEKGNLTTAGFACSQCGQPLFVYKLEQVSEKGKAYTNYFGRCNVAEHEKLILLAQLKPEKDSDEAVTYSLGKFGQRALDFYSIHVTKESTHPVKPLAQIAGNRYASAPVGKALSDACMGTIASFLSKYQDIIIEHQKVVKGNQKRLESLRELAGKENLEYPSVTLPPQPHTKEGVDAYNEVIARVRMWVNLNLWQKLKLSRDDAKPLLRLKGFPSFPLVERQANEVDWWDMVCNVKKLINEKKEDGKVFWQNLAGYKRQEALRPYLSSEEDRKKGKKFARYQLGDLLLHLEKKHGEDWGKVYDEAWERIDKKVEGLSKHIKLEEERRSEDAQSKAALTDWLRAKASFVIEGLKEADKDEFCRCELKLQKWYGDLRGKPFAIEAENSILDISGFSKQYNCAFIWQKDGVKKLNLYLIINYFKGGKLRFKKIKPEAFEANRFYTVINKKSGEIVPMEVNFNFDDPNLIILPLAFGKRQGREFIWNDLLSLETGSLKLANGRVIEKTLYNRRTRQDEPALFVALTFERREVLDSSNIKPMNLIGVDRGENIPAVIALTDPEGCPLSRFKDSLGNPTHILRIGESYKEKQRTIQAKKEVEQRRAGGYSRKYASKAKNLADDMVRNTARDLLYYAVTQDAMLIFENLSRGFGRQGKRTFMAERQYTRMEDWLTAKLAYEGLPSKTYLSKTLAQYTSKTCSNCGFTITSADYDRVLEKLKKTATGWMTTINGKELKVEGQITYYNRYKRQNVVKDLSVELDRLSEESVNNDISSWTKGRSGEALSLLKKRFSHRPVQEKFVCLNCGFETHADEQAALNIARSWLFLRSQEYKKYQTNKTTGNTDKRAFVETWQSFYRKKLKEVWKPAV

SEQ ID NO: 32520 - protein, 978 aa, synthetic construct
  REGION 1..978: note = engineered CasX variant
QEIKRASKIRRRLVKDSNTKKAGKTGPMKTLLVRVMTPDLRERLENLRKKPENIPQPISNTSRANLNKLLTDYTEMKKAILHVYWEEFQKDPVGLMSRVAQPASKKIDQNKLKPEMDEKGNLTTAGFACSQCGQPLFVYKLEQVSEKGKAYTNYFGRCNVAEHEKLILLAQLKPEKDSDEAVTYSLGKFGQRALDFYSIHVTKESTHPVKPLAQIAGNRYASVPVGKALSDACMGTIASFLSKYQDIIIEHQKVVKGNQKRLESLRELAGKENLEYPSVTLPPQPHTKEGVDAYNEVIARVRMWVNLNLWQKLKLSRDDAKPLLRLKGFPSFPLVERQANEVDWWDMVCNVKKLINEKKEDGKVFWQNLAGYKRQEALRPYLSSEEDRKKGKKFARYQLGDLLLHLEKKHGEDWGKVYDEAWERIDKKVEGLSKHIKLEEERRSEDAQSKAALTDWLRAKASFVIEGLKEADKDEFCRCELKLQKWYGDLRGKPFAIEAENSILDISGFSKQYNCAFIWQKDGVKKLNLYLIINYFKGGKLRFKKIKPEAFEANRFYTVINKKSGEIVPMEVNFNFDDPNLIILPLAFGKRQGREFIWNDLLSLETGSLKLANGRVIEKTLYNRRTRQDEPALFVALTFERREVLDSSNIKPMNLIGVDRGENIPAVIALTDPEGCPLSRFKDSLGNPTHILRIGESYKEKQRTIQAKKEVEQRRAGGYSRKYASKAKNLADDMVRNTARDLLYYAVTQDAMLIFENLSRGFGRQGKRTFMAERQYTRMEDWLTAKLAYEGLPSKTYLSKTLAQYTSKTCSNCGFTITSADYDRVLEKLKKTATGWMTTINGKELKVEGQITYYNRYKRQNVVKDLSVELDRLSEESVNNDISSWTKGRSGEALSLLKKRFSHRPVQEKFVCLNCGFETHADEQAALNIARSWLFLRSQEYKKYQTNKTTGNTDKRAFVETWQSFYRKKLKEVWKPAV

SEQ ID NO: 32521 - protein, 978 aa, synthetic construct
  REGION 1..978: note = engineered CasX variant
QEIKRASKIRRRLVKDSNTKKAGKTGPMKTLLVRVMTPDLRERLENLRKKPENIPQPISNTSRANLNKLLTDYTEMKKAILHVYWEEFQKDPVGLMSRVAQPASKKIDQNKLKPEMDEKGNLTTAGFACSQCGQPLFVYKLEQVSEKGKAYTNYFGRCNVAEHEKLIKLAQLKPEKDSDEAVTYSLGKFGQRALDFYSIHVTKESTHPVKPLAQIAGNRYASGPVGKALSDACMGTIASFLSKYQDIIIEHQKVVKGNQKRLESLRELAGKENLEYPSVTLPPQPHTKEGVDAYNEVIARVRMWVNLNLWQKLKLSRDDAKPLLRLKGFPSFPLVERQANEVDWWDMVCNVKKLINEKKEDGKVFWQNLAGYKRQEALRPYLSSEEDRKKGKKFARYQLGDLLLHLEKKHGEDWGKVYDEAWERIDKKVEGLSKHIKLEEERRSEDAQSKAALTDWLRAKASFVIEGLKEADKDEFCRCELKLQKWYGDLRGKPFAIEAENSILDISGFSKQYNCAFIWQKDGVKKLNLYLIINYFKGGKLRFKKIKPEAFEANRFYTVINKKSGEIVPMEVNFNFDDPNLIILPLAFGKRQGREFIWNDLLSLETGSLKLANGRVIEKTLYNRRTRQDEPALFVALTFERREVLDSSNIKPMNLIGVDRGENIPAVIALTDPEGCPLSRFKDSLGNPTHILRIGESYKEKQRTIQAKKEVEQRRAGGYSRKYASKAKNLADDMVRNTARDLLYYAVTQDAMLIFENLSRGFGRQGKRTFMAERQYTRMEDWLTAKLAYEGLPSKTYLSKTLAQYTSKTCSNCGFTITSADYDRVLEKLKKTATGWMTTINGKELKVEGQITYYNRYKRQNVVKDLSVELDRLSEESVNNDISSWTKGRSGEALSLLKKRFSHRPVQEKFVCLNCGFETHADEQAALNIARSWLFLRSQEYKKYQTNKTTGNTDKRAFVETWQSFYRKKLKEVWKPAV

SEQ ID NO: 32522 - protein, 977 aa, synthetic construct
  REGION 1..977: note = engineered CasX variant
QEIKRASKIRRRLVKDSNTKKAGKTGPMKTLLVRVMTPDLRERLENLRKKPENIPQPISNTSRANLNKLLTDYTEMKKAILHVYWEEFQKDPVGLMSRVAQPASKKIDQNKLKPEMDEKGNLTTAGFACSQCGQPLFVYKLEQVSEKGKAYTNYFGRCNVAEHEKLILLAQLKPEKDSDEAVTYSLGKFGQRALDFYSIHVTKESTHPVKPLAQIAGNRYASPVGKALSDACMGTIASFLSKYQDIIIEHQKVVKGNQKRLESLRELAGKENLEYPSVTLPPQPHTKEGVDAYNEVIARVRMWVNLNLWQKLKLSRDDAKPLLRLKGFPSFPLVERQANEVDWWDMVCNVKKLINEKKEDGKVFWQNLAGYKRQEALRPYLSSEEDRKKGKKFARYQLGDLLLHLEKKHGEDWGKVYDEAWERIDKKVEGLSKHIKLEEERRSEDAQSKAALTDWLRAKASFVIEGLKEADKDEFCRCELKLQKWYGDLRGKPFAIEAENSILDISGFSKQYNCAFIWQKDGVKKLNLYLIINYFKGGKLRFKKIKPEAFEANRFYTVINKKSGEIVPMEVNFNFDDPNLIILPLAFGKRQGREFIWNDLLSLETGSLKLANGRVIEKTLYNRRTRQDEPALFVALTFERREVLDSSNIKPMNLIGVDRGENIPAVIALTDPEGCPLSRFKDSLGNPTHILRIGESYKEKQRTIQAKKEVEQRRAGGYSRKYASKAKNLADDMVRNTARDLLYYAVTQDAMLIFENLSRGFGRQGKRTFMAERQYTRMEDWLTAKLAYEGLPSKTYLSKTLAQYTSKTCSNCGFTITSADYDRVLEKLKKTATGWMTTINGKELKVEGQITYYNRYKRQNVVKDLSVELDRLSEESVNNDISSWTKGRSGEALSLLKKRFSHRPVQEKFVCLNCGFETHADEQAALNIARSWLFLRSQEYKKYQTNKTTGNTDKRAFVETWQSFYRKKLKEVWKPAV

SEQ ID NO: 32523 - protein, 978 aa, synthetic construct
  REGION 1..978: note = engineered CasX variant
QEIKRANGIRRRLVKDSNTKKAGKTGPMKTLLVRVMTPDLRERLENLRKKPENIPQPISNTSRANLNKLLTDYTEMKKAILHVYWEEFQKDPVGLMSRVAQPASKKIDQNKLKPEMDEKGNLTTAGFACSQCGQPLFVYKLEQVSEKGKAYTNYFGRCNVAEHEKLILLAQLKPEKDSDEAVTYSLGKFGQRALDFYSIHVTKESTHPVKPLAQIAGNRYASYPVGKALSDACMGTIASFLSKYQDIIIEHQKVVKGNQKRLESLRELAGKENLEYPSVTLPPQPHTKEGVDAYNEVIARVRMWVNLNLWQKLKLSRDDAKPLLRLKGFPSFPLVERQANEVDWWDMVCNVKKLINEKKEDGKVFWQNLAGYKRQEALRPYLSSEEDRKKGKKFARYQLGDLLLHLEKKHGEDWGKVYDEAWERIDKKVEGLSKHIKLEEERRSEDAQSKAALTDWLRAKASFVIEGLKEADKDEFCRCELKLQKWYGDLRGKPFAIEAENSILDISGFSKQYNCAFIWQKDGVKKLNLYLIINYFKGGKLRFKKIKPEAFEANRFYTVINKKSGEIVPMEVNFNFDDPNLIILPLAFGKRQGREFIWNDLLSLETGSLKLANGRVIEKTLYNRRTRQDEPALFVALTFERREVLDSSNIKPMNLIGVDRGENIPAVIALTDPEGCPLSRFKDSLGNPTHILRIGESYKEKQRTIQAKKEVEQRRAGGYSRKYASKAKNLADDMVRNTARDLLYYAVTQDAMLIFENLSRGFGRQGKRTFMAERQYTRMEDWLTAKLAYEGLPSKTYLSKTLAQYTSKTCSNCGFTITSADYDRVLEKLKKTATGWMTTINGKELKVEGQITYYNRYKRQNVVKDLSVELDRLSEESVNNDISSWTKGRSGEALSLLKKRFSHRPVQEKFVCLNCGFETHADEQAALNIARSWLFLRSQEYKKYQTNKTTGNTDKRAFVETWQSFYRKKLKEVWKPAV

SEQ ID NO: 32524 - protein, 978 aa, synthetic construct
  REGION 1..978: note = engineered CasX variant
QEIKRANGIRRRLVKDSNTKKAGKTGPMKTLLVRVMTPDLRERLENLRKKPENIPQPISNTSRANLNKLLTDYTEMKKAILHVYWEEFQKDPVGLMSRVAQPASKKIDQNKLKPEMDEKGNLTTAGFACSQCGQPLFVYKLEQVSEKGKAYTNYFGRCNVAEHEKLILLAQLKPEKDSDEAVTYSLGKFGQRALDFYSIHVTKESTHPVKPLAQIAGNRYASHPVGKALSDACMGTIASFLSKYQDIIIEHQKVVKGNQKRLESLRELAGKENLEYPSVTLPPQPHTKEGVDAYNEVIARVRMWVNLNLWQKLKLSRDDAKPLLRLKGFPSFPLVERQANEVDWWDMVCNVKKLINEKKEDGKVFWQNLAGYKRQEALRPYLSSEEDRKKGKKFARYQLGDLLLHLEKKHGEDWGKVYDEAWERIDKKVEGLSKHIKLEEERRSEDAQSKAALTDWLRAKASFVIEGLKEADKDEFCRCELKLQKWYGDLRGKPFAIEAENSILDISGFSKQYNCAFIWQKDGVKKLNLYLIINYFKGGKLRFKKIKPEAFEANRFYTVINKKSGEIVPMEVNFNFDDPNLIILPLAFGKRQGREFIWNDLLSLETGSLKLANGRVIEKTLYNRRTRQDEPALFVALTFERREVLDSSNIKPMNLIGVDRGENIPAVIALTDPEGCPLSRFKDSLGNPTHILRIGESYKEKQRTIQAKKEVEQRRAGGYSRKYASKAKNLADDMVRNTARDLLYYAVTQDAMLIFENLSRGFGRQGKRTFMAERQYTRMEDWLTAKLAYEGLPSKTYLSKTLAQYTSKTCSNCGFTITSADYDRVLEKLKKTATGWMTTINGKELKVEGQITYYNRYKRQNVVKDLSVELDRLSEESVNNDISSWTKGRSGEALSLLKKRFSHRPVQEKFVCLNCGFETHADEQAALNIARSWLFLRSQEYKKYQTNKTTGNTDKRAFVETWQSFYRKKLKEVWKPAV

SEQ ID NO: 32525 - protein, 978 aa, synthetic construct
  REGION 1..978: note = engineered CasX variant
QEIKRANGIRRRLVKDSNTKKAGKTGPMKTLLVRVMTPDLRERLENLRKKPENIPQPISNTSRANLNKLLTDYTEMKKAILHVYWEEFQKDPVGLMSRVAQPASKKIDQNKLKPEMDEKGNLTTAGFACSQCGQPLFVYKLEQVSEKGKAYTNYFGRCNVAEHEKLILLAQLKPEKDSDEAVTYSLGKFGQRALDFYSIHVTKESTHPVKPLAQIAGNRYASSPVGKALSDACMGTIASFLSKYQDIIIEHQKVVKGNQKRLESLRELAGKENLEYPSVTLPPQPHTKEGVDAYNEVIARVRMWVNLNLWQKLKLSRDDAKPLLRLKGFPSFPLVERQANEVDWWDMVCNVKKLINEKKEDGKVFWQNLAGYKRQEALRPYLSSEEDRKKGKKFARYQLGDLLLHLEKKHGEDWGKVYDEAWERIDKKVEGLSKHIKLEEERRSEDAQSKAALTDWLRAKASFVIEGLKEADKDEFCRCELKLQKWYGDLRGKPFAIEAENSILDISGFSKQYNCAFIWQKDGVKKLNLYLIINYFKGGKLRFKKIKPEAFEANRFYTVINKKSGEIVPMEVNFNFDDPNLIILPLAFGKRQGREFIWNDLLSLETGSLKLANGRVIEKTLYNRRTRQDEPALFVALTFERREVLDSSNIKPMNLIGVDRGENIPAVIALTDPEGCPLSRFKDSLGNPTHILRIGESYKEKQRTIQAKKEVEQRRAGGYSRKYASKAKNLADDMVRNTARDLLYYAVTQDAMLIFENLSRGFGRQGKRTFMAERQYTRMEDWLTAKLAYEGLPSKTYLSKTLAQYTSKTCSNCGFTITSADYDRVLEKLKKTATGWMTTINGKELKVEGQITYYNRYKRQNVVKDLSVELDRLSEESVNNDISSWTKGRSGEALSLLKKRFSHRPVQEKFVCLNCGFETHADEQAALNIARSWLFLRSQEYKKYQTNKTTGNTDKRAFVETWQSFYRKKLKEVWKPAV

SEQ ID NO: 32526 - protein, 978 aa, synthetic construct
  REGION 1..978: note = engineered CasX variant
QEIKRANGIRRRLVKDSNTKKAGKTGPMKTLLVRVMTPDLRERLENLRKKPENIPQPISNTSRANLNKLLTDYTEMKKAILHVYWEEFQKDPVGLMSRVAQPASKKIDQNKLKPEMDEKGNLTTAGFACSQCGQPLFVYKLEQVSEKGKAYTNYFGRCNVAEHEKLILLAQLKPEKDSDEAVTYSLGKFGQRALDFYSIHVTKESTHPVKPLAQIAGNRYASTPVGKALSDACMGTIASFLSKYQDIIIEHQKVVKGNQKRLESLRELAGKENLEYPSVTLPPQPHTKEGVDAYNEVIARVRMWVNLNLWQKLKLSRDDAKPLLRLKGFPSFPLVERQANEVDWWDMVCNVKKLINEKKEDGKVFWQNLAGYKRQEALRPYLSSEEDRKKGKKFARYQLGDLLLHLEKKHGEDWGKVYDEAWERIDKKVEGLSKHIKLEEERRSEDAQSKAALTDWLRAKASFVIEGLKEADKDEFCRCELKLQKWYGDLRGKPFAIEAENSILDISGFSKQYNCAFIWQKDGVKKLNLYLIINYFKGGKLRFKKIKPEAFEANRFYTVINKKSGEIVPMEVNFNFDDPNLIILPLAFGKRQGREFIWNDLLSLETGSLKLANGRVIEKTLYNRRTRQDEPALFVALTFERREVLDSSNIKPMNLIGVDRGENIPAVIALTDPEGCPLSRFKDSLGNPTHILRIGESYKEKQRTIQAKKEVEQRRAGGYSRKYASKAKNLADDMVRNTARDLLYYAVTQDAMLIFENLSRGFGRQGKRTFMAERQYTRMEDWLTAKLAYEGLPSKTYLSKTLAQYTSKTCSNCGFTITSADYDRVLEKLKKTATGWMTTINGKELKVEGQITYYNRYKRQNVVKDLSVELDRLSEESVNNDISSWTKGRSGEALSLLKKRFSHRPVQEKFVCLNCGFETHADEQAALNIARSWLFLRSQEYKKYQTNKTTGNTDKRAFVETWQSFYRKKLKEVWKPAV

SEQ ID NO: 32527 - protein, 978 aa, synthetic construct
  REGION 1..978: note = engineered CasX variant
QEIKRANGIRRRLVKDSNTKKAGKTGPMKTLLVRVMTPDLRERLENLRKKPENIPQPISNTSRANLNKLLTDYTEMKKAILHVYWEEFQKDPVGLMSRVAQPASKKIDQNKLKPEMDEKGNLTTAGFACSQCGQPLFVYKLEQVSEKGKAYTNYFGRCNVAEHEKLILLAQLKPEKDSDEAVTYSLGKFGQRALDFYSIHVTKESTHPVKPLAQIAGNRYASAPVGKALSDACMGTIASFLSKYQDIIIEHQKVVKGNQKRLESLRELAGKENLEYPSVTLPPQPHTKEGVDAYNEVIARVRMWVNLNLWQKLKLSRDDAKPLLRLKGFPSFPLVERQANEVDWWDMVCNVKKLINEKKEDGKVFWQNLAGYKRQEALRPYLSSEEDRKKGKKFARYQLGDLLLHLEKKHGEDWGKVYDEAWERIDKKVEGLSKHIKLEEERRSEDAQSKAALTDWLRAKASFVIEGLKEADKDEFCRCELKLQKWYGDLRGKPFAIEAENSILDISGFSKQYNCAFIWQKDGVKKLNLYLIINYFKGGKLRFKKIKPEAFEANRFYTVINKKSGEIVPMEVNFNFDDPNLIILPLAFGKRQGREFIWNDLLSLETGSLKLANGRVIEKTLYNRRTRQDEPALFVALTFERREVLDSSNIKPMNLIGVDRGENIPAVIALTDPEGCPLSRFKDSLGNPTHILRIGESYKEKQRTIQAKKEVEQRRAGGYSRKYASKAKNLADDMVRNTARDLLYYAVTQDAMLIFENLSRGFGRQGKRTFMAERQYTRMEDWLTAKLAYEGLPSKTYLSKTLAQYTSKTCSNCGFTITSADYDRVLEKLKKTATGWMTTINGKELKVEGQITYYNRYKRQNVVKDLSVELDRLSEESVNNDISSWTKGRSGEALSLLKKRFSHRPVQEKFVCLNCGFETHADEQAALNIARSWLFLRSQEYKKYQTNKTTGNTDKRAFVETWQSFYRKKLKEVWKPAV

SEQ ID NO: 32528 - protein, 978 aa, synthetic construct
  REGION 1..978: note = engineered CasX variant
QEIKRANGIRRRLVKDSNTKKAGKTGPMKTLLVRVMTPDLRERLENLRKKPENIPQPISNTSRANLNKLLTDYTEMKKAILHVYWEEFQKDPVGLMSRVAQPASKKIDQNKLKPEMDEKGNLTTAGFACSQCGQPLFVYKLEQVSEKGKAYTNYFGRCNVAEHEKLILLAQLKPEKDSDEAVTYSLGKFGQRALDFYSIHVTKESTHPVKPLAQIAGNRYASVPVGKALSDACMGTIASFLSKYQDIIIEHQKVVKGNQKRLESLRELAGKENLEYPSVTLPPQPHTKEGVDAYNEVIARVRMWVNLNLWQKLKLSRDDAKPLLRLKGFPSFPLVERQANEVDWWDMVCNVKKLINEKKEDGKVFWQNLAGYKRQEALRPYLSSEEDRKKGKKFARYQLGDLLLHLEKKHGEDWGKVYDEAWERIDKKVEGLSKHIKLEEERRSEDAQSKAALTDWLRAKASFVIEGLKEADKDEFCRCELKLQKWYGDLRGKPFAIEAENSILDISGFSKQYNCAFIWQKDGVKKLNLYLIINYFKGGKLRFKKIKPEAFEANRFYTVINKKSGEIVPMEVNFNFDDPNLIILPLAFGKRQGREFIWNDLLSLETGSLKLANGRVIEKTLYNRRTRQDEPALFVALTFERREVLDSSNIKPMNLIGVDRGENIPAVIALTDPEGCPLSRFKDSLGNPTHILRIGESYKEKQRTIQAKKEVEQRRAGGYSRKYASKAKNLADDMVRNTARDLLYYAVTQDAMLIFENLSRGFGRQGKRTFMAERQYTRMEDWLTAKLAYEGLPSKTYLSKTLAQYTSKTCSNCGFTITSADYDRVLEKLKKTATGWMTTINGKELKVEGQITYYNRYKRQNVVKDLSVELDRLSEESVNNDISSWTKGRSGEALSLLKKRFSHRPVQEKFVCLNCGFETHADEQAALNIARSWLFLRSQEYKKYQTNKTTGNTDKRAFVETWQSFYRKKLKEVWKPAV

SEQ ID NO: 32529 - protein, 978 aa, synthetic construct
  REGION 1..978: note = engineered CasX variant
QEIKRANGIRRRLVKDSNTKKAGKTGPMKTLLVRVMTPDLRERLENLRKKPENIPQPISNTSRANLNKLLTDYTEMKKAILHVYWEEFQKDPVGLMSRVAQPASKKIDQNKLKPEMDEKGNLTTAGFACSQCGQPLFVYKLEQVSEKGKAYTNYFGRCNVAEHEKLIKLAQLKPEKDSDEAVTYSLGKFGQRALDFYSIHVTKESTHPVKPLAQIAGNRYASGPVGKALSDACMGTIASFLSKYQDIIIEHQKVVKGNQKRLESLRELAGKENLEYPSVTLPPQPHTKEGVDAYNEVIARVRMWVNLNLWQKLKLSRDDAKPLLRLKGFPSFPLVERQANEVDWWDMVCNVKKLINEKKEDGKVFWQNLAGYKRQEALRPYLSSEEDRKKGKKFARYQLGDLLLHLEKKHGEDWGKVYDEAWERIDKKVEGLSKHIKLEEERRSEDAQSKAALTDWLRAKASFVIEGLKEADKDEFCRCELKLQKWYGDLRGKPFAIEAENSILDISGFSKQYNCAFIWQKDGVKKLNLYLIINYFKGGKLRFKKIKPEAFEANRFYTVINKKSGEIVPMEVNFNFDDPNLIILPLAFGKRQGREFIWNDLLSLETGSLKLANGRVIEKTLYNRRTRQDEPALFVALTFERREVLDSSNIKPMNLIGVDRGENIPAVIALTDPEGCPLSRFKDSLGNPTHILRIGESYKEKQRTIQAKKEVEQRRAGGYSRKYASKAKNLADDMVRNTARDLLYYAVTQDAMLIFENLSRGFGRQGKRTFMAERQYTRMEDWLTAKLAYEGLPSKTYLSKTLAQYTSKTCSNCGFTITSADYDRVLEKLKKTATGWMTTINGKELKVEGQITYYNRYKRQNVVKDLSVELDRLSEESVNNDISSWTKGRSGEALSLLKKRFSHRPVQEKFVCLNCGFETHADEQAALNIARSWLFLRSQEYKKYQTNKTTGNTDKRAFVETWQSFYRKKLKEVWKPAV

SEQ ID NO: 32530 - protein, 977 aa, synthetic construct
  REGION 1..977: note = engineered CasX variant
QEIKRANGIRRRLVKDSNTKKAGKTGPMKTLLVRVMTPDLRERLENLRKKPENIPQPISNTSRANLNKLLTDYTEMKKAILHVYWEEFQKDPVGLMSRVAQPASKKIDQNKLKPEMDEKGNLTTAGFACSQCGQPLFVYKLEQVSEKGKAYTNYFGRCNVAEHEKLILLAQLKPEKDSDEAVTYSLGKFGQRALDFYSIHVTKESTHPVKPLAQIAGNRYASPVGKALSDACMGTIASFLSKYQDIIIEHQKVVKGNQKRLESLRELAGKENLEYPSVTLPPQPHTKEGVDAYNEVIARVRMWVNLNLWQKLKLSRDDAKPLLRLKGFPSFPLVERQANEVDWWDMVCNVKKLINEKKEDGKVFWQNLAGYKRQEALRPYLSSEEDRKKGKKFARYQLGDLLLHLEKKHGEDWGKVYDEAWERIDKKVEGLSKHIKLEEERRSEDAQSKAALTDWLRAKASFVIEGLKEADKDEFCRCELKLQKWYGDLRGKPFAIEAENSILDISGFSKQYNCAFIWQKDGVKKLNLYLIINYFKGGKLRFKKIKPEAFEANRFYTVINKKSGEIVPMEVNFNFDDPNLIILPLAFGKRQGREFIWNDLLSLETGSLKLANGRVIEKTLYNRRTRQDEPALFVALTFERREVLDSSNIKPMNLIGVDRGENIPAVIALTDPEGCPLSRFKDSLGNPTHILRIGESYKEKQRTIQAKKEVEQRRAGGYSRKYASKAKNLADDMVRNTARDLLYYAVTQDAMLIFENLSRGFGRQGKRTFMAERQYTRMEDWLTAKLAYEGLPSKTYLSKTLAQYTSKTCSNCGFTITSADYDRVLEKLKKTATGWMTTINGKELKVEGQITYYNRYKRQNVVKDLSVELDRLSEESVNNDISSWTKGRSGEALSLLKKRFSHRPVQEKFVCLNCGFETHADEQAALNIARSWLFLRSQEYKKYQTNKTTGNTDKRAFVETWQSFYRKKLKEVWKPAV

SEQ ID NO: 32531 - protein, 978 aa, synthetic construct
  REGION 1..978: note = engineered CasX variant
QEIKRANKIRRRLVKDSNTKKAGKTGPMKTLLVPVMTPDLRERLENLRKKPENIPQPISNTSRANLNKLLTDYTEMKKAILHVYWEEFQKDPVGLMSRVAQPASKKIDQNKLKPEMDEKGNLTTAGFACSQCGQPLFVYKLEQVSEKGKAYTNYFGRCNVAEHEKLILLAQLKPEKDSDEAVTYSLGKFGQRALDFYSIHVTKESTHPVKPLAQIAGNRYASYPVGKALSDACMGTIASFLSKYQDIIIEHQKVVKGNQKRLESLRELAGKENLEYPSVTLPPQPHTKEGVDAYNEVIARVRMWVNLNLWQKLKLSRDDAKPLLRLKGFPSFPLVERQANEVDWWDMVCNVKKLINEKKEDGKVFWQNLAGYKRQEALRPYLSSEEDRKKGKKFARYQLGDLLLHLEKKHGEDWGKVYDEAWERIDKKVEGLSKHIKLEEERRSEDAQSKAALTDWLRAKASFVIEGLKEADKDEFCRCELKLQKWYGDLRGKPFAIEAENSILDISGFSKQYNCAFIWQKDGVKKLNLYLIINYFKGGKLRFKKIKPEAFEANRFYTVINKKSGEIVPMEVNFNFDDPNLIILPLAFGKRQGREFIWNDLLSLETGSLKLANGRVIEKTLYNRRTRQDEPALFVALTFERREVLDSSNIKPMNLIGVDRGENIPAVIALTDPEGCPLSRFKDSLGNPTHILRIGESYKEKQRTIQAKKEVEQRRAGGYSRKYASKAKNLADDMVRNTARDLLYYAVTQDAMLIFENLSRGFGRQGKRTFMAERQYTRMEDWLTAKLAYEGLPSKTYLSKTLAQYTSKTCSNCGFTITSADYDRVLEKLKKTATGWMTTINGKELKVEGQITYYNRYKRQNVVKDLSVELDRLSEESVNNDISSWTKGRSGEALSLLKKRFSHRPVQEKFVCLNCGFETHADEQAALNIARSWLFLRSQEYKKYQTNKTTGNTDKRAFVETWQSFYRKKLKEVWKPAV

SEQ ID NO: 32532 - protein, 978 aa, synthetic construct
  REGION 1..978: note = engineered CasX variant
QEIKRANKIRRRLVKDSNTKKAGKTGPMKTLLVPVMTPDLRERLENLRKKPENIPQPISNTSRANLNKLLTDYTEMKKAILHVYWEEFQKDPVGLMSRVAQPASKKIDQNKLKPEMDEKGNLTTAGFACSQCGQPLFVYKLEQVSEKGKAYTNYFGRCNVAEHEKLILLAQLKPEKDSDEAVTYSLGKFGQRALDFYSIHVTKESTHPVKPLAQIAGNRYASHPVGKALSDACMGTIASFLSKYQDIIIEHQKVVKGNQKRLESLRELAGKENLEYPSVTLPPQPHTKEGVDAYNEVIARVRMWVNLNLWQKLKLSRDDAKPLLRLKGFPSFPLVERQANEVDWWDMVCNVKKLINEKKEDGKVFWQNLAGYKRQEALRPYLSSEEDRKKGKKFARYQLGDLLLHLEKKHGEDWGKVYDEAWERIDKKVEGLSKHIKLEEERRSEDAQSKAALTDWLRAKASFVIEGLKEADKDEFCRCELKLQKWYGDLRGKPFAIEAENSILDISGFSKQYNCAFIWQKDGVKKLNLYLIINYFKGGKLRFKKIKPEAFEANRFYTVINKKSGEIVPMEVNFNFDDPNLIILPLAFGKRQGREFIWNDLLSLETGSLKLANGRVIEKTLYNRRTRQDEPALFVALTFERREVLDSSNIKPMNLIGVDRGENIPAVIALTDPEGCPLSRFKDSLGNPTHILRIGESYKEKQRTIQAKKEVEQRRAGGYSRKYASKAKNLADDMVRNTARDLLYYAVTQDAMLIFENLSRGFGRQGKRTFMAERQYTRMEDWLTAKLAYEGLPSKTYLSKTLAQYTSKTCSNCGFTITSADYDRVLEKLKKTATGWMTTINGKELKVEGQITYYNRYKRQNVVKDLSVELDRLSEESVNNDISSWTKGRSGEALSLLKKRFSHRPVQEKFVCLNCGFETHADEQAALNIARSWLFLRSQEYKKYQTNKTTGNTDKRAFVETWQSFYRKKLKEVWKPAV

SEQ ID NO: 32533 - protein, 978 aa, synthetic construct
  REGION 1..978: note = engineered CasX variant
QEIKRANKIRRRLVKDSNTKKAGKTGPMKTLLVPVMTPDLRERLENLRKKPENIPQPISNTSRANLNKLLTDYTEMKKAILHVYWEEFQKDPVGLMSRVAQPASKKIDQNKLKPEMDEKGNLTTAGFACSQCGQPLFVYKLEQVSEKGKAYTNYFGRCNVAEHEKLILLAQLKPEKDSDEAVTYSLGKFGQRALDFYSIHVTKESTHPVKPLAQIAGNRYASSPVGKALSDACMGTIASFLSKYQDIIIEHQKVVKGNQKRLESLRELAGKENLEYPSVTLPPQPHTKEGVDAYNEVIARVRMWVNLNLWQKLKLSRDDAKPLLRLKGFPSFPLVERQANEVDWWDMVCNVKKLINEKKEDGKVFWQNLAGYKRQEALRPYLSSEEDRKKGKKFARYQLGDLLLHLEKKHGEDWGKVYDEAWERIDKKVEGLSKHIKLEEERRSEDAQSKAALTDWLRAKASFVIEGLKEADKDEFCRCELKLQKWYGDLRGKPFAIEAENSILDISGFSKQYNCAFIWQKDGVKKLNLYLIINYFKGGKLRFKKIKPEAFEANRFYTVINKKSGEIVPMEVNFNFDDPNLIILPLAFGKRQGREFIWNDLLSLETGSLKLANGRVIEKTLYNRRTRQDEPALFVALTFERREVLDSSNIKPMNLIGVDRGENIPAVIALTDPEGCPLSRFKDSLGNPTHILRIGESYKEKQRTIQAKKEVEQRRAGGYSRKYASKAKNLADDMVRNTARDLLYYAVTQDAMLIFENLSRGFGRQGKRTFMAERQYTRMEDWLTAKLAYEGLPSKTYLSKTLAQYTSKTCSNCGFTITSADYDRVLEKLKKTATGWMTTINGKELKVEGQITYYNRYKRQNVVKDLSVELDRLSEESVNNDISSWTKGRSGEALSLLKKRFSHRPVQEKFVCLNCGFETHADEQAALNIARSWLFLRSQEYKKYQTNKTTGNTDKRAFVETWQSFYRKKLKEVWKPAV

SEQ ID NO: 32534 - protein, 978 aa, synthetic construct
  REGION 1..978: note = engineered CasX variant
QEIKRANKIRRRLVKDSNTKKAGKTGPMKTLLVPVMTPDLRERLENLRKKPENIPQPISNTSRANLNKLLTDYTEMKKAILHVYWEEFQKDPVGLMSRVAQPASKKIDQNKLKPEMDEKGNLTTAGFACSQCGQPLFVYKLEQVSEKGKAYTNYFGRCNVAEHEKLILLAQLKPEKDSDEAVTYSLGKFGQRALDFYSIHVTKESTHPVKPLAQIAGNRYASTPVGKALSDACMGTIASFLSKYQDIIIEHQKVVKGNQKRLESLRELAGKENLEYPSVTLPPQPHTKEGVDAYNEVIARVRMWVNLNLWQKLKLSRDDAKPLLRLKGFPSFPLVERQANEVDWWDMVCNVKKLINEKKEDGKVFWQNLAGYKRQEALRPYLSSEEDRKKGKKFARYQLGDLLLHLEKKHGEDWGKVYDEAWERIDKKVEGLSKHIKLEEERRSEDAQSKAALTDWLRAKASFVIEGLKEADKDEFCRCELKLQKWYGDLRGKPFAIEAENSILDISGFSKQYNCAFIWQKDGVKKLNLYLIINYFKGGKLRFKKIKPEAFEANRFYTVINKKSGEIVPMEVNFNFDDPNLIILPLAFGKRQGREFIWNDLLSLETGSLKLANGRVIEKTLYNRRTRQDEPALFVALTFERREVLDSSNIKPMNLIGVDRGENIPAVIALTDPEGCPLSRFKDSLGNPTHILRIGESYKEKQRTIQAKKEVEQRRAGGYSRKYASKAKNLADDMVRNTARDLLYYAVTQDAMLIFENLSRGFGRQGKRTFMAERQYTRMEDWLTAKLAYEGLPSKTYLSKTLAQYTSKTCSNCGFTITSADYDRVLEKLKKTATGWMTTINGKELKVEGQITYYNRYKRQNVVKDLSVELDRLSEESVNNDISSWTKGRSGEALSLLKKRFSHRPVQEKFVCLNCGFETHADEQAALNIARSWLFLRSQEYKKYQTNKTTGNTDKRAFVETWQSFYRKKLKEVWKPAV

SEQ ID NO: 32535 - protein, 978 aa, synthetic construct
  REGION 1..978: note = engineered CasX variant
QEIKRANKIRRRLVKDSNTKKAGKTGPMKTLLVPVMTPDLRERLENLRKKPENIPQPISNTSRANLNKLLTDYTEMKKAILHVYWEEFQKDPVGLMSRVAQPASKKIDQNKLKPEMDEKGNLTTAGFACSQCGQPLFVYKLEQVSEKGKAYTNYFGRCNVAEHEKLILLAQLKPEKDSDEAVTYSLGKFGQRALDFYSIHVTKESTHPVKPLAQIAGNRYASAPVGKALSDACMGTIASFLSKYQDIIIEHQKVVKGNQKRLESLRELAGKENLEYPSVTLPPQPHTKEGVDAYNEVIARVRMWVNLNLWQKLKLSRDDAKPLLRLKGFPSFPLVERQANEVDWWDMVCNVKKLINEKKEDGKVFWQNLAGYKRQEALRPYLSSEEDRKKGKKFARYQLGDLLLHLEKKHGEDWGKVYDEAWERIDKKVEGLSKHIKLEEERRSEDAQSKAALTDWLRAKASFVIEGLKEADKDEFCRCELKLQKWYGDLRGKPFAIEAENSILDISGFSKQYNCAFIWQKDGVKKLNLYLIINYFKGGKLRFKKIKPEAFEANRFYTVINKKSGEIVPMEVNFNFDDPNLIILPLAFGKRQGREFIWNDLLSLETGSLKLANGRVIEKTLYNRRTRQDEPALFVALTFERREVLDSSNIKPMNLIGVDRGENIPAVIALTDPEGCPLSRFKDSLGNPTHILRIGESYKEKQRTIQAKKEVEQRRAGGYSRKYASKAKNLADDMVRNTARDLLYYAVTQDAMLIFENLSRGFGRQGKRTFMAERQYTRMEDWLTAKLAYEGLPSKTYLSKTLAQYTSKTCSNCGFTITSADYDRVLEKLKKTATGWMTTINGKELKVEGQITYYNRYKRQNVVKDLSVELDRLSEESVNNDISSWTKGRSGEALSLLKKRFSHRPVQEKFVCLNCGFETHADEQAALNIARSWLFLRSQEYKKYQTNKTTGNTDKRAFVETWQSFYRKKLKEVWKPAV

SEQ ID NO: 32536 - protein, 978 aa, synthetic construct
  REGION 1..978: note = engineered CasX variant
QEIKRANKIRRRLVKDSNTKKAGKTGPMKTLLVPVMTPDLRERLENLRKKPENIPQPISNTSRANLNKLLTDYTEMKKAILHVYWEEFQKDPVGLMSRVAQPASKKIDQNKLKPEMDEKGNLTTAGFACSQCGQPLFVYKLEQVSEKGKAYTNYFGRCNVAEHEKLILLAQLKPEKDSDEAVTYSLGKFGQRALDFYSIHVTKESTHPVKPLAQIAGNRYASVPVGKALSDACMGTIASFLSKYQDIIIEHQKVVKGNQKRLESLRELAGKENLEYPSVTLPPQPHTKEGVDAYNEVIARVRMWVNLNLWQKLKLSRDDAKPLLRLKGFPSFPLVERQANEVDWWDMVCNVKKLINEKKEDGKVFWQNLAGYKRQEALRPYLSSEEDRKKGKKFARYQLGDLLLHLEKKHGEDWGKVYDEAWERIDKKVEGLSKHIKLEEERRSEDAQSKAALTDWLRAKASFVIEGLKEADKDEFCRCELKLQKWYGDLRGKPFAIEAENSILDISGFSKQYNCAFIWQKDGVKKLNLYLIINYFKGGKLRFKKIKPEAFEANRFYTVINKKSGEIVPMEVNFNFDDPNLIILPLAFGKRQGREFIWNDLLSLETGSLKLANGRVIEKTLYNRRTRQDEPALFVALTFERREVLDSSNIKPMNLIGVDRGENIPAVIALTDPEGCPLSRFKDSLGNPTHILRIGESYKEKQRTIQAKKEVEQRRAGGYSRKYASKAKNLADDMVRNTARDLLYYAVTQDAMLIFENLSRGFGRQGKRTFMAERQYTRMEDWLTAKLAYEGLPSKTYLSKTLAQYTSKTCSNCGFTITSADYDRVLEKLKKTATGWMTTINGKELKVEGQITYYNRYKRQNVVKDLSVELDRLSEESVNNDISSWTKGRSGEALSLLKKRFSHRPVQEKFVCLNCGFETHADEQAALNIARSWLFLRSQEYKKYQTNKTTGNTDKRAFVETWQSFYRKKLKEVWKPAV

SEQ ID NO: 32537 - protein, 978 aa, synthetic construct
  REGION 1..978: note = engineered CasX variant
QEIKRANKIRRRLVKDSNTKKAGKTGPMKTLLVPVMTPDLRERLENLRKKPENIPQPISNTSRANLNKLLTDYTEMKKAILHVYWEEFQKDPVGLMSRVAQPASKKIDQNKLKPEMDEKGNLTTAGFACSQCGQPLFVYKLEQVSEKGKAYTNYFGRCNVAEHEKLIKLAQLKPEKDSDEAVTYSLGKFGQRALDFYSIHVTKESTHPVKPLAQIAGNRYASGPVGKALSDACMGTIASFLSKYQDIIIEHQKVVKGNQKRLESLRELAGKENLEYPSVTLPPQPHTKEGVDAYNEVIARVRMWVNLNLWQKLKLSRDDAKPLLRLKGFPSFPLVERQANEVDWWDMVCNVKKLINEKKEDGKVFWQNLAGYKRQEALRPYLSSEEDRKKGKKFARYQLGDLLLHLEKKHGEDWGKVYDEAWERIDKKVEGLSKHIKLEEERRSEDAQSKAALTDWLRAKASFVIEGLKEADKDEFCRCELKLQKWYGDLRGKPFAIEAENSILDISGFSKQYNCAFIWQKDGVKKLNLYLIINYFKGGKLRFKKIKPEAFEANRFYTVINKKSGEIVPMEVNFNFDDPNLIILPLAFGKRQGREFIWNDLLSLETGSLKLANGRVIEKTLYNRRTRQDEPALFVALTFERREVLDSSNIKPMNLIGVDRGENIPAVIALTDPEGCPLSRFKDSLGNPTHILRIGESYKEKQRTIQAKKEVEQRRAGGYSRKYASKAKNLADDMVRNTARDLLYYAVTQDAMLIFENLSRGFGRQGKRTFMAERQYTRMEDWLTAKLAYEGLPSKTYLSKTLAQYTSKTCSNCGFTITSADYDRVLEKLKKTATGWMTTINGKELKVEGQITYYNRYKRQNVVKDLSVELDRLSEESVNNDISSWTKGRSGEALSLLKKRFSHRPVQEKFVCLNCGFETHADEQAALNIARSWLFLRSQEYKKYQTNKTTGNTDKRAFVETWQSFYRKKLKEVWKPAV

SEQ ID NO: 32538 - protein, 977 aa, synthetic construct
  REGION 1..977: note = engineered CasX variant
QEIKRANKIRRRLVKDSNTKKAGKTGPMKTLLVPVMTPDLRERLENLRKKPENIPQPISNTSRANLNKLLTDYTEMKKAILHVYWEEFQKDPVGLMSRVAQPASKKIDQNKLKPEMDEKGNLTTAGFACSQCGQPLFVYKLEQVSEKGKAYTNYFGRCNVAEHEKLILLAQLKPEKDSDEAVTYSLGKFGQRALDFYSIHVTKESTHPVKPLAQIAGNRYASPVGKALSDACMGTIASFLSKYQDIIIEHQKVVKGNQKRLESLRELAGKENLEYPSVTLPPQPHTKEGVDAYNEVIARVRMWVNLNLWQKLKLSRDDAKPLLRLKGFPSFPLVERQANEVDWWDMVCNVKKLINEKKEDGKVFWQNLAGYKRQEALRPYLSSEEDRKKGKKFARYQLGDLLLHLEKKHGEDWGKVYDEAWERIDKKVEGLSKHIKLEEERRSEDAQSKAALTDWLRAKASFVIEGLKEADKDEFCRCELKLQKWYGDLRGKPFAIEAENSILDISGFSKQYNCAFIWQKDGVKKLNLYLIINYFKGGKLRFKKIKPEAFEANRFYTVINKKSGEIVPMEVNFNFDDPNLIILPLAFGKRQGREFIWNDLLSLETGSLKLANGRVIEKTLYNRRTRQDEPALFVALTFERREVLDSSNIKPMNLIGVDRGENIPAVIALTDPEGCPLSRFKDSLGNPTHILRIGESYKEKQRTIQAKKEVEQRRAGGYSRKYASKAKNLADDMVRNTARDLLYYAVTQDAMLIFENLSRGFGRQGKRTFMAERQYTRMEDWLTAKLAYEGLPSKTYLSKTLAQYTSKTCSNCGFTITSADYDRVLEKLKKTATGWMTTINGKELKVEGQITYYNRYKRQNVVKDLSVELDRLSEESVNNDISSWTKGRSGEALSLLKKRFSHRPVQEKFVCLNCGFETHADEQAALNIARSWLFLRSQEYKKYQTNKTTGNTDKRAFVETWQSFYRKKLKEVWKPAV

SEQ ID NO: 32539 - protein, 978 aa, synthetic construct
  REGION 1..978: note = engineered CasX variant
QEIKRANKIRRRLVKDSNTKKAGKTGPMKTLLVRVMTPDLRERLENLRKKPPNIPQPISNTSRANLNKLLTDYTEMKKAILHVYWEEFQKDPVGLMSRVAQPASKKIDQNKLKPEMDEKGNLTTAGFACSQCGQPLFVYKLEQVSEKGKAYTNYFGRCNVAEHEKLILLAQLKPEKDSDEAVTYSLGKFGQRALDFYSIHVTKESTHPVKPLAQIAGNRYASYPVGKALSDACMGTIASFLSKYQDIIIEHQKVVKGNQKRLESLRELAGKENLEYPSVTLPPQPHTKEGVDAYNEVIARVRMWVNLNLWQKLKLSRDDAKPLLRLKGFPSFPLVERQANEVDWWDMVCNVKKLINEKKEDGKVFWQNLAGYKRQEALRPYLSSEEDRKKGKKFARYQLGDLLLHLEKKHGEDWGKVYDEAWERIDKKVEGLSKHIKLEEERRSEDAQSKAALTDWLRAKASFVIEGLKEADKDEFCRCELKLQKWYGDLRGKPFAIEAENSILDISGFSKQYNCAFIWQKDGVKKLNLYLIINYFKGGKLRFKKIKPEAFEANRFYTVINKKSGEIVPMEVNFNFDDPNLIILPLAFGKRQGREFIWNDLLSLETGSLKLANGRVIEKTLYNRRTRQDEPALFVALTFERREVLDSSNIKPMNLIGVDRGENIPAVIALTDPEGCPLSRFKDSLGNPTHILRIGESYKEKQRTIQAKKEVEQRRAGGYSRKYASKAKNLADDMVRNTARDLLYYAVTQDAMLIFENLSRGFGRQGKRTFMAERQYTRMEDWLTAKLAYEGLPSKTYLSKTLAQYTSKTCSNCGFTITSADYDRVLEKLKKTATGWMTTINGKELKVEGQITYYNRYKRQNVVKDLSVELDRLSEESVNNDISSWTKGRSGEALSLLKKRFSHRPVQEKFVCLNCGFETHADEQAALNIARSWLFLRSQEYKKYQTNKTTGNTDKRAFVETWQSFYRKKLKEVWKPAV

SEQ ID NO: 32540 - protein, 978 aa, synthetic construct
  REGION 1..978: note = engineered CasX variant
QEIKRANKIRRRLVKDSNTKKAGKTGPMKTLLVRVMTPDLRERLENLRKKPPNIPQPISNTSRANLNKLLTDYTEMKKAILHVYWEEFQKDPVGLMSRVAQPASKKIDQNKLKPEMDEKGNLTTAGFACSQCGQPLFVYKLEQVSEKGKAYTNYFGRCNVAEHEKLILLAQLKPEKDSDEAVTYSLGKFGQRALDFYSIHVTKESTHPVKPLAQIAGNRYASHPVGKALSDACMGTIASFLSKYQDIIIEHQKVVKGNQKRLESLRELAGKENLEYPSVTLPPQPHTKEGVDAYNEVIARVRMWVNLNLWQKLKLSRDDAKPLLRLKGFPSFPLVERQANEVDWWDMVCNVKKLINEKKEDGKVFWQNLAGYKRQEALRPYLSSEEDRKKGKKFARYQLGDLLLHLEKKHGEDWGKVYDEAWERIDKKVEGLSKHIKLEEERRSEDAQSKAALTDWLRAKASFVIEGLKEADKDEFCRCELKLQKWYGDLRGKPFAIEAENSILDISGFSKQYNCAFIWQKDGVKKLNLYLIINYFKGGKLRFKKIKPEAFEANRFYTVINKKSGEIVPMEVNFNFDDPNLIILPLAFGKRQGREFIWNDLLSLETGSLKLANGRVIEKTLYNRRTRQDEPALFVALTFERREVLDSSNIKPMNLIGVDRGENIPAVIALTDPEGCPLSRFKDSLGNPTHILRIGESYKEKQRTIQAKKEVEQRRAGGYSRKYASKAKNLADDMVRNTARDLLYYAVTQDAMLIFENLSRGFGRQGKRTFMAERQYTRMEDWLTAKLAYEGLPSKTYLSKTLAQYTSKTCSNCGFTITSADYDRVLEKLKKTATGWMTTINGKELKVEGQITYYNRYKRQNVVKDLSVELDRLSEESVNNDISSWTKGRSGEALSLLKKRFSHRPVQEKFVCLNCGFETHADEQAALNIARSWLFLRSQEYKKYQTNKTTGNTDKRAFVETWQSFYRKKLKEVWKPAV

SEQ ID NO: 32541 - protein, 978 aa, synthetic construct
  REGION 1..978: note = engineered CasX variant
QEIKRANKIRRRLVKDSNTKKAGKTGPMKTLLVRVMTPDLRERLENLRKKPPNIPQPISNTSRANLNKLLTDYTEMKKAILHVYWEEFQKDPVGLMSRVAQPASKKIDQNKLKPEMDEKGNLTTAGFACSQCGQPLFVYKLEQVSEKGKAYTNYFGRCNVAEHEKLILLAQLKPEKDSDEAVTYSLGKFGQRALDFYSIHVTKESTHPVKPLAQIAGNRYASSPVGKALSDACMGTIASFLSKYQDIIIEHQKVVKGNQKRLESLRELAGKENLEYPSVTLPPQPHTKEGVDAYNEVIARVRMWVNLNLWQKLKLSRDDAKPLLRLKGFPSFPLVERQANEVDWWDMVCNVKKLINEKKEDGKVFWQNLAGYKRQEALRPYLSSEEDRKKGKKFARYQLGDLLLHLEKKHGEDWGKVYDEAWERIDKKVEGLSKHIKLEEERRSEDAQSKAALTDWLRAKASFVIEGLKEADKDEFCRCELKLQKWYGDLRGKPFAIEAENSILDISGFSKQYNCAFIWQKDGVKKLNLYLIINYFKGGKLRFKKIKPEAFEANRFYTVINKKSGEIVPMEVNFNFDDPNLIILPLAFGKRQGREFIWNDLLSLETGSLKLANGRVIEKTLYNRRTRQDEPALFVALTFERREVLDSSNIKPMNLIGVDRGENIPAVIALTDPEGCPLSRFKDSLGNPTHILRIGESYKEKQRTIQAKKEVEQRRAGGYSRKYASKAKNLADDMVRNTARDLLYYAVTQDAMLIFENLSRGFGRQGKRTFMAERQYTRMEDWLTAKLAYEGLPSKTYLSKTLAQYTSKTCSNCGFTITSADYDRVLEKLKKTATGWMTTINGKELKVEGQITYYNRYKRQNVVKDLSVELDRLSEESVNNDISSWTKGRSGEALSLLKKRFSHRPVQEKFVCLNCGFETHADEQAALNIARSWLFLRSQEYKKYQTNKTTGNTDKRAFVETWQSFYRKKLKEVWKPAV

SEQ ID NO: 32542 - protein, 978 aa, synthetic construct
  REGION 1..978: note = engineered CasX variant
QEIKRANKIRRRLVKDSNTKKAGKTGPMKTLLVRVMTPDLRERLENLRKKPPNIPQPISNTSRANLNKLLTDYTEMKKAILHVYWEEFQKDPVGLMSRVAQPASKKIDQNKLKPEMDEKGNLTTAGFACSQCGQPLFVYKLEQVSEKGKAYTNYFGRCNVAEHEKLILLAQLKPEKDSDEAVTYSLGKFGQRALDFYSIHVTKESTHPVKPLAQIAGNRYASTPVGKALSDACMGTIASFLSKYQDIIIEHQKVVKGNQKRLESLRELAGKENLEYPSVTLPPQPHTKEGVDAYNEVIARVRMWVNLNLWQKLKLSRDDAKPLLRLKGFPSFPLVERQANEVDWWDMVCNVKKLINEKKEDGKVFWQNLAGYKRQEALRPYLSSEEDRKKGKKFARYQLGDLLLHLEKKHGEDWGKVYDEAWERIDKKVEGLSKHIKLEEERRSEDAQSKAALTDWLRAKASFVIEGLKEADKDEFCRCELKLQKWYGDLRGKPFAIEAENSILDISGFSKQYNCAFIWQKDGVKKLNLYLIINYFKGGKLRFKKIKPEAFEANRFYTVINKKSGEIVPMEVNFNFDDPNLIILPLAFGKRQGREFIWNDLLSLETGSLKLANGRVIEKTLYNRRTRQDEPALFVALTFERREVLDSSNIKPMNLIGVDRGENIPAVIALTDPEGCPLSRFKDSLGNPTHILRIGESYKEKQRTIQAKKEVEQRRAGGYSRKYASKAKNLADDMVRNTARDLLYYAVTQDAMLIFENLSRGFGRQGKRTFMAERQYTRMEDWLTAKLAYEGLPSKTYLSKTLAQYTSKTCSNCGFTITSADYDRVLEKLKKTATGWMTTINGKELKVEGQITYYNRYKRQNVVKDLSVELDRLSEESVNNDISSWTKGRSGEALSLLKKRFSHRPVQEKFVCLNCGFETHADEQAALNIARSWLFLRSQEYKKYQTNKTTGNTDKRAFVETWQSFYRKKLKEVWKPAV

SEQ ID NO: 32543 - protein, 978 aa, synthetic construct
  REGION 1..978: note = engineered CasX variant
QEIKRANKIRRRLVKDSNTKKAGKTGPMKTLLVRVMTPDLRERLENLRKKPPNIPQPISNTSRANLNKLLTDYTEMKKAILHVYWEEFQKDPVGLMSRVAQPASKKIDQNKLKPEMDEKGNLTTAGFACSQCGQPLFVYKLEQVSEKGKAYTNYFGRCNVAEHEKLILLAQLKPEKDSDEAVTYSLGKFGQRALDFYSIHVTKESTHPVKPLAQIAGNRYASAPVGKALSDACMGTIASFLSKYQDIIIEHQKVVKGNQKRLESLRELAGKENLEYPSVTLPPQPHTKEGVDAYNEVIARVRMWVNLNLWQKLKLSRDDAKPLLRLKGFPSFPLVERQANEVDWWDMVCNVKKLINEKKEDGKVFWQNLAGYKRQEALRPYLSSEEDRKKGKKFARYQLGDLLLHLEKKHGEDWGKVYDEAWERIDKKVEGLSKHIKLEEERRSEDAQSKAALTDWLRAKASFVIEGLKEADKDEFCRCELKLQKWYGDLRGKPFAIEAENSILDISGFSKQYNCAFIWQKDGVKKLNLYLIINYFKGGKLRFKKIKPEAFEANRFYTVINKKSGEIVPMEVNFNFDDPNLIILPLAFGKRQGREFIWNDLLSLETGSLKLANGRVIEKTLYNRRTRQDEPALFVALTFERREVLDSSNIKPMNLIGVDRGENIPAVIALTDPEGCPLSRFKDSLGNPTHILRIGESYKEKQRTIQAKKEVEQRRAGGYSRKYASKAKNLADDMVRNTARDLLYYAVTQDAMLIFENLSRGFGRQGKRTFMAERQYTRMEDWLTAKLAYEGLPSKTYLSKTLAQYTSKTCSNCGFTITSADYDRVLEKLKKTATGWMTTINGKELKVEGQITYYNRYKRQNVVKDLSVELDRLSEESVNNDISSWTKGRSGEALSLLKKRFSHRPVQEKFVCLNCGFETHADEQAALNIARSWLFLRSQEYKKYQTNKTTGNTDKRAFVETWQSFYRKKLKEVWKPAV

SEQ ID NO: 32544 - protein, 978 aa, synthetic construct
  REGION 1..978: note = engineered CasX variant
QEIKRANKIRRRLVKDSNTKKAGKTGPMKTLLVRVMTPDLRERLENLRKKPPNIPQPISNTSRANLNKLLTDYTEMKKAILHVYWEEFQKDPVGLMSRVAQPASKKIDQNKLKPEMDEKGNLTTAGFACSQCGQPLFVYKLEQVSEKGKAYTNYFGRCNVAEHEKLILLAQLKPEKDSDEAVTYSLGKFGQRALDFYSIHVTKESTHPVKPLAQIAGNRYASVPVGKALSDACMGTIASFLSKYQDIIIEHQKVVKGNQKRLESLRELAGKENLEYPSVTLPPQPHTKEGVDAYNEVIARVRMWVNLNLWQKLKLSRDDAKPLLRLKGFPSFPLVERQANEVDWWDMVCNVKKLINEKKEDGKVFWQNLAGYKRQEALRPYLSSEEDRKKGKKFARYQLGDLLLHLEKKHGEDWGKVYDEAWERIDKKVEGLSKHIKLEEERRSEDAQSKAALTDWLRAKASFVIEGLKEADKDEFCRCELKLQKWYGDLRGKPFAIEAENSILDISGFSKQYNCAFIWQKDGVKKLNLYLIINYFKGGKLRFKKIKPEAFEANRFYTVINKKSGEIVPMEVNFNFDDPNLIILPLAFGKRQGREFIWNDLLSLETGSLKLANGRVIEKTLYNRRTRQDEPALFVALTFERREVLDSSNIKPMNLIGVDRGENIPAVIALTDPEGCPLSRFKDSLGNPTHILRIGESYKEKQRTIQAKKEVEQRRAGGYSRKYASKAKNLADDMVRNTARDLLYYAVTQDAMLIFENLSRGFGRQGKRTFMAERQYTRMEDWLTAKLAYEGLPSKTYLSKTLAQYTSKTCSNCGFTITSADYDRVLEKLKKTATGWMTTINGKELKVEGQITYYNRYKRQNVVKDLSVELDRLSEESVNNDISSWTKGRSGEALSLLKKRFSHRPVQEKFVCLNCGFETHADEQAALNIARSWLFLRSQEYKKYQTNKTTGNTDKRAFVETWQSFYRKKLKEVWKPAV

SEQ ID NO: 32545 - protein, 978 aa, synthetic construct
  REGION 1..978: note = engineered CasX variant
QEIKRANKIRRRLVKDSNTKKAGKTGPMKTLLVRVMTPDLRERLENLRKKPPNIPQPISNTSRANLNKLLTDYTEMKKAILHVYWEEFQKDPVGLMSRVAQPASKKIDQNKLKPEMDEKGNLTTAGFACSQCGQPLFVYKLEQVSEKGKAYTNYFGRCNVAEHEKLIKLAQLKPEKDSDEAVTYSLGKFGQRALDFYSIHVTKESTHPVKPLAQIAGNRYASGPVGKALSDACMGTIASFLSKYQDIIIEHQKVVKGNQKRLESLRELAGKENLEYPSVTLPPQPHTKEGVDAYNEVIARVRMWVNLNLWQKLKLSRDDAKPLLRLKGFPSFPLVERQANEVDWWDMVCNVKKLINEKKEDGKVFWQNLAGYKRQEALRPYLSSEEDRKKGKKFARYQLGDLLLHLEKKHGEDWGKVYDEAWERIDKKVEGLSKHIKLEEERRSEDAQSKAALTDWLRAKASFVIEGLKEADKDEFCRCELKLQKWYGDLRGKPFAIEAENSILDISGFSKQYNCAFIWQKDGVKKLNLYLIINYFKGGKLRFKKIKPEAFEANRFYTVINKKSGEIVPMEVNFNFDDPNLIILPLAFGKRQGREFIWNDLLSLETGSLKLANGRVIEKTLYNRRTRQDEPALFVALTFERREVLDSSNIKPMNLIGVDRGENIPAVIALTDPEGCPLSRFKDSLGNPTHILRIGESYKEKQRTIQAKKEVEQRRAGGYSRKYASKAKNLADDMVRNTARDLLYYAVTQDAMLIFENLSRGFGRQGKRTFMAERQYTRMEDWLTAKLAYEGLPSKTYLSKTLAQYTSKTCSNCGFTITSADYDRVLEKLKKTATGWMTTINGKELKVEGQITYYNRYKRQNVVKDLSVELDRLSEESVNNDISSWTKGRSGEALSLLKKRFSHRPVQEKFVCLNCGFETHADEQAALNIARSWLFLRSQEYKKYQTNKTTGNTDKRAFVETWQSFYRKKLKEVWKPAV

SEQ ID NO: 32546 - protein, 977 aa, synthetic construct
  REGION 1..977: note = engineered CasX variant
QEIKRANKIRRRLVKDSNTKKAGKTGPMKTLLVRVMTPDLRERLENLRKKPPNIPQPISNTSRANLNKLLTDYTEMKKAILHVYWEEFQKDPVGLMSRVAQPASKKIDQNKLKPEMDEKGNLTTAGFACSQCGQPLFVYKLEQVSEKGKAYTNYFGRCNVAEHEKLILLAQLKPEKDSDEAVTYSLGKFGQRALDFYSIHVTKESTHPVKPLAQIAGNRYASPVGKALSDACMGTIASFLSKYQDIIIEHQKVVKGNQKRLESLRELAGKENLEYPSVTLPPQPHTKEGVDAYNEVIARVRMWVNLNLWQKLKLSRDDAKPLLRLKGFPSFPLVERQANEVDWWDMVCNVKKLINEKKEDGKVFWQNLAGYKRQEALRPYLSSEEDRKKGKKFARYQLGDLLLHLEKKHGEDWGKVYDEAWERIDKKVEGLSKHIKLEEERRSEDAQSKAALTDWLRAKASFVIEGLKEADKDEFCRCELKLQKWYGDLRGKPFAIEAENSILDISGFSKQYNCAFIWQKDGVKKLNLYLIINYFKGGKLRFKKIKPEAFEANRFYTVINKKSGEIVPMEVNFNFDDPNLIILPLAFGKRQGREFIWNDLLSLETGSLKLANGRVIEKTLYNRRTRQDEPALFVALTFERREVLDSSNIKPMNLIGVDRGENIPAVIALTDPEGCPLSRFKDSLGNPTHILRIGESYKEKQRTIQAKKEVEQRRAGGYSRKYASKAKNLADDMVRNTARDLLYYAVTQDAMLIFENLSRGFGRQGKRTFMAERQYTRMEDWLTAKLAYEGLPSKTYLSKTLAQYTSKTCSNCGFTITSADYDRVLEKLKKTATGWMTTINGKELKVEGQITYYNRYKRQNVVKDLSVELDRLSEESVNNDISSWTKGRSGEALSLLKKRFSHRPVQEKFVCLNCGFETHADEQAALNIARSWLFLRSQEYKKYQTNKTTGNTDKRAFVETWQSFYRKKLKEVWKPAV

SEQ ID NO: 32547 - protein, 978 aa, synthetic construct
  REGION 1..978: note = engineered CasX variant
QEIKRANKIRRRLVKDSNTKKAGKTGPMKTLLVRVMTPDLRERLENLRKKPENIPQPISNTSQANLNKLLTDYTEMKKAILHVYWEEFQKDPVGLMSRVAQPASKKIDQNKLKPEMDEKGNLTTAGFACSQCGQPLFVYKLEQVSEKGKAYTNYFGRCNVAEHEKLILLAQLKPEKDSDEAVTYSLGKFGQRALDFYSIHVTKESTHPVKPLAQIAGNRYASYPVGKALSDACMGTIASFLSKYQDIIIEHQKVVKGNQKRLESLRELAGKENLEYPSVTLPPQPHTKEGVDAYNEVIARVRMWVNLNLWQKLKLSRDDAKPLLRLKGFPSFPLVERQANEVDWWDMVCNVKKLINEKKEDGKVFWQNLAGYKRQEALRPYLSSEEDRKKGKKFARYQLGDLLLHLEKKHGEDWGKVYDEAWERIDKKVEGLSKHIKLEEERRSEDAQSKAALTDWLRAKASFVIEGLKEADKDEFCRCELKLQKWYGDLRGKPFAIEAENSILDISGFSKQYNCAFIWQKDGVKKLNLYLIINYFKGGKLRFKKIKPEAFEANRFYTVINKKSGEIVPMEVNFNFDDPNLIILPLAFGKRQGREFIWNDLLSLETGSLKLANGRVIEKTLYNRRTRQDEPALFVALTFERREVLDSSNIKPMNLIGVDRGENIPAVIALTDPEGCPLSRFKDSLGNPTHILRIGESYKEKQRTIQAKKEVEQRRAGGYSRKYASKAKNLADDMVRNTARDLLYYAVTQDAMLIFENLSRGFGRQGKRTFMAERQYTRMEDWLTAKLAYEGLPSKTYLSKTLAQYTSKTCSNCGFTITSADYDRVLEKLKKTATGWMTTINGKELKVEGQITYYNRYKRQNVVKDLSVELDRLSEESVNNDISSWTKGRSGEALSLLKKRFSHRPVQEKFVCLNCGFETHADEQAALNIARSWLFLRSQEYKKYQTNKTTGNTDKRAFVETWQSFYRKKLKEVWKPAV

SEQ ID NO: 32548 - protein, 978 aa, synthetic construct
  REGION 1..978: note = engineered CasX variant
QEIKRANKIRRRLVKDSNTKKAGKTGPMKTLLVRVMTPDLRERLENLRKKPENIPQPISNTSQANLNKLLTDYTEMKKAILHVYWEEFQKDPVGLMSRVAQPASKKIDQNKLKPEMDEKGNLTTAGFACSQCGQPLFVYKLEQVSEKGKAYTNYFGRCNVAEHEKLILLAQLKPEKDSDEAVTYSLGKFGQRALDFYSIHVTKESTHPVKPLAQIAGNRYASHPVGKALSDACMGTIASFLSKYQDIIIEHQKVVKGNQKRLESLRELAGKENLEYPSVTLPPQPHTKEGVDAYNEVIARVRMWVNLNLWQKLKLSRDDAKPLLRLKGFPSFPLVERQANEVDWWDMVCNVKKLINEKKEDGKVFWQNLAGYKRQEALRPYLSSEEDRKKGKKFARYQLGDLLLHLEKKHGEDWGKVYDEAWERIDKKVEGLSKHIKLEEERRSEDAQSKAALTDWLRAKASFVIEGLKEADKDEFCRCELKLQKWYGDLRGKPFAIEAENSILDISGFSKQYNCAFIWQKDGVKKLNLYLIINYFKGGKLRFKKIKPEAFEANRFYTVINKKSGEIVPMEVNFNFDDPNLIILPLAFGKRQGREFIWNDLLSLETGSLKLANGRVIEKTLYNRRTRQDEPALFVALTFERREVLDSSNIKPMNLIGVDRGENIPAVIALTDPEGCPLSRFKDSLGNPTHILRIGESYKEKQRTIQAKKEVEQRRAGGYSRKYASKAKNLADDMVRNTARDLLYYAVTQDAMLIFENLSRGFGRQGKRTFMAERQYTRMEDWLTAKLAYEGLPSKTYLSKTLAQYTSKTCSNCGFTITSADYDRVLEKLKKTATGWMTTINGKELKVEGQITYYNRYKRQNVVKDLSVELDRLSEESVNNDISSWTKGRSGEALSLLKKRFSHRPVQEKFVCLNCGFETHADEQAALNIARSWLFLRSQEYKKYQTNKTTGNTDKRAFVETWQSFYRKKLKEVWKPAV

SEQ ID NO: 32549 - protein, 978 aa, synthetic construct
  REGION 1..978: note = engineered CasX variant
QEIKRANKIRRRLVKDSNTKKAGKTGPMKTLLVRVMTPDLRERLENLRKKPENIPQPISNTSQANLNKLLTDYTEMKKAILHVYWEEFQKDPVGLMSRVAQPASKKIDQNKLKPEMDEKGNLTTAGFACSQCGQPLFVYKLEQVSEKGKAYTNYFGRCNVAEHEKLILLAQLKPEKDSDEAVTYSLGKFGQRALDFYSIHVTKESTHPVKPLAQIAGNRYASSPVGKALSDACMGTIASFLSKYQDIIIEHQKVVKGNQKRLESLRELAGKENLEYPSVTLPPQPHTKEGVDAYNEVIARVRMWVNLNLWQKLKLSRDDAKPLLRLKGFPSFPLVERQANEVDWWDMVCNVKKLINEKKEDGKVFWQNLAGYKRQEALRPYLSSEEDRKKGKKFARYQLGDLLLHLEKKHGEDWGKVYDEAWERIDKKVEGLSKHIKLEEERRSEDAQSKAALTDWLRAKASFVIEGLKEADKDEFCRCELKLQKWYGDLRGKPFAIEAENSILDISGFSKQYNCAFIWQKDGVKKLNLYLIINYFKGGKLRFKKIKPEAFEANRFYTVINKKSGEIVPMEVNFNFDDPNLIILPLAFGKRQGREFIWNDLLSLETGSLKLANGRVIEKTLYNRRTRQDEPALFVALTFERREVLDSSNIKPMNLIGVDRGENIPAVIALTDPEGCPLSRFKDSLGNPTHILRIGESYKEKQRTIQAKKEVEQRRAGGYSRKYASKAKNLADDMVRNTARDLLYYAVTQDAMLIFENLSRGFGRQGKRTFMAERQYTRMEDWLTAKLAYEGLPSKTYLSKTLAQYTSKTCSNCGFTITSADYDRVLEKLKKTATGWMTTINGKELKVEGQITYYNRYKRQNVVKDLSVELDRLSEESVNNDISSWTKGRSGEALSLLKKRFSHRPVQEKFVCLNCGFETHADEQAALNIARSWLFLRSQEYKKYQTNKTTGNTDKRAFVETWQSFYRKKLKEVWKPAV

SEQ ID NO: 32550 - protein, 978 aa, synthetic construct
  REGION 1..978: note = engineered CasX variant
QEIKRANKIRRRLVKDSNTKKAGKTGPMKTLLVRVMTPDLRERLENLRKKPENIPQPISNTSQANLNKLLTDYTEMKKAILHVYWEEFQKDPVGLMSRVAQPASKKIDQNKLKPEMDEKGNLTTAGFACSQCGQPLFVYKLEQVSEKGKAYTNYFGRCNVAEHEKLILLAQLKPEKDSDEAVTYSLGKFGQRALDFYSIHVTKESTHPVKPLAQIAGNRYASTPVGKALSDACMGTIASFLSKYQDIIIEHQKVVKGNQKRLESLRELAGKENLEYPSVTLPPQPHTKEGVDAYNEVIARVRMWVNLNLWQKLKLSRDDAKPLLRLKGFPSFPLVERQANEVDWWDMVCNVKKLINEKKEDGKVFWQNLAGYKRQEALRPYLSSEEDRKKGKKFARYQLGDLLLHLEKKHGEDWGKVYDEAWERIDKKVEGLSKHIKLEEERRSEDAQSKAALTDWLRAKASFVIEGLKEADKDEFCRCELKLQKWYGDLRGKPFAIEAENSILDISGFSKQYNCAFIWQKDGVKKLNLYLIINYFKGGKLRFKKIKPEAFEANRFYTVINKKSGEIVPMEVNFNFDDPNLIILPLAFGKRQGREFIWNDLLSLETGSLKLANGRVIEKTLYNRRTRQDEPALFVALTFERREVLDSSNIKPMNLIGVDRGENIPAVIALTDPEGCPLSRFKDSLGNPTHILRIGESYKEKQRTIQAKKEVEQRRAGGYSRKYASKAKNLADDMVRNTARDLLYYAVTQDAMLIFENLSRGFGRQGKRTFMAERQYTRMEDWLTAKLAYEGLPSKTYLSKTLAQYTSKTCSNCGFTITSADYDRVLEKLKKTATGWMTTINGKELKVEGQITYYNRYKRQNVVKDLSVELDRLSEESVNNDISSWTKGRSGEALSLLKKRFSHRPVQEKFVCLNCGFETHADEQAALNIARSWLFLRSQEYKKYQTNKTTGNTDKRAFVETWQSFYRKKLKEVWKPAV

SEQ ID NO: 32551 - protein, 978 aa, synthetic construct
  REGION 1..978: note = engineered CasX variant
QEIKRANKIRRRLVKDSNTKKAGKTGPMKTLLVRVMTPDLRERLENLRKKPENIPQPISNTSQANLNKLLTDYTEMKKAILHVYWEEFQKDPVGLMSRVAQPASKKIDQNKLKPEMDEKGNLTTAGFACSQCGQPLFVYKLEQVSEKGKAYTNYFGRCNVAEHEKLILLAQLKPEKDSDEAVTYSLGKFGQRALDFYSIHVTKESTHPVKPLAQIAGNRYASAPVGKALSDACMGTIASFLSKYQDIIIEHQKVVKGNQKRLESLRELAGKENLEYPSVTLPPQPHTKEGVDAYNEVIARVRMWVNLNLWQKLKLSRDDAKPLLRLKGFPSFPLVERQANEVDWWDMVCNVKKLINEKKEDGKVFWQNLAGYKRQEALRPYLSSEEDRKKGKKFARYQLGDLLLHLEKKHGEDWGKVYDEAWERIDKKVEGLSKHIKLEEERRSEDAQSKAALTDWLRAKASFVIEGLKEADKDEFCRCELKLQKWYGDLRGKPFAIEAENSILDISGFSKQYNCAFIWQKDGVKKLNLYLIINYFKGGKLRFKKIKPEAFEANRFYTVINKKSGEIVPMEVNFNFDDPNLIILPLAFGKRQGREFIWNDLLSLETGSLKLANGRVIEKTLYNRRTRQDEPALFVALTFERREVLDSSNIKPMNLIGVDRGENIPAVIALTDPEGCPLSRFKDSLGNPTHILRIGESYKEKQRTIQAKKEVEQRRAGGYSRKYASKAKNLADDMVRNTARDLLYYAVTQDAMLIFENLSRGFGRQGKRTFMAERQYTRMEDWLTAKLAYEGLPSKTYLSKTLAQYTSKTCSNCGFTITSADYDRVLEKLKKTATGWMTTINGKELKVEGQITYYNRYKRQNVVKDLSVELDRLSEESVNNDISSWTKGRSGEALSLLKKRFSHRPVQEKFVCLNCGFETHADEQAALNIARSWLFLRSQEYKKYQTNKTTGNTDKRAFVETWQSFYRKKLKEVWKPAV

SEQ ID NO: 32552 - protein, 978 aa, synthetic construct
  REGION 1..978: note = engineered CasX variant
QEIKRANKIRRRLVKDSNTKKAGKTGPMKTLLVRVMTPDLRERLENLRKKPENIPQPISNTSQANLNKLLTDYTEMKKAILHVYWEEFQKDPVGLMSRVAQPASKKIDQNKLKPEMDEKGNLTTAGFACSQCGQPLFVYKLEQVSEKGKAYTNYFGRCNVAEHEKLILLAQLKPEKDSDEAVTYSLGKFGQRALDFYSIHVTKESTHPVKPLAQIAGNRYASVPVGKALSDACMGTIASFLSKYQDIIIEHQKVVKGNQKRLESLRELAGKENLEYPSVTLPPQPHTKEGVDAYNEVIARVRMWVNLNLWQKLKLSRDDAKPLLRLKGFPSFPLVERQANEVDWWDMVCNVKKLINEKKEDGKVFWQNLAGYKRQEALRPYLSSEEDRKKGKKFARYQLGDLLLHLEKKHGEDWGKVYDEAWERIDKKVEGLSKHIKLEEERRSEDAQSKAALTDWLRAKASFVIEGLKEADKDEFCRCELKLQKWYGDLRGKPFAIEAENSILDISGFSKQYNCAFIWQKDGVKKLNLYLIINYFKGGKLRFKKIKPEAFEANRFYTVINKKSGEIVPMEVNFNFDDPNLIILPLAFGKRQGREFIWNDLLSLETGSLKLANGRVIEKTLYNRRTRQDEPALFVALTFERREVLDSSNIKPMNLIGVDRGENIPAVIALTDPEGCPLSRFKDSLGNPTHILRIGESYKEKQRTIQAKKEVEQRRAGGYSRKYASKAKNLADDMVRNTARDLLYYAVTQDAMLIFENLSRGFGRQGKRTFMAERQYTRMEDWLTAKLAYEGLPSKTYLSKTLAQYTSKTCSNCGFTITSADYDRVLEKLKKTATGWMTTINGKELKVEGQITYYNRYKRQNVVKDLSVELDRLSEESVNNDISSWTKGRSGEALSLLKKRFSHRPVQEKFVCLNCGFETHADEQAALNIARSWLFLRSQEYKKYQTNKTTGNTDKRAFVETWQSFYRKKLKEVWKPAV

SEQ ID NO: 32553 - protein, 978 aa, synthetic construct
  REGION 1..978: note = engineered CasX variant
QEIKRANKIRRRLVKDSNTKKAGKTGPMKTLLVRVMTPDLRERLENLRKKPENIPQPISNTSQANLNKLLTDYTEMKKAILHVYWEEFQKDPVGLMSRVAQPASKKIDQNKLKPEMDEKGNLTTAGFACSQCGQPLFVYKLEQVSEKGKAYTNYFGRCNVAEHEKLIKLAQLKPEKDSDEAVTYSLGKFGQRALDFYSIHVTKESTHPVKPLAQIAGNRYASGPVGKALSDACMGTIASFLSKYQDIIIEHQKVVKGNQKRLESLRELAGKENLEYPSVTLPPQPHTKEGVDAYNEVIARVRMWVNLNLWQKLKLSRDDAKPLLRLKGFPSFPLVERQANEVDWWDMVCNVKKLINEKKEDGKVFWQNLAGYKRQEALRPYLSSEEDRKKGKKFARYQLGDLLLHLEKKHGEDWGKVYDEAWERIDKKVEGLSKHIKLEEERRSEDAQSKAALTDWLRAKASFVIEGLKEADKDEFCRCELKLQKWYGDLRGKPFAIEAENSILDISGFSKQYNCAFIWQKDGVKKLNLYLIINYFKGGKLRFKKIKPEAFEANRFYTVINKKSGEIVPMEVNFNFDDPNLIILPLAFGKRQGREFIWNDLLSLETGSLKLANGRVIEKTLYNRRTRQDEPALFVALTFERREVLDSSNIKPMNLIGVDRGENIPAVIALTDPEGCPLSRFKDSLGNPTHILRIGESYKEKQRTIQAKKEVEQRRAGGYSRKYASKAKNLADDMVRNTARDLLYYAVTQDAMLIFENLSRGFGRQGKRTFMAERQYTRMEDWLTAKLAYEGLPSKTYLSKTLAQYTSKTCSNCGFTITSADYDRVLEKLKKTATGWMTTINGKELKVEGQITYYNRYKRQNVVKDLSVELDRLSEESVNNDISSWTKGRSGEALSLLKKRFSHRPVQEKFVCLNCGFETHADEQAALNIARSWLFLRSQEYKKYQTNKTTGNTDKRAFVETWQSFYRKKLKEVWKPAV

SEQ ID NO: 32554 - protein, 977 aa, synthetic construct
  REGION 1..977: note = engineered CasX variant
QEIKRANKIRRRLVKDSNTKKAGKTGPMKTLLVRVMTPDLRERLENLRKKPENIPQPISNTSQANLNKLLTDYTEMKKAILHVYWEEFQKDPVGLMSRVAQPASKKIDQNKLKPEMDEKGNLTTAGFACSQCGQPLFVYKLEQVSEKGKAYTNYFGRCNVAEHEKLILLAQLKPEKDSDEAVTYSLGKFGQRALDFYSIHVTKESTHPVKPLAQIAGNRYASPVGKALSDACMGTIASFLSKYQDIIIEHQKVVKGNQKRLESLRELAGKENLEYPSVTLPPQPHTKEGVDAYNEVIARVRMWVNLNLWQKLKLSRDDAKPLLRLKGFPSFPLVERQANEVDWWDMVCNVKKLINEKKEDGKVFWQNLAGYKRQEALRPYLSSEEDRKKGKKFARYQLGDLLLHLEKKHGEDWGKVYDEAWERIDKKVEGLSKHIKLEEERRSEDAQSKAALTDWLRAKASFVIEGLKEADKDEFCRCELKLQKWYGDLRGKPFAIEAENSILDISGFSKQYNCAFIWQKDGVKKLNLYLIINYFKGGKLRFKKIKPEAFEANRFYTVINKKSGEIVPMEVNFNFDDPNLIILPLAFGKRQGREFIWNDLLSLETGSLKLANGRVIEKTLYNRRTRQDEPALFVALTFERREVLDSSNIKPMNLIGVDRGENIPAVIALTDPEGCPLSRFKDSLGNPTHILRIGESYKEKQRTIQAKKEVEQRRAGGYSRKYASKAKNLADDMVRNTARDLLYYAVTQDAMLIFENLSRGFGRQGKRTFMAERQYTRMEDWLTAKLAYEGLPSKTYLSKTLAQYTSKTCSNCGFTITSADYDRVLEKLKKTATGWMTTINGKELKVEGQITYYNRYKRQNVVKDLSVELDRLSEESVNNDISSWTKGRSGEALSLLKKRFSHRPVQEKFVCLNCGFETHADEQAALNIARSWLFLRSQEYKKYQTNKTTGNTDKRAFVETWQSFYRKKLKEVWKPAV

SEQ ID NO: 32555 - protein, 978 aa, synthetic construct
  REGION 1..978: note = engineered CasX variant
QEIKRANKIRRRLVKDSNTKKAGKTGPMKTLLVRVMTPDLRERLENLRKKPENIPQPISNTSRANLNKLLTDYTEMKKAILHVYDEEFQKDPVGLMSRVAQPASKKIDQNKLKPEMDEKGNLTTAGFACSQCGQPLFVYKLEQVSEKGKAYTNYFGRCNVAEHEKLILLAQLKPEKDSDEAVTYSLGKFGQRALDFYSIHVTKESTHPVKPLAQIAGNRYASYPVGKALSDACMGTIASFLSKYQDIIIEHQKVVKGNQKRLESLRELAGKENLEYPSVTLPPQPHTKEGVDAYNEVIARVRMWVNLNLWQKLKLSRDDAKPLLRLKGFPSFPLVERQANEVDWWDMVCNVKKLINEKKEDGKVFWQNLAGYKRQEALRPYLSSEEDRKKGKKFARYQLGDLLLHLEKKHGEDWGKVYDEAWERIDKKVEGLSKHIKLEEERRSEDAQSKAALTDWLRAKASFVIEGLKEADKDEFCRCELKLQKWYGDLRGKPFAIEAENSILDISGFSKQYNCAFIWQKDGVKKLNLYLIINYFKGGKLRFKKIKPEAFEANRFYTVINKKSGEIVPMEVNFNFDDPNLIILPLAFGKRQGREFIWNDLLSLETGSLKLANGRVIEKTLYNRRTRQDEPALFVALTFERREVLDSSNIKPMNLIGVDRGENIPAVIALTDPEGCPLSRFKDSLGNPTHILRIGESYKEKQRTIQAKKEVEQRRAGGYSRKYASKAKNLADDMVRNTARDLLYYAVTQDAMLIFENLSRGFGRQGKRTFMAERQYTRMEDWLTAKLAYEGLPSKTYLSKTLAQYTSKTCSNCGFTITSADYDRVLEKLKKTATGWMTTINGKELKVEGQITYYNRYKRQNVVKDLSVELDRLSEESVNNDISSWTKGRSGEALSLLKKRFSHRPVQEKFVCLNCGFETHADEQAALNIARSWLFLRSQEYKKYQTNKTTGNTDKRAFVETWQSFYRKKLKEVWKPAV

SEQ ID NO: 32556 - protein, 978 aa, synthetic construct
  REGION 1..978: note = engineered CasX variant
QEIKRANKIRRRLVKDSNTKKAGKTGPMKTLLVRVMTPDLRERLENLRKKPENIPQPISNTSRANLNKLLTDYTEMKKAILHVYDEEFQKDPVGLMSRVAQPASKKIDQNKLKPEMDEKGNLTTAGFACSQCGQPLFVYKLEQVSEKGKAYTNYFGRCNVAEHEKLILLAQLKPEKDSDEAVTYSLGKFGQRALDFYSIHVTKESTHPVKPLAQIAGNRYASHPVGKALSDACMGTIASFLSKYQDIIIEHQKVVKGNQKRLESLRELAGKENLEYPSVTLPPQPHTKEGVDAYNEVIARVRMWVNLNLWQKLKLSRDDAKPLLRLKGFPSFPLVERQANEVDWWDMVCNVKKLINEKKEDGKVFWQNLAGYKRQEALRPYLSSEEDRKKGKKFARYQLGDLLLHLEKKHGEDWGKVYDEAWERIDKKVEGLSKHIKLEEERRSEDAQSKAALTDWLRAKASFVIEGLKEADKDEFCRCELKLQKWYGDLRGKPFAIEAENSILDISGFSKQYNCAFIWQKDGVKKLNLYLIINYFKGGKLRFKKIKPEAFEANRFYTVINKKSGEIVPMEVNFNFDDPNLIILPLAFGKRQGREFIWNDLLSLETGSLKLANGRVIEKTLYNRRTRQDEPALFVALTFERREVLDSSNIKPMNLIGVDRGENIPAVIALTDPEGCPLSRFKDSLGNPTHILRIGESYKEKQRTIQAKKEVEQRRAGGYSRKYASKAKNLADDMVRNTARDLLYYAVTQDAMLIFENLSRGFGRQGKRTFMAERQYTRMEDWLTAKLAYEGLPSKTYLSKTLAQYTSKTCSNCGFTITSADYDRVLEKLKKTATGWMTTINGKELKVEGQITYYNRYKRQNVVKDLSVELDRLSEESVNNDISSWTKGRSGEALSLLKKRFSHRPVQEKFVCLNCGFETHADEQAALNIARSWLFLRSQEYKKYQTNKTTGNTDKRAFVETWQSFYRKKLKEVWKPAV

SEQ ID NO: 32557 - protein, 978 aa, synthetic construct
  REGION 1..978: note = engineered CasX variant
QEIKRANKIRRRLVKDSNTKKAGKTGPMKTLLVRVMTPDLRERLENLRKKPENIPQPISNTSRANLNKLLTDYTEMKKAILHVYDEEFQKDPVGLMSRVAQPASKKIDQNKLKPEMDEKGNLTTAGFACSQCGQPLFVYKLEQVSEKGKAYTNYFGRCNVAEHEKLILLAQLKPEKDSDEAVTYSLGKFGQRALDFYSIHVTKESTHPVKPLAQIAGNRYASSPVGKALSDACMGTIASFLSKYQDIIIEHQKVVKGNQKRLESLRELAGKENLEYPSVTLPPQPHTKEGVDAYNEVIARVRMWVNLNLWQKLKLSRDDAKPLLRLKGFPSFPLVERQANEVDWWDMVCNVKKLINEKKEDGKVFWQNLAGYKRQEALRPYLSSEEDRKKGKKFARYQLGDLLLHLEKKHGEDWGKVYDEAWERIDKKVEGLSKHIKLEEERRSEDAQSKAALTDWLRAKASFVIEGLKEADKDEFCRCELKLQKWYGDLRGKPFAIEAENSILDISGFSKQYNCAFIWQKDGVKKLNLYLIINYFKGGKLRFKKIKPEAFEANRFYTVINKKSGEIVPMEVNFNFDDPNLIILPLAFGKRQGREFIWNDLLSLETGSLKLANGRVIEKTLYNRRTRQDEPALFVALTFERREVLDSSNIKPMNLIGVDRGENIPAVIALTDPEGCPLSRFKDSLGNPTHILRIGESYKEKQRTIQAKKEVEQRRAGGYSRKYASKAKNLADDMVRNTARDLLYYAVTQDAMLIFENLSRGFGRQGKRTFMAERQYTRMEDWLTAKLAYEGLPSKTYLSKTLAQYTSKTCSNCGFTITSADYDRVLEKLKKTATGWMTTINGKELKVEGQITYYNRYKRQNVVKDLSVELDRLSEESVNNDISSWTKGRSGEALSLLKKRFSHRPVQEKFVCLNCGFETHADEQAALNIARSWLFLRSQEYKKYQTNKTTGNTDKRAFVETWQSFYRKKLKEVWKPAV

SEQ ID NO: 32558 - protein, 978 aa, synthetic construct
  REGION 1..978: note = engineered CasX variant
QEIKRANKIRRRLVKDSNTKKAGKTGPMKTLLVRVMTPDLRERLENLRKKPENIPQPISNTSRANLNKLLTDYTEMKKAILHVYDEEFQKDPVGLMSRVAQPASKKIDQNKLKPEMDEKGNLTTAGFACSQCGQPLFVYKLEQVSEKGKAYTNYFGRCNVAEHEKLILLAQLKPEKDSDEAVTYSLGKFGQRALDFYSIHVTKESTHPVKPLAQIAGNRYASTPVGKALSDACMGTIASFLSKYQDIIIEHQKVVKGNQKRLESLRELAGKENLEYPSVTLPPQPHTKEGVDAYNEVIARVRMWVNLNLWQKLKLSRDDAKPLLRLKGFPSFPLVERQANEVDWWDMVCNVKKLINEKKEDGKVFWQNLAGYKRQEALRPYLSSEEDRKKGKKFARYQLGDLLLHLEKKHGEDWGKVYDEAWERIDKKVEGLSKHIKLEEERRSEDAQSKAALTDWLRAKASFVIEGLKEADKDEFCRCELKLQKWYGDLRGKPFAIEAENSILDISGFSKQYNCAFIWQKDGVKKLNLYLIINYFKGGKLRFKKIKPEAFEANRFYTVINKKSGEIVPMEVNFNFDDPNLIILPLAFGKRQGREFIWNDLLSLETGSLKLANGRVIEKTLYNRRTRQDEPALFVALTFERREVLDSSNIKPMNLIGVDRGENIPAVIALTDPEGCPLSRFKDSLGNPTHILRIGESYKEKQRTIQAKKEVEQRRAGGYSRKYASKAKNLADDMVRNTARDLLYYAVTQDAMLIFENLSRGFGRQGKRTFMAERQYTRMEDWLTAKLAYEGLPSKTYLSKTLAQYTSKTCSNCGFTITSADYDRVLEKLKKTATGWMTTINGKELKVEGQITYYNRYKRQNVVKDLSVELDRLSEESVNNDISSWTKGRSGEALSLLKKRFSHRPVQEKFVCLNCGFETHADEQAALNIARSWLFLRSQEYKKYQTNKTTGNTDKRAFVETWQSFYRKKLKEVWKPAV

SEQ ID NO: 32559 - protein, 978 aa, synthetic construct
  REGION 1..978: note = engineered CasX variant
QEIKRANKIRRRLVKDSNTKKAGKTGPMKTLLVRVMTPDLRERLENLRKKPENIPQPISNTSRANLNKLLTDYTEMKKAILHVYDEEFQKDPVGLMSRVAQPASKKIDQNKLKPEMDEKGNLTTAGFACSQCGQPLFVYKLEQVSEKGKAYTNYFGRCNVAEHEKLILLAQLKPEKDSDEAVTYSLGKFGQRALDFYSIHVTKESTHPVKPLAQIAGNRYASAPVGKALSDACMGTIASFLSKYQDIIIEHQKVVKGNQKRLESLRELAGKENLEYPSVTLPPQPHTKEGVDAYNEVIARVRMWVNLNLWQKLKLSRDDAKPLLRLKGFPSFPLVERQANEVDWWDMVCNVKKLINEKKEDGKVFWQNLAGYKRQEALRPYLSSEEDRKKGKKFARYQLGDLLLHLEKKHGEDWGKVYDEAWERIDKKVEGLSKHIKLEEERRSEDAQSKAALTDWLRAKASFVIEGLKEADKDEFCRCELKLQKWYGDLRGKPFAIEAENSILDISGFSKQYNCAFIWQKDGVKKLNLYLIINYFKGGKLRFKKIKPEAFEANRFYTVINKKSGEIVPMEVNFNFDDPNLIILPLAFGKRQGREFIWNDLLSLETGSLKLANGRVIEKTLYNRRTRQDEPALFVALTFERREVLDSSNIKPMNLIGVDRGENIPAVIALTDPEGCPLSRFKDSLGNPTHILRIGESYKEKQRTIQAKKEVEQRRAGGYSRKYASKAKNLADDMVRNTARDLLYYAVTQDAMLIFENLSRGFGRQGKRTFMAERQYTRMEDWLTAKLAYEGLPSKTYLSKTLAQYTSKTCSNCGFTITSADYDRVLEKLKKTATGWMTTINGKELKVEGQITYYNRYKRQNVVKDLSVELDRLSEESVNNDISSWTKGRSGEALSLLKKRFSHRPVQEKFVCLNCGFETHADEQAALNIARSWLFLRSQEYKKYQTNKTTGNTDKRAFVETWQSFYRKKLKEVWKPAV

SEQ ID NO: 32560 - protein, 978 aa, synthetic construct
  REGION 1..978: note = engineered CasX variant
QEIKRANKIRRRLVKDSNTKKAGKTGPMKTLLVRVMTPDLRERLENLRKKPENIPQPISNTSRANLNKLLTDYTEMKKAILHVYDEEFQKDPVGLMSRVAQPASKKIDQNKLKPEMDEKGNLTTAGFACSQCGQPLFVYKLEQVSEKGKAYTNYFGRCNVAEHEKLILLAQLKPEKDSDEAVTYSLGKFGQRALDFYSIHVTKESTHPVKPLAQIAGNRYASVPVGKALSDACMGTIASFLSKYQDIIIEHQKVVKGNQKRLESLRELAGKENLEYPSVTLPPQPHTKEGVDAYNEVIARVRMWVNLNLWQKLKLSRDDAKPLLRLKGFPSFPLVERQANEVDWWDMVCNVKKLINEKKEDGKVFWQNLAGYKRQEALRPYLSSEEDRKKGKKFARYQLGDLLLHLEKKHGEDWGKVYDEAWERIDKKVEGLSKHIKLEEERRSEDAQSKAALTDWLRAKASFVIEGLKEADKDEFCRCELKLQKWYGDLRGKPFAIEAENSILDISGFSKQYNCAFIWQKDGVKKLNLYLIINYFKGGKLRFKKIKPEAFEANRFYTVINKKSGEIVPMEVNFNFDDPNLIILPLAFGKRQGREFIWNDLLSLETGSLKLANGRVIEKTLYNRRTRQDEPALFVALTFERREVLDSSNIKPMNLIGVDRGENIPAVIALTDPEGCPLSRFKDSLGNPTHILRIGESYKEKQRTIQAKKEVEQRRAGGYSRKYASKAKNLADDMVRNTARDLLYYAVTQDAMLIFENLSRGFGRQGKRTFMAERQYTRMEDWLTAKLAYEGLPSKTYLSKTLAQYTSKTCSNCGFTITSADYDRVLEKLKKTATGWMTTINGKELKVEGQITYYNRYKRQNVVKDLSVELDRLSEESVNNDISSWTKGRSGEALSLLKKRFSHRPVQEKFVCLNCGFETHADEQAALNIARSWLFLRSQEYKKYQTNKTTGNTDKRAFVETWQSFYRKKLKEVWKPAV

SEQ ID NO: 32561 - protein, 978 aa, synthetic construct
  REGION 1..978: note = engineered CasX variant
QEIKRANKIRRRLVKDSNTKKAGKTGPMKTLLVRVMTPDLRERLENLRKKPENIPQPISNTSRANLNKLLTDYTEMKKAILHVYDEEFQKDPVGLMSRVAQPASKKIDQNKLKPEMDEKGNLTTAGFACSQCGQPLFVYKLEQVSEKGKAYTNYFGRCNVAEHEKLIKLAQLKPEKDSDEAVTYSLGKFGQRALDFYSIHVTKESTHPVKPLAQIAGNRYASGPVGKALSDACMGTIASFLSKYQDIIIEHQKVVKGNQKRLESLRELAGKENLEYPSVTLPPQPHTKEGVDAYNEVIARVRMWVNLNLWQKLKLSRDDAKPLLRLKGFPSFPLVERQANEVDWWDMVCNVKKLINEKKEDGKVFWQNLAGYKRQEALRPYLSSEEDRKKGKKFARYQLGDLLLHLEKKHGEDWGKVYDEAWERIDKKVEGLSKHIKLEEERRSEDAQSKAALTDWLRAKASFVIEGLKEADKDEFCRCELKLQKWYGDLRGKPFAIEAENSILDISGFSKQYNCAFIWQKDGVKKLNLYLIINYFKGGKLRFKKIKPEAFEANRFYTVINKKSGEIVPMEVNFNFDDPNLIILPLAFGKRQGREFIWNDLLSLETGSLKLANGRVIEKTLYNRRTRQDEPALFVALTFERREVLDSSNIKPMNLIGVDRGENIPAVIALTDPEGCPLSRFKDSLGNPTHILRIGESYKEKQRTIQAKKEVEQRRAGGYSRKYASKAKNLADDMVRNTARDLLYYAVTQDAMLIFENLSRGFGRQGKRTFMAERQYTRMEDWLTAKLAYEGLPSKTYLSKTLAQYTSKTCSNCGFTITSADYDRVLEKLKKTATGWMTTINGKELKVEGQITYYNRYKRQNVVKDLSVELDRLSEESVNNDISSWTKGRSGEALSLLKKRFSHRPVQEKFVCLNCGFETHADEQAALNIARSWLFLRSQEYKKYQTNKTTGNTDKRAFVETWQSFYRKKLKEVWKPAV

SEQ ID NO: 32562 - protein, 977 aa, synthetic construct
  REGION 1..977: note = engineered CasX variant
QEIKRANKIRRRLVKDSNTKKAGKTGPMKTLLVRVMTPDLRERLENLRKKPENIPQPISNTSRANLNKLLTDYTEMKKAILHVYDEEFQKDPVGLMSRVAQPASKKIDQNKLKPEMDEKGNLTTAGFACSQCGQPLFVYKLEQVSEKGKAYTNYFGRCNVAEHEKLILLAQLKPEKDSDEAVTYSLGKFGQRALDFYSIHVTKESTHPVKPLAQIAGNRYASPVGKALSDACMGTIASFLSKYQDIIIEHQKVVKGNQKRLESLRELAGKENLEYPSVTLPPQPHTKEGVDAYNEVIARVRMWVNLNLWQKLKLSRDDAKPLLRLKGFPSFPLVERQANEVDWWDMVCNVKKLINEKKEDGKVFWQNLAGYKRQEALRPYLSSEEDRKKGKKFARYQLGDLLLHLEKKHGEDWGKVYDEAWERIDKKVEGLSKHIKLEEERRSEDAQSKAALTDWLRAKASFVIEGLKEADKDEFCRCELKLQKWYGDLRGKPFAIEAENSILDISGFSKQYNCAFIWQKDGVKKLNLYLIINYFKGGKLRFKKIKPEAFEANRFYTVINKKSGEIVPMEVNFNFDDPNLIILPLAFGKRQGREFIWNDLLSLETGSLKLANGRVIEKTLYNRRTRQDEPALFVALTFERREVLDSSNIKPMNLIGVDRGENIPAVIALTDPEGCPLSRFKDSLGNPTHILRIGESYKEKQRTIQAKKEVEQRRAGGYSRKYASKAKNLADDMVRNTARDLLYYAVTQDAMLIFENLSRGFGRQGKRTFMAERQYTRMEDWLTAKLAYEGLPSKTYLSKTLAQYTSKTCSNCGFTITSADYDRVLEKLKKTATGWMTTINGKELKVEGQITYYNRYKRQNVVKDLSVELDRLSEESVNNDISSWTKGRSGEALSLLKKRFSHRPVQEKFVCLNCGFETHADEQAALNIARSWLFLRSQEYKKYQTNKTTGNTDKRAFVETWQSFYRKKLKEVWKPAV

SEQ ID NO: 32563 - protein, 978 aa, synthetic construct
  REGION 1..978: note = engineered CasX variant
QEIKRANKIRRRLVKDSNTKKAGKTGPMKTLLVRVMTPDLRERLENLRKKPENIPQPISNTSRANLNKLLTDYTEMKKAILHVYWEEFQKDPVGLMSRVAQPASKKIDQNKLKPEMDEKGNLTTAGFACSQCGQPLFVYKLEQVSEKGKAYTNYFGRCNVAEHEKLIKLAQLKPEKDSDEAVTYSLGKFGQRALDFYSIHVTKESTHPVKPLAQIAGNRYASYPVGKALSDACMGTIASFLSKYQDIIIEHQKVVKGNQKRLESLRELAGKENLEYPSVTLPPQPHTKEGVDAYNEVIARVRMWVNLNLWQKLKLSRDDAKPLLRLKGFPSFPLVERQANEVDWWDMVCNVKKLINEKKEDGKVFWQNLAGYKRQEALRPYLSSEEDRKKGKKFARYQLGDLLLHLEKKHGEDWGKVYDEAWERIDKKVEGLSKHIKLEEERRSEDAQSKAALTDWLRAKASFVIEGLKEADKDEFCRCELKLQKWYGDLRGKPFAIEAENSILDISGFSKQYNCAFIWQKDGVKKLNLYLIINYFKGGKLRFKKIKPEAFEANRFYTVINKKSGEIVPMEVNFNFDDPNLIILPLAFGKRQGREFIWNDLLSLETGSLKLANGRVIEKTLYNRRTRQDEPALFVALTFERREVLDSSNIKPMNLIGVDRGENIPAVIALTDPEGCPLSRFKDSLGNPTHILRIGESYKEKQRTIQAKKEVEQRRAGGYSRKYASKAKNLADDMVRNTARDLLYYAVTQDAMLIFENLSRGFGRQGKRTFMAERQYTRMEDWLTAKLAYEGLPSKTYLSKTLAQYTSKTCSNCGFTITSADYDRVLEKLKKTATGWMTTINGKELKVEGQITYYNRYKRQNVVKDLSVELDRLSEESVNNDISSWTKGRSGEALSLLKKRFSHRPVQEKFVCLNCGFETHADEQAALNIARSWLFLRSQEYKKYQTNKTTGNTDKRAFVETWQSFYRKKLKEVWKPAV

SEQ ID NO: 32564 - protein, 978 aa, synthetic construct
  REGION 1..978: note = engineered CasX variant
QEIKRANKIRRRLVKDSNTKKAGKTGPMKTLLVRVMTPDLRERLENLRKKPENIPQPISNTSRANLNKLLTDYTEMKKAILHVYWEEFQKDPVGLMSRVAQPASKKIDQNKLKPEMDEKGNLTTAGFACSQCGQPLFVYKLEQVSEKGKAYTNYFGRCNVAEHEKLIKLAQLKPEKDSDEAVTYSLGKFGQRALDFYSIHVTKESTHPVKPLAQIAGNRYASHPVGKALSDACMGTIASFLSKYQDIIIEHQKVVKGNQKRLESLRELAGKENLEYPSVTLPPQPHTKEGVDAYNEVIARVRMWVNLNLWQKLKLSRDDAKPLLRLKGFPSFPLVERQANEVDWWDMVCNVKKLINEKKEDGKVFWQNLAGYKRQEALRPYLSSEEDRKKGKKFARYQLGDLLLHLEKKHGEDWGKVYDEAWERIDKKVEGLSKHIKLEEERRSEDAQSKAALTDWLRAKASFVIEGLKEADKDEFCRCELKLQKWYGDLRGKPFAIEAENSILDISGFSKQYNCAFIWQKDGVKKLNLYLIINYFKGGKLRFKKIKPEAFEANRFYTVINKKSGEIVPMEVNFNFDDPNLIILPLAFGKRQGREFIWNDLLSLETGSLKLANGRVIEKTLYNRRTRQDEPALFVALTFERREVLDSSNIKPMNLIGVDRGENIPAVIALTDPEGCPLSRFKDSLGNPTHILRIGESYKEKQRTIQAKKEVEQRRAGGYSRKYASKAKNLADDMVRNTARDLLYYAVTQDAMLIFENLSRGFGRQGKRTFMAERQYTRMEDWLTAKLAYEGLPSKTYLSKTLAQYTSKTCSNCGFTITSADYDRVLEKLKKTATGWMTTINGKELKVEGQITYYNRYKRQNVVKDLSVELDRLSEESVNNDISSWTKGRSGEALSLLKKRFSHRPVQEKFVCLNCGFETHADEQAALNIARSWLFLRSQEYKKYQTNKTTGNTDKRAFVETWQSFYRKKLKEVWKPAV

SEQ ID NO: 32565 - protein, 978 aa, synthetic construct
  REGION 1..978: note = engineered CasX variant
QEIKRANKIRRRLVKDSNTKKAGKTGPMKTLLVRVMTPDLRERLENLRKKPENIPQPISNTSRANLNKLLTDYTEMKKAILHVYWEEFQKDPVGLMSRVAQPASKKIDQNKLKPEMDEKGNLTTAGFACSQCGQPLFVYKLEQVSEKGKAYTNYFGRCNVAEHEKLIKLAQLKPEKDSDEAVTYSLGKFGQRALDFYSIHVTKESTHPVKPLAQIAGNRYASTPVGKALSDACMGTIASFLSKYQDIIIEHQKVVKGNQKRLESLRELAGKENLEYPSVTLPPQPHTKEGVDAYNEVIARVRMWVNLNLWQKLKLSRDDAKPLLRLKGFPSFPLVERQANEVDWWDMVCNVKKLINEKKEDGKVFWQNLAGYKRQEALRPYLSSEEDRKKGKKFARYQLGDLLLHLEKKHGEDWGKVYDEAWERIDKKVEGLSKHIKLEEERRSEDAQSKAALTDWLRAKASFVIEGLKEADKDEFCRCELKLQKWYGDLRGKPFAIEAENSILDISGFSKQYNCAFIWQKDGVKKLNLYLIINYFKGGKLRFKKIKPEAFEANRFYTVINKKSGEIVPMEVNFNFDDPNLIILPLAFGKRQGREFIWNDLLSLETGSLKLANGRVIEKTLYNRRTRQDEPALFVALTFERREVLDSSNIKPMNLIGVDRGENIPAVIALTDPEGCPLSRFKDSLGNPTHILRIGESYKEKQRTIQAKKEVEQRRAGGYSRKYASKAKNLADDMVRNTARDLLYYAVTQDAMLIFENLSRGFGRQGKRTFMAERQYTRMEDWLTAKLAYEGLPSKTYLSKTLAQYTSKTCSNCGFTITSADYDRVLEKLKKTATGWMTTINGKELKVEGQITYYNRYKRQNVVKDLSVELDRLSEESVNNDISSWTKGRSGEALSLLKKRFSHRPVQEKFVCLNCGFETHADEQAALNIARSWLFLRSQEYKKYQTNKTTGNTDKRAFVETWQSFYRKKLKEVWKPAV

SEQ ID NO: 32566 - protein, 978 aa, synthetic construct
  REGION 1..978: note = engineered CasX variant
QEIKRANKIRRRLVKDSNTKKAGKTGPMKTLLVRVMTPDLRERLENLRKKPENIPQPISNTSRANLNKLLTDYTEMKKAILHVYWEEFQKDPVGLMSRVAQPASKKIDQNKLKPEMDEKGNLTTAGFACSQCGQPLFVYKLEQVSEKGKAYTNYFGRCNVAEHEKLIKLAQLKPEKDSDEAVTYSLGKFGQRALDFYSIHVTKESTHPVKPLAQIAGNRYASAPVGKALSDACMGTIASFLSKYQDIIIEHQKVVKGNQKRLESLRELAGKENLEYPSVTLPPQPHTKEGVDAYNEVIARVRMWVNLNLWQKLKLSRDDAKPLLRLKGFPSFPLVERQANEVDWWDMVCNVKKLINEKKEDGKVFWQNLAGYKRQEALRPYLSSEEDRKKGKKFARYQLGDLLLHLEKKHGEDWGKVYDEAWERIDKKVEGLSKHIKLEEERRSEDAQSKAALTDWLRAKASFVIEGLKEADKDEFCRCELKLQKWYGDLRGKPFAIEAENSILDISGFSKQYNCAFIWQKDGVKKLNLYLIINYFKGGKLRFKKIKPEAFEANRFYTVINKKSGEIVPMEVNFNFDDPNLIILPLAFGKRQGREFIWNDLLSLETGSLKLANGRVIEKTLYNRRTRQDEPALFVALTFERREVLDSSNIKPMNLIGVDRGENIPAVIALTDPEGCPLSRFKDSLGNPTHILRIGESYKEKQRTIQAKKEVEQRRAGGYSRKYASKAKNLADDMVRNTARDLLYYAVTQDAMLIFENLSRGFGRQGKRTFMAERQYTRMEDWLTAKLAYEGLPSKTYLSKTLAQYTSKTCSNCGFTITSADYDRVLEKLKKTATGWMTTINGKELKVEGQITYYNRYKRQNVVKDLSVELDRLSEESVNNDISSWTKGRSGEALSLLKKRFSHRPVQEKFVCLNCGFETHADEQAALNIARSWLFLRSQEYKKYQTNKTTGNTDKRAFVETWQSFYRKKLKEVWKPAV

SEQ ID NO: 32567 - protein, 978 aa, synthetic construct
  REGION 1..978: note = engineered CasX variant
QEIKRANKIRRRLVKDSNTKKAGKTGPMKTLLVRVMTPDLRERLENLRKKPENIPQPISNTSRANLNKLLTDYTEMKKAILHVYWEEFQKDPVGLMSRVAQPASKKIDQNKLKPEMDEKGNLTTAGFACSQCGQPLFVYKLEQVSEKGKAYTNYFGRCNVAEHEKLIKLAQLKPEKDSDEAVTYSLGKFGQRALDFYSIHVTKESTHPVKPLAQIAGNRYASVPVGKALSDACMGTIASFLSKYQDIIIEHQKVVKGNQKRLESLRELAGKENLEYPSVTLPPQPHTKEGVDAYNEVIARVRMWVNLNLWQKLKLSRDDAKPLLRLKGFPSFPLVERQANEVDWWDMVCNVKKLINEKKEDGKVFWQNLAGYKRQEALRPYLSSEEDRKKGKKFARYQLGDLLLHLEKKHGEDWGKVYDEAWERIDKKVEGLSKHIKLEEERRSEDAQSKAALTDWLRAKASFVIEGLKEADKDEFCRCELKLQKWYGDLRGKPFAIEAENSILDISGFSKQYNCAFIWQKDGVKKLNLYLIINYFKGGKLRFKKIKPEAFEANRFYTVINKKSGEIVPMEVNFNFDDPNLIILPLAFGKRQGREFIWNDLLSLETGSLKLANGRVIEKTLYNRRTRQDEPALFVALTFERREVLDSSNIKPMNLIGVDRGENIPAVIALTDPEGCPLSRFKDSLGNPTHILRIGESYKEKQRTIQAKKEVEQRRAGGYSRKYASKAKNLADDMVRNTARDLLYYAVTQDAMLIFENLSRGFGRQGKRTFMAERQYTRMEDWLTAKLAYEGLPSKTYLSKTLAQYTSKTCSNCGFTITSADYDRVLEKLKKTATGWMTTINGKELKVEGQITYYNRYKRQNVVKDLSVELDRLSEESVNNDISSWTKGRSGEALSLLKKRFSHRPVQEKFVCLNCGFETHADEQAALNIARSWLFLRSQEYKKYQTNKTTGNTDKRAFVETWQSFYRKKLKEVWKPAV

SEQ ID NO: 32568 - protein, 979 aa, synthetic construct
  REGION 1..979: note = engineered CasX variant
QEIKRANKIRRRLVKDSNTKKAGKTGPMKTLLVRVMTPDLRERLENLRKKPENIPQPISNTSRANLNKLLTDYTEMKKAILHVYWEEFQKDPVGLMSRVAQPASKKIDQNKLKPEMDEKGNLTTAGFACSQCGQPLFVYKLEQVSEKGKAYTNYFGRCNVAEHEKLIKKLAQLKPEKDSDEAVTYSLGKFGQRALDFYSIHVTKESTHPVKPLAQIAGNRYASGPVGKALSDACMGTIASFLSKYQDIIIEHQKVVKGNQKRLESLRELAGKENLEYPSVTLPPQPHTKEGVDAYNEVIARVRMWVNLNLWQKLKLSRDDAKPLLRLKGFPSFPLVERQANEVDWWDMVCNVKKLINEKKEDGKVFWQNLAGYKRQEALRPYLSSEEDRKKGKKFARYQLGDLLLHLEKKHGEDWGKVYDEAWERIDKKVEGLSKHIKLEEERRSEDAQSKAALTDWLRAKASFVIEGLKEADKDEFCRCELKLQKWYGDLRGKPFAIEAENSILDISGFSKQYNCAFIWQKDGVKKLNLYLIINYFKGGKLRFKKIKPEAFEANRFYTVINKKSGEIVPMEVNFNFDDPNLIILPLAFGKRQGREFIWNDLLSLETGSLKLANGRVIEKTLYNRRTRQDEPALFVALTFERREVLDSSNIKPMNLIGVDRGENIPAVIALTDPEGCPLSRFKDSLGNPTHILRIGESYKEKQRTIQAKKEVEQRRAGGYSRKYASKAKNLADDMVRNTARDLLYYAVTQDAMLIFENLSRGFGRQGKRTFMAERQYTRMEDWLTAKLAYEGLPSKTYLSKTLAQYTSKTCSNCGFTITSADYDRVLEKLKKTATGWMTTINGKELKVEGQITYYNRYKRQNVVKDLSVELDRLSEESVNNDISSWTKGRSGEALSLLKKRFSHRPVQEKFVCLNCGFETHADEQAALNIARSWLFLRSQEYKKYQTNKTTGNTDKRAFVETWQSFYRKKLKEVWKPAV

SEQ ID NO: 32569 - protein, 977 aa, synthetic construct
  REGION 1..977: note = engineered CasX variant
QEIKRANKIRRRLVKDSNTKKAGKTGPMKTLLVRVMTPDLRERLENLRKKPENIPQPISNTSRANLNKLLTDYTEMKKAILHVYWEEFQKDPVGLMSRVAQPASKKIDQNKLKPEMDEKGNLTTAGFACSQCGQPLFVYKLEQVSEKGKAYTNYFGRCNVAEHEKLIKLAQLKPEKDSDEAVTYSLGKFGQRALDFYSIHVTKESTHPVKPLAQIAGNRYASPVGKALSDACMGTIASFLSKYQDIIIEHQKVVKGNQKRLESLRELAGKENLEYPSVTLPPQPHTKEGVDAYNEVIARVRMWVNLNLWQKLKLSRDDAKPLLRLKGFPSFPLVERQANEVDWWDMVCNVKKLINEKKEDGKVFWQNLAGYKRQEALRPYLSSEEDRKKGKKFARYQLGDLLLHLEKKHGEDWGKVYDEAWERIDKKVEGLSKHIKLEEERRSEDAQSKAALTDWLRAKASFVIEGLKEADKDEFCRCELKLQKWYGDLRGKPFAIEAENSILDISGFSKQYNCAFIWQKDGVKKLNLYLIINYFKGGKLRFKKIKPEAFEANRFYTVINKKSGEIVPMEVNFNFDDPNLIILPLAFGKRQGREFIWNDLLSLETGSLKLANGRVIEKTLYNRRTRQDEPALFVALTFERREVLDSSNIKPMNLIGVDRGENIPAVIALTDPEGCPLSRFKDSLGNPTHILRIGESYKEKQRTIQAKKEVEQRRAGGYSRKYASKAKNLADDMVRNTARDLLYYAVTQDAMLIFENLSRGFGRQGKRTFMAERQYTRMEDWLTAKLAYEGLPSKTYLSKTLAQYTSKTCSNCGFTITSADYDRVLEKLKKTATGWMTTINGKELKVEGQITYYNRYKRQNVVKDLSVELDRLSEESVNNDISSWTKGRSGEALSLLKKRFSHRPVQEKFVCLNCGFETHADEQAALNIARSWLFLRSQEYKKYQTNKTTGNTDKRAFVETWQSFYRKKLKEVWKPAV

SEQ ID NO: 32570 - protein, 978 aa, synthetic construct
  REGION 1..978: note = engineered CasX variant
QEIKRANKIRRRLVKDSNTKKAGKTGPMKTLLVRVMTPDLRERLENLRKKPENIPQPISNTSRANLNKLLTDYTEMKKAILHVYWEEFQKDPVGLMSRVAQPASKKIDQNKLKPEMDEKGNLTTAGFACSQCGQPLFVYKLEQVSEKGKAYTNYFGRCNVAEHEKLILLYQLKPEKDSDEAVTYSLGKFGQRALDFYSIHVTKESTHPVKPLAQIAGNRYASYPVGKALSDACMGTIASFLSKYQDIIIEHQKVVKGNQKRLESLRELAGKENLEYPSVTLPPQPHTKEGVDAYNEVIARVRMWVNLNLWQKLKLSRDDAKPLLRLKGFPSFPLVERQANEVDWWDMVCNVKKLINEKKEDGKVFWQNLAGYKRQEALRPYLSSEEDRKKGKKFARYQLGDLLLHLEKKHGEDWGKVYDEAWERIDKKVEGLSKHIKLEEERRSEDAQSKAALTDWLRAKASFVIEGLKEADKDEFCRCELKLQKWYGDLRGKPFAIEAENSILDISGFSKQYNCAFIWQKDGVKKLNLYLIINYFKGGKLRFKKIKPEAFEANRFYTVINKKSGEIVPMEVNFNFDDPNLIILPLAFGKRQGREFIWNDLLSLETGSLKLANGRVIEKTLYNRRTRQDEPALFVALTFERREVLDSSNIKPMNLIGVDRGENIPAVIALTDPEGCPLSRFKDSLGNPTHILRIGESYKEKQRTIQAKKEVEQRRAGGYSRKYASKAKNLADDMVRNTARDLLYYAVTQDAMLIFENLSRGFGRQGKRTFMAERQYTRMEDWLTAKLAYEGLPSKTYLSKTLAQYTSKTCSNCGFTITSADYDRVLEKLKKTATGWMTTINGKELKVEGQITYYNRYKRQNVVKDLSVELDRLSEESVNNDISSWTKGRSGEALSLLKKRFSHRPVQEKFVCLNCGFETHADEQAALNIARSWLFLRSQEYKKYQTNKTTGNTDKRAFVETWQSFYRKKLKEVWKPAV

SEQ ID NO: 32571 - protein, 978 aa, synthetic construct
  REGION 1..978: note = engineered CasX variant
QEIKRANKIRRRLVKDSNTKKAGKTGPMKTLLVRVMTPDLRERLENLRKKPENIPQPISNTSRANLNKLLTDYTEMKKAILHVYWEEFQKDPVGLMSRVAQPASKKIDQNKLKPEMDEKGNLTTAGFACSQCGQPLFVYKLEQVSEKGKAYTNYFGRCNVAEHEKLILLYQLKPEKDSDEAVTYSLGKFGQRALDFYSIHVTKESTHPVKPLAQIAGNRYASHPVGKALSDACMGTIASFLSKYQDIIIEHQKVVKGNQKRLESLRELAGKENLEYPSVTLPPQPHTKEGVDAYNEVIARVRMWVNLNLWQKLKLSRDDAKPLLRLKGFPSFPLVERQANEVDWWDMVCNVKKLINEKKEDGKVFWQNLAGYKRQEALRPYLSSEEDRKKGKKFARYQLGDLLLHLEKKHGEDWGKVYDEAWERIDKKVEGLSKHIKLEEERRSEDAQSKAALTDWLRAKASFVIEGLKEADKDEFCRCELKLQKWYGDLRGKPFAIEAENSILDISGFSKQYNCAFIWQKDGVKKLNLYLIINYFKGGKLRFKKIKPEAFEANRFYTVINKKSGEIVPMEVNFNFDDPNLIILPLAFGKRQGREFIWNDLLSLETGSLKLANGRVIEKTLYNRRTRQDEPALFVALTFERREVLDSSNIKPMNLIGVDRGENIPAVIALTDPEGCPLSRFKDSLGNPTHILRIGESYKEKQRTIQAKKEVEQRRAGGYSRKYASKAKNLADDMVRNTARDLLYYAVTQDAMLIFENLSRGFGRQGKRTFMAERQYTRMEDWLTAKLAYEGLPSKTYLSKTLAQYTSKTCSNCGFTITSADYDRVLEKLKKTATGWMTTINGKELKVEGQITYYNRYKRQNVVKDLSVELDRLSEESVNNDISSWTKGRSGEALSLLKKRFSHRPVQEKFVCLNCGFETHADEQAALNIARSWLFLRSQEYKKYQTNKTTGNTDKRAFVETWQSFYRKKLKEVWKPAV

SEQ ID NO: 32572 - protein, 978 aa, synthetic construct
  REGION 1..978: note = engineered CasX variant
QEIKRANKIRRRLVKDSNTKKAGKTGPMKTLLVRVMTPDLRERLENLRKKPENIPQPISNTSRANLNKLLTDYTEMKKAILHVYWEEFQKDPVGLMSRVAQPASKKIDQNKLKPEMDEKGNLTTAGFACSQCGQPLFVYKLEQVSEKGKAYTNYFGRCNVAEHEKLILLYQLKPEKDSDEAVTYSLGKFGQRALDFYSIHVTKESTHPVKPLAQIAGNRYASSPVGKALSDACMGTIASFLSKYQDIIIEHQKVVKGNQKRLESLRELAGKENLEYPSVTLPPQPHTKEGVDAYNEVIARVRMWVNLNLWQKLKLSRDDAKPLLRLKGFPSFPLVERQANEVDWWDMVCNVKKLINEKKEDGKVFWQNLAGYKRQEALRPYLSSEEDRKKGKKFARYQLGDLLLHLEKKHGEDWGKVYDEAWERIDKKVEGLSKHIKLEEERRSEDAQSKAALTDWLRAKASFVIEGLKEADKDEFCRCELKLQKWYGDLRGKPFAIEAENSILDISGFSKQYNCAFIWQKDGVKKLNLYLIINYFKGGKLRFKKIKPEAFEANRFYTVINKKSGEIVPMEVNFNFDDPNLIILPLAFGKRQGREFIWNDLLSLETGSLKLANGRVIEKTLYNRRTRQDEPALFVALTFERREVLDSSNIKPMNLIGVDRGENIPAVIALTDPEGCPLSRFKDSLGNPTHILRIGESYKEKQRTIQAKKEVEQRRAGGYSRKYASKAKNLADDMVRNTARDLLYYAVTQDAMLIFENLSRGFGRQGKRTFMAERQYTRMEDWLTAKLAYEGLPSKTYLSKTLAQYTSKTCSNCGFTITSADYDRVLEKLKKTATGWMTTINGKELKVEGQITYYNRYKRQNVVKDLSVELDRLSEESVNNDISSWTKGRSGEALSLLKKRFSHRPVQEKFVCLNCGFETHADEQAALNIARSWLFLRSQEYKKYQTNKTTGNTDKRAFVETWQSFYRKKLKEVWKPAV

SEQ ID NO: 32573 - protein, 978 aa, synthetic construct
  REGION 1..978: note = engineered CasX variant
QEIKRANKIRRRLVKDSNTKKAGKTGPMKTLLVRVMTPDLRERLENLRKKPENIPQPISNTSRANLNKLLTDYTEMKKAILHVYWEEFQKDPVGLMSRVAQPASKKIDQNKLKPEMDEKGNLTTAGFACSQCGQPLFVYKLEQVSEKGKAYTNYFGRCNVAEHEKLILLYQLKPEKDSDEAVTYSLGKFGQRALDFYSIHVTKESTHPVKPLAQIAGNRYASTPVGKALSDACMGTIASFLSKYQDIIIEHQKVVKGNQKRLESLRELAGKENLEYPSVTLPPQPHTKEGVDAYNEVIARVRMWVNLNLWQKLKLSRDDAKPLLRLKGFPSFPLVERQANEVDWWDMVCNVKKLINEKKEDGKVFWQNLAGYKRQEALRPYLSSEEDRKKGKKFARYQLGDLLLHLEKKHGEDWGKVYDEAWERIDKKVEGLSKHIKLEEERRSEDAQSKAALTDWLRAKASFVIEGLKEADKDEFCRCELKLQKWYGDLRGKPFAIEAENSILDISGFSKQYNCAFIWQKDGVKKLNLYLIINYFKGGKLRFKKIKPEAFEANRFYTVINKKSGEIVPMEVNFNFDDPNLIILPLAFGKRQGREFIWNDLLSLETGSLKLANGRVIEKTLYNRRTRQDEPALFVALTFERREVLDSSNIKPMNLIGVDRGENIPAVIALTDPEGCPLSRFKDSLGNPTHILRIGESYKEKQRTIQAKKEVEQRRAGGYSRKYASKAKNLADDMVRNTARDLLYYAVTQDAMLIFENLSRGFGRQGKRTFMAERQYTRMEDWLTAKLAYEGLPSKTYLSKTLAQYTSKTCSNCGFTITSADYDRVLEKLKKTATGWMTTINGKELKVEGQITYYNRYKRQNVVKDLSVELDRLSEESVNNDISSWTKGRSGEALSLLKKRFSHRPVQEKFVCLNCGFETHADEQAALNIARSWLFLRSQEYKKYQTNKTTGNTDKRAFVETWQSFYRKKLKEVWKPAV

SEQ ID NO: 32574 - protein, 978 aa, synthetic construct
  REGION 1..978: note = engineered CasX variant
QEIKRANKIRRRLVKDSNTKKAGKTGPMKTLLVRVMTPDLRERLENLRKKPENIPQPISNTSRANLNKLLTDYTEMKKAILHVYWEEFQKDPVGLMSRVAQPASKKIDQNKLKPEMDEKGNLTTAGFACSQCGQPLFVYKLEQVSEKGKAYTNYFGRCNVAEHEKLILLYQLKPEKDSDEAVTYSLGKFGQRALDFYSIHVTKESTHPVKPLAQIAGNRYASAPVGKALSDACMGTIASFLSKYQDIIIEHQKVVKGNQKRLESLRELAGKENLEYPSVTLPPQPHTKEGVDAYNEVIARVRMWVNLNLWQKLKLSRDDAKPLLRLKGFPSFPLVERQANEVDWWDMVCNVKKLINEKKEDGKVFWQNLAGYKRQEALRPYLSSEEDRKKGKKFARYQLGDLLLHLEKKHGEDWGKVYDEAWERIDKKVEGLSKHIKLEEERRSEDAQSKAALTDWLRAKASFVIEGLKEADKDEFCRCELKLQKWYGDLRGKPFAIEAENSILDISGFSKQYNCAFIWQKDGVKKLNLYLIINYFKGGKLRFKKIKPEAFEANRFYTVINKKSGEIVPMEVNFNFDDPNLIILPLAFGKRQGREFIWNDLLSLETGSLKLANGRVIEKTLYNRRTRQDEPALFVALTFERREVLDSSNIKPMNLIGVDRGENIPAVIALTDPEGCPLSRFKDSLGNPTHILRIGESYKEKQRTIQAKKEVEQRRAGGYSRKYASKAKNLADDMVRNTARDLLYYAVTQDAMLIFENLSRGFGRQGKRTFMAERQYTRMEDWLTAKLAYEGLPSKTYLSKTLAQYTSKTCSNCGFTITSADYDRVLEKLKKTATGWMTTINGKELKVEGQITYYNRYKRQNVVKDLSVELDRLSEESVNNDISSWTKGRSGEALSLLKKRFSHRPVQEKFVCLNCGFETHADEQAALNIARSWLFLRSQEYKKYQTNKTTGNTDKRAFVETWQSFYRKKLKEVWKPAV

SEQ ID NO: 32575 - protein, 978 aa, synthetic construct
  REGION 1..978: note = engineered CasX variant
QEIKRANKIRRRLVKDSNTKKAGKTGPMKTLLVRVMTPDLRERLENLRKKPENIPQPISNTSRANLNKLLTDYTEMKKAILHVYWEEFQKDPVGLMSRVAQPASKKIDQNKLKPEMDEKGNLTTAGFACSQCGQPLFVYKLEQVSEKGKAYTNYFGRCNVAEHEKLILLYQLKPEKDSDEAVTYSLGKFGQRALDFYSIHVTKESTHPVKPLAQIAGNRYASVPVGKALSDACMGTIASFLSKYQDIIIEHQKVVKGNQKRLESLRELAGKENLEYPSVTLPPQPHTKEGVDAYNEVIARVRMWVNLNLWQKLKLSRDDAKPLLRLKGFPSFPLVERQANEVDWWDMVCNVKKLINEKKEDGKVFWQNLAGYKRQEALRPYLSSEEDRKKGKKFARYQLGDLLLHLEKKHGEDWGKVYDEAWERIDKKVEGLSKHIKLEEERRSEDAQSKAALTDWLRAKASFVIEGLKEADKDEFCRCELKLQKWYGDLRGKPFAIEAENSILDISGFSKQYNCAFIWQKDGVKKLNLYLIINYFKGGKLRFKKIKPEAFEANRFYTVINKKSGEIVPMEVNFNFDDPNLIILPLAFGKRQGREFIWNDLLSLETGSLKLANGRVIEKTLYNRRTRQDEPALFVALTFERREVLDSSNIKPMNLIGVDRGENIPAVIALTDPEGCPLSRFKDSLGNPTHILRIGESYKEKQRTIQAKKEVEQRRAGGYSRKYASKAKNLADDMVRNTARDLLYYAVTQDAMLIFENLSRGFGRQGKRTFMAERQYTRMEDWLTAKLAYEGLPSKTYLSKTLAQYTSKTCSNCGFTITSADYDRVLEKLKKTATGWMTTINGKELKVEGQITYYNRYKRQNVVKDLSVELDRLSEESVNNDISSWTKGRSGEALSLLKKRFSHRPVQEKFVCLNCGFETHADEQAALNIARSWLFLRSQEYKKYQTNKTTGNTDKRAFVETWQSFYRKKLKEVWKPAV

SEQ ID NO: 32576 - protein, 978 aa, synthetic construct
  REGION 1..978: note = engineered CasX variant
QEIKRANKIRRRLVKDSNTKKAGKTGPMKTLLVRVMTPDLRERLENLRKKPENIPQPISNTSRANLNKLLTDYTEMKKAILHVYWEEFQKDPVGLMSRVAQPASKKIDQNKLKPEMDEKGNLTTAGFACSQCGQPLFVYKLEQVSEKGKAYTNYFGRCNVAEHEKLIKLYQLKPEKDSDEAVTYSLGKFGQRALDFYSIHVTKESTHPVKPLAQIAGNRYASGPVGKALSDACMGTIASFLSKYQDIIIEHQKVVKGNQKRLESLRELAGKENLEYPSVTLPPQPHTKEGVDAYNEVIARVRMWVNLNLWQKLKLSRDDAKPLLRLKGFPSFPLVERQANEVDWWDMVCNVKKLINEKKEDGKVFWQNLAGYKRQEALRPYLSSEEDRKKGKKFARYQLGDLLLHLEKKHGEDWGKVYDEAWERIDKKVEGLSKHIKLEEERRSEDAQSKAALTDWLRAKASFVIEGLKEADKDEFCRCELKLQKWYGDLRGKPFAIEAENSILDISGFSKQYNCAFIWQKDGVKKLNLYLIINYFKGGKLRFKKIKPEAFEANRFYTVINKKSGEIVPMEVNFNFDDPNLIILPLAFGKRQGREFIWNDLLSLETGSLKLANGRVIEKTLYNRRTRQDEPALFVALTFERREVLDSSNIKPMNLIGVDRGENIPAVIALTDPEGCPLSRFKDSLGNPTHILRIGESYKEKQRTIQAKKEVEQRRAGGYSRKYASKAKNLADDMVRNTARDLLYYAVTQDAMLIFENLSRGFGRQGKRTFMAERQYTRMEDWLTAKLAYEGLPSKTYLSKTLAQYTSKTCSNCGFTITSADYDRVLEKLKKTATGWMTTINGKELKVEGQITYYNRYKRQNVVKDLSVELDRLSEESVNNDISSWTKGRSGEALSLLKKRFSHRPVQEKFVCLNCGFETHADEQAALNIARSWLFLRSQEYKKYQTNKTTGNTDKRAFVETWQSFYRKKLKEVWKPAV

SEQ ID NO: 32577 - protein, 977 aa, synthetic construct
  REGION 1..977: note = engineered CasX variant
QEIKRANKIRRRLVKDSNTKKAGKTGPMKTLLVRVMTPDLRERLENLRKKPENIPQPISNTSRANLNKLLTDYTEMKKAILHVYWEEFQKDPVGLMSRVAQPASKKIDQNKLKPEMDEKGNLTTAGFACSQCGQPLFVYKLEQVSEKGKAYTNYFGRCNVAEHEKLILLYQLKPEKDSDEAVTYSLGKFGQRALDFYSIHVTKESTHPVKPLAQIAGNRYASPVGKALSDACMGTIASFLSKYQDIIIEHQKVVKGNQKRLESLRELAGKENLEYPSVTLPPQPHTKEGVDAYNEVIARVRMWVNLNLWQKLKLSRDDAKPLLRLKGFPSFPLVERQANEVDWWDMVCNVKKLINEKKEDGKVFWQNLAGYKRQEALRPYLSSEEDRKKGKKFARYQLGDLLLHLEKKHGEDWGKVYDEAWERIDKKVEGLSKHIKLEEERRSEDAQSKAALTDWLRAKASFVIEGLKEADKDEFCRCELKLQKWYGDLRGKPFAIEAENSILDISGFSKQYNCAFIWQKDGVKKLNLYLIINYFKGGKLRFKKIKPEAFEANRFYTVINKKSGEIVPMEVNFNFDDPNLIILPLAFGKRQGREFIWNDLLSLETGSLKLANGRVIEKTLYNRRTRQDEPALFVALTFERREVLDSSNIKPMNLIGVDRGENIPAVIALTDPEGCPLSRFKDSLGNPTHILRIGESYKEKQRTIQAKKEVEQRRAGGYSRKYASKAKNLADDMVRNTARDLLYYAVTQDAMLIFENLSRGFGRQGKRTFMAERQYTRMEDWLTAKLAYEGLPSKTYLSKTLAQYTSKTCSNCGFTITSADYDRVLEKLKKTATGWMTTINGKELKVEGQITYYNRYKRQNVVKDLSVELDRLSEESVNNDISSWTKGRSGEALSLLKKRFSHRPVQEKFVCLNCGFETHADEQAALNIARSWLFLRSQEYKKYQTNKTTGNTDKRAFVETWQSFYRKKLKEVWKPAV

SEQ ID NO: 32578 - protein, 978 aa, synthetic construct
  REGION 1..978: note = engineered CasX variant
QEIKRANKIRRRLVKDSNTKKAGKTGPMKTLLVRVMTPDLRERLENLRKKPENIPQPISNTSRANLNKLLTDYTEMKKAILHVYWEEFQKDPVGLMSRVAQPASKKIDQNKLKPEMDEKGNLTTAGFACSQCGQPLFVYKLEQVSEKGKAYTNYFGRCNVAEHEKLILLSQLKPEKDSDEAVTYSLGKFGQRALDFYSIHVTKESTHPVKPLAQIAGNRYASYPVGKALSDACMGTIASFLSKYQDIIIEHQKVVKGNQKRLESLRELAGKENLEYPSVTLPPQPHTKEGVDAYNEVIARVRMWVNLNLWQKLKLSRDDAKPLLRLKGFPSFPLVERQANEVDWWDMVCNVKKLINEKKEDGKVFWQNLAGYKRQEALRPYLSSEEDRKKGKKFARYQLGDLLLHLEKKHGEDWGKVYDEAWERIDKKVEGLSKHIKLEEERRSEDAQSKAALTDWLRAKASFVIEGLKEADKDEFCRCELKLQKWYGDLRGKPFAIEAENSILDISGFSKQYNCAFIWQKDGVKKLNLYLIINYFKGGKLRFKKIKPEAFEANRFYTVINKKSGEIVPMEVNFNFDDPNLIILPLAFGKRQGREFIWNDLLSLETGSLKLANGRVIEKTLYNRRTRQDEPALFVALTFERREVLDSSNIKPMNLIGVDRGENIPAVIALTDPEGCPLSRFKDSLGNPTHILRIGESYKEKQRTIQAKKEVEQRRAGGYSRKYASKAKNLADDMVRNTARDLLYYAVTQDAMLIFENLSRGFGRQGKRTFMAERQYTRMEDWLTAKLAYEGLPSKTYLSKTLAQYTSKTCSNCGFTITSADYDRVLEKLKKTATGWMTTINGKELKVEGQITYYNRYKRQNVVKDLSVELDRLSEESVNNDISSWTKGRSGEALSLLKKRFSHRPVQEKFVCLNCGFETHADEQAALNIARSWLFLRSQEYKKYQTNKTTGNTDKRAFVETWQSFYRKKLKEVWKPAV

SEQ ID NO: 32579 - protein, 978 aa, synthetic construct
  REGION 1..978: note = engineered CasX variant
QEIKRANKIRRRLVKDSNTKKAGKTGPMKTLLVRVMTPDLRERLENLRKKPENIPQPISNTSRANLNKLLTDYTEMKKAILHVYWEEFQKDPVGLMSRVAQPASKKIDQNKLKPEMDEKGNLTTAGFACSQCGQPLFVYKLEQVSEKGKAYTNYFGRCNVAEHEKLILLSQLKPEKDSDEAVTYSLGKFGQRALDFYSIHVTKESTHPVKPLAQIAGNRYASHPVGKALSDACMGTIASFLSKYQDIIIEHQKVVKGNQKRLESLRELAGKENLEYPSVTLPPQPHTKEGVDAYNEVIARVRMWVNLNLWQKLKLSRDDAKPLLRLKGFPSFPLVERQANEVDWWDMVCNVKKLINEKKEDGKVFWQNLAGYKRQEALRPYLSSEEDRKKGKKFARYQLGDLLLHLEKKHGEDWGKVYDEAWERIDKKVEGLSKHIKLEEERRSEDAQSKAALTDWLRAKASFVIEGLKEADKDEFCRCELKLQKWYGDLRGKPFAIEAENSILDISGFSKQYNCAFIWQKDGVKKLNLYLIINYFKGGKLRFKKIKPEAFEANRFYTVINKKSGEIVPMEVNFNFDDPNLIILPLAFGKRQGREFIWNDLLSLETGSLKLANGRVIEKTLYNRRTRQDEPALFVALTFERREVLDSSNIKPMNLIGVDRGENIPAVIALTDPEGCPLSRFKDSLGNPTHILRIGESYKEKQRTIQAKKEVEQRRAGGYSRKYASKAKNLADDMVRNTARDLLYYAVTQDAMLIFENLSRGFGRQGKRTFMAERQYTRMEDWLTAKLAYEGLPSKTYLSKTLAQYTSKTCSNCGFTITSADYDRVLEKLKKTATGWMTTINGKELKVEGQITYYNRYKRQNVVKDLSVELDRLSEESVNNDISSWTKGRSGEALSLLKKRFSHRPVQEKFVCLNCGFETHADEQAALNIARSWLFLRSQEYKKYQTNKTTGNTDKRAFVETWQSFYRKKLKEVWKPAV

SEQ ID NO: 32580 - protein, 978 aa, synthetic construct
  REGION 1..978: note = engineered CasX variant
QEIKRANKIRRRLVKDSNTKKAGKTGPMKTLLVRVMTPDLRERLENLRKKPENIPQPISNTSRANLNKLLTDYTEMKKAILHVYWEEFQKDPVGLMSRVAQPASKKIDQNKLKPEMDEKGNLTTAGFACSQCGQPLFVYKLEQVSEKGKAYTNYFGRCNVAEHEKLILLSQLKPEKDSDEAVTYSLGKFGQRALDFYSIHVTKESTHPVKPLAQIAGNRYASSPVGKALSDACMGTIASFLSKYQDIIIEHQKVVKGNQKRLESLRELAGKENLEYPSVTLPPQPHTKEGVDAYNEVIARVRMWVNLNLWQKLKLSRDDAKPLLRLKGFPSFPLVERQANEVDWWDMVCNVKKLINEKKEDGKVFWQNLAGYKRQEALRPYLSSEEDRKKGKKFARYQLGDLLLHLEKKHGEDWGKVYDEAWERIDKKVEGLSKHIKLEEERRSEDAQSKAALTDWLRAKASFVIEGLKEADKDEFCRCELKLQKWYGDLRGKPFAIEAENSILDISGFSKQYNCAFIWQKDGVKKLNLYLIINYFKGGKLRFKKIKPEAFEANRFYTVINKKSGEIVPMEVNFNFDDPNLIILPLAFGKRQGREFIWNDLLSLETGSLKLANGRVIEKTLYNRRTRQDEPALFVALTFERREVLDSSNIKPMNLIGVDRGENIPAVIALTDPEGCPLSRFKDSLGNPTHILRIGESYKEKQRTIQAKKEVEQRRAGGYSRKYASKAKNLADDMVRNTARDLLYYAVTQDAMLIFENLSRGFGRQGKRTFMAERQYTRMEDWLTAKLAYEGLPSKTYLSKTLAQYTSKTCSNCGFTITSADYDRVLEKLKKTATGWMTTINGKELKVEGQITYYNRYKRQNVVKDLSVELDRLSEESVNNDISSWTKGRSGEALSLLKKRFSHRPVQEKFVCLNCGFETHADEQAALNIARSWLFLRSQEYKKYQTNKTTGNTDKRAFVETWQSFYRKKLKEVWKPAV

SEQ ID NO: 32581 - protein, 978 aa, synthetic construct
  REGION 1..978: note = engineered CasX variant
QEIKRANKIRRRLVKDSNTKKAGKTGPMKTLLVRVMTPDLRERLENLRKKPENIPQPISNTSRANLNKLLTDYTEMKKAILHVYWEEFQKDPVGLMSRVAQPASKKIDQNKLKPEMDEKGNLTTAGFACSQCGQPLFVYKLEQVSEKGKAYTNYFGRCNVAEHEKLILLSQLKPEKDSDEAVTYSLGKFGQRALDFYSIHVTKESTHPVKPLAQIAGNRYASTPVGKALSDACMGTIASFLSKYQDIIIEHQKVVKGNQKRLESLRELAGKENLEYPSVTLPPQPHTKEGVDAYNEVIARVRMWVNLNLWQKLKLSRDDAKPLLRLKGFPSFPLVERQANEVDWWDMVCNVKKLINEKKEDGKVFWQNLAGYKRQEALRPYLSSEEDRKKGKKFARYQLGDLLLHLEKKHGEDWGKVYDEAWERIDKKVEGLSKHIKLEEERRSEDAQSKAALTDWLRAKASFVIEGLKEADKDEFCRCELKLQKWYGDLRGKPFAIEAENSILDISGFSKQYNCAFIWQKDGVKKLNLYLIINYFKGGKLRFKKIKPEAFEANRFYTVINKKSGEIVPMEVNFNFDDPNLIILPLAFGKRQGREFIWNDLLSLETGSLKLANGRVIEKTLYNRRTRQDEPALFVALTFERREVLDSSNIKPMNLIGVDRGENIPAVIALTDPEGCPLSRFKDSLGNPTHILRIGESYKEKQRTIQAKKEVEQRRAGGYSRKYASKAKNLADDMVRNTARDLLYYAVTQDAMLIFENLSRGFGRQGKRTFMAERQYTRMEDWLTAKLAYEGLPSKTYLSKTLAQYTSKTCSNCGFTITSADYDRVLEKLKKTATGWMTTINGKELKVEGQITYYNRYKRQNVVKDLSVELDRLSEESVNNDISSWTKGRSGEALSLLKKRFSHRPVQEKFVCLNCGFETHADEQAALNIARSWLFLRSQEYKKYQTNKTTGNTDKRAFVETWQSFYRKKLKEVWKPAV

SEQ ID NO: 32582 - protein, 978 aa, synthetic construct
  REGION 1..978: note = engineered CasX variant
QEIKRANKIRRRLVKDSNTKKAGKTGPMKTLLVRVMTPDLRERLENLRKKPENIPQPISNTSRANLNKLLTDYTEMKKAILHVYWEEFQKDPVGLMSRVAQPASKKIDQNKLKPEMDEKGNLTTAGFACSQCGQPLFVYKLEQVSEKGKAYTNYFGRCNVAEHEKLILLSQLKPEKDSDEAVTYSLGKFGQRALDFYSIHVTKESTHPVKPLAQIAGNRYASAPVGKALSDACMGTIASFLSKYQDIIIEHQKVVKGNQKRLESLRELAGKENLEYPSVTLPPQPHTKEGVDAYNEVIARVRMWVNLNLWQKLKLSRDDAKPLLRLKGFPSFPLVERQANEVDWWDMVCNVKKLINEKKEDGKVFWQNLAGYKRQEALRPYLSSEEDRKKGKKFARYQLGDLLLHLEKKHGEDWGKVYDEAWERIDKKVEGLSKHIKLEEERRSEDAQSKAALTDWLRAKASFVIEGLKEADKDEFCRCELKLQKWYGDLRGKPFAIEAENSILDISGFSKQYNCAFIWQKDGVKKLNLYLIINYFKGGKLRFKKIKPEAFEANRFYTVINKKSGEIVPMEVNFNFDDPNLIILPLAFGKRQGREFIWNDLLSLETGSLKLANGRVIEKTLYNRRTRQDEPALFVALTFERREVLDSSNIKPMNLIGVDRGENIPAVIALTDPEGCPLSRFKDSLGNPTHILRIGESYKEKQRTIQAKKEVEQRRAGGYSRKYASKAKNLADDMVRNTARDLLYYAVTQDAMLIFENLSRGFGRQGKRTFMAERQYTRMEDWLTAKLAYEGLPSKTYLSKTLAQYTSKTCSNCGFTITSADYDRVLEKLKKTATGWMTTINGKELKVEGQITYYNRYKRQNVVKDLSVELDRLSEESVNNDISSWTKGRSGEALSLLKKRFSHRPVQEKFVCLNCGFETHADEQAALNIARSWLFLRSQEYKKYQTNKTTGNTDKRAFVETWQSFYRKKLKEVWKPAV

SEQ ID NO: 32583 - protein, 978 aa, synthetic construct
  REGION 1..978: note = engineered CasX variant
QEIKRANKIRRRLVKDSNTKKAGKTGPMKTLLVRVMTPDLRERLENLRKKPENIPQPISNTSRANLNKLLTDYTEMKKAILHVYWEEFQKDPVGLMSRVAQPASKKIDQNKLKPEMDEKGNLTTAGFACSQCGQPLFVYKLEQVSEKGKAYTNYFGRCNVAEHEKLILLSQLKPEKDSDEAVTYSLGKFGQRALDFYSIHVTKESTHPVKPLAQIAGNRYASVPVGKALSDACMGTIASFLSKYQDIIIEHQKVVKGNQKRLESLRELAGKENLEYPSVTLPPQPHTKEGVDAYNEVIARVRMWVNLNLWQKLKLSRDDAKPLLRLKGFPSFPLVERQANEVDWWDMVCNVKKLINEKKEDGKVFWQNLAGYKRQEALRPYLSSEEDRKKGKKFARYQLGDLLLHLEKKHGEDWGKVYDEAWERIDKKVEGLSKHIKLEEERRSEDAQSKAALTDWLRAKASFVIEGLKEADKDEFCRCELKLQKWYGDLRGKPFAIEAENSILDISGFSKQYNCAFIWQKDGVKKLNLYLIINYFKGGKLRFKKIKPEAFEANRFYTVINKKSGEIVPMEVNFNFDDPNLIILPLAFGKRQGREFIWNDLLSLETGSLKLANGRVIEKTLYNRRTRQDEPALFVALTFERREVLDSSNIKPMNLIGVDRGENIPAVIALTDPEGCPLSRFKDSLGNPTHILRIGESYKEKQRTIQAKKEVEQRRAGGYSRKYASKAKNLADDMVRNTARDLLYYAVTQDAMLIFENLSRGFGRQGKRTFMAERQYTRMEDWLTAKLAYEGLPSKTYLSKTLAQYTSKTCSNCGFTITSADYDRVLEKLKKTATGWMTTINGKELKVEGQITYYNRYKRQNVVKDLSVELDRLSEESVNNDISSWTKGRSGEALSLLKKRFSHRPVQEKFVCLNCGFETHADEQAALNIARSWLFLRSQEYKKYQTNKTTGNTDKRAFVETWQSFYRKKLKEVWKPAV

SEQ ID NO: 32584 - protein, 978 aa, synthetic construct
  REGION 1..978: note = engineered CasX variant
QEIKRANKIRRRLVKDSNTKKAGKTGPMKTLLVRVMTPDLRERLENLRKKPENIPQPISNTSRANLNKLLTDYTEMKKAILHVYWEEFQKDPVGLMSRVAQPASKKIDQNKLKPEMDEKGNLTTAGFACSQCGQPLFVYKLEQVSEKGKAYTNYFGRCNVAEHEKLIKLSQLKPEKDSDEAVTYSLGKFGQRALDFYSIHVTKESTHPVKPLAQIAGNRYASGPVGKALSDACMGTIASFLSKYQDIIIEHQKVVKGNQKRLESLRELAGKENLEYPSVTLPPQPHTKEGVDAYNEVIARVRMWVNLNLWQKLKLSRDDAKPLLRLKGFPSFPLVERQANEVDWWDMVCNVKKLINEKKEDGKVFWQNLAGYKRQEALRPYLSSEEDRKKGKKFARYQLGDLLLHLEKKHGEDWGKVYDEAWERIDKKVEGLSKHIKLEEERRSEDAQSKAALTDWLRAKASFVIEGLKEADKDEFCRCELKLQKWYGDLRGKPFAIEAENSILDISGFSKQYNCAFIWQKDGVKKLNLYLIINYFKGGKLRFKKIKPEAFEANRFYTVINKKSGEIVPMEVNFNFDDPNLIILPLAFGKRQGREFIWNDLLSLETGSLKLANGRVIEKTLYNRRTRQDEPALFVALTFERREVLDSSNIKPMNLIGVDRGENIPAVIALTDPEGCPLSRFKDSLGNPTHILRIGESYKEKQRTIQAKKEVEQRRAGGYSRKYASKAKNLADDMVRNTARDLLYYAVTQDAMLIFENLSRGFGRQGKRTFMAERQYTRMEDWLTAKLAYEGLPSKTYLSKTLAQYTSKTCSNCGFTITSADYDRVLEKLKKTATGWMTTINGKELKVEGQITYYNRYKRQNVVKDLSVELDRLSEESVNNDISSWTKGRSGEALSLLKKRFSHRPVQEKFVCLNCGFETHADEQAALNIARSWLFLRSQEYKKYQTNKTTGNTDKRAFVETWQSFYRKKLKEVWKPAV

SEQ ID NO: 32585 - protein, 977 aa, synthetic construct
  REGION 1..977: note = engineered CasX variant
QEIKRANKIRRRLVKDSNTKKAGKTGPMKTLLVRVMTPDLRERLENLRKKPENIPQPISNTSRANLNKLLTDYTEMKKAILHVYWEEFQKDPVGLMSRVAQPASKKIDQNKLKPEMDEKGNLTTAGFACSQCGQPLFVYKLEQVSEKGKAYTNYFGRCNVAEHEKLILLSQLKPEKDSDEAVTYSLGKFGQRALDFYSIHVTKESTHPVKPLAQIAGNRYASPVGKALSDACMGTIASFLSKYQDIIIEHQKVVKGNQKRLESLRELAGKENLEYPSVTLPPQPHTKEGVDAYNEVIARVRMWVNLNLWQKLKLSRDDAKPLLRLKGFPSFPLVERQANEVDWWDMVCNVKKLINEKKEDGKVFWQNLAGYKRQEALRPYLSSEEDRKKGKKFARYQLGDLLLHLEKKHGEDWGKVYDEAWERIDKKVEGLSKHIKLEEERRSEDAQSKAALTDWLRAKASFVIEGLKEADKDEFCRCELKLQKWYGDLRGKPFAIEAENSILDISGFSKQYNCAFIWQKDGVKKLNLYLIINYFKGGKLRFKKIKPEAFEANRFYTVINKKSGEIVPMEVNFNFDDPNLIILPLAFGKRQGREFIWNDLLSLETGSLKLANGRVIEKTLYNRRTRQDEPALFVALTFERREVLDSSNIKPMNLIGVDRGENIPAVIALTDPEGCPLSRFKDSLGNPTHILRIGESYKEKQRTIQAKKEVEQRRAGGYSRKYASKAKNLADDMVRNTARDLLYYAVTQDAMLIFENLSRGFGRQGKRTFMAERQYTRMEDWLTAKLAYEGLPSKTYLSKTLAQYTSKTCSNCGFTITSADYDRVLEKLKKTATGWMTTINGKELKVEGQITYYNRYKRQNVVKDLSVELDRLSEESVNNDISSWTKGRSGEALSLLKKRFSHRPVQEKFVCLNCGFETHADEQAALNIARSWLFLRSQEYKKYQTNKTTGNTDKRAFVETWQSFYRKKLKEVWKPAV

SEQ ID NO: 32586 - protein, 978 aa, synthetic construct
  REGION 1..978: note = engineered CasX variant
QEIKRANKIRRRLVKDSNTKKAGKTGPMKTLLVRVMTPDLRERLENLRKKPENIPQPISNTSRANLNKLLTDYTEMKKAILHVYWEEFQKDPVGLMSRVAQPASKKIDQNKLKPEMDEKGNLTTAGFACSQCGQPLFVYKLEQVSEKGKAYTNYFGRCNVAEHEKLILLAQLKPEKDSDEAVTYSLGKFGQRALDFYSIHVTKESTHPVKPLAQIAGNRYASYPVGKALSDACMGTIASFLSKYQDIIIEHQKVVKGNQKRLESLRELAGKENLEYPSVTLPPQPHTKEGVDAYNEVIARVRMWVNLNLWQKLKLSRDDAKPLLRLKGFPSFPLVERQANEVDWWDMVCNVKKLINEKKEDGKVFWQNLAGYKRQEALRPYLSSEEDRKKGKKFARYQLGDLLLHLEKKHGEDWGKVYDEAWERIDKKVEGLSKHIKLEEERRSEDAQSKAALTDWLRAKASFVIEGLKEADKDEFCRCELKLQKWYGDLRGKPFAIEAENSILDISGFSKQYNCAFIWQKDGVKKLNLYLIINYFKGGKLRFKKIKPEAFEANRFYTVINKKSGEIVPMEVNFNFDDPNLIILPLAFGKRQGREFIWNDLLSLETGSLKLANGRVIEKTLYNRRTRQDEPALFVALTFERREVLDSSNIKPMNLIGVDRGENIPAVIALTDPEGCPLSRFKDSLGNPTHILRIGESYKEKQRTIQAKKEVEQRRAGGYSRKYASKAKNLADDMVRNTARDLLYYAVTQDAMLIFENLSRGFGRQGKRTFMAERQYTRMEDWLTAKLAYEGLPSKTYLSKTLAQYTSKTCSNCGFTITSADYDRVLEKLKKTATGWMTTINGKELKVEGQITYYNRYKRQNVVKDLSVELDRLSEESVNNDISSWTKGRSGEALSLLKKRFSHRPVQEKFVCLNCGFETHADEQAALNIARSWLFLRSQEYKKYQTNKTTGNTDKRAFVETWQSFYRKKLKEVWKPAV

SEQ ID NO: 32587 - protein, 978 aa, synthetic construct
  REGION 1..978: note = engineered CasX variant
QEIKRANKIRRRLVKDSNTKKAGKTGPMKTLLVRVMTPDLRERLENLRKKPENIPQPISNTSRANLNKLLTDYTEMKKAILHVYWEEFQKDPVGLMSRVAQPASKKIDQNKLKPEMDEKGNLTTAGFACSQCGQPLFVYKLEQVSEKGKAYTNYFGRCNVAEHEKLILLAQLKPEKDSDEAVTYSLGKFGQRALDFYSIHVTKESTHPVKPLAQIAGNRYASHPVGKALSDACMGTIASFLSKYQDIIIEHQKVVKGNQKRLESLRELAGKENLEYPSVTLPPQPHTKEGVDAYNEVIARVRMWVNLNLWQKLKLSRDDAKPLLRLKGFPSFPLVERQANEVDWWDMVCNVKKLINEKKEDGKVFWQNLAGYKRQEALRPYLSSEEDRKKGKKFARYQLGDLLLHLEKKHGEDWGKVYDEAWERIDKKVEGLSKHIKLEEERRSEDAQSKAALTDWLRAKASFVIEGLKEADKDEFCRCELKLQKWYGDLRGKPFAIEAENSILDISGFSKQYNCAFIWQKDGVKKLNLYLIINYFKGGKLRFKKIKPEAFEANRFYTVINKKSGEIVPMEVNFNFDDPNLIILPLAFGKRQGREFIWNDLLSLETGSLKLANGRVIEKTLYNRRTRQDEPALFVALTFERREVLDSSNIKPMNLIGVDRGENIPAVIALTDPEGCPLSRFKDSLGNPTHILRIGESYKEKQRTIQAKKEVEQRRAGGYSRKYASKAKNLADDMVRNTARDLLYYAVTQDAMLIFENLSRGFGRQGKRTFMAERQYTRMEDWLTAKLAYEGLPSKTYLSKTLAQYTSKTCSNCGFTITSADYDRVLEKLKKTATGWMTTINGKELKVEGQITYYNRYKRQNVVKDLSVELDRLSEESVNNDISSWTKGRSGEALSLLKKRFSHRPVQEKFVCLNCGFETHADEQAALNIARSWLFLRSQEYKKYQTNKTTGNTDKRAFVETWQSFYRKKLKEVWKPAV

SEQ ID NO: 32588 - protein, 978 aa, synthetic construct
  REGION 1..978: note = engineered CasX variant
QEIKRANKIRRRLVKDSNTKKAGKTGPMKTLLVRVMTPDLRERLENLRKKPENIPQPISNTSRANLNKLLTDYTEMKKAILHVYWEEFQKDPVGLMSRVAQPASKKIDQNKLKPEMDEKGNLTTAGFACSQCGQPLFVYKLEQVSEKGKAYTNYFGRCNVAEHEKLILLAQLKPEKDSDEAVTYSLGKFGQRALDFYSIHVTKESTHPVKPLAQIAGNRYASTPVGKALSDACMGTIASFLSKYQDIIIEHQKVVKGNQKRLESLRELAGKENLEYPSVTLPPQPHTKEGVDAYNEVIARVRMWVNLNLWQKLKLSRDDAKPLLRLKGFPSFPLVERQANEVDWWDMVCNVKKLINEKKEDGKVFWQNLAGYKRQEALRPYLSSEEDRKKGKKFARYQLGDLLLHLEKKHGEDWGKVYDEAWERIDKKVEGLSKHIKLEEERRSEDAQSKAALTDWLRAKASFVIEGLKEADKDEFCRCELKLQKWYGDLRGKPFAIEAENSILDISGFSKQYNCAFIWQKDGVKKLNLYLIINYFKGGKLRFKKIKPEAFEANRFYTVINKKSGEIVPMEVNFNFDDPNLIILPLAFGKRQGREFIWNDLLSLETGSLKLANGRVIEKTLYNRRTRQDEPALFVALTFERREVLDSSNIKPMNLIGVDRGENIPAVIALTDPEGCPLSRFKDSLGNPTHILRIGESYKEKQRTIQAKKEVEQRRAGGYSRKYASKAKNLADDMVRNTARDLLYYAVTQDAMLIFENLSRGFGRQGKRTFMAERQYTRMEDWLTAKLAYEGLPSKTYLSKTLAQYTSKTCSNCGFTITSADYDRVLEKLKKTATGWMTTINGKELKVEGQITYYNRYKRQNVVKDLSVELDRLSEESVNNDISSWTKGRSGEALSLLKKRFSHRPVQEKFVCLNCGFETHADEQAALNIARSWLFLRSQEYKKYQTNKTTGNTDKRAFVETWQSFYRKKLKEVWKPAV

SEQ ID NO: 32589 - protein, 978 aa, synthetic construct
  REGION 1..978: note = engineered CasX variant
QEIKRANKIRRRLVKDSNTKKAGKTGPMKTLLVRVMTPDLRERLENLRKKPENIPQPISNTSRANLNKLLTDYTEMKKAILHVYWEEFQKDPVGLMSRVAQPASKKIDQNKLKPEMDEKGNLTTAGFACSQCGQPLFVYKLEQVSEKGKAYTNYFGRCNVAEHEKLILLAQLKPEKDSDEAVTYSLGKFGQRALDFYSIHVTKESTHPVKPLAQIAGNRYASAPVGKALSDACMGTIASFLSKYQDIIIEHQKVVKGNQKRLESLRELAGKENLEYPSVTLPPQPHTKEGVDAYNEVIARVRMWVNLNLWQKLKLSRDDAKPLLRLKGFPSFPLVERQANEVDWWDMVCNVKKLINEKKEDGKVFWQNLAGYKRQEALRPYLSSEEDRKKGKKFARYQLGDLLLHLEKKHGEDWGKVYDEAWERIDKKVEGLSKHIKLEEERRSEDAQSKAALTDWLRAKASFVIEGLKEADKDEFCRCELKLQKWYGDLRGKPFAIEAENSILDISGFSKQYNCAFIWQKDGVKKLNLYLIINYFKGGKLRFKKIKPEAFEANRFYTVINKKSGEIVPMEVNFNFDDPNLIILPLAFGKRQGREFIWNDLLSLETGSLKLANGRVIEKTLYNRRTRQDEPALFVALTFERREVLDSSNIKPMNLIGVDRGENIPAVIALTDPEGCPLSRFKDSLGNPTHILRIGESYKEKQRTIQAKKEVEQRRAGGYSRKYASKAKNLADDMVRNTARDLLYYAVTQDAMLIFENLSRGFGRQGKRTFMAERQYTRMEDWLTAKLAYEGLPSKTYLSKTLAQYTSKTCSNCGFTITSADYDRVLEKLKKTATGWMTTINGKELKVEGQITYYNRYKRQNVVKDLSVELDRLSEESVNNDISSWTKGRSGEALSLLKKRFSHRPVQEKFVCLNCGFETHADEQAALNIARSWLFLRSQEYKKYQTNKTTGNTDKRAFVETWQSFYRKKLKEVWKPAV

SEQ ID NO: 32590 - protein, 978 aa, synthetic construct
  REGION 1..978: note = engineered CasX variant
QEIKRANKIRRRLVKDSNTKKAGKTGPMKTLLVRVMTPDLRERLENLRKKPENIPQPISNTSRANLNKLLTDYTEMKKAILHVYWEEFQKDPVGLMSRVAQPASKKIDQNKLKPEMDEKGNLTTAGFACSQCGQPLFVYKLEQVSEKGKAYTNYFGRCNVAEHEKLILLAQLKPEKDSDEAVTYSLGKFGQRALDFYSIHVTKESTHPVKPLAQIAGNRYASVPVGKALSDACMGTIASFLSKYQDIIIEHQKVVKGNQKRLESLRELAGKENLEYPSVTLPPQPHTKEGVDAYNEVIARVRMWVNLNLWQKLKLSRDDAKPLLRLKGFPSFPLVERQANEVDWWDMVCNVKKLINEKKEDGKVFWQNLAGYKRQEALRPYLSSEEDRKKGKKFARYQLGDLLLHLEKKHGEDWGKVYDEAWERIDKKVEGLSKHIKLEEERRSEDAQSKAALTDWLRAKASFVIEGLKEADKDEFCRCELKLQKWYGDLRGKPFAIEAENSILDISGFSKQYNCAFIWQKDGVKKLNLYLIINYFKGGKLRFKKIKPEAFEANRFYTVINKKSGEIVPMEVNFNFDDPNLIILPLAFGKRQGREFIWNDLLSLETGSLKLANGRVIEKTLYNRRTRQDEPALFVALTFERREVLDSSNIKPMNLIGVDRGENIPAVIALTDPEGCPLSRFKDSLGNPTHILRIGESYKEKQRTIQAKKEVEQRRAGGYSRKYASKAKNLADDMVRNTARDLLYYAVTQDAMLIFENLSRGFGRQGKRTFMAERQYTRMEDWLTAKLAYEGLPSKTYLSKTLAQYTSKTCSNCGFTITSADYDRVLEKLKKTATGWMTTINGKELKVEGQITYYNRYKRQNVVKDLSVELDRLSEESVNNDISSWTKGRSGEALSLLKKRFSHRPVQEKFVCLNCGFETHADEQAALNIARSWLFLRSQEYKKYQTNKTTGNTDKRAFVETWQSFYRKKLKEVWKPAV

SEQ ID NO: 32591 - protein, 978 aa, synthetic construct
  REGION 1..978: note = engineered CasX variant
QEIKRANKIRRRLVKDSNTKKAGKTGPMKTLLVRVMTPDLRERLENLRKKPENIPQPISNTSRANLNKLLTDYTEMKKAILHVYWEEFQKDPVGLMSRVAQPASKKIDQNKLKPEMDEKGNLTTAGFACSQCGQPLFVYKLEQVSEKGKAYTNYFGRCNVAEHEKLILLAQLKPEKDSDEAVTYSLGKFGQRALDFYSIHVTKESTHPVKPLAQIAGNRYASYPVGKALSDACMGTIASFLSKYQDIIIEHQKVVKGNQKRLESLRELAGKENLEYPSVTLPPQPHTSEGVDAYNEVIARVRMWVNLNLWQKLKLSRDDAKPLLRLKGFPSFPLVERQANEVDWWDMVCNVKKLINEKKEDGKVFWQNLAGYKRQEALRPYLSSEEDRKKGKKFARYQLGDLLLHLEKKHGEDWGKVYDEAWERIDKKVEGLSKHIKLEEERRSEDAQSKAALTDWLRAKASFVIEGLKEADKDEFCRCELKLQKWYGDLRGKPFAIEAENSILDISGFSKQYNCAFIWQKDGVKKLNLYLIINYFKGGKLRFKKIKPEAFEANRFYTVINKKSGEIVPMEVNFNFDDPNLIILPLAFGKRQGREFIWNDLLSLETGSLKLANGRVIEKTLYNRRTRQDEPALFVALTFERREVLDSSNIKPMNLIGVDRGENIPAVIALTDPEGCPLSRFKDSLGNPTHILRIGESYKEKQRTIQAKKEVEQRRAGGYSRKYASKAKNLADDMVRNTARDLLYYAVTQDAMLIFENLSRGFGRQGKRTFMAERQYTRMEDWLTAKLAYEGLPSKTYLSKTLAQYTSKTCSNCGFTITSADYDRVLEKLKKTATGWMTTINGKELKVEGQITYYNRYKRQNVVKDLSVELDRLSEESVNNDISSWTKGRSGEALSLLKKRFSHRPVQEKFVCLNCGFETHADEQAALNIARSWLFLRSQEYKKYQTNKTTGNTDKRAFVETWQSFYRKKLKEVWKPAV

SEQ ID NO: 32592 - protein, 978 aa, synthetic construct
  REGION 1..978: note = engineered CasX variant
QEIKRANKIRRRLVKDSNTKKAGKTGPMKTLLVRVMTPDLRERLENLRKKPENIPQPISNTSRANLNKLLTDYTEMKKAILHVYWEEFQKDPVGLMSRVAQPASKKIDQNKLKPEMDEKGNLTTAGFACSQCGQPLFVYKLEQVSEKGKAYTNYFGRCNVAEHEKLILLAQLKPEKDSDEAVTYSLGKFGQRALDFYSIHVTKESTHPVKPLAQIAGNRYASHPVGKALSDACMGTIASFLSKYQDIIIEHQKVVKGNQKRLESLRELAGKENLEYPSVTLPPQPHTSEGVDAYNEVIARVRMWVNLNLWQKLKLSRDDAKPLLRLKGFPSFPLVERQANEVDWWDMVCNVKKLINEKKEDGKVFWQNLAGYKRQEALRPYLSSEEDRKKGKKFARYQLGDLLLHLEKKHGEDWGKVYDEAWERIDKKVEGLSKHIKLEEERRSEDAQSKAALTDWLRAKASFVIEGLKEADKDEFCRCELKLQKWYGDLRGKPFAIEAENSILDISGFSKQYNCAFIWQKDGVKKLNLYLIINYFKGGKLRFKKIKPEAFEANRFYTVINKKSGEIVPMEVNFNFDDPNLIILPLAFGKRQGREFIWNDLLSLETGSLKLANGRVIEKTLYNRRTRQDEPALFVALTFERREVLDSSNIKPMNLIGVDRGENIPAVIALTDPEGCPLSRFKDSLGNPTHILRIGESYKEKQRTIQAKKEVEQRRAGGYSRKYASKAKNLADDMVRNTARDLLYYAVTQDAMLIFENLSRGFGRQGKRTFMAERQYTRMEDWLTAKLAYEGLPSKTYLSKTLAQYTSKTCSNCGFTITSADYDRVLEKLKKTATGWMTTINGKELKVEGQITYYNRYKRQNVVKDLSVELDRLSEESVNNDISSWTKGRSGEALSLLKKRFSHRPVQEKFVCLNCGFETHADEQAALNIARSWLFLRSQEYKKYQTNKTTGNTDKRAFVETWQSFYRKKLKEVWKPAV

SEQ ID NO: 32593 - protein, 978 aa, synthetic construct
  REGION 1..978: note = engineered CasX variant
QEIKRANKIRRRLVKDSNTKKAGKTGPMKTLLVRVMTPDLRERLENLRKKPENIPQPISNTSRANLNKLLTDYTEMKKAILHVYWEEFQKDPVGLMSRVAQPASKKIDQNKLKPEMDEKGNLTTAGFACSQCGQPLFVYKLEQVSEKGKAYTNYFGRCNVAEHEKLILLAQLKPEKDSDEAVTYSLGKFGQRALDFYSIHVTKESTHPVKPLAQIAGNRYASSPVGKALSDACMGTIASFLSKYQDIIIEHQKVVKGNQKRLESLRELAGKENLEYPSVTLPPQPHTSEGVDAYNEVIARVRMWVNLNLWQKLKLSRDDAKPLLRLKGFPSFPLVERQANEVDWWDMVCNVKKLINEKKEDGKVFWQNLAGYKRQEALRPYLSSEEDRKKGKKFARYQLGDLLLHLEKKHGEDWGKVYDEAWERIDKKVEGLSKHIKLEEERRSEDAQSKAALTDWLRAKASFVIEGLKEADKDEFCRCELKLQKWYGDLRGKPFAIEAENSILDISGFSKQYNCAFIWQKDGVKKLNLYLIINYFKGGKLRFKKIKPEAFEANRFYTVINKKSGEIVPMEVNFNFDDPNLIILPLAFGKRQGREFIWNDLLSLETGSLKLANGRVIEKTLYNRRTRQDEPALFVALTFERREVLDSSNIKPMNLIGVDRGENIPAVIALTDPEGCPLSRFKDSLGNPTHILRIGESYKEKQRTIQAKKEVEQRRAGGYSRKYASKAKNLADDMVRNTARDLLYYAVTQDAMLIFENLSRGFGRQGKRTFMAERQYTRMEDWLTAKLAYEGLPSKTYLSKTLAQYTSKTCSNCGFTITSADYDRVLEKLKKTATGWMTTINGKELKVEGQITYYNRYKRQNVVKDLSVELDRLSEESVNNDISSWTKGRSGEALSLLKKRFSHRPVQEKFVCLNCGFETHADEQAALNIARSWLFLRSQEYKKYQTNKTTGNTDKRAFVETWQSFYRKKLKEVWKPAV

SEQ ID NO: 32594 - protein, 978 aa, synthetic construct
  REGION 1..978: note = engineered CasX variant
QEIKRANKIRRRLVKDSNTKKAGKTGPMKTLLVRVMTPDLRERLENLRKKPENIPQPISNTSRANLNKLLTDYTEMKKAILHVYWEEFQKDPVGLMSRVAQPASKKIDQNKLKPEMDEKGNLTTAGFACSQCGQPLFVYKLEQVSEKGKAYTNYFGRCNVAEHEKLILLAQLKPEKDSDEAVTYSLGKFGQRALDFYSIHVTKESTHPVKPLAQIAGNRYASTPVGKALSDACMGTIASFLSKYQDIIIEHQKVVKGNQKRLESLRELAGKENLEYPSVTLPPQPHTSEGVDAYNEVIARVRMWVNLNLWQKLKLSRDDAKPLLRLKGFPSFPLVERQANEVDWWDMVCNVKKLINEKKEDGKVFWQNLAGYKRQEALRPYLSSEEDRKKGKKFARYQLGDLLLHLEKKHGEDWGKVYDEAWERIDKKVEGLSKHIKLEEERRSEDAQSKAALTDWLRAKASFVIEGLKEADKDEFCRCELKLQKWYGDLRGKPFAIEAENSILDISGFSKQYNCAFIWQKDGVKKLNLYLIINYFKGGKLRFKKIKPEAFEANRFYTVINKKSGEIVPMEVNFNFDDPNLIILPLAFGKRQGREFIWNDLLSLETGSLKLANGRVIEKTLYNRRTRQDEPALFVALTFERREVLDSSNIKPMNLIGVDRGENIPAVIALTDPEGCPLSRFKDSLGNPTHILRIGESYKEKQRTIQAKKEVEQRRAGGYSRKYASKAKNLADDMVRNTARDLLYYAVTQDAMLIFENLSRGFGRQGKRTFMAERQYTRMEDWLTAKLAYEGLPSKTYLSKTLAQYTSKTCSNCGFTITSADYDRVLEKLKKTATGWMTTINGKELKVEGQITYYNRYKRQNVVKDLSVELDRLSEESVNNDISSWTKGRSGEALSLLKKRFSHRPVQEKFVCLNCGFETHADEQAALNIARSWLFLRSQEYKKYQTNKTTGNTDKRAFVETWQSFYRKKLKEVWKPAV

SEQ ID NO: 32595 - protein, 978 aa, synthetic construct
  REGION 1..978: note = engineered CasX variant
QEIKRANKIRRRLVKDSNTKKAGKTGPMKTLLVRVMTPDLRERLENLRKKPENIPQPISNTSRANLNKLLTDYTEMKKAILHVYWEEFQKDPVGLMSRVAQPASKKIDQNKLKPEMDEKGNLTTAGFACSQCGQPLFVYKLEQVSEKGKAYTNYFGRCNVAEHEKLILLAQLKPEKDSDEAVTYSLGKFGQRALDFYSIHVTKESTHPVKPLAQIAGNRYASAPVGKALSDACMGTIASFLSKYQDIIIEHQKVVKGNQKRLESLRELAGKENLEYPSVTLPPQPHTSEGVDAYNEVIARVRMWVNLNLWQKLKLSRDDAKPLLRLKGFPSFPLVERQANEVDWWDMVCNVKKLINEKKEDGKVFWQNLAGYKRQEALRPYLSSEEDRKKGKKFARYQLGDLLLHLEKKHGEDWGKVYDEAWERIDKKVEGLSKHIKLEEERRSEDAQSKAALTDWLRAKASFVIEGLKEADKDEFCRCELKLQKWYGDLRGKPFAIEAENSILDISGFSKQYNCAFIWQKDGVKKLNLYLIINYFKGGKLRFKKIKPEAFEANRFYTVINKKSGEIVPMEVNFNFDDPNLIILPLAFGKRQGREFIWNDLLSLETGSLKLANGRVIEKTLYNRRTRQDEPALFVALTFERREVLDSSNIKPMNLIGVDRGENIPAVIALTDPEGCPLSRFKDSLGNPTHILRIGESYKEKQRTIQAKKEVEQRRAGGYSRKYASKAKNLADDMVRNTARDLLYYAVTQDAMLIFENLSRGFGRQGKRTFMAERQYTRMEDWLTAKLAYEGLPSKTYLSKTLAQYTSKTCSNCGFTITSADYDRVLEKLKKTATGWMTTINGKELKVEGQITYYNRYKRQNVVKDLSVELDRLSEESVNNDISSWTKGRSGEALSLLKKRFSHRPVQEKFVCLNCGFETHADEQAALNIARSWLFLRSQEYKKYQTNKTTGNTDKRAFVETWQSFYRKKLKEVWKPAV

SEQ ID NO: 32596 - protein, 978 aa, synthetic construct
  REGION 1..978: note = engineered CasX variant
QEIKRANKIRRRLVKDSNTKKAGKTGPMKTLLVRVMTPDLRERLENLRKKPENIPQPISNTSRANLNKLLTDYTEMKKAILHVYWEEFQKDPVGLMSRVAQPASKKIDQNKLKPEMDEKGNLTTAGFACSQCGQPLFVYKLEQVSEKGKAYTNYFGRCNVAEHEKLILLAQLKPEKDSDEAVTYSLGKFGQRALDFYSIHVTKESTHPVKPLAQIAGNRYASVPVGKALSDACMGTIASFLSKYQDIIIEHQKVVKGNQKRLESLRELAGKENLEYPSVTLPPQPHTSEGVDAYNEVIARVRMWVNLNLWQKLKLSRDDAKPLLRLKGFPSFPLVERQANEVDWWDMVCNVKKLINEKKEDGKVFWQNLAGYKRQEALRPYLSSEEDRKKGKKFARYQLGDLLLHLEKKHGEDWGKVYDEAWERIDKKVEGLSKHIKLEEERRSEDAQSKAALTDWLRAKASFVIEGLKEADKDEFCRCELKLQKWYGDLRGKPFAIEAENSILDISGFSKQYNCAFIWQKDGVKKLNLYLIINYFKGGKLRFKKIKPEAFEANRFYTVINKKSGEIVPMEVNFNFDDPNLIILPLAFGKRQGREFIWNDLLSLETGSLKLANGRVIEKTLYNRRTRQDEPALFVALTFERREVLDSSNIKPMNLIGVDRGENIPAVIALTDPEGCPLSRFKDSLGNPTHILRIGESYKEKQRTIQAKKEVEQRRAGGYSRKYASKAKNLADDMVRNTARDLLYYAVTQDAMLIFENLSRGFGRQGKRTFMAERQYTRMEDWLTAKLAYEGLPSKTYLSKTLAQYTSKTCSNCGFTITSADYDRVLEKLKKTATGWMTTINGKELKVEGQITYYNRYKRQNVVKDLSVELDRLSEESVNNDISSWTKGRSGEALSLLKKRFSHRPVQEKFVCLNCGFETHADEQAALNIARSWLFLRSQEYKKYQTNKTTGNTDKRAFVETWQSFYRKKLKEVWKPAV

SEQ ID NO: 32597 - protein, 978 aa, synthetic construct
  REGION 1..978: note = engineered CasX variant
QEIKRANKIRRRLVKDSNTKKAGKTGPMKTLLVRVMTPDLRERLENLRKKPENIPQPISNTSRANLNKLLTDYTEMKKAILHVYWEEFQKDPVGLMSRVAQPASKKIDQNKLKPEMDEKGNLTTAGFACSQCGQPLFVYKLEQVSEKGKAYTNYFGRCNVAEHEKLIKLAQLKPEKDSDEAVTYSLGKFGQRALDFYSIHVTKESTHPVKPLAQIAGNRYASGPVGKALSDACMGTIASFLSKYQDIIIEHQKVVKGNQKRLESLRELAGKENLEYPSVTLPPQPHTSEGVDAYNEVIARVRMWVNLNLWQKLKLSRDDAKPLLRLKGFPSFPLVERQANEVDWWDMVCNVKKLINEKKEDGKVFWQNLAGYKRQEALRPYLSSEEDRKKGKKFARYQLGDLLLHLEKKHGEDWGKVYDEAWERIDKKVEGLSKHIKLEEERRSEDAQSKAALTDWLRAKASFVIEGLKEADKDEFCRCELKLQKWYGDLRGKPFAIEAENSILDISGFSKQYNCAFIWQKDGVKKLNLYLIINYFKGGKLRFKKIKPEAFEANRFYTVINKKSGEIVPMEVNFNFDDPNLIILPLAFGKRQGREFIWNDLLSLETGSLKLANGRVIEKTLYNRRTRQDEPALFVALTFERREVLDSSNIKPMNLIGVDRGENIPAVIALTDPEGCPLSRFKDSLGNPTHILRIGESYKEKQRTIQAKKEVEQRRAGGYSRKYASKAKNLADDMVRNTARDLLYYAVTQDAMLIFENLSRGFGRQGKRTFMAERQYTRMEDWLTAKLAYEGLPSKTYLSKTLAQYTSKTCSNCGFTITSADYDRVLEKLKKTATGWMTTINGKELKVEGQITYYNRYKRQNVVKDLSVELDRLSEESVNNDISSWTKGRSGEALSLLKKRFSHRPVQEKFVCLNCGFETHADEQAALNIARSWLFLRSQEYKKYQTNKTTGNTDKRAFVETWQSFYRKKLKEVWKPAV

SEQ ID NO: 32598 - protein, 977 aa, synthetic construct
  REGION 1..977: note = engineered CasX variant
QEIKRANKIRRRLVKDSNTKKAGKTGPMKTLLVRVMTPDLRERLENLRKKPENIPQPISNTSRANLNKLLTDYTEMKKAILHVYWEEFQKDPVGLMSRVAQPASKKIDQNKLKPEMDEKGNLTTAGFACSQCGQPLFVYKLEQVSEKGKAYTNYFGRCNVAEHEKLILLAQLKPEKDSDEAVTYSLGKFGQRALDFYSIHVTKESTHPVKPLAQIAGNRYASPVGKALSDACMGTIASFLSKYQDIIIEHQKVVKGNQKRLESLRELAGKENLEYPSVTLPPQPHTSEGVDAYNEVIARVRMWVNLNLWQKLKLSRDDAKPLLRLKGFPSFPLVERQANEVDWWDMVCNVKKLINEKKEDGKVFWQNLAGYKRQEALRPYLSSEEDRKKGKKFARYQLGDLLLHLEKKHGEDWGKVYDEAWERIDKKVEGLSKHIKLEEERRSEDAQSKAALTDWLRAKASFVIEGLKEADKDEFCRCELKLQKWYGDLRGKPFAIEAENSILDISGFSKQYNCAFIWQKDGVKKLNLYLIINYFKGGKLRFKKIKPEAFEANRFYTVINKKSGEIVPMEVNFNFDDPNLIILPLAFGKRQGREFIWNDLLSLETGSLKLANGRVIEKTLYNRRTRQDEPALFVALTFERREVLDSSNIKPMNLIGVDRGENIPAVIALTDPEGCPLSRFKDSLGNPTHILRIGESYKEKQRTIQAKKEVEQRRAGGYSRKYASKAKNLADDMVRNTARDLLYYAVTQDAMLIFENLSRGFGRQGKRTFMAERQYTRMEDWLTAKLAYEGLPSKTYLSKTLAQYTSKTCSNCGFTITSADYDRVLEKLKKTATGWMTTINGKELKVEGQITYYNRYKRQNVVKDLSVELDRLSEESVNNDISSWTKGRSGEALSLLKKRFSHRPVQEKFVCLNCGFETHADEQAALNIARSWLFLRSQEYKKYQTNKTTGNTDKRAFVETWQSFYRKKLKEVWKPAV

SEQ ID NO: 32599 - protein, 978 aa, synthetic construct
  REGION 1..978: note = engineered CasX variant
QEIKRANKIRRRLVKDSNTKKAGKTGPMKTLLVRVMTPDLRERLENLRKKPENIPQPISNTSRANLNKLLTDYTEMKKAILHVYWEEFQKDPVGLMSRVAQPASKKIDQNKLKPEMDEKGNLTTAGFACSQCGQPLFVYKLEQVSEKGKAYTNYFGRCNVAEHEKLILLAQLKPEKDSDEAVTYSLGKFGQRALDFYSIHVTKESTHPVKPLAQIAGNRYASYPVGKALSDACMGTIASFLSKYQDIIIEHQKVVKGNQKRLESLRELAGKENLEYPSVTLPPQPHTKEGLDAYNEVIARVRMWVNLNLWQKLKLSRDDAKPLLRLKGFPSFPLVERQANEVDWWDMVCNVKKLINEKKEDGKVFWQNLAGYKRQEALRPYLSSEEDRKKGKKFARYQLGDLLLHLEKKHGEDWGKVYDEAWERIDKKVEGLSKHIKLEEERRSEDAQSKAALTDWLRAKASFVIEGLKEADKDEFCRCELKLQKWYGDLRGKPFAIEAENSILDISGFSKQYNCAFIWQKDGVKKLNLYLIINYFKGGKLRFKKIKPEAFEANRFYTVINKKSGEIVPMEVNFNFDDPNLIILPLAFGKRQGREFIWNDLLSLETGSLKLANGRVIEKTLYNRRTRQDEPALFVALTFERREVLDSSNIKPMNLIGVDRGENIPAVIALTDPEGCPLSRFKDSLGNPTHILRIGESYKEKQRTIQAKKEVEQRRAGGYSRKYASKAKNLADDMVRNTARDLLYYAVTQDAMLIFENLSRGFGRQGKRTFMAERQYTRMEDWLTAKLAYEGLPSKTYLSKTLAQYTSKTCSNCGFTITSADYDRVLEKLKKTATGWMTTINGKELKVEGQITYYNRYKRQNVVKDLSVELDRLSEESVNNDISSWTKGRSGEALSLLKKRFSHRPVQEKFVCLNCGFETHADEQAALNIARSWLFLRSQEYKKYQTNKTTGNTDKRAFVETWQSFYRKKLKEVWKPAV

SEQ ID NO: 32600 - protein, 978 aa, synthetic construct
  REGION 1..978: note = engineered CasX variant
QEIKRANKIRRRLVKDSNTKKAGKTGPMKTLLVRVMTPDLRERLENLRKKPENIPQPISNTSRANLNKLLTDYTEMKKAILHVYWEEFQKDPVGLMSRVAQPASKKIDQNKLKPEMDEKGNLTTAGFACSQCGQPLFVYKLEQVSEKGKAYTNYFGRCNVAEHEKLILLAQLKPEKDSDEAVTYSLGKFGQRALDFYSIHVTKESTHPVKPLAQIAGNRYASHPVGKALSDACMGTIASFLSKYQDIIIEHQKVVKGNQKRLESLRELAGKENLEYPSVTLPPQPHTKEGLDAYNEVIARVRMWVNLNLWQKLKLSRDDAKPLLRLKGFPSFPLVERQANEVDWWDMVCNVKKLINEKKEDGKVFWQNLAGYKRQEALRPYLSSEEDRKKGKKFARYQLGDLLLHLEKKHGEDWGKVYDEAWERIDKKVEGLSKHIKLEEERRSEDAQSKAALTDWLRAKASFVIEGLKEADKDEFCRCELKLQKWYGDLRGKPFAIEAENSILDISGFSKQYNCAFIWQKDGVKKLNLYLIINYFKGGKLRFKKIKPEAFEANRFYTVINKKSGEIVPMEVNFNFDDPNLIILPLAFGKRQGREFIWNDLLSLETGSLKLANGRVIEKTLYNRRTRQDEPALFVALTFERREVLDSSNIKPMNLIGVDRGENIPAVIALTDPEGCPLSRFKDSLGNPTHILRIGESYKEKQRTIQAKKEVEQRRAGGYSRKYASKAKNLADDMVRNTARDLLYYAVTQDAMLIFENLSRGFGRQGKRTFMAERQYTRMEDWLTAKLAYEGLPSKTYLSKTLAQYTSKTCSNCGFTITSADYDRVLEKLKKTATGWMTTINGKELKVEGQITYYNRYKRQNVVKDLSVELDRLSEESVNNDISSWTKGRSGEALSLLKKRFSHRPVQEKFVCLNCGFETHADEQAALNIARSWLFLRSQEYKKYQTNKTTGNTDKRAFVETWQSFYRKKLKEVWKPAV

SEQ ID NO: 32601 - protein, 978 aa, synthetic construct
  REGION 1..978: note = engineered CasX variant
QEIKRANKIRRRLVKDSNTKKAGKTGPMKTLLVRVMTPDLRERLENLRKKPENIPQPISNTSRANLNKLLTDYTEMKKAILHVYWEEFQKDPVGLMSRVAQPASKKIDQNKLKPEMDEKGNLTTAGFACSQCGQPLFVYKLEQVSEKGKAYTNYFGRCNVAEHEKLILLAQLKPEKDSDEAVTYSLGKFGQRALDFYSIHVTKESTHPVKPLAQIAGNRYASSPVGKALSDACMGTIASFLSKYQDIIIEHQKVVKGNQKRLESLRELAGKENLEYPSVTLPPQPHTKEGLDAYNEVIARVRMWVNLNLWQKLKLSRDDAKPLLRLKGFPSFPLVERQANEVDWWDMVCNVKKLINEKKEDGKVFWQNLAGYKRQEALRPYLSSEEDRKKGKKFARYQLGDLLLHLEKKHGEDWGKVYDEAWERIDKKVEGLSKHIKLEEERRSEDAQSKAALTDWLRAKASFVIEGLKEADKDEFCRCELKLQKWYGDLRGKPFAIEAENSILDISGFSKQYNCAFIWQKDGVKKLNLYLIINYFKGGKLRFKKIKPEAFEANRFYTVINKKSGEIVPMEVNFNFDDPNLIILPLAFGKRQGREFIWNDLLSLETGSLKLANGRVIEKTLYNRRTRQDEPALFVALTFERREVLDSSNIKPMNLIGVDRGENIPAVIALTDPEGCPLSRFKDSLGNPTHILRIGESYKEKQRTIQAKKEVEQRRAGGYSRKYASKAKNLADDMVRNTARDLLYYAVTQDAMLIFENLSRGFGRQGKRTFMAERQYTRMEDWLTAKLAYEGLPSKTYLSKTLAQYTSKTCSNCGFTITSADYDRVLEKLKKTATGWMTTINGKELKVEGQITYYNRYKRQNVVKDLSVELDRLSEESVNNDISSWTKGRSGEALSLLKKRFSHRPVQEKFVCLNCGFETHADEQAALNIARSWLFLRSQEYKKYQTNKTTGNTDKRAFVETWQSFYRKKLKEVWKPAV

SEQ ID NO: 32602 - protein, 978 aa, synthetic construct
  REGION 1..978: note = engineered CasX variant
QEIKRANKIRRRLVKDSNTKKAGKTGPMKTLLVRVMTPDLRERLENLRKKPENIPQPISNTSRANLNKLLTDYTEMKKAILHVYWEEFQKDPVGLMSRVAQPASKKIDQNKLKPEMDEKGNLTTAGFACSQCGQPLFVYKLEQVSEKGKAYTNYFGRCNVAEHEKLILLAQLKPEKDSDEAVTYSLGKFGQRALDFYSIHVTKESTHPVKPLAQIAGNRYASTPVGKALSDACMGTIASFLSKYQDIIIEHQKVVKGNQKRLESLRELAGKENLEYPSVTLPPQPHTKEGLDAYNEVIARVRMWVNLNLWQKLKLSRDDAKPLLRLKGFPSFPLVERQANEVDWWDMVCNVKKLINEKKEDGKVFWQNLAGYKRQEALRPYLSSEEDRKKGKKFARYQLGDLLLHLEKKHGEDWGKVYDEAWERIDKKVEGLSKHIKLEEERRSEDAQSKAALTDWLRAKASFVIEGLKEADKDEFCRCELKLQKWYGDLRGKPFAIEAENSILDISGFSKQYNCAFIWQKDGVKKLNLYLIINYFKGGKLRFKKIKPEAFEANRFYTVINKKSGEIVPMEVNFNFDDPNLIILPLAFGKRQGREFIWNDLLSLETGSLKLANGRVIEKTLYNRRTRQDEPALFVALTFERREVLDSSNIKPMNLIGVDRGENIPAVIALTDPEGCPLSRFKDSLGNPTHILRIGESYKEKQRTIQAKKEVEQRRAGGYSRKYASKAKNLADDMVRNTARDLLYYAVTQDAMLIFENLSRGFGRQGKRTFMAERQYTRMEDWLTAKLAYEGLPSKTYLSKTLAQYTSKTCSNCGFTITSADYDRVLEKLKKTATGWMTTINGKELKVEGQITYYNRYKRQNVVKDLSVELDRLSEESVNNDISSWTKGRSGEALSLLKKRFSHRPVQEKFVCLNCGFETHADEQAALNIARSWLFLRSQEYKKYQTNKTTGNTDKRAFVETWQSFYRKKLKEVWKPAV

SEQ ID NO: 32603 - protein, 978 aa, synthetic construct
  REGION 1..978: note = engineered CasX variant
QEIKRANKIRRRLVKDSNTKKAGKTGPMKTLLVRVMTPDLRERLENLRKKPENIPQPISNTSRANLNKLLTDYTEMKKAILHVYWEEFQKDPVGLMSRVAQPASKKIDQNKLKPEMDEKGNLTTAGFACSQCGQPLFVYKLEQVSEKGKAYTNYFGRCNVAEHEKLILLAQLKPEKDSDEAVTYSLGKFGQRALDFYSIHVTKESTHPVKPLAQIAGNRYASAPVGKALSDACMGTIASFLSKYQDIIIEHQKVVKGNQKRLESLRELAGKENLEYPSVTLPPQPHTKEGLDAYNEVIARVRMWVNLNLWQKLKLSRDDAKPLLRLKGFPSFPLVERQANEVDWWDMVCNVKKLINEKKEDGKVFWQNLAGYKRQEALRPYLSSEEDRKKGKKFARYQLGDLLLHLEKKHGEDWGKVYDEAWERIDKKVEGLSKHIKLEEERRSEDAQSKAALTDWLRAKASFVIEGLKEADKDEFCRCELKLQKWYGDLRGKPFAIEAENSILDISGFSKQYNCAFIWQKDGVKKLNLYLIINYFKGGKLRFKKIKPEAFEANRFYTVINKKSGEIVPMEVNFNFDDPNLIILPLAFGKRQGREFIWNDLLSLETGSLKLANGRVIEKTLYNRRTRQDEPALFVALTFERREVLDSSNIKPMNLIGVDRGENIPAVIALTDPEGCPLSRFKDSLGNPTHILRIGESYKEKQRTIQAKKEVEQRRAGGYSRKYASKAKNLADDMVRNTARDLLYYAVTQDAMLIFENLSRGFGRQGKRTFMAERQYTRMEDWLTAKLAYEGLPSKTYLSKTLAQYTSKTCSNCGFTITSADYDRVLEKLKKTATGWMTTINGKELKVEGQITYYNRYKRQNVVKDLSVELDRLSEESVNNDISSWTKGRSGEALSLLKKRFSHRPVQEKFVCLNCGFETHADEQAALNIARSWLFLRSQEYKKYQTNKTTGNTDKRAFVETWQSFYRKKLKEVWKPAV

SEQ ID NO: 32604 - protein, 978 aa, synthetic construct
  REGION 1..978: note = engineered CasX variant
QEIKRANKIRRRLVKDSNTKKAGKTGPMKTLLVRVMTPDLRERLENLRKKPENIPQPISNTSRANLNKLLTDYTEMKKAILHVYWEEFQKDPVGLMSRVAQPASKKIDQNKLKPEMDEKGNLTTAGFACSQCGQPLFVYKLEQVSEKGKAYTNYFGRCNVAEHEKLILLAQLKPEKDSDEAVTYSLGKFGQRALDFYSIHVTKESTHPVKPLAQIAGNRYASVPVGKALSDACMGTIASFLSKYQDIIIEHQKVVKGNQKRLESLRELAGKENLEYPSVTLPPQPHTKEGLDAYNEVIARVRMWVNLNLWQKLKLSRDDAKPLLRLKGFPSFPLVERQANEVDWWDMVCNVKKLINEKKEDGKVFWQNLAGYKRQEALRPYLSSEEDRKKGKKFARYQLGDLLLHLEKKHGEDWGKVYDEAWERIDKKVEGLSKHIKLEEERRSEDAQSKAALTDWLRAKASFVIEGLKEADKDEFCRCELKLQKWYGDLRGKPFAIEAENSILDISGFSKQYNCAFIWQKDGVKKLNLYLIINYFKGGKLRFKKIKPEAFEANRFYTVINKKSGEIVPMEVNFNFDDPNLIILPLAFGKRQGREFIWNDLLSLETGSLKLANGRVIEKTLYNRRTRQDEPALFVALTFERREVLDSSNIKPMNLIGVDRGENIPAVIALTDPEGCPLSRFKDSLGNPTHILRIGESYKEKQRTIQAKKEVEQRRAGGYSRKYASKAKNLADDMVRNTARDLLYYAVTQDAMLIFENLSRGFGRQGKRTFMAERQYTRMEDWLTAKLAYEGLPSKTYLSKTLAQYTSKTCSNCGFTITSADYDRVLEKLKKTATGWMTTINGKELKVEGQITYYNRYKRQNVVKDLSVELDRLSEESVNNDISSWTKGRSGEALSLLKKRFSHRPVQEKFVCLNCGFETHADEQAALNIARSWLFLRSQEYKKYQTNKTTGNTDKRAFVETWQSFYRKKLKEVWKPAV

SEQ ID NO: 32605 - protein, 978 aa, synthetic construct
  REGION 1..978: note = engineered CasX variant
QEIKRANKIRRRLVKDSNTKKAGKTGPMKTLLVRVMTPDLRERLENLRKKPENIPQPISNTSRANLNKLLTDYTEMKKAILHVYWEEFQKDPVGLMSRVAQPASKKIDQNKLKPEMDEKGNLTTAGFACSQCGQPLFVYKLEQVSEKGKAYTNYFGRCNVAEHEKLIKLAQLKPEKDSDEAVTYSLGKFGQRALDFYSIHVTKESTHPVKPLAQIAGNRYASGPVGKALSDACMGTIASFLSKYQDIIIEHQKVVKGNQKRLESLRELAGKENLEYPSVTLPPQPHTKEGLDAYNEVIARVRMWVNLNLWQKLKLSRDDAKPLLRLKGFPSFPLVERQANEVDWWDMVCNVKKLINEKKEDGKVFWQNLAGYKRQEALRPYLSSEEDRKKGKKFARYQLGDLLLHLEKKHGEDWGKVYDEAWERIDKKVEGLSKHIKLEEERRSEDAQSKAALTDWLRAKASFVIEGLKEADKDEFCRCELKLQKWYGDLRGKPFAIEAENSILDISGFSKQYNCAFIWQKDGVKKLNLYLIINYFKGGKLRFKKIKPEAFEANRFYTVINKKSGEIVPMEVNFNFDDPNLIILPLAFGKRQGREFIWNDLLSLETGSLKLANGRVIEKTLYNRRTRQDEPALFVALTFERREVLDSSNIKPMNLIGVDRGENIPAVIALTDPEGCPLSRFKDSLGNPTHILRIGESYKEKQRTIQAKKEVEQRRAGGYSRKYASKAKNLADDMVRNTARDLLYYAVTQDAMLIFENLSRGFGRQGKRTFMAERQYTRMEDWLTAKLAYEGLPSKTYLSKTLAQYTSKTCSNCGFTITSADYDRVLEKLKKTATGWMTTINGKELKVEGQITYYNRYKRQNVVKDLSVELDRLSEESVNNDISSWTKGRSGEALSLLKKRFSHRPVQEKFVCLNCGFETHADEQAALNIARSWLFLRSQEYKKYQTNKTTGNTDKRAFVETWQSFYRKKLKEVWKPAV

SEQ ID NO: 32606 - protein, 977 aa, synthetic construct
  REGION 1..977: note = engineered CasX variant
QEIKRANKIRRRLVKDSNTKKAGKTGPMKTLLVRVMTPDLRERLENLRKKPENIPQPISNTSRANLNKLLTDYTEMKKAILHVYWEEFQKDPVGLMSRVAQPASKKIDQNKLKPEMDEKGNLTTAGFACSQCGQPLFVYKLEQVSEKGKAYTNYFGRCNVAEHEKLILLAQLKPEKDSDEAVTYSLGKFGQRALDFYSIHVTKESTHPVKPLAQIAGNRYASPVGKALSDACMGTIASFLSKYQDIIIEHQKVVKGNQKRLESLRELAGKENLEYPSVTLPPQPHTKEGLDAYNEVIARVRMWVNLNLWQKLKLSRDDAKPLLRLKGFPSFPLVERQANEVDWWDMVCNVKKLINEKKEDGKVFWQNLAGYKRQEALRPYLSSEEDRKKGKKFARYQLGDLLLHLEKKHGEDWGKVYDEAWERIDKKVEGLSKHIKLEEERRSEDAQSKAALTDWLRAKASFVIEGLKEADKDEFCRCELKLQKWYGDLRGKPFAIEAENSILDISGFSKQYNCAFIWQKDGVKKLNLYLIINYFKGGKLRFKKIKPEAFEANRFYTVINKKSGEIVPMEVNFNFDDPNLIILPLAFGKRQGREFIWNDLLSLETGSLKLANGRVIEKTLYNRRTRQDEPALFVALTFERREVLDSSNIKPMNLIGVDRGENIPAVIALTDPEGCPLSRFKDSLGNPTHILRIGESYKEKQRTIQAKKEVEQRRAGGYSRKYASKAKNLADDMVRNTARDLLYYAVTQDAMLIFENLSRGFGRQGKRTFMAERQYTRMEDWLTAKLAYEGLPSKTYLSKTLAQYTSKTCSNCGFTITSADYDRVLEKLKKTATGWMTTINGKELKVEGQITYYNRYKRQNVVKDLSVELDRLSEESVNNDISSWTKGRSGEALSLLKKRFSHRPVQEKFVCLNCGFETHADEQAALNIARSWLFLRSQEYKKYQTNKTTGNTDKRAFVETWQSFYRKKLKEVWKPAV

SEQ ID NO: 32607 - protein, 978 aa, synthetic construct
  REGION 1..978: note = engineered CasX variant
QEIKRANKIRRRLVKDSNTKKAGKTGPMKTLLVRVMTPDLRERLENLRKKPENIPQPISNTSRANLNKLLTDYTEMKKAILHVYWEEFQKDPVGLMSRVAQPASKKIDQNKLKPEMDEKGNLTTAGFACSQCGQPLFVYKLEQVSEKGKAYTNYFGRCNVAEHEKLILLAQLKPEKDSDEAVTYSLGKFGQRALDFYSIHVTKESTHPVKPLAQIAGNRYASYPVGKALSDACMGTIASFLSKYQDIIIEHQKVVKGNQKRLESLRELAGKENLEYPSVTLPPQPHTKEGVDAYNEVIARVRTWVNLNLWQKLKLSRDDAKPLLRLKGFPSFPLVERQANEVDWWDMVCNVKKLINEKKEDGKVFWQNLAGYKRQEALRPYLSSEEDRKKGKKFARYQLGDLLLHLEKKHGEDWGKVYDEAWERIDKKVEGLSKHIKLEEERRSEDAQSKAALTDWLRAKASFVIEGLKEADKDEFCRCELKLQKWYGDLRGKPFAIEAENSILDISGFSKQYNCAFIWQKDGVKKLNLYLIINYFKGGKLRFKKIKPEAFEANRFYTVINKKSGEIVPMEVNFNFDDPNLIILPLAFGKRQGREFIWNDLLSLETGSLKLANGRVIEKTLYNRRTRQDEPALFVALTFERREVLDSSNIKPMNLIGVDRGENIPAVIALTDPEGCPLSRFKDSLGNPTHILRIGESYKEKQRTIQAKKEVEQRRAGGYSRKYASKAKNLADDMVRNTARDLLYYAVTQDAMLIFENLSRGFGRQGKRTFMAERQYTRMEDWLTAKLAYEGLPSKTYLSKTLAQYTSKTCSNCGFTITSADYDRVLEKLKKTATGWMTTINGKELKVEGQITYYNRYKRQNVVKDLSVELDRLSEESVNNDISSWTKGRSGEALSLLKKRFSHRPVQEKFVCLNCGFETHADEQAALNIARSWLFLRSQEYKKYQTNKTTGNTDKRAFVETWQSFYRKKLKEVWKPAV

SEQ ID NO: 32608 - protein, 978 aa, synthetic construct
  REGION 1..978: note = engineered CasX variant
QEIKRANKIRRRLVKDSNTKKAGKTGPMKTLLVRVMTPDLRERLENLRKKPENIPQPISNTSRANLNKLLTDYTEMKKAILHVYWEEFQKDPVGLMSRVAQPASKKIDQNKLKPEMDEKGNLTTAGFACSQCGQPLFVYKLEQVSEKGKAYTNYFGRCNVAEHEKLILLAQLKPEKDSDEAVTYSLGKFGQRALDFYSIHVTKESTHPVKPLAQIAGNRYASHPVGKALSDACMGTIASFLSKYQDIIIEHQKVVKGNQKRLESLRELAGKENLEYPSVTLPPQPHTKEGVDAYNEVIARVRTWVNLNLWQKLKLSRDDAKPLLRLKGFPSFPLVERQANEVDWWDMVCNVKKLINEKKEDGKVFWQNLAGYKRQEALRPYLSSEEDRKKGKKFARYQLGDLLLHLEKKHGEDWGKVYDEAWERIDKKVEGLSKHIKLEEERRSEDAQSKAALTDWLRAKASFVIEGLKEADKDEFCRCELKLQKWYGDLRGKPFAIEAENSILDISGFSKQYNCAFIWQKDGVKKLNLYLIINYFKGGKLRFKKIKPEAFEANRFYTVINKKSGEIVPMEVNFNFDDPNLIILPLAFGKRQGREFIWNDLLSLETGSLKLANGRVIEKTLYNRRTRQDEPALFVALTFERREVLDSSNIKPMNLIGVDRGENIPAVIALTDPEGCPLSRFKDSLGNPTHILRIGESYKEKQRTIQAKKEVEQRRAGGYSRKYASKAKNLADDMVRNTARDLLYYAVTQDAMLIFENLSRGFGRQGKRTFMAERQYTRMEDWLTAKLAYEGLPSKTYLSKTLAQYTSKTCSNCGFTITSADYDRVLEKLKKTATGWMTTINGKELKVEGQITYYNRYKRQNVVKDLSVELDRLSEESVNNDISSWTKGRSGEALSLLKKRFSHRPVQEKFVCLNCGFETHADEQAALNIARSWLFLRSQEYKKYQTNKTTGNTDKRAFVETWQSFYRKKLKEVWKPAV

SEQ ID NO: 32609 - protein, 978 aa, synthetic construct
  REGION 1..978: note = engineered CasX variant
QEIKRANKIRRRLVKDSNTKKAGKTGPMKTLLVRVMTPDLRERLENLRKKPENIPQPISNTSRANLNKLLTDYTEMKKAILHVYWEEFQKDPVGLMSRVAQPASKKIDQNKLKPEMDEKGNLTTAGFACSQCGQPLFVYKLEQVSEKGKAYTNYFGRCNVAEHEKLILLAQLKPEKDSDEAVTYSLGKFGQRALDFYSIHVTKESTHPVKPLAQIAGNRYASSPVGKALSDACMGTIASFLSKYQDIIIEHQKVVKGNQKRLESLRELAGKENLEYPSVTLPPQPHTKEGVDAYNEVIARVRTWVNLNLWQKLKLSRDDAKPLLRLKGFPSFPLVERQANEVDWWDMVCNVKKLINEKKEDGKVFWQNLAGYKRQEALRPYLSSEEDRKKGKKFARYQLGDLLLHLEKKHGEDWGKVYDEAWERIDKKVEGLSKHIKLEEERRSEDAQSKAALTDWLRAKASFVIEGLKEADKDEFCRCELKLQKWYGDLRGKPFAIEAENSILDISGFSKQYNCAFIWQKDGVKKLNLYLIINYFKGGKLRFKKIKPEAFEANRFYTVINKKSGEIVPMEVNFNFDDPNLIILPLAFGKRQGREFIWNDLLSLETGSLKLANGRVIEKTLYNRRTRQDEPALFVALTFERREVLDSSNIKPMNLIGVDRGENIPAVIALTDPEGCPLSRFKDSLGNPTHILRIGESYKEKQRTIQAKKEVEQRRAGGYSRKYASKAKNLADDMVRNTARDLLYYAVTQDAMLIFENLSRGFGRQGKRTFMAERQYTRMEDWLTAKLAYEGLPSKTYLSKTLAQYTSKTCSNCGFTITSADYDRVLEKLKKTATGWMTTINGKELKVEGQITYYNRYKRQNVVKDLSVELDRLSEESVNNDISSWTKGRSGEALSLLKKRFSHRPVQEKFVCLNCGFETHADEQAALNIARSWLFLRSQEYKKYQTNKTTGNTDKRAFVETWQSFYRKKLKEVWKPAV

SEQ ID NO: 32610 - protein, 978 aa, synthetic construct
  REGION 1..978: note = engineered CasX variant
QEIKRANKIRRRLVKDSNTKKAGKTGPMKTLLVRVMTPDLRERLENLRKKPENIPQPISNTSRANLNKLLTDYTEMKKAILHVYWEEFQKDPVGLMSRVAQPASKKIDQNKLKPEMDEKGNLTTAGFACSQCGQPLFVYKLEQVSEKGKAYTNYFGRCNVAEHEKLILLAQLKPEKDSDEAVTYSLGKFGQRALDFYSIHVTKESTHPVKPLAQIAGNRYASTPVGKALSDACMGTIASFLSKYQDIIIEHQKVVKGNQKRLESLRELAGKENLEYPSVTLPPQPHTKEGVDAYNEVIARVRTWVNLNLWQKLKLSRDDAKPLLRLKGFPSFPLVERQANEVDWWDMVCNVKKLINEKKEDGKVFWQNLAGYKRQEALRPYLSSEEDRKKGKKFARYQLGDLLLHLEKKHGEDWGKVYDEAWERIDKKVEGLSKHIKLEEERRSEDAQSKAALTDWLRAKASFVIEGLKEADKDEFCRCELKLQKWYGDLRGKPFAIEAENSILDISGFSKQYNCAFIWQKDGVKKLNLYLIINYFKGGKLRFKKIKPEAFEANRFYTVINKKSGEIVPMEVNFNFDDPNLIILPLAFGKRQGREFIWNDLLSLETGSLKLANGRVIEKTLYNRRTRQDEPALFVALTFERREVLDSSNIKPMNLIGVDRGENIPAVIALTDPEGCPLSRFKDSLGNPTHILRIGESYKEKQRTIQAKKEVEQRRAGGYSRKYASKAKNLADDMVRNTARDLLYYAVTQDAMLIFENLSRGFGRQGKRTFMAERQYTRMEDWLTAKLAYEGLPSKTYLSKTLAQYTSKTCSNCGFTITSADYDRVLEKLKKTATGWMTTINGKELKVEGQITYYNRYKRQNVVKDLSVELDRLSEESVNNDISSWTKGRSGEALSLLKKRFSHRPVQEKFVCLNCGFETHADEQAALNIARSWLFLRSQEYKKYQTNKTTGNTDKRAFVETWQSFYRKKLKEVWKPAV

SEQ ID NO: 32611 - protein, 978 aa, synthetic construct
  REGION 1..978: note = engineered CasX variant
QEIKRANKIRRRLVKDSNTKKAGKTGPMKTLLVRVMTPDLRERLENLRKKPENIPQPISNTSRANLNKLLTDYTEMKKAILHVYWEEFQKDPVGLMSRVAQPASKKIDQNKLKPEMDEKGNLTTAGFACSQCGQPLFVYKLEQVSEKGKAYTNYFGRCNVAEHEKLILLAQLKPEKDSDEAVTYSLGKFGQRALDFYSIHVTKESTHPVKPLAQIAGNRYASAPVGKALSDACMGTIASFLSKYQDIIIEHQKVVKGNQKRLESLRELAGKENLEYPSVTLPPQPHTKEGVDAYNEVIARVRTWVNLNLWQKLKLSRDDAKPLLRLKGFPSFPLVERQANEVDWWDMVCNVKKLINEKKEDGKVFWQNLAGYKRQEALRPYLSSEEDRKKGKKFARYQLGDLLLHLEKKHGEDWGKVYDEAWERIDKKVEGLSKHIKLEEERRSEDAQSKAALTDWLRAKASFVIEGLKEADKDEFCRCELKLQKWYGDLRGKPFAIEAENSILDISGFSKQYNCAFIWQKDGVKKLNLYLIINYFKGGKLRFKKIKPEAFEANRFYTVINKKSGEIVPMEVNFNFDDPNLIILPLAFGKRQGREFIWNDLLSLETGSLKLANGRVIEKTLYNRRTRQDEPALFVALTFERREVLDSSNIKPMNLIGVDRGENIPAVIALTDPEGCPLSRFKDSLGNPTHILRIGESYKEKQRTIQAKKEVEQRRAGGYSRKYASKAKNLADDMVRNTARDLLYYAVTQDAMLIFENLSRGFGRQGKRTFMAERQYTRMEDWLTAKLAYEGLPSKTYLSKTLAQYTSKTCSNCGFTITSADYDRVLEKLKKTATGWMTTINGKELKVEGQITYYNRYKRQNVVKDLSVELDRLSEESVNNDISSWTKGRSGEALSLLKKRFSHRPVQEKFVCLNCGFETHADEQAALNIARSWLFLRSQEYKKYQTNKTTGNTDKRAFVETWQSFYRKKLKEVWKPAV

SEQ ID NO: 32612 - protein, 978 aa, synthetic construct
  REGION 1..978: note = engineered CasX variant
QEIKRANKIRRRLVKDSNTKKAGKTGPMKTLLVRVMTPDLRERLENLRKKPENIPQPISNTSRANLNKLLTDYTEMKKAILHVYWEEFQKDPVGLMSRVAQPASKKIDQNKLKPEMDEKGNLTTAGFACSQCGQPLFVYKLEQVSEKGKAYTNYFGRCNVAEHEKLILLAQLKPEKDSDEAVTYSLGKFGQRALDFYSIHVTKESTHPVKPLAQIAGNRYASVPVGKALSDACMGTIASFLSKYQDIIIEHQKVVKGNQKRLESLRELAGKENLEYPSVTLPPQPHTKEGVDAYNEVIARVRTWVNLNLWQKLKLSRDDAKPLLRLKGFPSFPLVERQANEVDWWDMVCNVKKLINEKKEDGKVFWQNLAGYKRQEALRPYLSSEEDRKKGKKFARYQLGDLLLHLEKKHGEDWGKVYDEAWERIDKKVEGLSKHIKLEEERRSEDAQSKAALTDWLRAKASFVIEGLKEADKDEFCRCELKLQKWYGDLRGKPFAIEAENSILDISGFSKQYNCAFIWQKDGVKKLNLYLIINYFKGGKLRFKKIKPEAFEANRFYTVINKKSGEIVPMEVNFNFDDPNLIILPLAFGKRQGREFIWNDLLSLETGSLKLANGRVIEKTLYNRRTRQDEPALFVALTFERREVLDSSNIKPMNLIGVDRGENIPAVIALTDPEGCPLSRFKDSLGNPTHILRIGESYKEKQRTIQAKKEVEQRRAGGYSRKYASKAKNLADDMVRNTARDLLYYAVTQDAMLIFENLSRGFGRQGKRTFMAERQYTRMEDWLTAKLAYEGLPSKTYLSKTLAQYTSKTCSNCGFTITSADYDRVLEKLKKTATGWMTTINGKELKVEGQITYYNRYKRQNVVKDLSVELDRLSEESVNNDISSWTKGRSGEALSLLKKRFSHRPVQEKFVCLNCGFETHADEQAALNIARSWLFLRSQEYKKYQTNKTTGNTDKRAFVETWQSFYRKKLKEVWKPAV

SEQ ID NO: 32613 - protein, 978 aa, synthetic construct
  REGION 1..978: note = engineered CasX variant
QEIKRANKIRRRLVKDSNTKKAGKTGPMKTLLVRVMTPDLRERLENLRKKPENIPQPISNTSRANLNKLLTDYTEMKKAILHVYWEEFQKDPVGLMSRVAQPASKKIDQNKLKPEMDEKGNLTTAGFACSQCGQPLFVYKLEQVSEKGKAYTNYFGRCNVAEHEKLIKLAQLKPEKDSDEAVTYSLGKFGQRALDFYSIHVTKESTHPVKPLAQIAGNRYASGPVGKALSDACMGTIASFLSKYQDIIIEHQKVVKGNQKRLESLRELAGKENLEYPSVTLPPQPHTKEGVDAYNEVIARVRTWVNLNLWQKLKLSRDDAKPLLRLKGFPSFPLVERQANEVDWWDMVCNVKKLINEKKEDGKVFWQNLAGYKRQEALRPYLSSEEDRKKGKKFARYQLGDLLLHLEKKHGEDWGKVYDEAWERIDKKVEGLSKHIKLEEERRSEDAQSKAALTDWLRAKASFVIEGLKEADKDEFCRCELKLQKWYGDLRGKPFAIEAENSILDISGFSKQYNCAFIWQKDGVKKLNLYLIINYFKGGKLRFKKIKPEAFEANRFYTVINKKSGEIVPMEVNFNFDDPNLIILPLAFGKRQGREFIWNDLLSLETGSLKLANGRVIEKTLYNRRTRQDEPALFVALTFERREVLDSSNIKPMNLIGVDRGENIPAVIALTDPEGCPLSRFKDSLGNPTHILRIGESYKEKQRTIQAKKEVEQRRAGGYSRKYASKAKNLADDMVRNTARDLLYYAVTQDAMLIFENLSRGFGRQGKRTFMAERQYTRMEDWLTAKLAYEGLPSKTYLSKTLAQYTSKTCSNCGFTITSADYDRVLEKLKKTATGWMTTINGKELKVEGQITYYNRYKRQNVVKDLSVELDRLSEESVNNDISSWTKGRSGEALSLLKKRFSHRPVQEKFVCLNCGFETHADEQAALNIARSWLFLRSQEYKKYQTNKTTGNTDKRAFVETWQSFYRKKLKEVWKPAV

SEQ ID NO: 32614 - protein, 977 aa, synthetic construct
  REGION 1..977: note = engineered CasX variant
QEIKRANKIRRRLVKDSNTKKAGKTGPMKTLLVRVMTPDLRERLENLRKKPENIPQPISNTSRANLNKLLTDYTEMKKAILHVYWEEFQKDPVGLMSRVAQPASKKIDQNKLKPEMDEKGNLTTAGFACSQCGQPLFVYKLEQVSEKGKAYTNYFGRCNVAEHEKLILLAQLKPEKDSDEAVTYSLGKFGQRALDFYSIHVTKESTHPVKPLAQIAGNRYASPVGKALSDACMGTIASFLSKYQDIIIEHQKVVKGNQKRLESLRELAGKENLEYPSVTLPPQPHTKEGVDAYNEVIARVRTWVNLNLWQKLKLSRDDAKPLLRLKGFPSFPLVERQANEVDWWDMVCNVKKLINEKKEDGKVFWQNLAGYKRQEALRPYLSSEEDRKKGKKFARYQLGDLLLHLEKKHGEDWGKVYDEAWERIDKKVEGLSKHIKLEEERRSEDAQSKAALTDWLRAKASFVIEGLKEADKDEFCRCELKLQKWYGDLRGKPFAIEAENSILDISGFSKQYNCAFIWQKDGVKKLNLYLIINYFKGGKLRFKKIKPEAFEANRFYTVINKKSGEIVPMEVNFNFDDPNLIILPLAFGKRQGREFIWNDLLSLETGSLKLANGRVIEKTLYNRRTRQDEPALFVALTFERREVLDSSNIKPMNLIGVDRGENIPAVIALTDPEGCPLSRFKDSLGNPTHILRIGESYKEKQRTIQAKKEVEQRRAGGYSRKYASKAKNLADDMVRNTARDLLYYAVTQDAMLIFENLSRGFGRQGKRTFMAERQYTRMEDWLTAKLAYEGLPSKTYLSKTLAQYTSKTCSNCGFTITSADYDRVLEKLKKTATGWMTTINGKELKVEGQITYYNRYKRQNVVKDLSVELDRLSEESVNNDISSWTKGRSGEALSLLKKRFSHRPVQEKFVCLNCGFETHADEQAALNIARSWLFLRSQEYKKYQTNKTTGNTDKRAFVETWQSFYRKKLKEVWKPAV

SEQ ID NO: 32615 - protein, 978 aa, synthetic construct
  REGION 1..978: note = engineered CasX variant
QEIKRANKIRRRLVKDSNTKKAGKTGPMKTLLVRVMTPDLRERLENLRKKPENIPQPISNTSRANLNKLLTDYTEMKKAILHVYWEEFQKDPVGLMSRVAQPASKKIDQNKLKPEMDEKGNLTTAGFACSQCGQPLFVYKLEQVSEKGKAYTNYFGRCNVAEHEKLILLAQLKPEKDSDEAVTYSLGKFGQRALDFYSIHVTKESTHPVKPLAQIAGNRYASYPVGKALSDACMGTIASFLSKYQDIIIEHQKVVKGNQKRLESLRELAGKENLEYPSVTLPPQPHTKEGVDAYNEVIARVRWWVNLNLWQKLKLSRDDAKPLLRLKGFPSFPLVERQANEVDWWDMVCNVKKLINEKKEDGKVFWQNLAGYKRQEALRPYLSSEEDRKKGKKFARYQLGDLLLHLEKKHGEDWGKVYDEAWERIDKKVEGLSKHIKLEEERRSEDAQSKAALTDWLRAKASFVIEGLKEADKDEFCRCELKLQKWYGDLRGKPFAIEAENSILDISGFSKQYNCAFIWQKDGVKKLNLYLIINYFKGGKLRFKKIKPEAFEANRFYTVINKKSGEIVPMEVNFNFDDPNLIILPLAFGKRQGREFIWNDLLSLETGSLKLANGRVIEKTLYNRRTRQDEPALFVALTFERREVLDSSNIKPMNLIGVDRGENIPAVIALTDPEGCPLSRFKDSLGNPTHILRIGESYKEKQRTIQAKKEVEQRRAGGYSRKYASKAKNLADDMVRNTARDLLYYAVTQDAMLIFENLSRGFGRQGKRTFMAERQYTRMEDWLTAKLAYEGLPSKTYLSKTLAQYTSKTCSNCGFTITSADYDRVLEKLKKTATGWMTTINGKELKVEGQITYYNRYKRQNVVKDLSVELDRLSEESVNNDISSWTKGRSGEALSLLKKRFSHRPVQEKFVCLNCGFETHADEQAALNIARSWLFLRSQEYKKYQTNKTTGNTDKRAFVETWQSFYRKKLKEVWKPAV

SEQ ID NO: 32616 - protein, 978 aa, synthetic construct
  REGION 1..978: note = engineered CasX variant
QEIKRANKIRRRLVKDSNTKKAGKTGPMKTLLVRVMTPDLRERLENLRKKPENIPQPISNTSRANLNKLLTDYTEMKKAILHVYWEEFQKDPVGLMSRVAQPASKKIDQNKLKPEMDEKGNLTTAGFACSQCGQPLFVYKLEQVSEKGKAYTNYFGRCNVAEHEKLILLAQLKPEKDSDEAVTYSLGKFGQRALDFYSIHVTKESTHPVKPLAQIAGNRYASHPVGKALSDACMGTIASFLSKYQDIIIEHQKVVKGNQKRLESLRELAGKENLEYPSVTLPPQPHTKEGVDAYNEVIARVRWWVNLNLWQKLKLSRDDAKPLLRLKGFPSFPLVERQANEVDWWDMVCNVKKLINEKKEDGKVFWQNLAGYKRQEALRPYLSSEEDRKKGKKFARYQLGDLLLHLEKKHGEDWGKVYDEAWERIDKKVEGLSKHIKLEEERRSEDAQSKAALTDWLRAKASFVIEGLKEADKDEFCRCELKLQKWYGDLRGKPFAIEAENSILDISGFSKQYNCAFIWQKDGVKKLNLYLIINYFKGGKLRFKKIKPEAFEANRFYTVINKKSGEIVPMEVNFNFDDPNLIILPLAFGKRQGREFIWNDLLSLETGSLKLANGRVIEKTLYNRRTRQDEPALFVALTFERREVLDSSNIKPMNLIGVDRGENIPAVIALTDPEGCPLSRFKDSLGNPTHILRIGESYKEKQRTIQAKKEVEQRRAGGYSRKYASKAKNLADDMVRNTARDLLYYAVTQDAMLIFENLSRGFGRQGKRTFMAERQYTRMEDWLTAKLAYEGLPSKTYLSKTLAQYTSKTCSNCGFTITSADYDRVLEKLKKTATGWMTTINGKELKVEGQITYYNRYKRQNVVKDLSVELDRLSEESVNNDISSWTKGRSGEALSLLKKRFSHRPVQEKFVCLNCGFETHADEQAALNIARSWLFLRSQEYKKYQTNKTTGNTDKRAFVETWQSFYRKKLKEVWKPAV

SEQ ID NO: 32617 - protein, 978 aa, synthetic construct
  REGION 1..978: note = engineered CasX variant
QEIKRANKIRRRLVKDSNTKKAGKTGPMKTLLVRVMTPDLRERLENLRKKPENIPQPISNTSRANLNKLLTDYTEMKKAILHVYWEEFQKDPVGLMSRVAQPASKKIDQNKLKPEMDEKGNLTTAGFACSQCGQPLFVYKLEQVSEKGKAYTNYFGRCNVAEHEKLILLAQLKPEKDSDEAVTYSLGKFGQRALDFYSIHVTKESTHPVKPLAQIAGNRYASSPVGKALSDACMGTIASFLSKYQDIIIEHQKVVKGNQKRLESLRELAGKENLEYPSVTLPPQPHTKEGVDAYNEVIARVRWWVNLNLWQKLKLSRDDAKPLLRLKGFPSFPLVERQANEVDWWDMVCNVKKLINEKKEDGKVFWQNLAGYKRQEALRPYLSSEEDRKKGKKFARYQLGDLLLHLEKKHGEDWGKVYDEAWERIDKKVEGLSKHIKLEEERRSEDAQSKAALTDWLRAKASFVIEGLKEADKDEFCRCELKLQKWYGDLRGKPFAIEAENSILDISGFSKQYNCAFIWQKDGVKKLNLYLIINYFKGGKLRFKKIKPEAFEANRFYTVINKKSGEIVPMEVNFNFDDPNLIILPLAFGKRQGREFIWNDLLSLETGSLKLANGRVIEKTLYNRRTRQDEPALFVALTFERREVLDSSNIKPMNLIGVDRGENIPAVIALTDPEGCPLSRFKDSLGNPTHILRIGESYKEKQRTIQAKKEVEQRRAGGYSRKYASKAKNLADDMVRNTARDLLYYAVTQDAMLIFENLSRGFGRQGKRTFMAERQYTRMEDWLTAKLAYEGLPSKTYLSKTLAQYTSKTCSNCGFTITSADYDRVLEKLKKTATGWMTTINGKELKVEGQITYYNRYKRQNVVKDLSVELDRLSEESVNNDISSWTKGRSGEALSLLKKRFSHRPVQEKFVCLNCGFETHADEQAALNIARSWLFLRSQEYKKYQTNKTTGNTDKRAFVETWQSFYRKKLKEVWKPAV

SEQ ID NO: 32618 - protein, 978 aa, synthetic construct
  REGION 1..978: note = engineered CasX variant
QEIKRANKIRRRLVKDSNTKKAGKTGPMKTLLVRVMTPDLRERLENLRKKPENIPQPISNTSRANLNKLLTDYTEMKKAILHVYWEEFQKDPVGLMSRVAQPASKKIDQNKLKPEMDEKGNLTTAGFACSQCGQPLFVYKLEQVSEKGKAYTNYFGRCNVAEHEKLILLAQLKPEKDSDEAVTYSLGKFGQRALDFYSIHVTKESTHPVKPLAQIAGNRYASTPVGKALSDACMGTIASFLSKYQDIIIEHQKVVKGNQKRLESLRELAGKENLEYPSVTLPPQPHTKEGVDAYNEVIARVRWWVNLNLWQKLKLSRDDAKPLLRLKGFPSFPLVERQANEVDWWDMVCNVKKLINEKKEDGKVFWQNLAGYKRQEALRPYLSSEEDRKKGKKFARYQLGDLLLHLEKKHGEDWGKVYDEAWERIDKKVEGLSKHIKLEEERRSEDAQSKAALTDWLRAKASFVIEGLKEADKDEFCRCELKLQKWYGDLRGKPFAIEAENSILDISGFSKQYNCAFIWQKDGVKKLNLYLIINYFKGGKLRFKKIKPEAFEANRFYTVINKKSGEIVPMEVNFNFDDPNLIILPLAFGKRQGREFIWNDLLSLETGSLKLANGRVIEKTLYNRRTRQDEPALFVALTFERREVLDSSNIKPMNLIGVDRGENIPAVIALTDPEGCPLSRFKDSLGNPTHILRIGESYKEKQRTIQAKKEVEQRRAGGYSRKYASKAKNLADDMVRNTARDLLYYAVTQDAMLIFENLSRGFGRQGKRTFMAERQYTRMEDWLTAKLAYEGLPSKTYLSKTLAQYTSKTCSNCGFTITSADYDRVLEKLKKTATGWMTTINGKELKVEGQITYYNRYKRQNVVKDLSVELDRLSEESVNNDISSWTKGRSGEALSLLKKRFSHRPVQEKFVCLNCGFETHADEQAALNIARSWLFLRSQEYKKYQTNKTTGNTDKRAFVETWQSFYRKKLKEVWKPAV

SEQ ID NO: 32619 - protein, 978 aa, synthetic construct
  REGION 1..978: note = engineered CasX variant
QEIKRANKIRRRLVKDSNTKKAGKTGPMKTLLVRVMTPDLRERLENLRKKPENIPQPISNTSRANLNKLLTDYTEMKKAILHVYWEEFQKDPVGLMSRVAQPASKKIDQNKLKPEMDEKGNLTTAGFACSQCGQPLFVYKLEQVSEKGKAYTNYFGRCNVAEHEKLILLAQLKPEKDSDEAVTYSLGKFGQRALDFYSIHVTKESTHPVKPLAQIAGNRYASAPVGKALSDACMGTIASFLSKYQDIIIEHQKVVKGNQKRLESLRELAGKENLEYPSVTLPPQPHTKEGVDAYNEVIARVRWWVNLNLWQKLKLSRDDAKPLLRLKGFPSFPLVERQANEVDWWDMVCNVKKLINEKKEDGKVFWQNLAGYKRQEALRPYLSSEEDRKKGKKFARYQLGDLLLHLEKKHGEDWGKVYDEAWERIDKKVEGLSKHIKLEEERRSEDAQSKAALTDWLRAKASFVIEGLKEADKDEFCRCELKLQKWYGDLRGKPFAIEAENSILDISGFSKQYNCAFIWQKDGVKKLNLYLIINYFKGGKLRFKKIKPEAFEANRFYTVINKKSGEIVPMEVNFNFDDPNLIILPLAFGKRQGREFIWNDLLSLETGSLKLANGRVIEKTLYNRRTRQDEPALFVALTFERREVLDSSNIKPMNLIGVDRGENIPAVIALTDPEGCPLSRFKDSLGNPTHILRIGESYKEKQRTIQAKKEVEQRRAGGYSRKYASKAKNLADDMVRNTARDLLYYAVTQDAMLIFENLSRGFGRQGKRTFMAERQYTRMEDWLTAKLAYEGLPSKTYLSKTLAQYTSKTCSNCGFTITSADYDRVLEKLKKTATGWMTTINGKELKVEGQITYYNRYKRQNVVKDLSVELDRLSEESVNNDISSWTKGRSGEALSLLKKRFSHRPVQEKFVCLNCGFETHADEQAALNIARSWLFLRSQEYKKYQTNKTTGNTDKRAFVETWQSFYRKKLKEVWKPAV

SEQ ID NO: 32620 - protein, 978 aa, synthetic construct
  REGION 1..978: note = engineered CasX variant
QEIKRANKIRRRLVKDSNTKKAGKTGPMKTLLVRVMTPDLRERLENLRKKPENIPQPISNTSRANLNKLLTDYTEMKKAILHVYWEEFQKDPVGLMSRVAQPASKKIDQNKLKPEMDEKGNLTTAGFACSQCGQPLFVYKLEQVSEKGKAYTNYFGRCNVAEHEKLILLAQLKPEKDSDEAVTYSLGKFGQRALDFYSIHVTKESTHPVKPLAQIAGNRYASVPVGKALSDACMGTIASFLSKYQDIIIEHQKVVKGNQKRLESLRELAGKENLEYPSVTLPPQPHTKEGVDAYNEVIARVRWWVNLNLWQKLKLSRDDAKPLLRLKGFPSFPLVERQANEVDWWDMVCNVKKLINEKKEDGKVFWQNLAGYKRQEALRPYLSSEEDRKKGKKFARYQLGDLLLHLEKKHGEDWGKVYDEAWERIDKKVEGLSKHIKLEEERRSEDAQSKAALTDWLRAKASFVIEGLKEADKDEFCRCELKLQKWYGDLRGKPFAIEAENSILDISGFSKQYNCAFIWQKDGVKKLNLYLIINYFKGGKLRFKKIKPEAFEANRFYTVINKKSGEIVPMEVNFNFDDPNLIILPLAFGKRQGREFIWNDLLSLETGSLKLANGRVIEKTLYNRRTRQDEPALFVALTFERREVLDSSNIKPMNLIGVDRGENIPAVIALTDPEGCPLSRFKDSLGNPTHILRIGESYKEKQRTIQAKKEVEQRRAGGYSRKYASKAKNLADDMVRNTARDLLYYAVTQDAMLIFENLSRGFGRQGKRTFMAERQYTRMEDWLTAKLAYEGLPSKTYLSKTLAQYTSKTCSNCGFTITSADYDRVLEKLKKTATGWMTTINGKELKVEGQITYYNRYKRQNVVKDLSVELDRLSEESVNNDISSWTKGRSGEALSLLKKRFSHRPVQEKFVCLNCGFETHADEQAALNIARSWLFLRSQEYKKYQTNKTTGNTDKRAFVETWQSFYRKKLKEVWKPAV

SEQ ID NO: 32621 - protein, 978 aa, synthetic construct
  REGION 1..978: note = engineered CasX variant
QEIKRANKIRRRLVKDSNTKKAGKTGPMKTLLVRVMTPDLRERLENLRKKPENIPQPISNTSRANLNKLLTDYTEMKKAILHVYWEEFQKDPVGLMSRVAQPASKKIDQNKLKPEMDEKGNLTTAGFACSQCGQPLFVYKLEQVSEKGKAYTNYFGRCNVAEHEKLIKLAQLKPEKDSDEAVTYSLGKFGQRALDFYSIHVTKESTHPVKPLAQIAGNRYASGPVGKALSDACMGTIASFLSKYQDIIIEHQKVVKGNQKRLESLRELAGKENLEYPSVTLPPQPHTKEGVDAYNEVIARVRWWVNLNLWQKLKLSRDDAKPLLRLKGFPSFPLVERQANEVDWWDMVCNVKKLINEKKEDGKVFWQNLAGYKRQEALRPYLSSEEDRKKGKKFARYQLGDLLLHLEKKHGEDWGKVYDEAWERIDKKVEGLSKHIKLEEERRSEDAQSKAALTDWLRAKASFVIEGLKEADKDEFCRCELKLQKWYGDLRGKPFAIEAENSILDISGFSKQYNCAFIWQKDGVKKLNLYLIINYFKGGKLRFKKIKPEAFEANRFYTVINKKSGEIVPMEVNFNFDDPNLIILPLAFGKRQGREFIWNDLLSLETGSLKLANGRVIEKTLYNRRTRQDEPALFVALTFERREVLDSSNIKPMNLIGVDRGENIPAVIALTDPEGCPLSRFKDSLGNPTHILRIGESYKEKQRTIQAKKEVEQRRAGGYSRKYASKAKNLADDMVRNTARDLLYYAVTQDAMLIFENLSRGFGRQGKRTFMAERQYTRMEDWLTAKLAYEGLPSKTYLSKTLAQYTSKTCSNCGFTITSADYDRVLEKLKKTATGWMTTINGKELKVEGQITYYNRYKRQNVVKDLSVELDRLSEESVNNDISSWTKGRSGEALSLLKKRFSHRPVQEKFVCLNCGFETHADEQAALNIARSWLFLRSQEYKKYQTNKTTGNTDKRAFVETWQSFYRKKLKEVWKPAV

SEQ ID NO: 32622 - protein, 977 aa, synthetic construct
  REGION 1..977: note = engineered CasX variant
QEIKRANKIRRRLVKDSNTKKAGKTGPMKTLLVRVMTPDLRERLENLRKKPENIPQPISNTSRANLNKLLTDYTEMKKAILHVYWEEFQKDPVGLMSRVAQPASKKIDQNKLKPEMDEKGNLTTAGFACSQCGQPLFVYKLEQVSEKGKAYTNYFGRCNVAEHEKLILLAQLKPEKDSDEAVTYSLGKFGQRALDFYSIHVTKESTHPVKPLAQIAGNRYASPVGKALSDACMGTIASFLSKYQDIIIEHQKVVKGNQKRLESLRELAGKENLEYPSVTLPPQPHTKEGVDAYNEVIARVRWWVNLNLWQKLKLSRDDAKPLLRLKGFPSFPLVERQANEVDWWDMVCNVKKLINEKKEDGKVFWQNLAGYKRQEALRPYLSSEEDRKKGKKFARYQLGDLLLHLEKKHGEDWGKVYDEAWERIDKKVEGLSKHIKLEEERRSEDAQSKAALTDWLRAKASFVIEGLKEADKDEFCRCELKLQKWYGDLRGKPFAIEAENSILDISGFSKQYNCAFIWQKDGVKKLNLYLIINYFKGGKLRFKKIKPEAFEANRFYTVINKKSGEIVPMEVNFNFDDPNLIILPLAFGKRQGREFIWNDLLSLETGSLKLANGRVIEKTLYNRRTRQDEPALFVALTFERREVLDSSNIKPMNLIGVDRGENIPAVIALTDPEGCPLSRFKDSLGNPTHILRIGESYKEKQRTIQAKKEVEQRRAGGYSRKYASKAKNLADDMVRNTARDLLYYAVTQDAMLIFENLSRGFGRQGKRTFMAERQYTRMEDWLTAKLAYEGLPSKTYLSKTLAQYTSKTCSNCGFTITSADYDRVLEKLKKTATGWMTTINGKELKVEGQITYYNRYKRQNVVKDLSVELDRLSEESVNNDISSWTKGRSGEALSLLKKRFSHRPVQEKFVCLNCGFETHADEQAALNIARSWLFLRSQEYKKYQTNKTTGNTDKRAFVETWQSFYRKKLKEVWKPAV

SEQ ID NO: 32623 - protein, 979 aa, synthetic construct
  REGION 1..979: note = engineered CasX variant
QEIKRANKIRRRLVKDSNTKKAGKTGPMKTLLVRVMTPDLRERLENLRKKPENIPQPISNTSRANLNKLLTDYTEMKKAILHVYWEEFQKDPVGLMSRVAQPASKKIDQNKLKPEMDEKGNLTTAGFACSQCGQPLFVYKLEQVSEKGKAYTNYFGRCNVAEHEKLILLAQLKPEKDSDEAVTYSLGKFGQRALDFYSIHVTKESTHPVKPLAQIAGNRYASYPVGKALSDACMGTIASFLSKYQDIIIEHQKVVKGNQKRLESLRELAGKENLEYPSVTLPPQPHTKEGVDAYNEVIARVRMWVNLNLWQKLKLSRDDAKPLLRLKGFPSFPLVERQQANEVDWWDMVCNVKKLINEKKEDGKVFWQNLAGYKRQEALRPYLSSEEDRKKGKKFARYQLGDLLLHLEKKHGEDWGKVYDEAWERIDKKVEGLSKHIKLEEERRSEDAQSKAALTDWLRAKASFVIEGLKEADKDEFCRCELKLQKWYGDLRGKPFAIEAENSILDISGFSKQYNCAFIWQKDGVKKLNLYLIINYFKGGKLRFKKIKPEAFEANRFYTVINKKSGEIVPMEVNFNFDDPNLIILPLAFGKRQGREFIWNDLLSLETGSLKLANGRVIEKTLYNRRTRQDEPALFVALTFERREVLDSSNIKPMNLIGVDRGENIPAVIALTDPEGCPLSRFKDSLGNPTHILRIGESYKEKQRTIQAKKEVEQRRAGGYSRKYASKAKNLADDMVRNTARDLLYYAVTQDAMLIFENLSRGFGRQGKRTFMAERQYTRMEDWLTAKLAYEGLPSKTYLSKTLAQYTSKTCSNCGFTITSADYDRVLEKLKKTATGWMTTINGKELKVEGQITYYNRYKRQNVVKDLSVELDRLSEESVNNDISSWTKGRSGEALSLLKKRFSHRPVQEKFVCLNCGFETHADEQAALNIARSWLFLRSQEYKKYQTNKTTGNTDKRAFVETWQSFYRKKLKEVWKPAV

SEQ ID NO: 32624 - protein, 979 aa, synthetic construct
  REGION 1..979: note = engineered CasX variant
QEIKRANKIRRRLVKDSNTKKAGKTGPMKTLLVRVMTPDLRERLENLRKKPENIPQPISNTSRANLNKLLTDYTEMKKAILHVYWEEFQKDPVGLMSRVAQPASKKIDQNKLKPEMDEKGNLTTAGFACSQCGQPLFVYKLEQVSEKGKAYTNYFGRCNVAEHEKLILLAQLKPEKDSDEAVTYSLGKFGQRALDFYSIHVTKESTHPVKPLAQIAGNRYASHPVGKALSDACMGTIASFLSKYQDIIIEHQKVVKGNQKRLESLRELAGKENLEYPSVTLPPQPHTKEGVDAYNEVIARVRMWVNLNLWQKLKLSRDDAKPLLRLKGFPSFPLVERQQANEVDWWDMVCNVKKLINEKKEDGKVFWQNLAGYKRQEALRPYLSSEEDRKKGKKFARYQLGDLLLHLEKKHGEDWGKVYDEAWERIDKKVEGLSKHIKLEEERRSEDAQSKAALTDWLRAKASFVIEGLKEADKDEFCRCELKLQKWYGDLRGKPFAIEAENSILDISGFSKQYNCAFIWQKDGVKKLNLYLIINYFKGGKLRFKKIKPEAFEANRFYTVINKKSGEIVPMEVNFNFDDPNLIILPLAFGKRQGREFIWNDLLSLETGSLKLANGRVIEKTLYNRRTRQDEPALFVALTFERREVLDSSNIKPMNLIGVDRGENIPAVIALTDPEGCPLSRFKDSLGNPTHILRIGESYKEKQRTIQAKKEVEQRRAGGYSRKYASKAKNLADDMVRNTARDLLYYAVTQDAMLIFENLSRGFGRQGKRTFMAERQYTRMEDWLTAKLAYEGLPSKTYLSKTLAQYTSKTCSNCGFTITSADYDRVLEKLKKTATGWMTTINGKELKVEGQITYYNRYKRQNVVKDLSVELDRLSEESVNNDISSWTKGRSGEALSLLKKRFSHRPVQEKFVCLNCGFETHADEQAALNIARSWLFLRSQEYKKYQTNKTTGNTDKRAFVETWQSFYRKKLKEVWKPAV

SEQ ID NO: 32625 - protein, 979 aa, synthetic construct
  REGION 1..979: note = engineered CasX variant
QEIKRANKIRRRLVKDSNTKKAGKTGPMKTLLVRVMTPDLRERLENLRKKPENIPQPISNTSRANLNKLLTDYTEMKKAILHVYWEEFQKDPVGLMSRVAQPASKKIDQNKLKPEMDEKGNLTTAGFACSQCGQPLFVYKLEQVSEKGKAYTNYFGRCNVAEHEKLILLAQLKPEKDSDEAVTYSLGKFGQRALDFYSIHVTKESTHPVKPLAQIAGNRYASSPVGKALSDACMGTIASFLSKYQDIIIEHQKVVKGNQKRLESLRELAGKENLEYPSVTLPPQPHTKEGVDAYNEVIARVRMWVNLNLWQKLKLSRDDAKPLLRLKGFPSFPLVERQQANEVDWWDMVCNVKKLINEKKEDGKVFWQNLAGYKRQEALRPYLSSEEDRKKGKKFARYQLGDLLLHLEKKHGEDWGKVYDEAWERIDKKVEGLSKHIKLEEERRSEDAQSKAALTDWLRAKASFVIEGLKEADKDEFCRCELKLQKWYGDLRGKPFAIEAENSILDISGFSKQYNCAFIWQKDGVKKLNLYLIINYFKGGKLRFKKIKPEAFEANRFYTVINKKSGEIVPMEVNFNFDDPNLIILPLAFGKRQGREFIWNDLLSLETGSLKLANGRVIEKTLYNRRTRQDEPALFVALTFERREVLDSSNIKPMNLIGVDRGENIPAVIALTDPEGCPLSRFKDSLGNPTHILRIGESYKEKQRTIQAKKEVEQRRAGGYSRKYASKAKNLADDMVRNTARDLLYYAVTQDAMLIFENLSRGFGRQGKRTFMAERQYTRMEDWLTAKLAYEGLPSKTYLSKTLAQYTSKTCSNCGFTITSADYDRVLEKLKKTATGWMTTINGKELKVEGQITYYNRYKRQNVVKDLSVELDRLSEESVNNDISSWTKGRSGEALSLLKKRFSHRPVQEKFVCLNCGFETHADEQAALNIARSWLFLRSQEYKKYQTNKTTGNTDKRAFVETWQSFYRKKLKEVWKPAV

SEQ ID NO: 32626 - protein, 979 aa, synthetic construct
  REGION 1..979: note = engineered CasX variant
QEIKRANKIRRRLVKDSNTKKAGKTGPMKTLLVRVMTPDLRERLENLRKKPENIPQPISNTSRANLNKLLTDYTEMKKAILHVYWEEFQKDPVGLMSRVAQPASKKIDQNKLKPEMDEKGNLTTAGFACSQCGQPLFVYKLEQVSEKGKAYTNYFGRCNVAEHEKLILLAQLKPEKDSDEAVTYSLGKFGQRALDFYSIHVTKESTHPVKPLAQIAGNRYASTPVGKALSDACMGTIASFLSKYQDIIIEHQKVVKGNQKRLESLRELAGKENLEYPSVTLPPQPHTKEGVDAYNEVIARVRMWVNLNLWQKLKLSRDDAKPLLRLKGFPSFPLVERQQANEVDWWDMVCNVKKLINEKKEDGKVFWQNLAGYKRQEALRPYLSSEEDRKKGKKFARYQLGDLLLHLEKKHGEDWGKVYDEAWERIDKKVEGLSKHIKLEEERRSEDAQSKAALTDWLRAKASFVIEGLKEADKDEFCRCELKLQKWYGDLRGKPFAIEAENSILDISGFSKQYNCAFIWQKDGVKKLNLYLIINYFKGGKLRFKKIKPEAFEANRFYTVINKKSGEIVPMEVNFNFDDPNLIILPLAFGKRQGREFIWNDLLSLETGSLKLANGRVIEKTLYNRRTRQDEPALFVALTFERREVLDSSNIKPMNLIGVDRGENIPAVIALTDPEGCPLSRFKDSLGNPTHILRIGESYKEKQRTIQAKKEVEQRRAGGYSRKYASKAKNLADDMVRNTARDLLYYAVTQDAMLIFENLSRGFGRQGKRTFMAERQYTRMEDWLTAKLAYEGLPSKTYLSKTLAQYTSKTCSNCGFTITSADYDRVLEKLKKTATGWMTTINGKELKVEGQITYYNRYKRQNVVKDLSVELDRLSEESVNNDISSWTKGRSGEALSLLKKRFSHRPVQEKFVCLNCGFETHADEQAALNIARSWLFLRSQEYKKYQTNKTTGNTDKRAFVETWQSFYRKKLKEVWKPAV

SEQ ID NO: 32627 - protein, 979 aa, synthetic construct
  REGION 1..979: note = engineered CasX variant
QEIKRANKIRRRLVKDSNTKKAGKTGPMKTLLVRVMTPDLRERLENLRKKPENIPQPISNTSRANLNKLLTDYTEMKKAILHVYWEEFQKDPVGLMSRVAQPASKKIDQNKLKPEMDEKGNLTTAGFACSQCGQPLFVYKLEQVSEKGKAYTNYFGRCNVAEHEKLILLAQLKPEKDSDEAVTYSLGKFGQRALDFYSIHVTKESTHPVKPLAQIAGNRYASAPVGKALSDACMGTIASFLSKYQDIIIEHQKVVKGNQKRLESLRELAGKENLEYPSVTLPPQPHTKEGVDAYNEVIARVRMWVNLNLWQKLKLSRDDAKPLLRLKGFPSFPLVERQQANEVDWWDMVCNVKKLINEKKEDGKVFWQNLAGYKRQEALRPYLSSEEDRKKGKKFARYQLGDLLLHLEKKHGEDWGKVYDEAWERIDKKVEGLSKHIKLEEERRSEDAQSKAALTDWLRAKASFVIEGLKEADKDEFCRCELKLQKWYGDLRGKPFAIEAENSILDISGFSKQYNCAFIWQKDGVKKLNLYLIINYFKGGKLRFKKIKPEAFEANRFYTVINKKSGEIVPMEVNFNFDDPNLIILPLAFGKRQGREFIWNDLLSLETGSLKLANGRVIEKTLYNRRTRQDEPALFVALTFERREVLDSSNIKPMNLIGVDRGENIPAVIALTDPEGCPLSRFKDSLGNPTHILRIGESYKEKQRTIQAKKEVEQRRAGGYSRKYASKAKNLADDMVRNTARDLLYYAVTQDAMLIFENLSRGFGRQGKRTFMAERQYTRMEDWLTAKLAYEGLPSKTYLSKTLAQYTSKTCSNCGFTITSADYDRVLEKLKKTATGWMTTINGKELKVEGQITYYNRYKRQNVVKDLSVELDRLSEESVNNDISSWTKGRSGEALSLLKKRFSHRPVQEKFVCLNCGFETHADEQAALNIARSWLFLRSQEYKKYQTNKTTGNTDKRAFVETWQSFYRKKLKEVWKPAV

SEQ ID NO: 32628 - protein, 979 aa, synthetic construct
  REGION 1..979: note = engineered CasX variant
QEIKRANKIRRRLVKDSNTKKAGKTGPMKTLLVRVMTPDLRERLENLRKKPENIPQPISNTSRANLNKLLTDYTEMKKAILHVYWEEFQKDPVGLMSRVAQPASKKIDQNKLKPEMDEKGNLTTAGFACSQCGQPLFVYKLEQVSEKGKAYTNYFGRCNVAEHEKLILLAQLKPEKDSDEAVTYSLGKFGQRALDFYSIHVTKESTHPVKPLAQIAGNRYASVPVGKALSDACMGTIASFLSKYQDIIIEHQKVVKGNQKRLESLRELAGKENLEYPSVTLPPQPHTKEGVDAYNEVIARVRMWVNLNLWQKLKLSRDDAKPLLRLKGFPSFPLVERQQANEVDWWDMVCNVKKLINEKKEDGKVFWQNLAGYKRQEALRPYLSSEEDRKKGKKFARYQLGDLLLHLEKKHGEDWGKVYDEAWERIDKKVEGLSKHIKLEEERRSEDAQSKAALTDWLRAKASFVIEGLKEADKDEFCRCELKLQKWYGDLRGKPFAIEAENSILDISGFSKQYNCAFIWQKDGVKKLNLYLIINYFKGGKLRFKKIKPEAFEANRFYTVINKKSGEIVPMEVNFNFDDPNLIILPLAFGKRQGREFIWNDLLSLETGSLKLANGRVIEKTLYNRRTRQDEPALFVALTFERREVLDSSNIKPMNLIGVDRGENIPAVIALTDPEGCPLSRFKDSLGNPTHILRIGESYKEKQRTIQAKKEVEQRRAGGYSRKYASKAKNLADDMVRNTARDLLYYAVTQDAMLIFENLSRGFGRQGKRTFMAERQYTRMEDWLTAKLAYEGLPSKTYLSKTLAQYTSKTCSNCGFTITSADYDRVLEKLKKTATGWMTTINGKELKVEGQITYYNRYKRQNVVKDLSVELDRLSEESVNNDISSWTKGRSGEALSLLKKRFSHRPVQEKFVCLNCGFETHADEQAALNIARSWLFLRSQEYKKYQTNKTTGNTDKRAFVETWQSFYRKKLKEVWKPAV

SEQ ID NO: 32629 - protein, 979 aa, synthetic construct
  REGION 1..979: note = engineered CasX variant
QEIKRANKIRRRLVKDSNTKKAGKTGPMKTLLVRVMTPDLRERLENLRKKPENIPQPISNTSRANLNKLLTDYTEMKKAILHVYWEEFQKDPVGLMSRVAQPASKKIDQNKLKPEMDEKGNLTTAGFACSQCGQPLFVYKLEQVSEKGKAYTNYFGRCNVAEHEKLIKLAQLKPEKDSDEAVTYSLGKFGQRALDFYSIHVTKESTHPVKPLAQIAGNRYASGPVGKALSDACMGTIASFLSKYQDIIIEHQKVVKGNQKRLESLRELAGKENLEYPSVTLPPQPHTKEGVDAYNEVIARVRMWVNLNLWQKLKLSRDDAKPLLRLKGFPSFPLVERQQANEVDWWDMVCNVKKLINEKKEDGKVFWQNLAGYKRQEALRPYLSSEEDRKKGKKFARYQLGDLLLHLEKKHGEDWGKVYDEAWERIDKKVEGLSKHIKLEEERRSEDAQSKAALTDWLRAKASFVIEGLKEADKDEFCRCELKLQKWYGDLRGKPFAIEAENSILDISGFSKQYNCAFIWQKDGVKKLNLYLIINYFKGGKLRFKKIKPEAFEANRFYTVINKKSGEIVPMEVNFNFDDPNLIILPLAFGKRQGREFIWNDLLSLETGSLKLANGRVIEKTLYNRRTRQDEPALFVALTFERREVLDSSNIKPMNLIGVDRGENIPAVIALTDPEGCPLSRFKDSLGNPTHILRIGESYKEKQRTIQAKKEVEQRRAGGYSRKYASKAKNLADDMVRNTARDLLYYAVTQDAMLIFENLSRGFGRQGKRTFMAERQYTRMEDWLTAKLAYEGLPSKTYLSKTLAQYTSKTCSNCGFTITSADYDRVLEKLKKTATGWMTTINGKELKVEGQITYYNRYKRQNVVKDLSVELDRLSEESVNNDISSWTKGRSGEALSLLKKRFSHRPVQEKFVCLNCGFETHADEQAALNIARSWLFLRSQEYKKYQTNKTTGNTDKRAFVETWQSFYRKKLKEVWKPAV

SEQ ID NO: 32630 - protein, 978 aa, synthetic construct
  REGION 1..978: note = engineered CasX variant
QEIKRANKIRRRLVKDSNTKKAGKTGPMKTLLVRVMTPDLRERLENLRKKPENIPQPISNTSRANLNKLLTDYTEMKKAILHVYWEEFQKDPVGLMSRVAQPASKKIDQNKLKPEMDEKGNLTTAGFACSQCGQPLFVYKLEQVSEKGKAYTNYFGRCNVAEHEKLILLAQLKPEKDSDEAVTYSLGKFGQRALDFYSIHVTKESTHPVKPLAQIAGNRYASPVGKALSDACMGTIASFLSKYQDIIIEHQKVVKGNQKRLESLRELAGKENLEYPSVTLPPQPHTKEGVDAYNEVIARVRMWVNLNLWQKLKLSRDDAKPLLRLKGFPSFPLVERQQANEVDWWDMVCNVKKLINEKKEDGKVFWQNLAGYKRQEALRPYLSSEEDRKKGKKFARYQLGDLLLHLEKKHGEDWGKVYDEAWERIDKKVEGLSKHIKLEEERRSEDAQSKAALTDWLRAKASFVIEGLKEADKDEFCRCELKLQKWYGDLRGKPFAIEAENSILDISGFSKQYNCAFIWQKDGVKKLNLYLIINYFKGGKLRFKKIKPEAFEANRFYTVINKKSGEIVPMEVNFNFDDPNLIILPLAFGKRQGREFIWNDLLSLETGSLKLANGRVIEKTLYNRRTRQDEPALFVALTFERREVLDSSNIKPMNLIGVDRGENIPAVIALTDPEGCPLSRFKDSLGNPTHILRIGESYKEKQRTIQAKKEVEQRRAGGYSRKYASKAKNLADDMVRNTARDLLYYAVTQDAMLIFENLSRGFGRQGKRTFMAERQYTRMEDWLTAKLAYEGLPSKTYLSKTLAQYTSKTCSNCGFTITSADYDRVLEKLKKTATGWMTTINGKELKVEGQITYYNRYKRQNVVKDLSVELDRLSEESVNNDISSWTKGRSGEALSLLKKRFSHRPVQEKFVCLNCGFETHADEQAALNIARSWLFLRSQEYKKYQTNKTTGNTDKRAFVETWQSFYRKKLKEVWKPAV

SEQ ID NO: 32631 - protein, 979 aa, synthetic construct
  REGION 1..979: note = engineered CasX variant
QEIKRANKIRRRLVKDSNTKKAGKTGPMKTLLVRVMTPDLRERLENLRKKPENIPQPISNTSRANLNKLLTDYTEMKKAILHVYWEEFQKDPVGLMSRVAQPASKKIDQNKLKPEMDEKGNLTTAGFACSQCGQPLFVYKLEQVSEKGKAYTNYFGRCNVAEHEKLILLAQLKPEKDSDEAVTYSLGKFGQRALDFYSIHVTKESTHPVKPLAQIAGNRYASYPVGKALSDACMGTIASFLSKYQDIIIEHQKVVKGNQKRLESLRELAGKENLEYPSVTLPPQPHTKEGVDAYNEVIARVRMWVNLNLWQKLKLSRDDAKPLLRLKGFPSFPLVERQANAEVDWWDMVCNVKKLINEKKEDGKVFWQNLAGYKRQEALRPYLSSEEDRKKGKKFARYQLGDLLLHLEKKHGEDWGKVYDEAWERIDKKVEGLSKHIKLEEERRSEDAQSKAALTDWLRAKASFVIEGLKEADKDEFCRCELKLQKWYGDLRGKPFAIEAENSILDISGFSKQYNCAFIWQKDGVKKLNLYLIINYFKGGKLRFKKIKPEAFEANRFYTVINKKSGEIVPMEVNFNFDDPNLIILPLAFGKRQGREFIWNDLLSLETGSLKLANGRVIEKTLYNRRTRQDEPALFVALTFERREVLDSSNIKPMNLIGVDRGENIPAVIALTDPEGCPLSRFKDSLGNPTHILRIGESYKEKQRTIQAKKEVEQRRAGGYSRKYASKAKNLADDMVRNTARDLLYYAVTQDAMLIFENLSRGFGRQGKRTFMAERQYTRMEDWLTAKLAYEGLPSKTYLSKTLAQYTSKTCSNCGFTITSADYDRVLEKLKKTATGWMTTINGKELKVEGQITYYNRYKRQNVVKDLSVELDRLSEESVNNDISSWTKGRSGEALSLLKKRFSHRPVQEKFVCLNCGFETHADEQAALNIARSWLFLRSQEYKKYQTNKTTGNTDKRAFVETWQSFYRKKLKEVWKPAV

SEQ ID NO: 32632 - protein, 979 aa, synthetic construct
  REGION 1..979: note = engineered CasX variant
QEIKRANKIRRRLVKDSNTKKAGKTGPMKTLLVRVMTPDLRERLENLRKKPENIPQPISNTSRANLNKLLTDYTEMKKAILHVYWEEFQKDPVGLMSRVAQPASKKIDQNKLKPEMDEKGNLTTAGFACSQCGQPLFVYKLEQVSEKGKAYTNYFGRCNVAEHEKLILLAQLKPEKDSDEAVTYSLGKFGQRALDFYSIHVTKESTHPVKPLAQIAGNRYASHPVGKALSDACMGTIASFLSKYQDIIIEHQKVVKGNQKRLESLRELAGKENLEYPSVTLPPQPHTKEGVDAYNEVIARVRMWVNLNLWQKLKLSRDDAKPLLRLKGFPSFPLVERQANAEVDWWDMVCNVKKLINEKKEDGKVFWQNLAGYKRQEALRPYLSSEEDRKKGKKFARYQLGDLLLHLEKKHGEDWGKVYDEAWERIDKKVEGLSKHIKLEEERRSEDAQSKAALTDWLRAKASFVIEGLKEADKDEFCRCELKLQKWYGDLRGKPFAIEAENSILDISGFSKQYNCAFIWQKDGVKKLNLYLIINYFKGGKLRFKKIKPEAFEANRFYTVINKKSGEIVPMEVNFNFDDPNLIILPLAFGKRQGREFIWNDLLSLETGSLKLANGRVIEKTLYNRRTRQDEPALFVALTFERREVLDSSNIKPMNLIGVDRGENIPAVIALTDPEGCPLSRFKDSLGNPTHILRIGESYKEKQRTIQAKKEVEQRRAGGYSRKYASKAKNLADDMVRNTARDLLYYAVTQDAMLIFENLSRGFGRQGKRTFMAERQYTRMEDWLTAKLAYEGLPSKTYLSKTLAQYTSKTCSNCGFTITSADYDRVLEKLKKTATGWMTTINGKELKVEGQITYYNRYKRQNVVKDLSVELDRLSEESVNNDISSWTKGRSGEALSLLKKRFSHRPVQEKFVCLNCGFETHADEQAALNIARSWLFLRSQEYKKYQTNKTTGNTDKRAFVETWQSFYRKKLKEVWKPAV

SEQ ID NO: 32633 - protein, 979 aa, synthetic construct
  REGION 1..979: note = engineered CasX variant
QEIKRANKIRRRLVKDSNTKKAGKTGPMKTLLVRVMTPDLRERLENLRKKPENIPQPISNTSRANLNKLLTDYTEMKKAILHVYWEEFQKDPVGLMSRVAQPASKKIDQNKLKPEMDEKGNLTTAGFACSQCGQPLFVYKLEQVSEKGKAYTNYFGRCNVAEHEKLILLAQLKPEKDSDEAVTYSLGKFGQRALDFYSIHVTKESTHPVKPLAQIAGNRYASSPVGKALSDACMGTIASFLSKYQDIIIEHQKVVKGNQKRLESLRELAGKENLEYPSVTLPPQPHTKEGVDAYNEVIARVRMWVNLNLWQKLKLSRDDAKPLLRLKGFPSFPLVERQANAEVDWWDMVCNVKKLINEKKEDGKVFWQNLAGYKRQEALRPYLSSEEDRKKGKKFARYQLGDLLLHLEKKHGEDWGKVYDEAWERIDKKVEGLSKHIKLEEERRSEDAQSKAALTDWLRAKASFVIEGLKEADKDEFCRCELKLQKWYGDLRGKPFAIEAENSILDISGFSKQYNCAFIWQKDGVKKLNLYLIINYFKGGKLRFKKIKPEAFEANRFYTVINKKSGEIVPMEVNFNFDDPNLIILPLAFGKRQGREFIWNDLLSLETGSLKLANGRVIEKTLYNRRTRQDEPALFVALTFERREVLDSSNIKPMNLIGVDRGENIPAVIALTDPEGCPLSRFKDSLGNPTHILRIGESYKEKQRTIQAKKEVEQRRAGGYSRKYASKAKNLADDMVRNTARDLLYYAVTQDAMLIFENLSRGFGRQGKRTFMAERQYTRMEDWLTAKLAYEGLPSKTYLSKTLAQYTSKTCSNCGFTITSADYDRVLEKLKKTATGWMTTINGKELKVEGQITYYNRYKRQNVVKDLSVELDRLSEESVNNDISSWTKGRSGEALSLLKKRFSHRPVQEKFVCLNCGFETHADEQAALNIARSWLFLRSQEYKKYQTNKTTGNTDKRAFVETWQSFYRKKLKEVWKPAV

SEQ ID NO: 32634 - protein, 979 aa, synthetic construct
  REGION 1..979: note = engineered CasX variant
QEIKRANKIRRRLVKDSNTKKAGKTGPMKTLLVRVMTPDLRERLENLRKKPENIPQPISNTSRANLNKLLTDYTEMKKAILHVYWEEFQKDPVGLMSRVAQPASKKIDQNKLKPEMDEKGNLTTAGFACSQCGQPLFVYKLEQVSEKGKAYTNYFGRCNVAEHEKLILLAQLKPEKDSDEAVTYSLGKFGQRALDFYSIHVTKESTHPVKPLAQIAGNRYASTPVGKALSDACMGTIASFLSKYQDIIIEHQKVVKGNQKRLESLRELAGKENLEYPSVTLPPQPHTKEGVDAYNEVIARVRMWVNLNLWQKLKLSRDDAKPLLRLKGFPSFPLVERQANAEVDWWDMVCNVKKLINEKKEDGKVFWQNLAGYKRQEALRPYLSSEEDRKKGKKFARYQLGDLLLHLEKKHGEDWGKVYDEAWERIDKKVEGLSKHIKLEEERRSEDAQSKAALTDWLRAKASFVIEGLKEADKDEFCRCELKLQKWYGDLRGKPFAIEAENSILDISGFSKQYNCAFIWQKDGVKKLNLYLIINYFKGGKLRFKKIKPEAFEANRFYTVINKKSGEIVPMEVNFNFDDPNLIILPLAFGKRQGREFIWNDLLSLETGSLKLANGRVIEKTLYNRRTRQDEPALFVALTFERREVLDSSNIKPMNLIGVDRGENIPAVIALTDPEGCPLSRFKDSLGNPTHILRIGESYKEKQRTIQAKKEVEQRRAGGYSRKYASKAKNLADDMVRNTARDLLYYAVTQDAMLIFENLSRGFGRQGKRTFMAERQYTRMEDWLTAKLAYEGLPSKTYLSKTLAQYTSKTCSNCGFTITSADYDRVLEKLKKTATGWMTTINGKELKVEGQITYYNRYKRQNVVKDLSVELDRLSEESVNNDISSWTKGRSGEALSLLKKRFSHRPVQEKFVCLNCGFETHADEQAALNIARSWLFLRSQEYKKYQTNKTTGNTDKRAFVETWQSFYRKKLKEVWKPAV

SEQ ID NO: 32635 - protein, 979 aa, synthetic construct
  REGION 1..979: note = engineered CasX variant
QEIKRANKIRRRLVKDSNTKKAGKTGPMKTLLVRVMTPDLRERLENLRKKPENIPQPISNTSRANLNKLLTDYTEMKKAILHVYWEEFQKDPVGLMSRVAQPASKKIDQNKLKPEMDEKGNLTTAGFACSQCGQPLFVYKLEQVSEKGKAYTNYFGRCNVAEHEKLILLAQLKPEKDSDEAVTYSLGKFGQRALDFYSIHVTKESTHPVKPLAQIAGNRYASAPVGKALSDACMGTIASFLSKYQDIIIEHQKVVKGNQKRLESLRELAGKENLEYPSVTLPPQPHTKEGVDAYNEVIARVRMWVNLNLWQKLKLSRDDAKPLLRLKGFPSFPLVERQANAEVDWWDMVCNVKKLINEKKEDGKVFWQNLAGYKRQEALRPYLSSEEDRKKGKKFARYQLGDLLLHLEKKHGEDWGKVYDEAWERIDKKVEGLSKHIKLEEERRSEDAQSKAALTDWLRAKASFVIEGLKEADKDEFCRCELKLQKWYGDLRGKPFAIEAENSILDISGFSKQYNCAFIWQKDGVKKLNLYLIINYFKGGKLRFKKIKPEAFEANRFYTVINKKSGEIVPMEVNFNFDDPNLIILPLAFGKRQGREFIWNDLLSLETGSLKLANGRVIEKTLYNRRTRQDEPALFVALTFERREVLDSSNIKPMNLIGVDRGENIPAVIALTDPEGCPLSRFKDSLGNPTHILRIGESYKEKQRTIQAKKEVEQRRAGGYSRKYASKAKNLADDMVRNTARDLLYYAVTQDAMLIFENLSRGFGRQGKRTFMAERQYTRMEDWLTAKLAYEGLPSKTYLSKTLAQYTSKTCSNCGFTITSADYDRVLEKLKKTATGWMTTINGKELKVEGQITYYNRYKRQNVVKDLSVELDRLSEESVNNDISSWTKGRSGEALSLLKKRFSHRPVQEKFVCLNCGFETHADEQAALNIARSWLFLRSQEYKKYQTNKTTGNTDKRAFVETWQSFYRKKLKEVWKPAV

SEQ ID NO: 32636 - protein, 979 aa, synthetic construct
  REGION 1..979: note = engineered CasX variant
QEIKRANKIRRRLVKDSNTKKAGKTGPMKTLLVRVMTPDLRERLENLRKKPENIPQPISNTSRANLNKLLTDYTEMKKAILHVYWEEFQKDPVGLMSRVAQPASKKIDQNKLKPEMDEKGNLTTAGFACSQCGQPLFVYKLEQVSEKGKAYTNYFGRCNVAEHEKLILLAQLKPEKDSDEAVTYSLGKFGQRALDFYSIHVTKESTHPVKPLAQIAGNRYASVPVGKALSDACMGTIASFLSKYQDIIIEHQKVVKGNQKRLESLRELAGKENLEYPSVTLPPQPHTKEGVDAYNEVIARVRMWVNLNLWQKLKLSRDDAKPLLRLKGFPSFPLVERQANAEVDWWDMVCNVKKLINEKKEDGKVFWQNLAGYKRQEALRPYLSSEEDRKKGKKFARYQLGDLLLHLEKKHGEDWGKVYDEAWERIDKKVEGLSKHIKLEEERRSEDAQSKAALTDWLRAKASFVIEGLKEADKDEFCRCELKLQKWYGDLRGKPFAIEAENSILDISGFSKQYNCAFIWQKDGVKKLNLYLIINYFKGGKLRFKKIKPEAFEANRFYTVINKKSGEIVPMEVNFNFDDPNLIILPLAFGKRQGREFIWNDLLSLETGSLKLANGRVIEKTLYNRRTRQDEPALFVALTFERREVLDSSNIKPMNLIGVDRGENIPAVIALTDPEGCPLSRFKDSLGNPTHILRIGESYKEKQRTIQAKKEVEQRRAGGYSRKYASKAKNLADDMVRNTARDLLYYAVTQDAMLIFENLSRGFGRQGKRTFMAERQYTRMEDWLTAKLAYEGLPSKTYLSKTLAQYTSKTCSNCGFTITSADYDRVLEKLKKTATGWMTTINGKELKVEGQITYYNRYKRQNVVKDLSVELDRLSEESVNNDISSWTKGRSGEALSLLKKRFSHRPVQEKFVCLNCGFETHADEQAALNIARSWLFLRSQEYKKYQTNKTTGNTDKRAFVETWQSFYRKKLKEVWKPAV

SEQ ID NO: 32637 - protein, 979 aa, synthetic construct
  REGION 1..979: note = engineered CasX variant
QEIKRANKIRRRLVKDSNTKKAGKTGPMKTLLVRVMTPDLRERLENLRKKPENIPQPISNTSRANLNKLLTDYTEMKKAILHVYWEEFQKDPVGLMSRVAQPASKKIDQNKLKPEMDEKGNLTTAGFACSQCGQPLFVYKLEQVSEKGKAYTNYFGRCNVAEHEKLIKLAQLKPEKDSDEAVTYSLGKFGQRALDFYSIHVTKESTHPVKPLAQIAGNRYASGPVGKALSDACMGTIASFLSKYQDIIIEHQKVVKGNQKRLESLRELAGKENLEYPSVTLPPQPHTKEGVDAYNEVIARVRMWVNLNLWQKLKLSRDDAKPLLRLKGFPSFPLVERQANAEVDWWDMVCNVKKLINEKKEDGKVFWQNLAGYKRQEALRPYLSSEEDRKKGKKFARYQLGDLLLHLEKKHGEDWGKVYDEAWERIDKKVEGLSKHIKLEEERRSEDAQSKAALTDWLRAKASFVIEGLKEADKDEFCRCELKLQKWYGDLRGKPFAIEAENSILDISGFSKQYNCAFIWQKDGVKKLNLYLIINYFKGGKLRFKKIKPEAFEANRFYTVINKKSGEIVPMEVNFNFDDPNLIILPLAFGKRQGREFIWNDLLSLETGSLKLANGRVIEKTLYNRRTRQDEPALFVALTFERREVLDSSNIKPMNLIGVDRGENIPAVIALTDPEGCPLSRFKDSLGNPTHILRIGESYKEKQRTIQAKKEVEQRRAGGYSRKYASKAKNLADDMVRNTARDLLYYAVTQDAMLIFENLSRGFGRQGKRTFMAERQYTRMEDWLTAKLAYEGLPSKTYLSKTLAQYTSKTCSNCGFTITSADYDRVLEKLKKTATGWMTTINGKELKVEGQITYYNRYKRQNVVKDLSVELDRLSEESVNNDISSWTKGRSGEALSLLKKRFSHRPVQEKFVCLNCGFETHADEQAALNIARSWLFLRSQEYKKYQTNKTTGNTDKRAFVETWQSFYRKKLKEVWKPAV

SEQ ID NO: 32638 - protein, 978 aa, synthetic construct
  REGION 1..978: note = engineered CasX variant
QEIKRANKIRRRLVKDSNTKKAGKTGPMKTLLVRVMTPDLRERLENLRKKPENIPQPISNTSRANLNKLLTDYTEMKKAILHVYWEEFQKDPVGLMSRVAQPASKKIDQNKLKPEMDEKGNLTTAGFACSQCGQPLFVYKLEQVSEKGKAYTNYFGRCNVAEHEKLILLAQLKPEKDSDEAVTYSLGKFGQRALDFYSIHVTKESTHPVKPLAQIAGNRYASPVGKALSDACMGTIASFLSKYQDIIIEHQKVVKGNQKRLESLRELAGKENLEYPSVTLPPQPHTKEGVDAYNEVIARVRMWVNLNLWQKLKLSRDDAKPLLRLKGFPSFPLVERQANAEVDWWDMVCNVKKLINEKKEDGKVFWQNLAGYKRQEALRPYLSSEEDRKKGKKFARYQLGDLLLHLEKKHGEDWGKVYDEAWERIDKKVEGLSKHIKLEEERRSEDAQSKAALTDWLRAKASFVIEGLKEADKDEFCRCELKLQKWYGDLRGKPFAIEAENSILDISGFSKQYNCAFIWQKDGVKKLNLYLIINYFKGGKLRFKKIKPEAFEANRFYTVINKKSGEIVPMEVNFNFDDPNLIILPLAFGKRQGREFIWNDLLSLETGSLKLANGRVIEKTLYNRRTRQDEPALFVALTFERREVLDSSNIKPMNLIGVDRGENIPAVIALTDPEGCPLSRFKDSLGNPTHILRIGESYKEKQRTIQAKKEVEQRRAGGYSRKYASKAKNLADDMVRNTARDLLYYAVTQDAMLIFENLSRGFGRQGKRTFMAERQYTRMEDWLTAKLAYEGLPSKTYLSKTLAQYTSKTCSNCGFTITSADYDRVLEKLKKTATGWMTTINGKELKVEGQITYYNRYKRQNVVKDLSVELDRLSEESVNNDISSWTKGRSGEALSLLKKRFSHRPVQEKFVCLNCGFETHADEQAALNIARSWLFLRSQEYKKYQTNKTTGNTDKRAFVETWQSFYRKKLKEVWKPAV

SEQ ID NO: 32639 - protein, 978 aa, synthetic construct
  REGION 1..978: note = engineered CasX variant
QEIKRANKIRRRLVKDSNTKKAGKTGPMKTLLVRVMTPDLRERLENLRKKPENIPQPISNTSRANLNKLLTDYTEMKKAILHVYWEEFQKDPVGLMSRVAQPASKKIDQNKLKPEMDEKGNLTTAGFACSQCGQPLFVYKLEQVSEKGKAYTNYFGRCNVAEHEKLILLAQLKPEKDSDEAVTYSLGKFGQRALDFYSIHVTKESTHPVKPLAQIAGNRYASYPVGKALSDACMGTIASFLSKYQDIIIEHQKVVKGNQKRLESLRELAGKENLEYPSVTLPPQPHTKEGVDAYNEVIARVRMWVNLNLWQKLKLSRDDAKPLLRLKGFPSFPLVERQANEVDWWDMVCNVKKLINEKKEDGKVFWQNLAGYKRQEALRPYLSSEEDRKKGKKFARTQLGDLLLHLEKKHGEDWGKVYDEAWERIDKKVEGLSKHIKLEEERRSEDAQSKAALTDWLRAKASFVIEGLKEADKDEFCRCELKLQKWYGDLRGKPFAIEAENSILDISGFSKQYNCAFIWQKDGVKKLNLYLIINYFKGGKLRFKKIKPEAFEANRFYTVINKKSGEIVPMEVNFNFDDPNLIILPLAFGKRQGREFIWNDLLSLETGSLKLANGRVIEKTLYNRRTRQDEPALFVALTFERREVLDSSNIKPMNLIGVDRGENIPAVIALTDPEGCPLSRFKDSLGNPTHILRIGESYKEKQRTIQAKKEVEQRRAGGYSRKYASKAKNLADDMVRNTARDLLYYAVTQDAMLIFENLSRGFGRQGKRTFMAERQYTRMEDWLTAKLAYEGLPSKTYLSKTLAQYTSKTCSNCGFTITSADYDRVLEKLKKTATGWMTTINGKELKVEGQITYYNRYKRQNVVKDLSVELDRLSEESVNNDISSWTKGRSGEALSLLKKRFSHRPVQEKFVCLNCGFETHADEQAALNIARSWLFLRSQEYKKYQTNKTTGNTDKRAFVETWQSFYRKKLKEVWKPAV

SEQ ID NO: 32640 - protein, 978 aa, synthetic construct
  REGION 1..978: note = engineered CasX variant
QEIKRANKIRRRLVKDSNTKKAGKTGPMKTLLVRVMTPDLRERLENLRKKPENIPQPISNTSRANLNKLLTDYTEMKKAILHVYWEEFQKDPVGLMSRVAQPASKKIDQNKLKPEMDEKGNLTTAGFACSQCGQPLFVYKLEQVSEKGKAYTNYFGRCNVAEHEKLILLAQLKPEKDSDEAVTYSLGKFGQRALDFYSIHVTKESTHPVKPLAQIAGNRYASHPVGKALSDACMGTIASFLSKYQDIIIEHQKVVKGNQKRLESLRELAGKENLEYPSVTLPPQPHTKEGVDAYNEVIARVRMWVNLNLWQKLKLSRDDAKPLLRLKGFPSFPLVERQANEVDWWDMVCNVKKLINEKKEDGKVFWQNLAGYKRQEALRPYLSSEEDRKKGKKFARTQLGDLLLHLEKKHGEDWGKVYDEAWERIDKKVEGLSKHIKLEEERRSEDAQSKAALTDWLRAKASFVIEGLKEADKDEFCRCELKLQKWYGDLRGKPFAIEAENSILDISGFSKQYNCAFIWQKDGVKKLNLYLIINYFKGGKLRFKKIKPEAFEANRFYTVINKKSGEIVPMEVNFNFDDPNLIILPLAFGKRQGREFIWNDLLSLETGSLKLANGRVIEKTLYNRRTRQDEPALFVALTFERREVLDSSNIKPMNLIGVDRGENIPAVIALTDPEGCPLSRFKDSLGNPTHILRIGESYKEKQRTIQAKKEVEQRRAGGYSRKYASKAKNLADDMVRNTARDLLYYAVTQDAMLIFENLSRGFGRQGKRTFMAERQYTRMEDWLTAKLAYEGLPSKTYLSKTLAQYTSKTCSNCGFTITSADYDRVLEKLKKTATGWMTTINGKELKVEGQITYYNRYKRQNVVKDLSVELDRLSEESVNNDISSWTKGRSGEALSLLKKRFSHRPVQEKFVCLNCGFETHADEQAALNIARSWLFLRSQEYKKYQTNKTTGNTDKRAFVETWQSFYRKKLKEVWKPAV

SEQ ID NO: 32641 - protein, 978 aa, synthetic construct
  REGION 1..978: note = engineered CasX variant
QEIKRANKIRRRLVKDSNTKKAGKTGPMKTLLVRVMTPDLRERLENLRKKPENIPQPISNTSRANLNKLLTDYTEMKKAILHVYWEEFQKDPVGLMSRVAQPASKKIDQNKLKPEMDEKGNLTTAGFACSQCGQPLFVYKLEQVSEKGKAYTNYFGRCNVAEHEKLILLAQLKPEKDSDEAVTYSLGKFGQRALDFYSIHVTKESTHPVKPLAQIAGNRYASSPVGKALSDACMGTIASFLSKYQDIIIEHQKVVKGNQKRLESLRELAGKENLEYPSVTLPPQPHTKEGVDAYNEVIARVRMWVNLNLWQKLKLSRDDAKPLLRLKGFPSFPLVERQANEVDWWDMVCNVKKLINEKKEDGKVFWQNLAGYKRQEALRPYLSSEEDRKKGKKFARTQLGDLLLHLEKKHGEDWGKVYDEAWERIDKKVEGLSKHIKLEEERRSEDAQSKAALTDWLRAKASFVIEGLKEADKDEFCRCELKLQKWYGDLRGKPFAIEAENSILDISGFSKQYNCAFIWQKDGVKKLNLYLIINYFKGGKLRFKKIKPEAFEANRFYTVINKKSGEIVPMEVNFNFDDPNLIILPLAFGKRQGREFIWNDLLSLETGSLKLANGRVIEKTLYNRRTRQDEPALFVALTFERREVLDSSNIKPMNLIGVDRGENIPAVIALTDPEGCPLSRFKDSLGNPTHILRIGESYKEKQRTIQAKKEVEQRRAGGYSRKYASKAKNLADDMVRNTARDLLYYAVTQDAMLIFENLSRGFGRQGKRTFMAERQYTRMEDWLTAKLAYEGLPSKTYLSKTLAQYTSKTCSNCGFTITSADYDRVLEKLKKTATGWMTTINGKELKVEGQITYYNRYKRQNVVKDLSVELDRLSEESVNNDISSWTKGRSGEALSLLKKRFSHRPVQEKFVCLNCGFETHADEQAALNIARSWLFLRSQEYKKYQTNKTTGNTDKRAFVETWQSFYRKKLKEVWKPAV

SEQ ID NO: 32642 - protein, 978 aa, synthetic construct
  REGION 1..978: note = engineered CasX variant
QEIKRANKIRRRLVKDSNTKKAGKTGPMKTLLVRVMTPDLRERLENLRKKPENIPQPISNTSRANLNKLLTDYTEMKKAILHVYWEEFQKDPVGLMSRVAQPASKKIDQNKLKPEMDEKGNLTTAGFACSQCGQPLFVYKLEQVSEKGKAYTNYFGRCNVAEHEKLILLAQLKPEKDSDEAVTYSLGKFGQRALDFYSIHVTKESTHPVKPLAQIAGNRYASTPVGKALSDACMGTIASFLSKYQDIIIEHQKVVKGNQKRLESLRELAGKENLEYPSVTLPPQPHTKEGVDAYNEVIARVRMWVNLNLWQKLKLSRDDAKPLLRLKGFPSFPLVERQANEVDWWDMVCNVKKLINEKKEDGKVFWQNLAGYKRQEALRPYLSSEEDRKKGKKFARTQLGDLLLHLEKKHGEDWGKVYDEAWERIDKKVEGLSKHIKLEEERRSEDAQSKAALTDWLRAKASFVIEGLKEADKDEFCRCELKLQKWYGDLRGKPFAIEAENSILDISGFSKQYNCAFIWQKDGVKKLNLYLIINYFKGGKLRFKKIKPEAFEANRFYTVINKKSGEIVPMEVNFNFDDPNLIILPLAFGKRQGREFIWNDLLSLETGSLKLANGRVIEKTLYNRRTRQDEPALFVALTFERREVLDSSNIKPMNLIGVDRGENIPAVIALTDPEGCPLSRFKDSLGNPTHILRIGESYKEKQRTIQAKKEVEQRRAGGYSRKYASKAKNLADDMVRNTARDLLYYAVTQDAMLIFENLSRGFGRQGKRTFMAERQYTRMEDWLTAKLAYEGLPSKTYLSKTLAQYTSKTCSNCGFTITSADYDRVLEKLKKTATGWMTTINGKELKVEGQITYYNRYKRQNVVKDLSVELDRLSEESVNNDISSWTKGRSGEALSLLKKRFSHRPVQEKFVCLNCGFETHADEQAALNIARSWLFLRSQEYKKYQTNKTTGNTDKRAFVETWQSFYRKKLKEVWKPAV

SEQ ID NO: 32643 - protein, 978 aa, synthetic construct
  REGION 1..978: note = engineered CasX variant
QEIKRANKIRRRLVKDSNTKKAGKTGPMKTLLVRVMTPDLRERLENLRKKPENIPQPISNTSRANLNKLLTDYTEMKKAILHVYWEEFQKDPVGLMSRVAQPASKKIDQNKLKPEMDEKGNLTTAGFACSQCGQPLFVYKLEQVSEKGKAYTNYFGRCNVAEHEKLILLAQLKPEKDSDEAVTYSLGKFGQRALDFYSIHVTKESTHPVKPLAQIAGNRYASAPVGKALSDACMGTIASFLSKYQDIIIEHQKVVKGNQKRLESLRELAGKENLEYPSVTLPPQPHTKEGVDAYNEVIARVRMWVNLNLWQKLKLSRDDAKPLLRLKGFPSFPLVERQANEVDWWDMVCNVKKLINEKKEDGKVFWQNLAGYKRQEALRPYLSSEEDRKKGKKFARTQLGDLLLHLEKKHGEDWGKVYDEAWERIDKKVEGLSKHIKLEEERRSEDAQSKAALTDWLRAKASFVIEGLKEADKDEFCRCELKLQKWYGDLRGKPFAIEAENSILDISGFSKQYNCAFIWQKDGVKKLNLYLIINYFKGGKLRFKKIKPEAFEANRFYTVINKKSGEIVPMEVNFNFDDPNLIILPLAFGKRQGREFIWNDLLSLETGSLKLANGRVIEKTLYNRRTRQDEPALFVALTFERREVLDSSNIKPMNLIGVDRGENIPAVIALTDPEGCPLSRFKDSLGNPTHILRIGESYKEKQRTIQAKKEVEQRRAGGYSRKYASKAKNLADDMVRNTARDLLYYAVTQDAMLIFENLSRGFGRQGKRTFMAERQYTRMEDWLTAKLAYEGLPSKTYLSKTLAQYTSKTCSNCGFTITSADYDRVLEKLKKTATGWMTTINGKELKVEGQITYYNRYKRQNVVKDLSVELDRLSEESVNNDISSWTKGRSGEALSLLKKRFSHRPVQEKFVCLNCGFETHADEQAALNIARSWLFLRSQEYKKYQTNKTTGNTDKRAFVETWQSFYRKKLKEVWKPAV

SEQ ID NO: 32644 - protein, 978 aa, synthetic construct
  REGION 1..978: note = engineered CasX variant
QEIKRANKIRRRLVKDSNTKKAGKTGPMKTLLVRVMTPDLRERLENLRKKPENIPQPISNTSRANLNKLLTDYTEMKKAILHVYWEEFQKDPVGLMSRVAQPASKKIDQNKLKPEMDEKGNLTTAGFACSQCGQPLFVYKLEQVSEKGKAYTNYFGRCNVAEHEKLILLAQLKPEKDSDEAVTYSLGKFGQRALDFYSIHVTKESTHPVKPLAQIAGNRYASVPVGKALSDACMGTIASFLSKYQDIIIEHQKVVKGNQKRLESLRELAGKENLEYPSVTLPPQPHTKEGVDAYNEVIARVRMWVNLNLWQKLKLSRDDAKPLLRLKGFPSFPLVERQANEVDWWDMVCNVKKLINEKKEDGKVFWQNLAGYKRQEALRPYLSSEEDRKKGKKFARTQLGDLLLHLEKKHGEDWGKVYDEAWERIDKKVEGLSKHIKLEEERRSEDAQSKAALTDWLRAKASFVIEGLKEADKDEFCRCELKLQKWYGDLRGKPFAIEAENSILDISGFSKQYNCAFIWQKDGVKKLNLYLIINYFKGGKLRFKKIKPEAFEANRFYTVINKKSGEIVPMEVNFNFDDPNLIILPLAFGKRQGREFIWNDLLSLETGSLKLANGRVIEKTLYNRRTRQDEPALFVALTFERREVLDSSNIKPMNLIGVDRGENIPAVIALTDPEGCPLSRFKDSLGNPTHILRIGESYKEKQRTIQAKKEVEQRRAGGYSRKYASKAKNLADDMVRNTARDLLYYAVTQDAMLIFENLSRGFGRQGKRTFMAERQYTRMEDWLTAKLAYEGLPSKTYLSKTLAQYTSKTCSNCGFTITSADYDRVLEKLKKTATGWMTTINGKELKVEGQITYYNRYKRQNVVKDLSVELDRLSEESVNNDISSWTKGRSGEALSLLKKRFSHRPVQEKFVCLNCGFETHADEQAALNIARSWLFLRSQEYKKYQTNKTTGNTDKRAFVETWQSFYRKKLKEVWKPAV

SEQ ID NO: 32645 - protein, 978 aa, synthetic construct
  REGION 1..978: note = engineered CasX variant
QEIKRANKIRRRLVKDSNTKKAGKTGPMKTLLVRVMTPDLRERLENLRKKPENIPQPISNTSRANLNKLLTDYTEMKKAILHVYWEEFQKDPVGLMSRVAQPASKKIDQNKLKPEMDEKGNLTTAGFACSQCGQPLFVYKLEQVSEKGKAYTNYFGRCNVAEHEKLIKLAQLKPEKDSDEAVTYSLGKFGQRALDFYSIHVTKESTHPVKPLAQIAGNRYASGPVGKALSDACMGTIASFLSKYQDIIIEHQKVVKGNQKRLESLRELAGKENLEYPSVTLPPQPHTKEGVDAYNEVIARVRMWVNLNLWQKLKLSRDDAKPLLRLKGFPSFPLVERQANEVDWWDMVCNVKKLINEKKEDGKVFWQNLAGYKRQEALRPYLSSEEDRKKGKKFARTQLGDLLLHLEKKHGEDWGKVYDEAWERIDKKVEGLSKHIKLEEERRSEDAQSKAALTDWLRAKASFVIEGLKEADKDEFCRCELKLQKWYGDLRGKPFAIEAENSILDISGFSKQYNCAFIWQKDGVKKLNLYLIINYFKGGKLRFKKIKPEAFEANRFYTVINKKSGEIVPMEVNFNFDDPNLIILPLAFGKRQGREFIWNDLLSLETGSLKLANGRVIEKTLYNRRTRQDEPALFVALTFERREVLDSSNIKPMNLIGVDRGENIPAVIALTDPEGCPLSRFKDSLGNPTHILRIGESYKEKQRTIQAKKEVEQRRAGGYSRKYASKAKNLADDMVRNTARDLLYYAVTQDAMLIFENLSRGFGRQGKRTFMAERQYTRMEDWLTAKLAYEGLPSKTYLSKTLAQYTSKTCSNCGFTITSADYDRVLEKLKKTATGWMTTINGKELKVEGQITYYNRYKRQNVVKDLSVELDRLSEESVNNDISSWTKGRSGEALSLLKKRFSHRPVQEKFVCLNCGFETHADEQAALNIARSWLFLRSQEYKKYQTNKTTGNTDKRAFVETWQSFYRKKLKEVWKPAV

SEQ ID NO: 32646 - protein, 977 aa, synthetic construct
  REGION 1..977: note = engineered CasX variant
QEIKRANKIRRRLVKDSNTKKAGKTGPMKTLLVRVMTPDLRERLENLRKKPENIPQPISNTSRANLNKLLTDYTEMKKAILHVYWEEFQKDPVGLMSRVAQPASKKIDQNKLKPEMDEKGNLTTAGFACSQCGQPLFVYKLEQVSEKGKAYTNYFGRCNVAEHEKLILLAQLKPEKDSDEAVTYSLGKFGQRALDFYSIHVTKESTHPVKPLAQIAGNRYASPVGKALSDACMGTIASFLSKYQDIIIEHQKVVKGNQKRLESLRELAGKENLEYPSVTLPPQPHTKEGVDAYNEVIARVRMWVNLNLWQKLKLSRDDAKPLLRLKGFPSFPLVERQANEVDWWDMVCNVKKLINEKKEDGKVFWQNLAGYKRQEALRPYLSSEEDRKKGKKFARTQLGDLLLHLEKKHGEDWGKVYDEAWERIDKKVEGLSKHIKLEEERRSEDAQSKAALTDWLRAKASFVIEGLKEADKDEFCRCELKLQKWYGDLRGKPFAIEAENSILDISGFSKQYNCAFIWQKDGVKKLNLYLIINYFKGGKLRFKKIKPEAFEANRFYTVINKKSGEIVPMEVNFNFDDPNLIILPLAFGKRQGREFIWNDLLSLETGSLKLANGRVIEKTLYNRRTRQDEPALFVALTFERREVLDSSNIKPMNLIGVDRGENIPAVIALTDPEGCPLSRFKDSLGNPTHILRIGESYKEKQRTIQAKKEVEQRRAGGYSRKYASKAKNLADDMVRNTARDLLYYAVTQDAMLIFENLSRGFGRQGKRTFMAERQYTRMEDWLTAKLAYEGLPSKTYLSKTLAQYTSKTCSNCGFTITSADYDRVLEKLKKTATGWMTTINGKELKVEGQITYYNRYKRQNVVKDLSVELDRLSEESVNNDISSWTKGRSGEALSLLKKRFSHRPVQEKFVCLNCGFETHADEQAALNIARSWLFLRSQEYKKYQTNKTTGNTDKRAFVETWQSFYRKKLKEVWKPAV

SEQ ID NO: 32647 - protein, 979 aa, synthetic construct
  REGION 1..979: note = engineered CasX variant
QEIKRANKIRRRLVKDSNTKKAGKTGPMKTLLVRVMTPDLRERLENLRKKPENIPQPISNTSRANLNKLLTDYTEMKKAILHVYWEEFQKDPVGLMSRVAQPASKKIDQNKLKPEMDEKGNLTTAGFACSQCGQPLFVYKLEQVSEKGKAYTNYFGRCNVAEHEKLILLAQLKPEKDSDEAVTYSLGKFGQRALDFYSIHVTKESTHPVKPLAQIAGNRYASYPVGKALSDACMGTIASFLSKYQDIIIEHQKVVKGNQKRLESLRELAGKENLEYPSVTLPPQPHTKEGVDAYNEVIARVRMWVNLNLWQKLKLSRDDAKPLLRLKGFPSFPLVERQANEVDWWDMVCNVKKLINEKKEDGKVFWQNLAGYKRQEALRPYLSSEEDRKKGKKFARYQLGDLLLHLEKKHEGEDWGKVYDEAWERIDKKVEGLSKHIKLEEERRSEDAQSKAALTDWLRAKASFVIEGLKEADKDEFCRCELKLQKWYGDLRGKPFAIEAENSILDISGFSKQYNCAFIWQKDGVKKLNLYLIINYFKGGKLRFKKIKPEAFEANRFYTVINKKSGEIVPMEVNFNFDDPNLIILPLAFGKRQGREFIWNDLLSLETGSLKLANGRVIEKTLYNRRTRQDEPALFVALTFERREVLDSSNIKPMNLIGVDRGENIPAVIALTDPEGCPLSRFKDSLGNPTHILRIGESYKEKQRTIQAKKEVEQRRAGGYSRKYASKAKNLADDMVRNTARDLLYYAVTQDAMLIFENLSRGFGRQGKRTFMAERQYTRMEDWLTAKLAYEGLPSKTYLSKTLAQYTSKTCSNCGFTITSADYDRVLEKLKKTATGWMTTINGKELKVEGQITYYNRYKRQNVVKDLSVELDRLSEESVNNDISSWTKGRSGEALSLLKKRFSHRPVQEKFVCLNCGFETHADEQAALNIARSWLFLRSQEYKKYQTNKTTGNTDKRAFVETWQSFYRKKLKEVWKPAV

SEQ ID NO: 32648 - protein, 979 aa, synthetic construct
  REGION 1..979: note = engineered CasX variant
QEIKRANKIRRRLVKDSNTKKAGKTGPMKTLLVRVMTPDLRERLENLRKKPENIPQPISNTSRANLNKLLTDYTEMKKAILHVYWEEFQKDPVGLMSRVAQPASKKIDQNKLKPEMDEKGNLTTAGFACSQCGQPLFVYKLEQVSEKGKAYTNYFGRCNVAEHEKLILLAQLKPEKDSDEAVTYSLGKFGQRALDFYSIHVTKESTHPVKPLAQIAGNRYASHPVGKALSDACMGTIASFLSKYQDIIIEHQKVVKGNQKRLESLRELAGKENLEYPSVTLPPQPHTKEGVDAYNEVIARVRMWVNLNLWQKLKLSRDDAKPLLRLKGFPSFPLVERQANEVDWWDMVCNVKKLINEKKEDGKVFWQNLAGYKRQEALRPYLSSEEDRKKGKKFARYQLGDLLLHLEKKHEGEDWGKVYDEAWERIDKKVEGLSKHIKLEEERRSEDAQSKAALTDWLRAKASFVIEGLKEADKDEFCRCELKLQKWYGDLRGKPFAIEAENSILDISGFSKQYNCAFIWQKDGVKKLNLYLIINYFKGGKLRFKKIKPEAFEANRFYTVINKKSGEIVPMEVNFNFDDPNLIILPLAFGKRQGREFIWNDLLSLETGSLKLANGRVIEKTLYNRRTRQDEPALFVALTFERREVLDSSNIKPMNLIGVDRGENIPAVIALTDPEGCPLSRFKDSLGNPTHILRIGESYKEKQRTIQAKKEVEQRRAGGYSRKYASKAKNLADDMVRNTARDLLYYAVTQDAMLIFENLSRGFGRQGKRTFMAERQYTRMEDWLTAKLAYEGLPSKTYLSKTLAQYTSKTCSNCGFTITSADYDRVLEKLKKTATGWMTTINGKELKVEGQITYYNRYKRQNVVKDLSVELDRLSEESVNNDISSWTKGRSGEALSLLKKRFSHRPVQEKFVCLNCGFETHADEQAALNIARSWLFLRSQEYKKYQTNKTTGNTDKRAFVETWQSFYRKKLKEVWKPAV

SEQ ID NO: 32649 - protein, 979 aa, synthetic construct
  REGION 1..979: note = engineered CasX variant
QEIKRANKIRRRLVKDSNTKKAGKTGPMKTLLVRVMTPDLRERLENLRKKPENIPQPISNTSRANLNKLLTDYTEMKKAILHVYWEEFQKDPVGLMSRVAQPASKKIDQNKLKPEMDEKGNLTTAGFACSQCGQPLFVYKLEQVSEKGKAYTNYFGRCNVAEHEKLILLAQLKPEKDSDEAVTYSLGKFGQRALDFYSIHVTKESTHPVKPLAQIAGNRYASSPVGKALSDACMGTIASFLSKYQDIIIEHQKVVKGNQKRLESLRELAGKENLEYPSVTLPPQPHTKEGVDAYNEVIARVRMWVNLNLWQKLKLSRDDAKPLLRLKGFPSFPLVERQANEVDWWDMVCNVKKLINEKKEDGKVFWQNLAGYKRQEALRPYLSSEEDRKKGKKFARYQLGDLLLHLEKKHEGEDWGKVYDEAWERIDKKVEGLSKHIKLEEERRSEDAQSKAALTDWLRAKASFVIEGLKEADKDEFCRCELKLQKWYGDLRGKPFAIEAENSILDISGFSKQYNCAFIWQKDGVKKLNLYLIINYFKGGKLRFKKIKPEAFEANRFYTVINKKSGEIVPMEVNFNFDDPNLIILPLAFGKRQGREFIWNDLLSLETGSLKLANGRVIEKTLYNRRTRQDEPALFVALTFERREVLDSSNIKPMNLIGVDRGENIPAVIALTDPEGCPLSRFKDSLGNPTHILRIGESYKEKQRTIQAKKEVEQRRAGGYSRKYASKAKNLADDMVRNTARDLLYYAVTQDAMLIFENLSRGFGRQGKRTFMAERQYTRMEDWLTAKLAYEGLPSKTYLSKTLAQYTSKTCSNCGFTITSADYDRVLEKLKKTATGWMTTINGKELKVEGQITYYNRYKRQNVVKDLSVELDRLSEESVNNDISSWTKGRSGEALSLLKKRFSHRPVQEKFVCLNCGFETHADEQAALNIARSWLFLRSQEYKKYQTNKTTGNTDKRAFVETWQSFYRKKLKEVWKPAV

SEQ ID NO: 32650 - protein, 979 aa, synthetic construct
  REGION 1..979: note = engineered CasX variant
QEIKRANKIRRRLVKDSNTKKAGKTGPMKTLLVRVMTPDLRERLENLRKKPENIPQPISNTSRANLNKLLTDYTEMKKAILHVYWEEFQKDPVGLMSRVAQPASKKIDQNKLKPEMDEKGNLTTAGFACSQCGQPLFVYKLEQVSEKGKAYTNYFGRCNVAEHEKLILLAQLKPEKDSDEAVTYSLGKFGQRALDFYSIHVTKESTHPVKPLAQIAGNRYASTPVGKALSDACMGTIASFLSKYQDIIIEHQKVVKGNQKRLESLRELAGKENLEYPSVTLPPQPHTKEGVDAYNEVIARVRMWVNLNLWQKLKLSRDDAKPLLRLKGFPSFPLVERQANEVDWWDMVCNVKKLINEKKEDGKVFWQNLAGYKRQEALRPYLSSEEDRKKGKKFARYQLGDLLLHLEKKHEGEDWGKVYDEAWERIDKKVEGLSKHIKLEEERRSEDAQSKAALTDWLRAKASFVIEGLKEADKDEFCRCELKLQKWYGDLRGKPFAIEAENSILDISGFSKQYNCAFIWQKDGVKKLNLYLIINYFKGGKLRFKKIKPEAFEANRFYTVINKKSGEIVPMEVNFNFDDPNLIILPLAFGKRQGREFIWNDLLSLETGSLKLANGRVIEKTLYNRRTRQDEPALFVALTFERREVLDSSNIKPMNLIGVDRGENIPAVIALTDPEGCPLSRFKDSLGNPTHILRIGESYKEKQRTIQAKKEVEQRRAGGYSRKYASKAKNLADDMVRNTARDLLYYAVTQDAMLIFENLSRGFGRQGKRTFMAERQYTRMEDWLTAKLAYEGLPSKTYLSKTLAQYTSKTCSNCGFTITSADYDRVLEKLKKTATGWMTTINGKELKVEGQITYYNRYKRQNVVKDLSVELDRLSEESVNNDISSWTKGRSGEALSLLKKRFSHRPVQEKFVCLNCGFETHADEQAALNIARSWLFLRSQEYKKYQTNKTTGNTDKRAFVETWQSFYRKKLKEVWKPAV

SEQ ID NO: 32651 - protein, 979 aa, synthetic construct
  REGION 1..979: note = engineered CasX variant
QEIKRANKIRRRLVKDSNTKKAGKTGPMKTLLVRVMTPDLRERLENLRKKPENIPQPISNTSRANLNKLLTDYTEMKKAILHVYWEEFQKDPVGLMSRVAQPASKKIDQNKLKPEMDEKGNLTTAGFACSQCGQPLFVYKLEQVSEKGKAYTNYFGRCNVAEHEKLILLAQLKPEKDSDEAVTYSLGKFGQRALDFYSIHVTKESTHPVKPLAQIAGNRYASAPVGKALSDACMGTIASFLSKYQDIIIEHQKVVKGNQKRLESLRELAGKENLEYPSVTLPPQPHTKEGVDAYNEVIARVRMWVNLNLWQKLKLSRDDAKPLLRLKGFPSFPLVERQANEVDWWDMVCNVKKLINEKKEDGKVFWQNLAGYKRQEALRPYLSSEEDRKKGKKFARYQLGDLLLHLEKKHEGEDWGKVYDEAWERIDKKVEGLSKHIKLEEERRSEDAQSKAALTDWLRAKASFVIEGLKEADKDEFCRCELKLQKWYGDLRGKPFAIEAENSILDISGFSKQYNCAFIWQKDGVKKLNLYLIINYFKGGKLRFKKIKPEAFEANRFYTVINKKSGEIVPMEVNFNFDDPNLIILPLAFGKRQGREFIWNDLLSLETGSLKLANGRVIEKTLYNRRTRQDEPALFVALTFERREVLDSSNIKPMNLIGVDRGENIPAVIALTDPEGCPLSRFKDSLGNPTHILRIGESYKEKQRTIQAKKEVEQRRAGGYSRKYASKAKNLADDMVRNTARDLLYYAVTQDAMLIFENLSRGFGRQGKRTFMAERQYTRMEDWLTAKLAYEGLPSKTYLSKTLAQYTSKTCSNCGFTITSADYDRVLEKLKKTATGWMTTINGKELKVEGQITYYNRYKRQNVVKDLSVELDRLSEESVNNDISSWTKGRSGEALSLLKKRFSHRPVQEKFVCLNCGFETHADEQAALNIARSWLFLRSQEYKKYQTNKTTGNTDKRAFVETWQSFYRKKLKEVWKPAV

SEQ ID NO: 32652 - protein, 979 aa, synthetic construct
  REGION 1..979: note = engineered CasX variant
QEIKRANKIRRRLVKDSNTKKAGKTGPMKTLLVRVMTPDLRERLENLRKKPENIPQPISNTSRANLNKLLTDYTEMKKAILHVYWEEFQKDPVGLMSRVAQPASKKIDQNKLKPEMDEKGNLTTAGFACSQCGQPLFVYKLEQVSEKGKAYTNYFGRCNVAEHEKLILLAQLKPEKDSDEAVTYSLGKFGQRALDFYSIHVTKESTHPVKPLAQIAGNRYASVPVGKALSDACMGTIASFLSKYQDIIIEHQKVVKGNQKRLESLRELAGKENLEYPSVTLPPQPHTKEGVDAYNEVIARVRMWVNLNLWQKLKLSRDDAKPLLRLKGFPSFPLVERQANEVDWWDMVCNVKKLINEKKEDGKVFWQNLAGYKRQEALRPYLSSEEDRKKGKKFARYQLGDLLLHLEKKHEGEDWGKVYDEAWERIDKKVEGLSKHIKLEEERRSEDAQSKAALTDWLRAKASFVIEGLKEADKDEFCRCELKLQKWYGDLRGKPFAIEAENSILDISGFSKQYNCAFIWQKDGVKKLNLYLIINYFKGGKLRFKKIKPEAFEANRFYTVINKKSGEIVPMEVNFNFDDPNLIILPLAFGKRQGREFIWNDLLSLETGSLKLANGRVIEKTLYNRRTRQDEPALFVALTFERREVLDSSNIKPMNLIGVDRGENIPAVIALTDPEGCPLSRFKDSLGNPTHILRIGESYKEKQRTIQAKKEVEQRRAGGYSRKYASKAKNLADDMVRNTARDLLYYAVTQDAMLIFENLSRGFGRQGKRTFMAERQYTRMEDWLTAKLAYEGLPSKTYLSKTLAQYTSKTCSNCGFTITSADYDRVLEKLKKTATGWMTTINGKELKVEGQITYYNRYKRQNVVKDLSVELDRLSEESVNNDISSWTKGRSGEALSLLKKRFSHRPVQEKFVCLNCGFETHADEQAALNIARSWLFLRSQEYKKYQTNKTTGNTDKRAFVETWQSFYRKKLKEVWKPAV

SEQ ID NO: 32653 - protein, 979 aa, synthetic construct
  REGION 1..979: note = engineered CasX variant
QEIKRANKIRRRLVKDSNTKKAGKTGPMKTLLVRVMTPDLRERLENLRKKPENIPQPISNTSRANLNKLLTDYTEMKKAILHVYWEEFQKDPVGLMSRVAQPASKKIDQNKLKPEMDEKGNLTTAGFACSQCGQPLFVYKLEQVSEKGKAYTNYFGRCNVAEHEKLIKLAQLKPEKDSDEAVTYSLGKFGQRALDFYSIHVTKESTHPVKPLAQIAGNRYASGPVGKALSDACMGTIASFLSKYQDIIIEHQKVVKGNQKRLESLRELAGKENLEYPSVTLPPQPHTKEGVDAYNEVIARVRMWVNLNLWQKLKLSRDDAKPLLRLKGFPSFPLVERQANEVDWWDMVCNVKKLINEKKEDGKVFWQNLAGYKRQEALRPYLSSEEDRKKGKKFARYQLGDLLLHLEKKHEGEDWGKVYDEAWERIDKKVEGLSKHIKLEEERRSEDAQSKAALTDWLRAKASFVIEGLKEADKDEFCRCELKLQKWYGDLRGKPFAIEAENSILDISGFSKQYNCAFIWQKDGVKKLNLYLIINYFKGGKLRFKKIKPEAFEANRFYTVINKKSGEIVPMEVNFNFDDPNLIILPLAFGKRQGREFIWNDLLSLETGSLKLANGRVIEKTLYNRRTRQDEPALFVALTFERREVLDSSNIKPMNLIGVDRGENIPAVIALTDPEGCPLSRFKDSLGNPTHILRIGESYKEKQRTIQAKKEVEQRRAGGYSRKYASKAKNLADDMVRNTARDLLYYAVTQDAMLIFENLSRGFGRQGKRTFMAERQYTRMEDWLTAKLAYEGLPSKTYLSKTLAQYTSKTCSNCGFTITSADYDRVLEKLKKTATGWMTTINGKELKVEGQITYYNRYKRQNVVKDLSVELDRLSEESVNNDISSWTKGRSGEALSLLKKRFSHRPVQEKFVCLNCGFETHADEQAALNIARSWLFLRSQEYKKYQTNKTTGNTDKRAFVETWQSFYRKKLKEVWKPAV

SEQ ID NO: 32654 - protein, 978 aa, synthetic construct
  REGION 1..978: note = engineered CasX variant
QEIKRANKIRRRLVKDSNTKKAGKTGPMKTLLVRVMTPDLRERLENLRKKPENIPQPISNTSRANLNKLLTDYTEMKKAILHVYWEEFQKDPVGLMSRVAQPASKKIDQNKLKPEMDEKGNLTTAGFACSQCGQPLFVYKLEQVSEKGKAYTNYFGRCNVAEHEKLILLAQLKPEKDSDEAVTYSLGKFGQRALDFYSIHVTKESTHPVKPLAQIAGNRYASPVGKALSDACMGTIASFLSKYQDIIIEHQKVVKGNQKRLESLRELAGKENLEYPSVTLPPQPHTKEGVDAYNEVIARVRMWVNLNLWQKLKLSRDDAKPLLRLKGFPSFPLVERQANEVDWWDMVCNVKKLINEKKEDGKVFWQNLAGYKRQEALRPYLSSEEDRKKGKKFARYQLGDLLLHLEKKHEGEDWGKVYDEAWERIDKKVEGLSKHIKLEEERRSEDAQSKAALTDWLRAKASFVIEGLKEADKDEFCRCELKLQKWYGDLRGKPFAIEAENSILDISGFSKQYNCAFIWQKDGVKKLNLYLIINYFKGGKLRFKKIKPEAFEANRFYTVINKKSGEIVPMEVNFNFDDPNLIILPLAFGKRQGREFIWNDLLSLETGSLKLANGRVIEKTLYNRRTRQDEPALFVALTFERREVLDSSNIKPMNLIGVDRGENIPAVIALTDPEGCPLSRFKDSLGNPTHILRIGESYKEKQRTIQAKKEVEQRRAGGYSRKYASKAKNLADDMVRNTARDLLYYAVTQDAMLIFENLSRGFGRQGKRTFMAERQYTRMEDWLTAKLAYEGLPSKTYLSKTLAQYTSKTCSNCGFTITSADYDRVLEKLKKTATGWMTTINGKELKVEGQITYYNRYKRQNVVKDLSVELDRLSEESVNNDISSWTKGRSGEALSLLKKRFSHRPVQEKFVCLNCGFETHADEQAALNIARSWLFLRSQEYKKYQTNKTTGNTDKRAFVETWQSFYRKKLKEVWKPAV

SEQ ID NO: 32655 - protein, 978 aa, synthetic construct
  REGION 1..978: note = engineered CasX variant
QEIKRANKIRRRLVKDSNTKKAGKTGPMKTLLVRVMTPDLRERLENLRKKPENIPQPISNTSRANLNKLLTDYTEMKKAILHVYWEEFQKDPVGLMSRVAQPASKKIDQNKLKPEMDEKGNLTTAGFACSQCGQPLFVYKLEQVSEKGKAYTNYFGRCNVAEHEKLILLAQLKPEKDSDEAVTYSLGKFGQRALDFYSIHVTKESTHPVKPLAQIAGNRYASYPVGKALSDACMGTIASFLSKYQDIIIEHQKVVKGNQKRLESLRELAGKENLEYPSVTLPPQPHTKEGVDAYNEVIARVRMWVNLNLWQKLKLSRDDAKPLLRLKGFPSFPLVERQANEVDWWDMVCNVKKLINEKKEDGKVFWQNLAGYKRQEALRPYLSSEEDRKKGKKFARYQLGDLLLHLEKKHGEDWGKVYDEAWERIDKKVEGLSKHIKLEEERRSEDAQSKAALTDWLRAKASFVIEGLKEADKDEFCRCDLKLQKWYGDLRGKPFAIEAENSILDISGFSKQYNCAFIWQKDGVKKLNLYLIINYFKGGKLRFKKIKPEAFEANRFYTVINKKSGEIVPMEVNFNFDDPNLIILPLAFGKRQGREFIWNDLLSLETGSLKLANGRVIEKTLYNRRTRQDEPALFVALTFERREVLDSSNIKPMNLIGVDRGENIPAVIALTDPEGCPLSRFKDSLGNPTHILRIGESYKEKQRTIQAKKEVEQRRAGGYSRKYASKAKNLADDMVRNTARDLLYYAVTQDAMLIFENLSRGFGRQGKRTFMAERQYTRMEDWLTAKLAYEGLPSKTYLSKTLAQYTSKTCSNCGFTITSADYDRVLEKLKKTATGWMTTINGKELKVEGQITYYNRYKRQNVVKDLSVELDRLSEESVNNDISSWTKGRSGEALSLLKKRFSHRPVQEKFVCLNCGFETHADEQAALNIARSWLFLRSQEYKKYQTNKTTGNTDKRAFVETWQSFYRKKLKEVWKPAV

SEQ ID NO: 32656 - protein, 978 aa, synthetic construct
  REGION 1..978: note = engineered CasX variant
QEIKRANKIRRRLVKDSNTKKAGKTGPMKTLLVRVMTPDLRERLENLRKKPENIPQPISNTSRANLNKLLTDYTEMKKAILHVYWEEFQKDPVGLMSRVAQPASKKIDQNKLKPEMDEKGNLTTAGFACSQCGQPLFVYKLEQVSEKGKAYTNYFGRCNVAEHEKLILLAQLKPEKDSDEAVTYSLGKFGQRALDFYSIHVTKESTHPVKPLAQIAGNRYASHPVGKALSDACMGTIASFLSKYQDIIIEHQKVVKGNQKRLESLRELAGKENLEYPSVTLPPQPHTKEGVDAYNEVIARVRMWVNLNLWQKLKLSRDDAKPLLRLKGFPSFPLVERQANEVDWWDMVCNVKKLINEKKEDGKVFWQNLAGYKRQEALRPYLSSEEDRKKGKKFARYQLGDLLLHLEKKHGEDWGKVYDEAWERIDKKVEGLSKHIKLEEERRSEDAQSKAALTDWLRAKASFVIEGLKEADKDEFCRCDLKLQKWYGDLRGKPFAIEAENSILDISGFSKQYNCAFIWQKDGVKKLNLYLIINYFKGGKLRFKKIKPEAFEANRFYTVINKKSGEIVPMEVNFNFDDPNLIILPLAFGKRQGREFIWNDLLSLETGSLKLANGRVIEKTLYNRRTRQDEPALFVALTFERREVLDSSNIKPMNLIGVDRGENIPAVIALTDPEGCPLSRFKDSLGNPTHILRIGESYKEKQRTIQAKKEVEQRRAGGYSRKYASKAKNLADDMVRNTARDLLYYAVTQDAMLIFENLSRGFGRQGKRTFMAERQYTRMEDWLTAKLAYEGLPSKTYLSKTLAQYTSKTCSNCGFTITSADYDRVLEKLKKTATGWMTTINGKELKVEGQITYYNRYKRQNVVKDLSVELDRLSEESVNNDISSWTKGRSGEALSLLKKRFSHRPVQEKFVCLNCGFETHADEQAALNIARSWLFLRSQEYKKYQTNKTTGNTDKRAFVETWQSFYRKKLKEVWKPAV

SEQ ID NO: 32657 - protein, 978 aa, synthetic construct
  REGION 1..978: note = engineered CasX variant
QEIKRANKIRRRLVKDSNTKKAGKTGPMKTLLVRVMTPDLRERLENLRKKPENIPQPISNTSRANLNKLLTDYTEMKKAILHVYWEEFQKDPVGLMSRVAQPASKKIDQNKLKPEMDEKGNLTTAGFACSQCGQPLFVYKLEQVSEKGKAYTNYFGRCNVAEHEKLILLAQLKPEKDSDEAVTYSLGKFGQRALDFYSIHVTKESTHPVKPLAQIAGNRYASSPVGKALSDACMGTIASFLSKYQDIIIEHQKVVKGNQKRLESLRELAGKENLEYPSVTLPPQPHTKEGVDAYNEVIARVRMWVNLNLWQKLKLSRDDAKPLLRLKGFPSFPLVERQANEVDWWDMVCNVKKLINEKKEDGKVFWQNLAGYKRQEALRPYLSSEEDRKKGKKFARYQLGDLLLHLEKKHGEDWGKVYDEAWERIDKKVEGLSKHIKLEEERRSEDAQSKAALTDWLRAKASFVIEGLKEADKDEFCRCDLKLQKWYGDLRGKPFAIEAENSILDISGFSKQYNCAFIWQKDGVKKLNLYLIINYFKGGKLRFKKIKPEAFEANRFYTVINKKSGEIVPMEVNFNFDDPNLIILPLAFGKRQGREFIWNDLLSLETGSLKLANGRVIEKTLYNRRTRQDEPALFVALTFERREVLDSSNIKPMNLIGVDRGENIPAVIALTDPEGCPLSRFKDSLGNPTHILRIGESYKEKQRTIQAKKEVEQRRAGGYSRKYASKAKNLADDMVRNTARDLLYYAVTQDAMLIFENLSRGFGRQGKRTFMAERQYTRMEDWLTAKLAYEGLPSKTYLSKTLAQYTSKTCSNCGFTITSADYDRVLEKLKKTATGWMTTINGKELKVEGQITYYNRYKRQNVVKDLSVELDRLSEESVNNDISSWTKGRSGEALSLLKKRFSHRPVQEKFVCLNCGFETHADEQAALNIARSWLFLRSQEYKKYQTNKTTGNTDKRAFVETWQSFYRKKLKEVWKPAV

SEQ ID NO: 32658 - protein, 978 aa, synthetic construct
  REGION 1..978: note = engineered CasX variant
QEIKRANKIRRRLVKDSNTKKAGKTGPMKTLLVRVMTPDLRERLENLRKKPENIPQPISNTSRANLNKLLTDYTEMKKAILHVYWEEFQKDPVGLMSRVAQPASKKIDQNKLKPEMDEKGNLTTAGFACSQCGQPLFVYKLEQVSEKGKAYTNYFGRCNVAEHEKLILLAQLKPEKDSDEAVTYSLGKFGQRALDFYSIHVTKESTHPVKPLAQIAGNRYASTPVGKALSDACMGTIASFLSKYQDIIIEHQKVVKGNQKRLESLRELAGKENLEYPSVTLPPQPHTKEGVDAYNEVIARVRMWVNLNLWQKLKLSRDDAKPLLRLKGFPSFPLVERQANEVDWWDMVCNVKKLINEKKEDGKVFWQNLAGYKRQEALRPYLSSEEDRKKGKKFARYQLGDLLLHLEKKHGEDWGKVYDEAWERIDKKVEGLSKHIKLEEERRSEDAQSKAALTDWLRAKASFVIEGLKEADKDEFCRCDLKLQKWYGDLRGKPFAIEAENSILDISGFSKQYNCAFIWQKDGVKKLNLYLIINYFKGGKLRFKKIKPEAFEANRFYTVINKKSGEIVPMEVNFNFDDPNLIILPLAFGKRQGREFIWNDLLSLETGSLKLANGRVIEKTLYNRRTRQDEPALFVALTFERREVLDSSNIKPMNLIGVDRGENIPAVIALTDPEGCPLSRFKDSLGNPTHILRIGESYKEKQRTIQAKKEVEQRRAGGYSRKYASKAKNLADDMVRNTARDLLYYAVTQDAMLIFENLSRGFGRQGKRTFMAERQYTRMEDWLTAKLAYEGLPSKTYLSKTLAQYTSKTCSNCGFTITSADYDRVLEKLKKTATGWMTTINGKELKVEGQITYYNRYKRQNVVKDLSVELDRLSEESVNNDISSWTKGRSGEALSLLKKRFSHRPVQEKFVCLNCGFETHADEQAALNIARSWLFLRSQEYKKYQTNKTTGNTDKRAFVETWQSFYRKKLKEVWKPAV

SEQ ID NO: 32659 - protein, 978 aa, synthetic construct
  REGION 1..978: note = engineered CasX variant
QEIKRANKIRRRLVKDSNTKKAGKTGPMKTLLVRVMTPDLRERLENLRKKPENIPQPISNTSRANLNKLLTDYTEMKKAILHVYWEEFQKDPVGLMSRVAQPASKKIDQNKLKPEMDEKGNLTTAGFACSQCGQPLFVYKLEQVSEKGKAYTNYFGRCNVAEHEKLILLAQLKPEKDSDEAVTYSLGKFGQRALDFYSIHVTKESTHPVKPLAQIAGNRYASAPVGKALSDACMGTIASFLSKYQDIIIEHQKVVKGNQKRLESLRELAGKENLEYPSVTLPPQPHTKEGVDAYNEVIARVRMWVNLNLWQKLKLSRDDAKPLLRLKGFPSFPLVERQANEVDWWDMVCNVKKLINEKKEDGKVFWQNLAGYKRQEALRPYLSSEEDRKKGKKFARYQLGDLLLHLEKKHGEDWGKVYDEAWERIDKKVEGLSKHIKLEEERRSEDAQSKAALTDWLRAKASFVIEGLKEADKDEFCRCDLKLQKWYGDLRGKPFAIEAENSILDISGFSKQYNCAFIWQKDGVKKLNLYLIINYFKGGKLRFKKIKPEAFEANRFYTVINKKSGEIVPMEVNFNFDDPNLIILPLAFGKRQGREFIWNDLLSLETGSLKLANGRVIEKTLYNRRTRQDEPALFVALTFERREVLDSSNIKPMNLIGVDRGENIPAVIALTDPEGCPLSRFKDSLGNPTHILRIGESYKEKQRTIQAKKEVEQRRAGGYSRKYASKAKNLADDMVRNTARDLLYYAVTQDAMLIFENLSRGFGRQGKRTFMAERQYTRMEDWLTAKLAYEGLPSKTYLSKTLAQYTSKTCSNCGFTITSADYDRVLEKLKKTATGWMTTINGKELKVEGQITYYNRYKRQNVVKDLSVELDRLSEESVNNDISSWTKGRSGEALSLLKKRFSHRPVQEKFVCLNCGFETHADEQAALNIARSWLFLRSQEYKKYQTNKTTGNTDKRAFVETWQSFYRKKLKEVWKPAV

SEQ ID NO: 32660 - protein, 978 aa, synthetic construct
  REGION 1..978: note = engineered CasX variant
QEIKRANKIRRRLVKDSNTKKAGKTGPMKTLLVRVMTPDLRERLENLRKKPENIPQPISNTSRANLNKLLTDYTEMKKAILHVYWEEFQKDPVGLMSRVAQPASKKIDQNKLKPEMDEKGNLTTAGFACSQCGQPLFVYKLEQVSEKGKAYTNYFGRCNVAEHEKLILLAQLKPEKDSDEAVTYSLGKFGQRALDFYSIHVTKESTHPVKPLAQIAGNRYASVPVGKALSDACMGTIASFLSKYQDIIIEHQKVVKGNQKRLESLRELAGKENLEYPSVTLPPQPHTKEGVDAYNEVIARVRMWVNLNLWQKLKLSRDDAKPLLRLKGFPSFPLVERQANEVDWWDMVCNVKKLINEKKEDGKVFWQNLAGYKRQEALRPYLSSEEDRKKGKKFARYQLGDLLLHLEKKHGEDWGKVYDEAWERIDKKVEGLSKHIKLEEERRSEDAQSKAALTDWLRAKASFVIEGLKEADKDEFCRCDLKLQKWYGDLRGKPFAIEAENSILDISGFSKQYNCAFIWQKDGVKKLNLYLIINYFKGGKLRFKKIKPEAFEANRFYTVINKKSGEIVPMEVNFNFDDPNLIILPLAFGKRQGREFIWNDLLSLETGSLKLANGRVIEKTLYNRRTRQDEPALFVALTFERREVLDSSNIKPMNLIGVDRGENIPAVIALTDPEGCPLSRFKDSLGNPTHILRIGESYKEKQRTIQAKKEVEQRRAGGYSRKYASKAKNLADDMVRNTARDLLYYAVTQDAMLIFENLSRGFGRQGKRTFMAERQYTRMEDWLTAKLAYEGLPSKTYLSKTLAQYTSKTCSNCGFTITSADYDRVLEKLKKTATGWMTTINGKELKVEGQITYYNRYKRQNVVKDLSVELDRLSEESVNNDISSWTKGRSGEALSLLKKRFSHRPVQEKFVCLNCGFETHADEQAALNIARSWLFLRSQEYKKYQTNKTTGNTDKRAFVETWQSFYRKKLKEVWKPAV

SEQ ID NO: 32661 - protein, 978 aa, synthetic construct
  REGION 1..978: note = engineered CasX variant
QEIKRANKIRRRLVKDSNTKKAGKTGPMKTLLVRVMTPDLRERLENLRKKPENIPQPISNTSRANLNKLLTDYTEMKKAILHVYWEEFQKDPVGLMSRVAQPASKKIDQNKLKPEMDEKGNLTTAGFACSQCGQPLFVYKLEQVSEKGKAYTNYFGRCNVAEHEKLIKLAQLKPEKDSDEAVTYSLGKFGQRALDFYSIHVTKESTHPVKPLAQIAGNRYASGPVGKALSDACMGTIASFLSKYQDIIIEHQKVVKGNQKRLESLRELAGKENLEYPSVTLPPQPHTKEGVDAYNEVIARVRMWVNLNLWQKLKLSRDDAKPLLRLKGFPSFPLVERQANEVDWWDMVCNVKKLINEKKEDGKVFWQNLAGYKRQEALRPYLSSEEDRKKGKKFARYQLGDLLLHLEKKHGEDWGKVYDEAWERIDKKVEGLSKHIKLEEERRSEDAQSKAALTDWLRAKASFVIEGLKEADKDEFCRCDLKLQKWYGDLRGKPFAIEAENSILDISGFSKQYNCAFIWQKDGVKKLNLYLIINYFKGGKLRFKKIKPEAFEANRFYTVINKKSGEIVPMEVNFNFDDPNLIILPLAFGKRQGREFIWNDLLSLETGSLKLANGRVIEKTLYNRRTRQDEPALFVALTFERREVLDSSNIKPMNLIGVDRGENIPAVIALTDPEGCPLSRFKDSLGNPTHILRIGESYKEKQRTIQAKKEVEQRRAGGYSRKYASKAKNLADDMVRNTARDLLYYAVTQDAMLIFENLSRGFGRQGKRTFMAERQYTRMEDWLTAKLAYEGLPSKTYLSKTLAQYTSKTCSNCGFTITSADYDRVLEKLKKTATGWMTTINGKELKVEGQITYYNRYKRQNVVKDLSVELDRLSEESVNNDISSWTKGRSGEALSLLKKRFSHRPVQEKFVCLNCGFETHADEQAALNIARSWLFLRSQEYKKYQTNKTTGNTDKRAFVETWQSFYRKKLKEVWKPAV

SEQ ID NO: 32662 - protein, 977 aa, synthetic construct
  REGION 1..977: note = engineered CasX variant
QEIKRANKIRRRLVKDSNTKKAGKTGPMKTLLVRVMTPDLRERLENLRKKPENIPQPISNTSRANLNKLLTDYTEMKKAILHVYWEEFQKDPVGLMSRVAQPASKKIDQNKLKPEMDEKGNLTTAGFACSQCGQPLFVYKLEQVSEKGKAYTNYFGRCNVAEHEKLILLAQLKPEKDSDEAVTYSLGKFGQRALDFYSIHVTKESTHPVKPLAQIAGNRYASPVGKALSDACMGTIASFLSKYQDIIIEHQKVVKGNQKRLESLRELAGKENLEYPSVTLPPQPHTKEGVDAYNEVIARVRMWVNLNLWQKLKLSRDDAKPLLRLKGFPSFPLVERQANEVDWWDMVCNVKKLINEKKEDGKVFWQNLAGYKRQEALRPYLSSEEDRKKGKKFARYQLGDLLLHLEKKHGEDWGKVYDEAWERIDKKVEGLSKHIKLEEERRSEDAQSKAALTDWLRAKASFVIEGLKEADKDEFCRCDLKLQKWYGDLRGKPFAIEAENSILDISGFSKQYNCAFIWQKDGVKKLNLYLIINYFKGGKLRFKKIKPEAFEANRFYTVINKKSGEIVPMEVNFNFDDPNLIILPLAFGKRQGREFIWNDLLSLETGSLKLANGRVIEKTLYNRRTRQDEPALFVALTFERREVLDSSNIKPMNLIGVDRGENIPAVIALTDPEGCPLSRFKDSLGNPTHILRIGESYKEKQRTIQAKKEVEQRRAGGYSRKYASKAKNLADDMVRNTARDLLYYAVTQDAMLIFENLSRGFGRQGKRTFMAERQYTRMEDWLTAKLAYEGLPSKTYLSKTLAQYTSKTCSNCGFTITSADYDRVLEKLKKTATGWMTTINGKELKVEGQITYYNRYKRQNVVKDLSVELDRLSEESVNNDISSWTKGRSGEALSLLKKRFSHRPVQEKFVCLNCGFETHADEQAALNIARSWLFLRSQEYKKYQTNKTTGNTDKRAFVETWQSFYRKKLKEVWKPAV

SEQ ID NO: 32663 - protein, 978 aa, synthetic construct
  REGION 1..978: note = engineered CasX variant
QEIKRANKIRRRLVKDSNTKKAGKTGPMKTLLVRVMTPDLRERLENLRKKPENIPQPISNTSRANLNKLLTDYTEMKKAILHVYWEEFQKDPVGLMSRVAQPASKKIDQNKLKPEMDEKGNLTTAGFACSQCGQPLFVYKLEQVSEKGKAYTNYFGRCNVAEHEKLILLAQLKPEKDSDEAVTYSLGKFGQRALDFYSIHVTKESTHPVKPLAQIAGNRYASYPVGKALSDACMGTIASFLSKYQDIIIEHQKVVKGNQKRLESLRELAGKENLEYPSVTLPPQPHTKEGVDAYNEVIARVRMWVNLNLWQKLKLSRDDAKPLLRLKGFPSFPLVERQANEVDWWDMVCNVKKLINEKKEDGKVFWQNLAGYKRQEALRPYLSSEEDRKKGKKFARYQLGDLLLHLEKKHGEDWGKVYDEAWERIDKKVEGLSKHIKLEEERRSEDAQSKAALTDWLRAKASFVIEGLKEADKDEFCRCELKLQKWYGDLRGKPFAIEAENSILDISGFSKQYNCAFIWQKDGVKKLNLYLIINYFKGGKLRFKKIKPEAFEANRFYTVINKKSGEIVPMEVNFNFDDPNLIILPLAFGKRFGREFIWNDLLSLETGSLKLANGRVIEKTLYNRRTRQDEPALFVALTFERREVLDSSNIKPMNLIGVDRGENIPAVIALTDPEGCPLSRFKDSLGNPTHILRIGESYKEKQRTIQAKKEVEQRRAGGYSRKYASKAKNLADDMVRNTARDLLYYAVTQDAMLIFENLSRGFGRQGKRTFMAERQYTRMEDWLTAKLAYEGLPSKTYLSKTLAQYTSKTCSNCGFTITSADYDRVLEKLKKTATGWMTTINGKELKVEGQITYYNRYKRQNVVKDLSVELDRLSEESVNNDISSWTKGRSGEALSLLKKRFSHRPVQEKFVCLNCGFETHADEQAALNIARSWLFLRSQEYKKYQTNKTTGNTDKRAFVETWQSFYRKKLKEVWKPAV

SEQ ID NO: 32664 - protein, 978 aa, synthetic construct
  REGION 1..978: note = engineered CasX variant
QEIKRANKIRRRLVKDSNTKKAGKTGPMKTLLVRVMTPDLRERLENLRKKPENIPQPISNTSRANLNKLLTDYTEMKKAILHVYWEEFQKDPVGLMSRVAQPASKKIDQNKLKPEMDEKGNLTTAGFACSQCGQPLFVYKLEQVSEKGKAYTNYFGRCNVAEHEKLILLAQLKPEKDSDEAVTYSLGKFGQRALDFYSIHVTKESTHPVKPLAQIAGNRYASHPVGKALSDACMGTIASFLSKYQDIIIEHQKVVKGNQKRLESLRELAGKENLEYPSVTLPPQPHTKEGVDAYNEVIARVRMWVNLNLWQKLKLSRDDAKPLLRLKGFPSFPLVERQANEVDWWDMVCNVKKLINEKKEDGKVFWQNLAGYKRQEALRPYLSSEEDRKKGKKFARYQLGDLLLHLEKKHGEDWGKVYDEAWERIDKKVEGLSKHIKLEEERRSEDAQSKAALTDWLRAKASFVIEGLKEADKDEFCRCELKLQKWYGDLRGKPFAIEAENSILDISGFSKQYNCAFIWQKDGVKKLNLYLIINYFKGGKLRFKKIKPEAFEANRFYTVINKKSGEIVPMEVNFNFDDPNLIILPLAFGKRFGREFIWNDLLSLETGSLKLANGRVIEKTLYNRRTRQDEPALFVALTFERREVLDSSNIKPMNLIGVDRGENIPAVIALTDPEGCPLSRFKDSLGNPTHILRIGESYKEKQRTIQAKKEVEQRRAGGYSRKYASKAKNLADDMVRNTARDLLYYAVTQDAMLIFENLSRGFGRQGKRTFMAERQYTRMEDWLTAKLAYEGLPSKTYLSKTLAQYTSKTCSNCGFTITSADYDRVLEKLKKTATGWMTTINGKELKVEGQITYYNRYKRQNVVKDLSVELDRLSEESVNNDISSWTKGRSGEALSLLKKRFSHRPVQEKFVCLNCGFETHADEQAALNIARSWLFLRSQEYKKYQTNKTTGNTDKRAFVETWQSFYRKKLKEVWKPAV

SEQ ID NO: 32665 - protein, 978 aa, synthetic construct
  REGION 1..978: note = engineered CasX variant
QEIKRANKIRRRLVKDSNTKKAGKTGPMKTLLVRVMTPDLRERLENLRKKPENIPQPISNTSRANLNKLLTDYTEMKKAILHVYWEEFQKDPVGLMSRVAQPASKKIDQNKLKPEMDEKGNLTTAGFACSQCGQPLFVYKLEQVSEKGKAYTNYFGRCNVAEHEKLILLAQLKPEKDSDEAVTYSLGKFGQRALDFYSIHVTKESTHPVKPLAQIAGNRYASSPVGKALSDACMGTIASFLSKYQDIIIEHQKVVKGNQKRLESLRELAGKENLEYPSVTLPPQPHTKEGVDAYNEVIARVRMWVNLNLWQKLKLSRDDAKPLLRLKGFPSFPLVERQANEVDWWDMVCNVKKLINEKKEDGKVFWQNLAGYKRQEALRPYLSSEEDRKKGKKFARYQLGDLLLHLEKKHGEDWGKVYDEAWERIDKKVEGLSKHIKLEEERRSEDAQSKAALTDWLRAKASFVIEGLKEADKDEFCRCELKLQKWYGDLRGKPFAIEAENSILDISGFSKQYNCAFIWQKDGVKKLNLYLIINYFKGGKLRFKKIKPEAFEANRFYTVINKKSGEIVPMEVNFNFDDPNLIILPLAFGKRFGREFIWNDLLSLETGSLKLANGRVIEKTLYNRRTRQDEPALFVALTFERREVLDSSNIKPMNLIGVDRGENIPAVIALTDPEGCPLSRFKDSLGNPTHILRIGESYKEKQRTIQAKKEVEQRRAGGYSRKYASKAKNLADDMVRNTARDLLYYAVTQDAMLIFENLSRGFGRQGKRTFMAERQYTRMEDWLTAKLAYEGLPSKTYLSKTLAQYTSKTCSNCGFTITSADYDRVLEKLKKTATGWMTTINGKELKVEGQITYYNRYKRQNVVKDLSVELDRLSEESVNNDISSWTKGRSGEALSLLKKRFSHRPVQEKFVCLNCGFETHADEQAALNIARSWLFLRSQEYKKYQTNKTTGNTDKRAFVETWQSFYRKKLKEVWKPAV

SEQ ID NO: 32666 - protein, 978 aa, synthetic construct
  REGION 1..978: note = engineered CasX variant
QEIKRANKIRRRLVKDSNTKKAGKTGPMKTLLVRVMTPDLRERLENLRKKPENIPQPISNTSRANLNKLLTDYTEMKKAILHVYWEEFQKDPVGLMSRVAQPASKKIDQNKLKPEMDEKGNLTTAGFACSQCGQPLFVYKLEQVSEKGKAYTNYFGRCNVAEHEKLILLAQLKPEKDSDEAVTYSLGKFGQRALDFYSIHVTKESTHPVKPLAQIAGNRYASTPVGKALSDACMGTIASFLSKYQDIIIEHQKVVKGNQKRLESLRELAGKENLEYPSVTLPPQPHTKEGVDAYNEVIARVRMWVNLNLWQKLKLSRDDAKPLLRLKGFPSFPLVERQANEVDWWDMVCNVKKLINEKKEDGKVFWQNLAGYKRQEALRPYLSSEEDRKKGKKFARYQLGDLLLHLEKKHGEDWGKVYDEAWERIDKKVEGLSKHIKLEEERRSEDAQSKAALTDWLRAKASFVIEGLKEADKDEFCRCELKLQKWYGDLRGKPFAIEAENSILDISGFSKQYNCAFIWQKDGVKKLNLYLIINYFKGGKLRFKKIKPEAFEANRFYTVINKKSGEIVPMEVNFNFDDPNLIILPLAFGKRFGREFIWNDLLSLETGSLKLANGRVIEKTLYNRRTRQDEPALFVALTFERREVLDSSNIKPMNLIGVDRGENIPAVIALTDPEGCPLSRFKDSLGNPTHILRIGESYKEKQRTIQAKKEVEQRRAGGYSRKYASKAKNLADDMVRNTARDLLYYAVTQDAMLIFENLSRGFGRQGKRTFMAERQYTRMEDWLTAKLAYEGLPSKTYLSKTLAQYTSKTCSNCGFTITSADYDRVLEKLKKTATGWMTTINGKELKVEGQITYYNRYKRQNVVKDLSVELDRLSEESVNNDISSWTKGRSGEALSLLKKRFSHRPVQEKFVCLNCGFETHADEQAALNIARSWLFLRSQEYKKYQTNKTTGNTDKRAFVETWQSFYRKKLKEVWKPAV

SEQ ID NO: 32667 - protein, 978 aa, synthetic construct
  REGION 1..978: note = engineered CasX variant
QEIKRANKIRRRLVKDSNTKKAGKTGPMKTLLVRVMTPDLRERLENLRKKPENIPQPISNTSRANLNKLLTDYTEMKKAILHVYWEEFQKDPVGLMSRVAQPASKKIDQNKLKPEMDEKGNLTTAGFACSQCGQPLFVYKLEQVSEKGKAYTNYFGRCNVAEHEKLILLAQLKPEKDSDEAVTYSLGKFGQRALDFYSIHVTKESTHPVKPLAQIAGNRYASAPVGKALSDACMGTIASFLSKYQDIIIEHQKVVKGNQKRLESLRELAGKENLEYPSVTLPPQPHTKEGVDAYNEVIARVRMWVNLNLWQKLKLSRDDAKPLLRLKGFPSFPLVERQANEVDWWDMVCNVKKLINEKKEDGKVFWQNLAGYKRQEALRPYLSSEEDRKKGKKFARYQLGDLLLHLEKKHGEDWGKVYDEAWERIDKKVEGLSKHIKLEEERRSEDAQSKAALTDWLRAKASFVIEGLKEADKDEFCRCELKLQKWYGDLRGKPFAIEAENSILDISGFSKQYNCAFIWQKDGVKKLNLYLIINYFKGGKLRFKKIKPEAFEANRFYTVINKKSGEIVPMEVNFNFDDPNLIILPLAFGKRFGREFIWNDLLSLETGSLKLANGRVIEKTLYNRRTRQDEPALFVALTFERREVLDSSNIKPMNLIGVDRGENIPAVIALTDPEGCPLSRFKDSLGNPTHILRIGESYKEKQRTIQAKKEVEQRRAGGYSRKYASKAKNLADDMVRNTARDLLYYAVTQDAMLIFENLSRGFGRQGKRTFMAERQYTRMEDWLTAKLAYEGLPSKTYLSKTLAQYTSKTCSNCGFTITSADYDRVLEKLKKTATGWMTTINGKELKVEGQITYYNRYKRQNVVKDLSVELDRLSEESVNNDISSWTKGRSGEALSLLKKRFSHRPVQEKFVCLNCGFETHADEQAALNIARSWLFLRSQEYKKYQTNKTTGNTDKRAFVETWQSFYRKKLKEVWKPAV

SEQ ID NO: 32668 - protein, 978 aa, synthetic construct
  REGION 1..978: note = engineered CasX variant
QEIKRANKIRRRLVKDSNTKKAGKTGPMKTLLVRVMTPDLRERLENLRKKPENIPQPISNTSRANLNKLLTDYTEMKKAILHVYWEEFQKDPVGLMSRVAQPASKKIDQNKLKPEMDEKGNLTTAGFACSQCGQPLFVYKLEQVSEKGKAYTNYFGRCNVAEHEKLILLAQLKPEKDSDEAVTYSLGKFGQRALDFYSIHVTKESTHPVKPLAQIAGNRYASVPVGKALSDACMGTIASFLSKYQDIIIEHQKVVKGNQKRLESLRELAGKENLEYPSVTLPPQPHTKEGVDAYNEVIARVRMWVNLNLWQKLKLSRDDAKPLLRLKGFPSFPLVERQANEVDWWDMVCNVKKLINEKKEDGKVFWQNLAGYKRQEALRPYLSSEEDRKKGKKFARYQLGDLLLHLEKKHGEDWGKVYDEAWERIDKKVEGLSKHIKLEEERRSEDAQSKAALTDWLRAKASFVIEGLKEADKDEFCRCELKLQKWYGDLRGKPFAIEAENSILDISGFSKQYNCAFIWQKDGVKKLNLYLIINYFKGGKLRFKKIKPEAFEANRFYTVINKKSGEIVPMEVNFNFDDPNLIILPLAFGKRFGREFIWNDLLSLETGSLKLANGRVIEKTLYNRRTRQDEPALFVALTFERREVLDSSNIKPMNLIGVDRGENIPAVIALTDPEGCPLSRFKDSLGNPTHILRIGESYKEKQRTIQAKKEVEQRRAGGYSRKYASKAKNLADDMVRNTARDLLYYAVTQDAMLIFENLSRGFGRQGKRTFMAERQYTRMEDWLTAKLAYEGLPSKTYLSKTLAQYTSKTCSNCGFTITSADYDRVLEKLKKTATGWMTTINGKELKVEGQITYYNRYKRQNVVKDLSVELDRLSEESVNNDISSWTKGRSGEALSLLKKRFSHRPVQEKFVCLNCGFETHADEQAALNIARSWLFLRSQEYKKYQTNKTTGNTDKRAFVETWQSFYRKKLKEVWKPAV

SEQ ID NO: 32669 - protein, 978 aa, synthetic construct
  REGION 1..978: note = engineered CasX variant
QEIKRANKIRRRLVKDSNTKKAGKTGPMKTLLVRVMTPDLRERLENLRKKPENIPQPISNTSRANLNKLLTDYTEMKKAILHVYWEEFQKDPVGLMSRVAQPASKKIDQNKLKPEMDEKGNLTTAGFACSQCGQPLFVYKLEQVSEKGKAYTNYFGRCNVAEHEKLIKLAQLKPEKDSDEAVTYSLGKFGQRALDFYSIHVTKESTHPVKPLAQIAGNRYASGPVGKALSDACMGTIASFLSKYQDIIIEHQKVVKGNQKRLESLRELAGKENLEYPSVTLPPQPHTKEGVDAYNEVIARVRMWVNLNLWQKLKLSRDDAKPLLRLKGFPSFPLVERQANEVDWWDMVCNVKKLINEKKEDGKVFWQNLAGYKRQEALRPYLSSEEDRKKGKKFARYQLGDLLLHLEKKHGEDWGKVYDEAWERIDKKVEGLSKHIKLEEERRSEDAQSKAALTDWLRAKASFVIEGLKEADKDEFCRCELKLQKWYGDLRGKPFAIEAENSILDISGFSKQYNCAFIWQKDGVKKLNLYLIINYFKGGKLRFKKIKPEAFEANRFYTVINKKSGEIVPMEVNFNFDDPNLIILPLAFGKRFGREFIWNDLLSLETGSLKLANGRVIEKTLYNRRTRQDEPALFVALTFERREVLDSSNIKPMNLIGVDRGENIPAVIALTDPEGCPLSRFKDSLGNPTHILRIGESYKEKQRTIQAKKEVEQRRAGGYSRKYASKAKNLADDMVRNTARDLLYYAVTQDAMLIFENLSRGFGRQGKRTFMAERQYTRMEDWLTAKLAYEGLPSKTYLSKTLAQYTSKTCSNCGFTITSADYDRVLEKLKKTATGWMTTINGKELKVEGQITYYNRYKRQNVVKDLSVELDRLSEESVNNDISSWTKGRSGEALSLLKKRFSHRPVQEKFVCLNCGFETHADEQAALNIARSWLFLRSQEYKKYQTNKTTGNTDKRAFVETWQSFYRKKLKEVWKPAV

SEQ ID NO: 32670 - protein, 977 aa, synthetic construct
  REGION 1..977: note = engineered CasX variant
QEIKRANKIRRRLVKDSNTKKAGKTGPMKTLLVRVMTPDLRERLENLRKKPENIPQPISNTSRANLNKLLTDYTEMKKAILHVYWEEFQKDPVGLMSRVAQPASKKIDQNKLKPEMDEKGNLTTAGFACSQCGQPLFVYKLEQVSEKGKAYTNYFGRCNVAEHEKLILLAQLKPEKDSDEAVTYSLGKFGQRALDFYSIHVTKESTHPVKPLAQIAGNRYASPVGKALSDACMGTIASFLSKYQDIIIEHQKVVKGNQKRLESLRELAGKENLEYPSVTLPPQPHTKEGVDAYNEVIARVRMWVNLNLWQKLKLSRDDAKPLLRLKGFPSFPLVERQANEVDWWDMVCNVKKLINEKKEDGKVFWQNLAGYKRQEALRPYLSSEEDRKKGKKFARYQLGDLLLHLEKKHGEDWGKVYDEAWERIDKKVEGLSKHIKLEEERRSEDAQSKAALTDWLRAKASFVIEGLKEADKDEFCRCELKLQKWYGDLRGKPFAIEAENSILDISGFSKQYNCAFIWQKDGVKKLNLYLIINYFKGGKLRFKKIKPEAFEANRFYTVINKKSGEIVPMEVNFNFDDPNLIILPLAFGKRFGREFIWNDLLSLETGSLKLANGRVIEKTLYNRRTRQDEPALFVALTFERREVLDSSNIKPMNLIGVDRGENIPAVIALTDPEGCPLSRFKDSLGNPTHILRIGESYKEKQRTIQAKKEVEQRRAGGYSRKYASKAKNLADDMVRNTARDLLYYAVTQDAMLIFENLSRGFGRQGKRTFMAERQYTRMEDWLTAKLAYEGLPSKTYLSKTLAQYTSKTCSNCGFTITSADYDRVLEKLKKTATGWMTTINGKELKVEGQITYYNRYKRQNVVKDLSVELDRLSEESVNNDISSWTKGRSGEALSLLKKRFSHRPVQEKFVCLNCGFETHADEQAALNIARSWLFLRSQEYKKYQTNKTTGNTDKRAFVETWQSFYRKKLKEVWKPAV

SEQ ID NO: 32671 - protein, 978 aa, synthetic construct
  REGION 1..978: note = engineered CasX variant
QEIKRANKIRRRLVKDSNTKKAGKTGPMKTLLVRVMTPDLRERLENLRKKPENIPQPISNTSRANLNKLLTDYTEMKKAILHVYWEEFQKDPVGLMSRVAQPASKKIDQNKLKPEMDEKGNLTTAGFACSQCGQPLFVYKLEQVSEKGKAYTNYFGRCNVAEHEKLILLAQLKPEKDSDEAVTYSLGKFGQRALDFYSIHVTKESTHPVKPLAQIAGNRYASYPVGKALSDACMGTIASFLSKYQDIIIEHQKVVKGNQKRLESLRELAGKENLEYPSVTLPPQPHTKEGVDAYNEVIARVRMWVNLNLWQKLKLSRDDAKPLLRLKGFPSFPLVERQANEVDWWDMVCNVKKLINEKKEDGKVFWQNLAGYKRQEALRPYLSSEEDRKKGKKFARYQLGDLLLHLEKKHGEDWGKVYDEAWERIDKKVEGLSKHIKLEEERRSEDAQSKAALTDWLRAKASFVIEGLKEADKDEFCRCELKLQKWYGDLRGKPFAIEAENSILDISGFSKQYNCAFIWQKDGVKKLNLYLIINYFKGGKLRFKKIKPEAFEANRFYTVINKKSGEIVPMEVNFNFDDPNLIILPLAFGKRVGREFIWNDLLSLETGSLKLANGRVIEKTLYNRRTRQDEPALFVALTFERREVLDSSNIKPMNLIGVDRGENIPAVIALTDPEGCPLSRFKDSLGNPTHILRIGESYKEKQRTIQAKKEVEQRRAGGYSRKYASKAKNLADDMVRNTARDLLYYAVTQDAMLIFENLSRGFGRQGKRTFMAERQYTRMEDWLTAKLAYEGLPSKTYLSKTLAQYTSKTCSNCGFTITSADYDRVLEKLKKTATGWMTTINGKELKVEGQITYYNRYKRQNVVKDLSVELDRLSEESVNNDISSWTKGRSGEALSLLKKRFSHRPVQEKFVCLNCGFETHADEQAALNIARSWLFLRSQEYKKYQTNKTTGNTDKRAFVETWQSFYRKKLKEVWKPAV

SEQ ID NO: 32672 - protein, 978 aa, synthetic construct
  REGION 1..978: note = engineered CasX variant
QEIKRANKIRRRLVKDSNTKKAGKTGPMKTLLVRVMTPDLRERLENLRKKPENIPQPISNTSRANLNKLLTDYTEMKKAILHVYWEEFQKDPVGLMSRVAQPASKKIDQNKLKPEMDEKGNLTTAGFACSQCGQPLFVYKLEQVSEKGKAYTNYFGRCNVAEHEKLILLAQLKPEKDSDEAVTYSLGKFGQRALDFYSIHVTKESTHPVKPLAQIAGNRYASHPVGKALSDACMGTIASFLSKYQDIIIEHQKVVKGNQKRLESLRELAGKENLEYPSVTLPPQPHTKEGVDAYNEVIARVRMWVNLNLWQKLKLSRDDAKPLLRLKGFPSFPLVERQANEVDWWDMVCNVKKLINEKKEDGKVFWQNLAGYKRQEALRPYLSSEEDRKKGKKFARYQLGDLLLHLEKKHGEDWGKVYDEAWERIDKKVEGLSKHIKLEEERRSEDAQSKAALTDWLRAKASFVIEGLKEADKDEFCRCELKLQKWYGDLRGKPFAIEAENSILDISGFSKQYNCAFIWQKDGVKKLNLYLIINYFKGGKLRFKKIKPEAFEANRFYTVINKKSGEIVPMEVNFNFDDPNLIILPLAFGKRVGREFIWNDLLSLETGSLKLANGRVIEKTLYNRRTRQDEPALFVALTFERREVLDSSNIKPMNLIGVDRGENIPAVIALTDPEGCPLSRFKDSLGNPTHILRIGESYKEKQRTIQAKKEVEQRRAGGYSRKYASKAKNLADDMVRNTARDLLYYAVTQDAMLIFENLSRGFGRQGKRTFMAERQYTRMEDWLTAKLAYEGLPSKTYLSKTLAQYTSKTCSNCGFTITSADYDRVLEKLKKTATGWMTTINGKELKVEGQITYYNRYKRQNVVKDLSVELDRLSEESVNNDISSWTKGRSGEALSLLKKRFSHRPVQEKFVCLNCGFETHADEQAALNIARSWLFLRSQEYKKYQTNKTTGNTDKRAFVETWQSFYRKKLKEVWKPAV

SEQ ID NO: 32673 - protein, 978 aa, synthetic construct
  REGION 1..978: note = engineered CasX variant
QEIKRANKIRRRLVKDSNTKKAGKTGPMKTLLVRVMTPDLRERLENLRKKPENIPQPISNTSRANLNKLLTDYTEMKKAILHVYWEEFQKDPVGLMSRVAQPASKKIDQNKLKPEMDEKGNLTTAGFACSQCGQPLFVYKLEQVSEKGKAYTNYFGRCNVAEHEKLILLAQLKPEKDSDEAVTYSLGKFGQRALDFYSIHVTKESTHPVKPLAQIAGNRYASSPVGKALSDACMGTIASFLSKYQDIIIEHQKVVKGNQKRLESLRELAGKENLEYPSVTLPPQPHTKEGVDAYNEVIARVRMWVNLNLWQKLKLSRDDAKPLLRLKGFPSFPLVERQANEVDWWDMVCNVKKLINEKKEDGKVFWQNLAGYKRQEALRPYLSSEEDRKKGKKFARYQLGDLLLHLEKKHGEDWGKVYDEAWERIDKKVEGLSKHIKLEEERRSEDAQSKAALTDWLRAKASFVIEGLKEADKDEFCRCELKLQKWYGDLRGKPFAIEAENSILDISGFSKQYNCAFIWQKDGVKKLNLYLIINYFKGGKLRFKKIKPEAFEANRFYTVINKKSGEIVPMEVNFNFDDPNLIILPLAFGKRVGREFIWNDLLSLETGSLKLANGRVIEKTLYNRRTRQDEPALFVALTFERREVLDSSNIKPMNLIGVDRGENIPAVIALTDPEGCPLSRFKDSLGNPTHILRIGESYKEKQRTIQAKKEVEQRRAGGYSRKYASKAKNLADDMVRNTARDLLYYAVTQDAMLIFENLSRGFGRQGKRTFMAERQYTRMEDWLTAKLAYEGLPSKTYLSKTLAQYTSKTCSNCGFTITSADYDRVLEKLKKTATGWMTTINGKELKVEGQITYYNRYKRQNVVKDLSVELDRLSEESVNNDISSWTKGRSGEALSLLKKRFSHRPVQEKFVCLNCGFETHADEQAALNIARSWLFLRSQEYKKYQTNKTTGNTDKRAFVETWQSFYRKKLKEVWKPAV

SEQ ID NO: 32674 - protein, 978 aa, synthetic construct
  REGION 1..978: note = engineered CasX variant
QEIKRANKIRRRLVKDSNTKKAGKTGPMKTLLVRVMTPDLRERLENLRKKPENIPQPISNTSRANLNKLLTDYTEMKKAILHVYWEEFQKDPVGLMSRVAQPASKKIDQNKLKPEMDEKGNLTTAGFACSQCGQPLFVYKLEQVSEKGKAYTNYFGRCNVAEHEKLILLAQLKPEKDSDEAVTYSLGKFGQRALDFYSIHVTKESTHPVKPLAQIAGNRYASTPVGKALSDACMGTIASFLSKYQDIIIEHQKVVKGNQKRLESLRELAGKENLEYPSVTLPPQPHTKEGVDAYNEVIARVRMWVNLNLWQKLKLSRDDAKPLLRLKGFPSFPLVERQANEVDWWDMVCNVKKLINEKKEDGKVFWQNLAGYKRQEALRPYLSSEEDRKKGKKFARYQLGDLLLHLEKKHGEDWGKVYDEAWERIDKKVEGLSKHIKLEEERRSEDAQSKAALTDWLRAKASFVIEGLKEADKDEFCRCELKLQKWYGDLRGKPFAIEAENSILDISGFSKQYNCAFIWQKDGVKKLNLYLIINYFKGGKLRFKKIKPEAFEANRFYTVINKKSGEIVPMEVNFNFDDPNLIILPLAFGKRVGREFIWNDLLSLETGSLKLANGRVIEKTLYNRRTRQDEPALFVALTFERREVLDSSNIKPMNLIGVDRGENIPAVIALTDPEGCPLSRFKDSLGNPTHILRIGESYKEKQRTIQAKKEVEQRRAGGYSRKYASKAKNLADDMVRNTARDLLYYAVTQDAMLIFENLSRGFGRQGKRTFMAERQYTRMEDWLTAKLAYEGLPSKTYLSKTLAQYTSKTCSNCGFTITSADYDRVLEKLKKTATGWMTTINGKELKVEGQITYYNRYKRQNVVKDLSVELDRLSEESVNNDISSWTKGRSGEALSLLKKRFSHRPVQEKFVCLNCGFETHADEQAALNIARSWLFLRSQEYKKYQTNKTTGNTDKRAFVETWQSFYRKKLKEVWKPAV

SEQ ID NO: 32675 - protein, 978 aa, synthetic construct
  REGION 1..978: note = engineered CasX variant
QEIKRANKIRRRLVKDSNTKKAGKTGPMKTLLVRVMTPDLRERLENLRKKPENIPQPISNTSRANLNKLLTDYTEMKKAILHVYWEEFQKDPVGLMSRVAQPASKKIDQNKLKPEMDEKGNLTTAGFACSQCGQPLFVYKLEQVSEKGKAYTNYFGRCNVAEHEKLILLAQLKPEKDSDEAVTYSLGKFGQRALDFYSIHVTKESTHPVKPLAQIAGNRYASAPVGKALSDACMGTIASFLSKYQDIIIEHQKVVKGNQKRLESLRELAGKENLEYPSVTLPPQPHTKEGVDAYNEVIARVRMWVNLNLWQKLKLSRDDAKPLLRLKGFPSFPLVERQANEVDWWDMVCNVKKLINEKKEDGKVFWQNLAGYKRQEALRPYLSSEEDRKKGKKFARYQLGDLLLHLEKKHGEDWGKVYDEAWERIDKKVEGLSKHIKLEEERRSEDAQSKAALTDWLRAKASFVIEGLKEADKDEFCRCELKLQKWYGDLRGKPFAIEAENSILDISGFSKQYNCAFIWQKDGVKKLNLYLIINYFKGGKLRFKKIKPEAFEANRFYTVINKKSGEIVPMEVNFNFDDPNLIILPLAFGKRVGREFIWNDLLSLETGSLKLANGRVIEKTLYNRRTRQDEPALFVALTFERREVLDSSNIKPMNLIGVDRGENIPAVIALTDPEGCPLSRFKDSLGNPTHILRIGESYKEKQRTIQAKKEVEQRRAGGYSRKYASKAKNLADDMVRNTARDLLYYAVTQDAMLIFENLSRGFGRQGKRTFMAERQYTRMEDWLTAKLAYEGLPSKTYLSKTLAQYTSKTCSNCGFTITSADYDRVLEKLKKTATGWMTTINGKELKVEGQITYYNRYKRQNVVKDLSVELDRLSEESVNNDISSWTKGRSGEALSLLKKRFSHRPVQEKFVCLNCGFETHADEQAALNIARSWLFLRSQEYKKYQTNKTTGNTDKRAFVETWQSFYRKKLKEVWKPAV

SEQ ID NO: 32676 - protein, 978 aa, synthetic construct
  REGION 1..978: note = engineered CasX variant
QEIKRANKIRRRLVKDSNTKKAGKTGPMKTLLVRVMTPDLRERLENLRKKPENIPQPISNTSRANLNKLLTDYTEMKKAILHVYWEEFQKDPVGLMSRVAQPASKKIDQNKLKPEMDEKGNLTTAGFACSQCGQPLFVYKLEQVSEKGKAYTNYFGRCNVAEHEKLILLAQLKPEKDSDEAVTYSLGKFGQRALDFYSIHVTKESTHPVKPLAQIAGNRYASVPVGKALSDACMGTIASFLSKYQDIIIEHQKVVKGNQKRLESLRELAGKENLEYPSVTLPPQPHTKEGVDAYNEVIARVRMWVNLNLWQKLKLSRDDAKPLLRLKGFPSFPLVERQANEVDWWDMVCNVKKLINEKKEDGKVFWQNLAGYKRQEALRPYLSSEEDRKKGKKFARYQLGDLLLHLEKKHGEDWGKVYDEAWERIDKKVEGLSKHIKLEEERRSEDAQSKAALTDWLRAKASFVIEGLKEADKDEFCRCELKLQKWYGDLRGKPFAIEAENSILDISGFSKQYNCAFIWQKDGVKKLNLYLIINYFKGGKLRFKKIKPEAFEANRFYTVINKKSGEIVPMEVNFNFDDPNLIILPLAFGKRVGREFIWNDLLSLETGSLKLANGRVIEKTLYNRRTRQDEPALFVALTFERREVLDSSNIKPMNLIGVDRGENIPAVIALTDPEGCPLSRFKDSLGNPTHILRIGESYKEKQRTIQAKKEVEQRRAGGYSRKYASKAKNLADDMVRNTARDLLYYAVTQDAMLIFENLSRGFGRQGKRTFMAERQYTRMEDWLTAKLAYEGLPSKTYLSKTLAQYTSKTCSNCGFTITSADYDRVLEKLKKTATGWMTTINGKELKVEGQITYYNRYKRQNVVKDLSVELDRLSEESVNNDISSWTKGRSGEALSLLKKRFSHRPVQEKFVCLNCGFETHADEQAALNIARSWLFLRSQEYKKYQTNKTTGNTDKRAFVETWQSFYRKKLKEVWKPAV

SEQ ID NO: 32677 - protein, 978 aa, synthetic construct
  REGION 1..978: note = engineered CasX variant
QEIKRANKIRRRLVKDSNTKKAGKTGPMKTLLVRVMTPDLRERLENLRKKPENIPQPISNTSRANLNKLLTDYTEMKKAILHVYWEEFQKDPVGLMSRVAQPASKKIDQNKLKPEMDEKGNLTTAGFACSQCGQPLFVYKLEQVSEKGKAYTNYFGRCNVAEHEKLIKLAQLKPEKDSDEAVTYSLGKFGQRALDFYSIHVTKESTHPVKPLAQIAGNRYASGPVGKALSDACMGTIASFLSKYQDIIIEHQKVVKGNQKRLESLRELAGKENLEYPSVTLPPQPHTKEGVDAYNEVIARVRMWVNLNLWQKLKLSRDDAKPLLRLKGFPSFPLVERQANEVDWWDMVCNVKKLINEKKEDGKVFWQNLAGYKRQEALRPYLSSEEDRKKGKKFARYQLGDLLLHLEKKHGEDWGKVYDEAWERIDKKVEGLSKHIKLEEERRSEDAQSKAALTDWLRAKASFVIEGLKEADKDEFCRCELKLQKWYGDLRGKPFAIEAENSILDISGFSKQYNCAFIWQKDGVKKLNLYLIINYFKGGKLRFKKIKPEAFEANRFYTVINKKSGEIVPMEVNFNFDDPNLIILPLAFGKRVGREFIWNDLLSLETGSLKLANGRVIEKTLYNRRTRQDEPALFVALTFERREVLDSSNIKPMNLIGVDRGENIPAVIALTDPEGCPLSRFKDSLGNPTHILRIGESYKEKQRTIQAKKEVEQRRAGGYSRKYASKAKNLADDMVRNTARDLLYYAVTQDAMLIFENLSRGFGRQGKRTFMAERQYTRMEDWLTAKLAYEGLPSKTYLSKTLAQYTSKTCSNCGFTITSADYDRVLEKLKKTATGWMTTINGKELKVEGQITYYNRYKRQNVVKDLSVELDRLSEESVNNDISSWTKGRSGEALSLLKKRFSHRPVQEKFVCLNCGFETHADEQAALNIARSWLFLRSQEYKKYQTNKTTGNTDKRAFVETWQSFYRKKLKEVWKPAV

SEQ ID NO: 32678 - protein, 977 aa, synthetic construct
  REGION 1..977: note = engineered CasX variant
QEIKRANKIRRRLVKDSNTKKAGKTGPMKTLLVRVMTPDLRERLENLRKKPENIPQPISNTSRANLNKLLTDYTEMKKAILHVYWEEFQKDPVGLMSRVAQPASKKIDQNKLKPEMDEKGNLTTAGFACSQCGQPLFVYKLEQVSEKGKAYTNYFGRCNVAEHEKLILLAQLKPEKDSDEAVTYSLGKFGQRALDFYSIHVTKESTHPVKPLAQIAGNRYASPVGKALSDACMGTIASFLSKYQDIIIEHQKVVKGNQKRLESLRELAGKENLEYPSVTLPPQPHTKEGVDAYNEVIARVRMWVNLNLWQKLKLSRDDAKPLLRLKGFPSFPLVERQANEVDWWDMVCNVKKLINEKKEDGKVFWQNLAGYKRQEALRPYLSSEEDRKKGKKFARYQLGDLLLHLEKKHGEDWGKVYDEAWERIDKKVEGLSKHIKLEEERRSEDAQSKAALTDWLRAKASFVIEGLKEADKDEFCRCELKLQKWYGDLRGKPFAIEAENSILDISGFSKQYNCAFIWQKDGVKKLNLYLIINYFKGGKLRFKKIKPEAFEANRFYTVINKKSGEIVPMEVNFNFDDPNLIILPLAFGKRVGREFIWNDLLSLETGSLKLANGRVIEKTLYNRRTRQDEPALFVALTFERREVLDSSNIKPMNLIGVDRGENIPAVIALTDPEGCPLSRFKDSLGNPTHILRIGESYKEKQRTIQAKKEVEQRRAGGYSRKYASKAKNLADDMVRNTARDLLYYAVTQDAMLIFENLSRGFGRQGKRTFMAERQYTRMEDWLTAKLAYEGLPSKTYLSKTLAQYTSKTCSNCGFTITSADYDRVLEKLKKTATGWMTTINGKELKVEGQITYYNRYKRQNVVKDLSVELDRLSEESVNNDISSWTKGRSGEALSLLKKRFSHRPVQEKFVCLNCGFETHADEQAALNIARSWLFLRSQEYKKYQTNKTTGNTDKRAFVETWQSFYRKKLKEVWKPAV

SEQ ID NO: 32679 - protein, 979 aa, synthetic construct
  REGION 1..979: note = engineered CasX variant
QEIKRANKIRRRLVKDSNTKKAGKTGPMKTLLVRVMTPDLRERLENLRKKPENIPQPISNTSRANLNKLLTDYTEMKKAILHVYWEEFQKDPVGLMSRVAQPASKKIDQNKLKPEMDEKGNLTTAGFACSQCGQPLFVYKLEQVSEKGKAYTNYFGRCNVAEHEKLILLAQLKPEKDSDEAVTYSLGKFGQRALDFYSIHVTKESTHPVKPLAQIAGNRYASYPVGKALSDACMGTIASFLSKYQDIIIEHQKVVKGNQKRLESLRELAGKENLEYPSVTLPPQPHTKEGVDAYNEVIARVRMWVNLNLWQKLKLSRDDAKPLLRLKGFPSFPLVERQANEVDWWDMVCNVKKLINEKKEDGKVFWQNLAGYKRQEALRPYLSSEEDRKKGKKFARYQLGDLLLHLEKKHGEDWGKVYDEAWERIDKKVEGLSKHIKLEEERRSEDAQSKAALTDWLRAKASFVIEGLKEADKDEFCRCELKLQKWYGDLRGKPFAIEAENSILDISGFSKQYNCAFIWQKDGVKKLNLYLIINYFKGGKLRFKKIKPEAFEANRFYTVINKKSGEIVPMEVNFNFDDPNLIILPLAFGKRQGREFIWNDLLSLETGSLKLANGRVIEKTLYNRRTRQDEPALFVALTFERREVLDSSNIKTPMNLIGVDRGENIPAVIALTDPEGCPLSRFKDSLGNPTHILRIGESYKEKQRTIQAKKEVEQRRAGGYSRKYASKAKNLADDMVRNTARDLLYYAVTQDAMLIFENLSRGFGRQGKRTFMAERQYTRMEDWLTAKLAYEGLPSKTYLSKTLAQYTSKTCSNCGFTITSADYDRVLEKLKKTATGWMTTINGKELKVEGQITYYNRYKRQNVVKDLSVELDRLSEESVNNDISSWTKGRSGEALSLLKKRFSHRPVQEKFVCLNCGFETHADEQAALNIARSWLFLRSQEYKKYQTNKTTGNTDKRAFVETWQSFYRKKLKEVWKPAV

SEQ ID NO: 32680 - protein, 979 aa, synthetic construct
  REGION 1..979: note = engineered CasX variant
QEIKRANKIRRRLVKDSNTKKAGKTGPMKTLLVRVMTPDLRERLENLRKKPENIPQPISNTSRANLNKLLTDYTEMKKAILHVYWEEFQKDPVGLMSRVAQPASKKIDQNKLKPEMDEKGNLTTAGFACSQCGQPLFVYKLEQVSEKGKAYTNYFGRCNVAEHEKLILLAQLKPEKDSDEAVTYSLGKFGQRALDFYSIHVTKESTHPVKPLAQIAGNRYASHPVGKALSDACMGTIASFLSKYQDIIIEHQKVVKGNQKRLESLRELAGKENLEYPSVTLPPQPHTKEGVDAYNEVIARVRMWVNLNLWQKLKLSRDDAKPLLRLKGFPSFPLVERQANEVDWWDMVCNVKKLINEKKEDGKVFWQNLAGYKRQEALRPYLSSEEDRKKGKKFARYQLGDLLLHLEKKHGEDWGKVYDEAWERIDKKVEGLSKHIKLEEERRSEDAQSKAALTDWLRAKASFVIEGLKEADKDEFCRCELKLQKWYGDLRGKPFAIEAENSILDISGFSKQYNCAFIWQKDGVKKLNLYLIINYFKGGKLRFKKIKPEAFEANRFYTVINKKSGEIVPMEVNFNFDDPNLIILPLAFGKRQGREFIWNDLLSLETGSLKLANGRVIEKTLYNRRTRQDEPALFVALTFERREVLDSSNIKTPMNLIGVDRGENIPAVIALTDPEGCPLSRFKDSLGNPTHILRIGESYKEKQRTIQAKKEVEQRRAGGYSRKYASKAKNLADDMVRNTARDLLYYAVTQDAMLIFENLSRGFGRQGKRTFMAERQYTRMEDWLTAKLAYEGLPSKTYLSKTLAQYTSKTCSNCGFTITSADYDRVLEKLKKTATGWMTTINGKELKVEGQITYYNRYKRQNVVKDLSVELDRLSEESVNNDISSWTKGRSGEALSLLKKRFSHRPVQEKFVCLNCGFETHADEQAALNIARSWLFLRSQEYKKYQTNKTTGNTDKRAFVETWQSFYRKKLKEVWKPAV

SEQ ID NO: 32681 - protein, 979 aa, synthetic construct
  REGION 1..979: note = engineered CasX variant
QEIKRANKIRRRLVKDSNTKKAGKTGPMKTLLVRVMTPDLRERLENLRKKPENIPQPISNTSRANLNKLLTDYTEMKKAILHVYWEEFQKDPVGLMSRVAQPASKKIDQNKLKPEMDEKGNLTTAGFACSQCGQPLFVYKLEQVSEKGKAYTNYFGRCNVAEHEKLILLAQLKPEKDSDEAVTYSLGKFGQRALDFYSIHVTKESTHPVKPLAQIAGNRYASSPVGKALSDACMGTIASFLSKYQDIIIEHQKVVKGNQKRLESLRELAGKENLEYPSVTLPPQPHTKEGVDAYNEVIARVRMWVNLNLWQKLKLSRDDAKPLLRLKGFPSFPLVERQANEVDWWDMVCNVKKLINEKKEDGKVFWQNLAGYKRQEALRPYLSSEEDRKKGKKFARYQLGDLLLHLEKKHGEDWGKVYDEAWERIDKKVEGLSKHIKLEEERRSEDAQSKAALTDWLRAKASFVIEGLKEADKDEFCRCELKLQKWYGDLRGKPFAIEAENSILDISGFSKQYNCAFIWQKDGVKKLNLYLIINYFKGGKLRFKKIKPEAFEANRFYTVINKKSGEIVPMEVNFNFDDPNLIILPLAFGKRQGREFIWNDLLSLETGSLKLANGRVIEKTLYNRRTRQDEPALFVALTFERREVLDSSNIKTPMNLIGVDRGENIPAVIALTDPEGCPLSRFKDSLGNPTHILRIGESYKEKQRTIQAKKEVEQRRAGGYSRKYASKAKNLADDMVRNTARDLLYYAVTQDAMLIFENLSRGFGRQGKRTFMAERQYTRMEDWLTAKLAYEGLPSKTYLSKTLAQYTSKTCSNCGFTITSADYDRVLEKLKKTATGWMTTINGKELKVEGQITYYNRYKRQNVVKDLSVELDRLSEESVNNDISSWTKGRSGEALSLLKKRFSHRPVQEKFVCLNCGFETHADEQAALNIARSWLFLRSQEYKKYQTNKTTGNTDKRAFVETWQSFYRKKLKEVWKPAV

SEQ ID NO: 32682 - protein, 979 aa, synthetic construct
  REGION 1..979: note = engineered CasX variant
QEIKRANKIRRRLVKDSNTKKAGKTGPMKTLLVRVMTPDLRERLENLRKKPENIPQPISNTSRANLNKLLTDYTEMKKAILHVYWEEFQKDPVGLMSRVAQPASKKIDQNKLKPEMDEKGNLTTAGFACSQCGQPLFVYKLEQVSEKGKAYTNYFGRCNVAEHEKLILLAQLKPEKDSDEAVTYSLGKFGQRALDFYSIHVTKESTHPVKPLAQIAGNRYASTPVGKALSDACMGTIASFLSKYQDIIIEHQKVVKGNQKRLESLRELAGKENLEYPSVTLPPQPHTKEGVDAYNEVIARVRMWVNLNLWQKLKLSRDDAKPLLRLKGFPSFPLVERQANEVDWWDMVCNVKKLINEKKEDGKVFWQNLAGYKRQEALRPYLSSEEDRKKGKKFARYQLGDLLLHLEKKHGEDWGKVYDEAWERIDKKVEGLSKHIKLEEERRSEDAQSKAALTDWLRAKASFVIEGLKEADKDEFCRCELKLQKWYGDLRGKPFAIEAENSILDISGFSKQYNCAFIWQKDGVKKLNLYLIINYFKGGKLRFKKIKPEAFEANRFYTVINKKSGEIVPMEVNFNFDDPNLIILPLAFGKRQGREFIWNDLLSLETGSLKLANGRVIEKTLYNRRTRQDEPALFVALTFERREVLDSSNIKTPMNLIGVDRGENIPAVIALTDPEGCPLSRFKDSLGNPTHILRIGESYKEKQRTIQAKKEVEQRRAGGYSRKYASKAKNLADDMVRNTARDLLYYAVTQDAMLIFENLSRGFGRQGKRTFMAERQYTRMEDWLTAKLAYEGLPSKTYLSKTLAQYTSKTCSNCGFTITSADYDRVLEKLKKTATGWMTTINGKELKVEGQITYYNRYKRQNVVKDLSVELDRLSEESVNNDISSWTKGRSGEALSLLKKRFSHRPVQEKFVCLNCGFETHADEQAALNIARSWLFLRSQEYKKYQTNKTTGNTDKRAFVETWQSFYRKKLKEVWKPAV

SEQ ID NO: 32683 - protein, 979 aa, synthetic construct
  REGION 1..979: note = engineered CasX variant
QEIKRANKIRRRLVKDSNTKKAGKTGPMKTLLVRVMTPDLRERLENLRKKPENIPQPISNTSRANLNKLLTDYTEMKKAILHVYWEEFQKDPVGLMSRVAQPASKKIDQNKLKPEMDEKGNLTTAGFACSQCGQPLFVYKLEQVSEKGKAYTNYFGRCNVAEHEKLILLAQLKPEKDSDEAVTYSLGKFGQRALDFYSIHVTKESTHPVKPLAQIAGNRYASAPVGKALSDACMGTIASFLSKYQDIIIEHQKVVKGNQKRLESLRELAGKENLEYPSVTLPPQPHTKEGVDAYNEVIARVRMWVNLNLWQKLKLSRDDAKPLLRLKGFPSFPLVERQANEVDWWDMVCNVKKLINEKKEDGKVFWQNLAGYKRQEALRPYLSSEEDRKKGKKFARYQLGDLLLHLEKKHGEDWGKVYDEAWERIDKKVEGLSKHIKLEEERRSEDAQSKAALTDWLRAKASFVIEGLKEADKDEFCRCELKLQKWYGDLRGKPFAIEAENSILDISGFSKQYNCAFIWQKDGVKKLNLYLIINYFKGGKLRFKKIKPEAFEANRFYTVINKKSGEIVPMEVNFNFDDPNLIILPLAFGKRQGREFIWNDLLSLETGSLKLANGRVIEKTLYNRRTRQDEPALFVALTFERREVLDSSNIKTPMNLIGVDRGENIPAVIALTDPEGCPLSRFKDSLGNPTHILRIGESYKEKQRTIQAKKEVEQRRAGGYSRKYASKAKNLADDMVRNTARDLLYYAVTQDAMLIFENLSRGFGRQGKRTFMAERQYTRMEDWLTAKLAYEGLPSKTYLSKTLAQYTSKTCSNCGFTITSADYDRVLEKLKKTATGWMTTINGKELKVEGQITYYNRYKRQNVVKDLSVELDRLSEESVNNDISSWTKGRSGEALSLLKKRFSHRPVQEKFVCLNCGFETHADEQAALNIARSWLFLRSQEYKKYQTNKTTGNTDKRAFVETWQSFYRKKLKEVWKPAV

SEQ ID NO: 32684 - protein, 979 aa, synthetic construct
  REGION 1..979: note = engineered CasX variant
QEIKRANKIRRRLVKDSNTKKAGKTGPMKTLLVRVMTPDLRERLENLRKKPENIPQPISNTSRANLNKLLTDYTEMKKAILHVYWEEFQKDPVGLMSRVAQPASKKIDQNKLKPEMDEKGNLTTAGFACSQCGQPLFVYKLEQVSEKGKAYTNYFGRCNVAEHEKLILLAQLKPEKDSDEAVTYSLGKFGQRALDFYSIHVTKESTHPVKPLAQIAGNRYASVPVGKALSDACMGTIASFLSKYQDIIIEHQKVVKGNQKRLESLRELAGKENLEYPSVTLPPQPHTKEGVDAYNEVIARVRMWVNLNLWQKLKLSRDDAKPLLRLKGFPSFPLVERQANEVDWWDMVCNVKKLINEKKEDGKVFWQNLAGYKRQEALRPYLSSEEDRKKGKKFARYQLGDLLLHLEKKHGEDWGKVYDEAWERIDKKVEGLSKHIKLEEERRSEDAQSKAALTDWLRAKASFVIEGLKEADKDEFCRCELKLQKWYGDLRGKPFAIEAENSILDISGFSKQYNCAFIWQKDGVKKLNLYLIINYFKGGKLRFKKIKPEAFEANRFYTVINKKSGEIVPMEVNFNFDDPNLIILPLAFGKRQGREFIWNDLLSLETGSLKLANGRVIEKTLYNRRTRQDEPALFVALTFERREVLDSSNIKTPMNLIGVDRGENIPAVIALTDPEGCPLSRFKDSLGNPTHILRIGESYKEKQRTIQAKKEVEQRRAGGYSRKYASKAKNLADDMVRNTARDLLYYAVTQDAMLIFENLSRGFGRQGKRTFMAERQYTRMEDWLTAKLAYEGLPSKTYLSKTLAQYTSKTCSNCGFTITSADYDRVLEKLKKTATGWMTTINGKELKVEGQITYYNRYKRQNVVKDLSVELDRLSEESVNNDISSWTKGRSGEALSLLKKRFSHRPVQEKFVCLNCGFETHADEQAALNIARSWLFLRSQEYKKYQTNKTTGNTDKRAFVETWQSFYRKKLKEVWKPAV

SEQ ID NO: 32685 - protein, 979 aa, synthetic construct
  REGION 1..979: note = engineered CasX variant
QEIKRANKIRRRLVKDSNTKKAGKTGPMKTLLVRVMTPDLRERLENLRKKPENIPQPISNTSRANLNKLLTDYTEMKKAILHVYWEEFQKDPVGLMSRVAQPASKKIDQNKLKPEMDEKGNLTTAGFACSQCGQPLFVYKLEQVSEKGKAYTNYFGRCNVAEHEKLIKLAQLKPEKDSDEAVTYSLGKFGQRALDFYSIHVTKESTHPVKPLAQIAGNRYASGPVGKALSDACMGTIASFLSKYQDIIIEHQKVVKGNQKRLESLRELAGKENLEYPSVTLPPQPHTKEGVDAYNEVIARVRMWVNLNLWQKLKLSRDDAKPLLRLKGFPSFPLVERQANEVDWWDMVCNVKKLINEKKEDGKVFWQNLAGYKRQEALRPYLSSEEDRKKGKKFARYQLGDLLLHLEKKHGEDWGKVYDEAWERIDKKVEGLSKHIKLEEERRSEDAQSKAALTDWLRAKASFVIEGLKEADKDEFCRCELKLQKWYGDLRGKPFAIEAENSILDISGFSKQYNCAFIWQKDGVKKLNLYLIINYFKGGKLRFKKIKPEAFEANRFYTVINKKSGEIVPMEVNFNFDDPNLIILPLAFGKRQGREFIWNDLLSLETGSLKLANGRVIEKTLYNRRTRQDEPALFVALTFERREVLDSSNIKTPMNLIGVDRGENIPAVIALTDPEGCPLSRFKDSLGNPTHILRIGESYKEKQRTIQAKKEVEQRRAGGYSRKYASKAKNLADDMVRNTARDLLYYAVTQDAMLIFENLSRGFGRQGKRTFMAERQYTRMEDWLTAKLAYEGLPSKTYLSKTLAQYTSKTCSNCGFTITSADYDRVLEKLKKTATGWMTTINGKELKVEGQITYYNRYKRQNVVKDLSVELDRLSEESVNNDISSWTKGRSGEALSLLKKRFSHRPVQEKFVCLNCGFETHADEQAALNIARSWLFLRSQEYKKYQTNKTTGNTDKRAFVETWQSFYRKKLKEVWKPAV

SEQ ID NO: 32686 - protein, 978 aa, synthetic construct
  REGION 1..978: note = engineered CasX variant
QEIKRANKIRRRLVKDSNTKKAGKTGPMKTLLVRVMTPDLRERLENLRKKPENIPQPISNTSRANLNKLLTDYTEMKKAILHVYWEEFQKDPVGLMSRVAQPASKKIDQNKLKPEMDEKGNLTTAGFACSQCGQPLFVYKLEQVSEKGKAYTNYFGRCNVAEHEKLILLAQLKPEKDSDEAVTYSLGKFGQRALDFYSIHVTKESTHPVKPLAQIAGNRYASPVGKALSDACMGTIASFLSKYQDIIIEHQKVVKGNQKRLESLRELAGKENLEYPSVTLPPQPHTKEGVDAYNEVIARVRMWVNLNLWQKLKLSRDDAKPLLRLKGFPSFPLVERQANEVDWWDMVCNVKKLINEKKEDGKVFWQNLAGYKRQEALRPYLSSEEDRKKGKKFARYQLGDLLLHLEKKHGEDWGKVYDEAWERIDKKVEGLSKHIKLEEERRSEDAQSKAALTDWLRAKASFVIEGLKEADKDEFCRCELKLQKWYGDLRGKPFAIEAENSILDISGFSKQYNCAFIWQKDGVKKLNLYLIINYFKGGKLRFKKIKPEAFEANRFYTVINKKSGEIVPMEVNFNFDDPNLIILPLAFGKRQGREFIWNDLLSLETGSLKLANGRVIEKTLYNRRTRQDEPALFVALTFERREVLDSSNIKTPMNLIGVDRGENIPAVIALTDPEGCPLSRFKDSLGNPTHILRIGESYKEKQRTIQAKKEVEQRRAGGYSRKYASKAKNLADDMVRNTARDLLYYAVTQDAMLIFENLSRGFGRQGKRTFMAERQYTRMEDWLTAKLAYEGLPSKTYLSKTLAQYTSKTCSNCGFTITSADYDRVLEKLKKTATGWMTTINGKELKVEGQITYYNRYKRQNVVKDLSVELDRLSEESVNNDISSWTKGRSGEALSLLKKRFSHRPVQEKFVCLNCGFETHADEQAALNIARSWLFLRSQEYKKYQTNKTTGNTDKRAFVETWQSFYRKKLKEVWKPAV

SEQ ID NO: 32687 - protein, 979 aa, synthetic construct
  REGION 1..979: note = engineered CasX variant
QEIKRANKIRRRLVKDSNTKKAGKTGPMKTLLVRVMTPDLRERLENLRKKPENIPQPISNTSRANLNKLLTDYTEMKKAILHVYWEEFQKDPVGLMSRVAQPASKKIDQNKLKPEMDEKGNLTTAGFACSQCGQPLFVYKLEQVSEKGKAYTNYFGRCNVAEHEKLILLAQLKPEKDSDEAVTYSLGKFGQRALDFYSIHVTKESTHPVKPLAQIAGNRYASYPVGKALSDACMGTIASFLSKYQDIIIEHQKVVKGNQKRLESLRELAGKENLEYPSVTLPPQPHTKEGVDAYNEVIARVRMWVNLNLWQKLKLSRDDAKPLLRLKGFPSFPLVERQANEVDWWDMVCNVKKLINEKKEDGKVFWQNLAGYKRQEALRPYLSSEEDRKKGKKFARYQLGDLLLHLEKKHGEDWGKVYDEAWERIDKKVEGLSKHIKLEEERRSEDAQSKAALTDWLRAKASFVIEGLKEADKDEFCRCELKLQKWYGDLRGKPFAIEAENSILDISGFSKQYNCAFIWQKDGVKKLNLYLIINYFKGGKLRFKKIKPEAFEANRFYTVINKKSGEIVPMEVNFNFDDPNLIILPLAFGKRQGREFIWNDLLSLETGSLKLANGRVIEKTLYNRRTRQDEPALFVALTFERREVLDSSNIKPMSNLIGVDRGENIPAVIALTDPEGCPLSRFKDSLGNPTHILRIGESYKEKQRTIQAKKEVEQRRAGGYSRKYASKAKNLADDMVRNTARDLLYYAVTQDAMLIFENLSRGFGRQGKRTFMAERQYTRMEDWLTAKLAYEGLPSKTYLSKTLAQYTSKTCSNCGFTITSADYDRVLEKLKKTATGWMTTINGKELKVEGQITYYNRYKRQNVVKDLSVELDRLSEESVNNDISSWTKGRSGEALSLLKKRFSHRPVQEKFVCLNCGFETHADEQAALNIARSWLFLRSQEYKKYQTNKTTGNTDKRAFVETWQSFYRKKLKEVWKPAV

SEQ ID NO: 32688 - protein, 979 aa, synthetic construct
  REGION 1..979: note = engineered CasX variant
QEIKRANKIRRRLVKDSNTKKAGKTGPMKTLLVRVMTPDLRERLENLRKKPENIPQPISNTSRANLNKLLTDYTEMKKAILHVYWEEFQKDPVGLMSRVAQPASKKIDQNKLKPEMDEKGNLTTAGFACSQCGQPLFVYKLEQVSEKGKAYTNYFGRCNVAEHEKLILLAQLKPEKDSDEAVTYSLGKFGQRALDFYSIHVTKESTHPVKPLAQIAGNRYASHPVGKALSDACMGTIASFLSKYQDIIIEHQKVVKGNQKRLESLRELAGKENLEYPSVTLPPQPHTKEGVDAYNEVIARVRMWVNLNLWQKLKLSRDDAKPLLRLKGFPSFPLVERQANEVDWWDMVCNVKKLINEKKEDGKVFWQNLAGYKRQEALRPYLSSEEDRKKGKKFARYQLGDLLLHLEKKHGEDWGKVYDEAWERIDKKVEGLSKHIKLEEERRSEDAQSKAALTDWLRAKASFVIEGLKEADKDEFCRCELKLQKWYGDLRGKPFAIEAENSILDISGFSKQYNCAFIWQKDGVKKLNLYLIINYFKGGKLRFKKIKPEAFEANRFYTVINKKSGEIVPMEVNFNFDDPNLIILPLAFGKRQGREFIWNDLLSLETGSLKLANGRVIEKTLYNRRTRQDEPALFVALTFERREVLDSSNIKPMSNLIGVDRGENIPAVIALTDPEGCPLSRFKDSLGNPTHILRIGESYKEKQRTIQAKKEVEQRRAGGYSRKYASKAKNLADDMVRNTARDLLYYAVTQDAMLIFENLSRGFGRQGKRTFMAERQYTRMEDWLTAKLAYEGLPSKTYLSKTLAQYTSKTCSNCGFTITSADYDRVLEKLKKTATGWMTTINGKELKVEGQITYYNRYKRQNVVKDLSVELDRLSEESVNNDISSWTKGRSGEALSLLKKRFSHRPVQEKFVCLNCGFETHADEQAALNIARSWLFLRSQEYKKYQTNKTTGNTDKRAFVETWQSFYRKKLKEVWKPAV

SEQ ID NO: 32689 - protein, 979 aa, synthetic construct
  REGION 1..979: note = engineered CasX variant
QEIKRANKIRRRLVKDSNTKKAGKTGPMKTLLVRVMTPDLRERLENLRKKPENIPQPISNTSRANLNKLLTDYTEMKKAILHVYWEEFQKDPVGLMSRVAQPASKKIDQNKLKPEMDEKGNLTTAGFACSQCGQPLFVYKLEQVSEKGKAYTNYFGRCNVAEHEKLILLAQLKPEKDSDEAVTYSLGKFGQRALDFYSIHVTKESTHPVKPLAQIAGNRYASSPVGKALSDACMGTIASFLSKYQDIIIEHQKVVKGNQKRLESLRELAGKENLEYPSVTLPPQPHTKEGVDAYNEVIARVRMWVNLNLWQKLKLSRDDAKPLLRLKGFPSFPLVERQANEVDWWDMVCNVKKLINEKKEDGKVFWQNLAGYKRQEALRPYLSSEEDRKKGKKFARYQLGDLLLHLEKKHGEDWGKVYDEAWERIDKKVEGLSKHIKLEEERRSEDAQSKAALTDWLRAKASFVIEGLKEADKDEFCRCELKLQKWYGDLRGKPFAIEAENSILDISGFSKQYNCAFIWQKDGVKKLNLYLIINYFKGGKLRFKKIKPEAFEANRFYTVINKKSGEIVPMEVNFNFDDPNLIILPLAFGKRQGREFIWNDLLSLETGSLKLANGRVIEKTLYNRRTRQDEPALFVALTFERREVLDSSNIKPMSNLIGVDRGENIPAVIALTDPEGCPLSRFKDSLGNPTHILRIGESYKEKQRTIQAKKEVEQRRAGGYSRKYASKAKNLADDMVRNTARDLLYYAVTQDAMLIFENLSRGFGRQGKRTFMAERQYTRMEDWLTAKLAYEGLPSKTYLSKTLAQYTSKTCSNCGFTITSADYDRVLEKLKKTATGWMTTINGKELKVEGQITYYNRYKRQNVVKDLSVELDRLSEESVNNDISSWTKGRSGEALSLLKKRFSHRPVQEKFVCLNCGFETHADEQAALNIARSWLFLRSQEYKKYQTNKTTGNTDKRAFVETWQSFYRKKLKEVWKPAV

SEQ ID NO: 32690 - protein, 979 aa, synthetic construct
  REGION 1..979: note = engineered CasX variant
QEIKRANKIRRRLVKDSNTKKAGKTGPMKTLLVRVMTPDLRERLENLRKKPENIPQPISNTSRANLNKLLTDYTEMKKAILHVYWEEFQKDPVGLMSRVAQPASKKIDQNKLKPEMDEKGNLTTAGFACSQCGQPLFVYKLEQVSEKGKAYTNYFGRCNVAEHEKLILLAQLKPEKDSDEAVTYSLGKFGQRALDFYSIHVTKESTHPVKPLAQIAGNRYASTPVGKALSDACMGTIASFLSKYQDIIIEHQKVVKGNQKRLESLRELAGKENLEYPSVTLPPQPHTKEGVDAYNEVIARVRMWVNLNLWQKLKLSRDDAKPLLRLKGFPSFPLVERQANEVDWWDMVCNVKKLINEKKEDGKVFWQNLAGYKRQEALRPYLSSEEDRKKGKKFARYQLGDLLLHLEKKHGEDWGKVYDEAWERIDKKVEGLSKHIKLEEERRSEDAQSKAALTDWLRAKASFVIEGLKEADKDEFCRCELKLQKWYGDLRGKPFAIEAENSILDISGFSKQYNCAFIWQKDGVKKLNLYLIINYFKGGKLRFKKIKPEAFEANRFYTVINKKSGEIVPMEVNFNFDDPNLIILPLAFGKRQGREFIWNDLLSLETGSLKLANGRVIEKTLYNRRTRQDEPALFVALTFERREVLDSSNIKPMSNLIGVDRGENIPAVIALTDPEGCPLSRFKDSLGNPTHILRIGESYKEKQRTIQAKKEVEQRRAGGYSRKYASKAKNLADDMVRNTARDLLYYAVTQDAMLIFENLSRGFGRQGKRTFMAERQYTRMEDWLTAKLAYEGLPSKTYLSKTLAQYTSKTCSNCGFTITSADYDRVLEKLKKTATGWMTTINGKELKVEGQITYYNRYKRQNVVKDLSVELDRLSEESVNNDISSWTKGRSGEALSLLKKRFSHRPVQEKFVCLNCGFETHADEQAALNIARSWLFLRSQEYKKYQTNKTTGNTDKRAFVETWQSFYRKKLKEVWKPAV

SEQ ID NO: 32691 - protein, 979 aa, synthetic construct
  REGION 1..979: note = engineered CasX variant
QEIKRANKIRRRLVKDSNTKKAGKTGPMKTLLVRVMTPDLRERLENLRKKPENIPQPISNTSRANLNKLLTDYTEMKKAILHVYWEEFQKDPVGLMSRVAQPASKKIDQNKLKPEMDEKGNLTTAGFACSQCGQPLFVYKLEQVSEKGKAYTNYFGRCNVAEHEKLILLAQLKPEKDSDEAVTYSLGKFGQRALDFYSIHVTKESTHPVKPLAQIAGNRYASAPVGKALSDACMGTIASFLSKYQDIIIEHQKVVKGNQKRLESLRELAGKENLEYPSVTLPPQPHTKEGVDAYNEVIARVRMWVNLNLWQKLKLSRDDAKPLLRLKGFPSFPLVERQANEVDWWDMVCNVKKLINEKKEDGKVFWQNLAGYKRQEALRPYLSSEEDRKKGKKFARYQLGDLLLHLEKKHGEDWGKVYDEAWERIDKKVEGLSKHIKLEEERRSEDAQSKAALTDWLRAKASFVIEGLKEADKDEFCRCELKLQKWYGDLRGKPFAIEAENSILDISGFSKQYNCAFIWQKDGVKKLNLYLIINYFKGGKLRFKKIKPEAFEANRFYTVINKKSGEIVPMEVNFNFDDPNLIILPLAFGKRQGREFIWNDLLSLETGSLKLANGRVIEKTLYNRRTRQDEPALFVALTFERREVLDSSNIKPMSNLIGVDRGENIPAVIALTDPEGCPLSRFKDSLGNPTHILRIGESYKEKQRTIQAKKEVEQRRAGGYSRKYASKAKNLADDMVRNTARDLLYYAVTQDAMLIFENLSRGFGRQGKRTFMAERQYTRMEDWLTAKLAYEGLPSKTYLSKTLAQYTSKTCSNCGFTITSADYDRVLEKLKKTATGWMTTINGKELKVEGQITYYNRYKRQNVVKDLSVELDRLSEESVNNDISSWTKGRSGEALSLLKKRFSHRPVQEKFVCLNCGFETHADEQAALNIARSWLFLRSQEYKKYQTNKTTGNTDKRAFVETWQSFYRKKLKEVWKPAV

SEQ ID NO: 32692 - protein, 979 aa, synthetic construct
  REGION 1..979: note = engineered CasX variant
QEIKRANKIRRRLVKDSNTKKAGKTGPMKTLLVRVMTPDLRERLENLRKKPENIPQPISNTSRANLNKLLTDYTEMKKAILHVYWEEFQKDPVGLMSRVAQPASKKIDQNKLKPEMDEKGNLTTAGFACSQCGQPLFVYKLEQVSEKGKAYTNYFGRCNVAEHEKLILLAQLKPEKDSDEAVTYSLGKFGQRALDFYSIHVTKESTHPVKPLAQIAGNRYASVPVGKALSDACMGTIASFLSKYQDIIIEHQKVVKGNQKRLESLRELAGKENLEYPSVTLPPQPHTKEGVDAYNEVIARVRMWVNLNLWQKLKLSRDDAKPLLRLKGFPSFPLVERQANEVDWWDMVCNVKKLINEKKEDGKVFWQNLAGYKRQEALRPYLSSEEDRKKGKKFARYQLGDLLLHLEKKHGEDWGKVYDEAWERIDKKVEGLSKHIKLEEERRSEDAQSKAALTDWLRAKASFVIEGLKEADKDEFCRCELKLQKWYGDLRGKPFAIEAENSILDISGFSKQYNCAFIWQKDGVKKLNLYLIINYFKGGKLRFKKIKPEAFEANRFYTVINKKSGEIVPMEVNFNFDDPNLIILPLAFGKRQGREFIWNDLLSLETGSLKLANGRVIEKTLYNRRTRQDEPALFVALTFERREVLDSSNIKPMSNLIGVDRGENIPAVIALTDPEGCPLSRFKDSLGNPTHILRIGESYKEKQRTIQAKKEVEQRRAGGYSRKYASKAKNLADDMVRNTARDLLYYAVTQDAMLIFENLSRGFGRQGKRTFMAERQYTRMEDWLTAKLAYEGLPSKTYLSKTLAQYTSKTCSNCGFTITSADYDRVLEKLKKTATGWMTTINGKELKVEGQITYYNRYKRQNVVKDLSVELDRLSEESVNNDISSWTKGRSGEALSLLKKRFSHRPVQEKFVCLNCGFETHADEQAALNIARSWLFLRSQEYKKYQTNKTTGNTDKRAFVETWQSFYRKKLKEVWKPAV

SEQ ID NO: 32693 - protein, 979 aa, synthetic construct
  REGION 1..979: note = engineered CasX variant
QEIKRANKIRRRLVKDSNTKKAGKTGPMKTLLVRVMTPDLRERLENLRKKPENIPQPISNTSRANLNKLLTDYTEMKKAILHVYWEEFQKDPVGLMSRVAQPASKKIDQNKLKPEMDEKGNLTTAGFACSQCGQPLFVYKLEQVSEKGKAYTNYFGRCNVAEHEKLIKLAQLKPEKDSDEAVTYSLGKFGQRALDFYSIHVTKESTHPVKPLAQIAGNRYASGPVGKALSDACMGTIASFLSKYQDIIIEHQKVVKGNQKRLESLRELAGKENLEYPSVTLPPQPHTKEGVDAYNEVIARVRMWVNLNLWQKLKLSRDDAKPLLRLKGFPSFPLVERQANEVDWWDMVCNVKKLINEKKEDGKVFWQNLAGYKRQEALRPYLSSEEDRKKGKKFARYQLGDLLLHLEKKHGEDWGKVYDEAWERIDKKVEGLSKHIKLEEERRSEDAQSKAALTDWLRAKASFVIEGLKEADKDEFCRCELKLQKWYGDLRGKPFAIEAENSILDISGFSKQYNCAFIWQKDGVKKLNLYLIINYFKGGKLRFKKIKPEAFEANRFYTVINKKSGEIVPMEVNFNFDDPNLIILPLAFGKRQGREFIWNDLLSLETGSLKLANGRVIEKTLYNRRTRQDEPALFVALTFERREVLDSSNIKPMSNLIGVDRGENIPAVIALTDPEGCPLSRFKDSLGNPTHILRIGESYKEKQRTIQAKKEVEQRRAGGYSRKYASKAKNLADDMVRNTARDLLYYAVTQDAMLIFENLSRGFGRQGKRTFMAERQYTRMEDWLTAKLAYEGLPSKTYLSKTLAQYTSKTCSNCGFTITSADYDRVLEKLKKTATGWMTTINGKELKVEGQITYYNRYKRQNVVKDLSVELDRLSEESVNNDISSWTKGRSGEALSLLKKRFSHRPVQEKFVCLNCGFETHADEQAALNIARSWLFLRSQEYKKYQTNKTTGNTDKRAFVETWQSFYRKKLKEVWKPAV

SEQ ID NO: 32694 - protein, 978 aa, synthetic construct
  REGION 1..978: note = engineered CasX variant
QEIKRANKIRRRLVKDSNTKKAGKTGPMKTLLVRVMTPDLRERLENLRKKPENIPQPISNTSRANLNKLLTDYTEMKKAILHVYWEEFQKDPVGLMSRVAQPASKKIDQNKLKPEMDEKGNLTTAGFACSQCGQPLFVYKLEQVSEKGKAYTNYFGRCNVAEHEKLILLAQLKPEKDSDEAVTYSLGKFGQRALDFYSIHVTKESTHPVKPLAQIAGNRYASPVGKALSDACMGTIASFLSKYQDIIIEHQKVVKGNQKRLESLRELAGKENLEYPSVTLPPQPHTKEGVDAYNEVIARVRMWVNLNLWQKLKLSRDDAKPLLRLKGFPSFPLVERQANEVDWWDMVCNVKKLINEKKEDGKVFWQNLAGYKRQEALRPYLSSEEDRKKGKKFARYQLGDLLLHLEKKHGEDWGKVYDEAWERIDKKVEGLSKHIKLEEERRSEDAQSKAALTDWLRAKASFVIEGLKEADKDEFCRCELKLQKWYGDLRGKPFAIEAENSILDISGFSKQYNCAFIWQKDGVKKLNLYLIINYFKGGKLRFKKIKPEAFEANRFYTVINKKSGEIVPMEVNFNFDDPNLIILPLAFGKRQGREFIWNDLLSLETGSLKLANGRVIEKTLYNRRTRQDEPALFVALTFERREVLDSSNIKPMSNLIGVDRGENIPAVIALTDPEGCPLSRFKDSLGNPTHILRIGESYKEKQRTIQAKKEVEQRRAGGYSRKYASKAKNLADDMVRNTARDLLYYAVTQDAMLIFENLSRGFGRQGKRTFMAERQYTRMEDWLTAKLAYEGLPSKTYLSKTLAQYTSKTCSNCGFTITSADYDRVLEKLKKTATGWMTTINGKELKVEGQITYYNRYKRQNVVKDLSVELDRLSEESVNNDISSWTKGRSGEALSLLKKRFSHRPVQEKFVCLNCGFETHADEQAALNIARSWLFLRSQEYKKYQTNKTTGNTDKRAFVETWQSFYRKKLKEVWKPAV

SEQ ID NO: 32695 - protein, 978 aa, synthetic construct
  REGION 1..978: note = engineered CasX variant
QEIKRANKIRRRLVKDSNTKKAGKTGPMKTLLVRVMTPDLRERLENLRKKPENIPQPISNTSRANLNKLLTDYTEMKKAILHVYWEEFQKDPVGLMSRVAQPASKKIDQNKLKPEMDEKGNLTTAGFACSQCGQPLFVYKLEQVSEKGKAYTNYFGRCNVAEHEKLILLAQLKPEKDSDEAVTYSLGKFGQRALDFYSIHVTKESTHPVKPLAQIAGNRYASYPVGKALSDACMGTIASFLSKYQDIIIEHQKVVKGNQKRLESLRELAGKENLEYPSVTLPPQPHTKEGVDAYNEVIARVRMWVNLNLWQKLKLSRDDAKPLLRLKGFPSFPLVERQANEVDWWDMVCNVKKLINEKKEDGKVFWQNLAGYKRQEALRPYLSSEEDRKKGKKFARYQLGDLLLHLEKKHGEDWGKVYDEAWERIDKKVEGLSKHIKLEEERRSEDAQSKAALTDWLRAKASFVIEGLKEADKDEFCRCELKLQKWYGDLRGKPFAIEAENSILDISGFSKQYNCAFIWQKDGVKKLNLYLIINYFKGGKLRFKKIKPEAFEANRFYTVINKKSGEIVPMEVNFNFDDPNLIILPLAFGKRQGREFIWNDLLSLETGSLKLANGRVIEKTLYNRRTRQDEPALFVALTFERREVLDSSNIKPMNLIGVDRGENIPAVIALTDPEGCPLSRFKDSLGNPTHILRIRESYKEKQRTIQAKKEVEQRRAGGYSRKYASKAKNLADDMVRNTARDLLYYAVTQDAMLIFENLSRGFGRQGKRTFMAERQYTRMEDWLTAKLAYEGLPSKTYLSKTLAQYTSKTCSNCGFTITSADYDRVLEKLKKTATGWMTTINGKELKVEGQITYYNRYKRQNVVKDLSVELDRLSEESVNNDISSWTKGRSGEALSLLKKRFSHRPVQEKFVCLNCGFETHADEQAALNIARSWLFLRSQEYKKYQTNKTTGNTDKRAFVETWQSFYRKKLKEVWKPAV

SEQ ID NO: 32696 - protein, 978 aa, synthetic construct
  REGION 1..978: note = engineered CasX variant
QEIKRANKIRRRLVKDSNTKKAGKTGPMKTLLVRVMTPDLRERLENLRKKPENIPQPISNTSRANLNKLLTDYTEMKKAILHVYWEEFQKDPVGLMSRVAQPASKKIDQNKLKPEMDEKGNLTTAGFACSQCGQPLFVYKLEQVSEKGKAYTNYFGRCNVAEHEKLILLAQLKPEKDSDEAVTYSLGKFGQRALDFYSIHVTKESTHPVKPLAQIAGNRYASHPVGKALSDACMGTIASFLSKYQDIIIEHQKVVKGNQKRLESLRELAGKENLEYPSVTLPPQPHTKEGVDAYNEVIARVRMWVNLNLWQKLKLSRDDAKPLLRLKGFPSFPLVERQANEVDWWDMVCNVKKLINEKKEDGKVFWQNLAGYKRQEALRPYLSSEEDRKKGKKFARYQLGDLLLHLEKKHGEDWGKVYDEAWERIDKKVEGLSKHIKLEEERRSEDAQSKAALTDWLRAKASFVIEGLKEADKDEFCRCELKLQKWYGDLRGKPFAIEAENSILDISGFSKQYNCAFIWQKDGVKKLNLYLIINYFKGGKLRFKKIKPEAFEANRFYTVINKKSGEIVPMEVNFNFDDPNLIILPLAFGKRQGREFIWNDLLSLETGSLKLANGRVIEKTLYNRRTRQDEPALFVALTFERREVLDSSNIKPMNLIGVDRGENIPAVIALTDPEGCPLSRFKDSLGNPTHILRIRESYKEKQRTIQAKKEVEQRRAGGYSRKYASKAKNLADDMVRNTARDLLYYAVTQDAMLIFENLSRGFGRQGKRTFMAERQYTRMEDWLTAKLAYEGLPSKTYLSKTLAQYTSKTCSNCGFTITSADYDRVLEKLKKTATGWMTTINGKELKVEGQITYYNRYKRQNVVKDLSVELDRLSEESVNNDISSWTKGRSGEALSLLKKRFSHRPVQEKFVCLNCGFETHADEQAALNIARSWLFLRSQEYKKYQTNKTTGNTDKRAFVETWQSFYRKKLKEVWKPAV

SEQ ID NO: 32697 - protein, 978 aa, synthetic construct
  REGION 1..978: note = engineered CasX variant
QEIKRANKIRRRLVKDSNTKKAGKTGPMKTLLVRVMTPDLRERLENLRKKPENIPQPISNTSRANLNKLLTDYTEMKKAILHVYWEEFQKDPVGLMSRVAQPASKKIDQNKLKPEMDEKGNLTTAGFACSQCGQPLFVYKLEQVSEKGKAYTNYFGRCNVAEHEKLILLAQLKPEKDSDEAVTYSLGKFGQRALDFYSIHVTKESTHPVKPLAQIAGNRYASSPVGKALSDACMGTIASFLSKYQDIIIEHQKVVKGNQKRLESLRELAGKENLEYPSVTLPPQPHTKEGVDAYNEVIARVRMWVNLNLWQKLKLSRDDAKPLLRLKGFPSFPLVERQANEVDWWDMVCNVKKLINEKKEDGKVFWQNLAGYKRQEALRPYLSSEEDRKKGKKFARYQLGDLLLHLEKKHGEDWGKVYDEAWERIDKKVEGLSKHIKLEEERRSEDAQSKAALTDWLRAKASFVIEGLKEADKDEFCRCELKLQKWYGDLRGKPFAIEAENSILDISGFSKQYNCAFIWQKDGVKKLNLYLIINYFKGGKLRFKKIKPEAFEANRFYTVINKKSGEIVPMEVNFNFDDPNLIILPLAFGKRQGREFIWNDLLSLETGSLKLANGRVIEKTLYNRRTRQDEPALFVALTFERREVLDSSNIKPMNLIGVDRGENIPAVIALTDPEGCPLSRFKDSLGNPTHILRIRESYKEKQRTIQAKKEVEQRRAGGYSRKYASKAKNLADDMVRNTARDLLYYAVTQDAMLIFENLSRGFGRQGKRTFMAERQYTRMEDWLTAKLAYEGLPSKTYLSKTLAQYTSKTCSNCGFTITSADYDRVLEKLKKTATGWMTTINGKELKVEGQITYYNRYKRQNVVKDLSVELDRLSEESVNNDISSWTKGRSGEALSLLKKRFSHRPVQEKFVCLNCGFETHADEQAALNIARSWLFLRSQEYKKYQTNKTTGNTDKRAFVETWQSFYRKKLKEVWKPAV

SEQ ID NO: 32698 - protein, 978 aa, synthetic construct
  REGION 1..978: note = engineered CasX variant
QEIKRANKIRRRLVKDSNTKKAGKTGPMKTLLVRVMTPDLRERLENLRKKPENIPQPISNTSRANLNKLLTDYTEMKKAILHVYWEEFQKDPVGLMSRVAQPASKKIDQNKLKPEMDEKGNLTTAGFACSQCGQPLFVYKLEQVSEKGKAYTNYFGRCNVAEHEKLILLAQLKPEKDSDEAVTYSLGKFGQRALDFYSIHVTKESTHPVKPLAQIAGNRYASTPVGKALSDACMGTIASFLSKYQDIIIEHQKVVKGNQKRLESLRELAGKENLEYPSVTLPPQPHTKEGVDAYNEVIARVRMWVNLNLWQKLKLSRDDAKPLLRLKGFPSFPLVERQANEVDWWDMVCNVKKLINEKKEDGKVFWQNLAGYKRQEALRPYLSSEEDRKKGKKFARYQLGDLLLHLEKKHGEDWGKVYDEAWERIDKKVEGLSKHIKLEEERRSEDAQSKAALTDWLRAKASFVIEGLKEADKDEFCRCELKLQKWYGDLRGKPFAIEAENSILDISGFSKQYNCAFIWQKDGVKKLNLYLIINYFKGGKLRFKKIKPEAFEANRFYTVINKKSGEIVPMEVNFNFDDPNLIILPLAFGKRQGREFIWNDLLSLETGSLKLANGRVIEKTLYNRRTRQDEPALFVALTFERREVLDSSNIKPMNLIGVDRGENIPAVIALTDPEGCPLSRFKDSLGNPTHILRIRESYKEKQRTIQAKKEVEQRRAGGYSRKYASKAKNLADDMVRNTARDLLYYAVTQDAMLIFENLSRGFGRQGKRTFMAERQYTRMEDWLTAKLAYEGLPSKTYLSKTLAQYTSKTCSNCGFTITSADYDRVLEKLKKTATGWMTTINGKELKVEGQITYYNRYKRQNVVKDLSVELDRLSEESVNNDISSWTKGRSGEALSLLKKRFSHRPVQEKFVCLNCGFETHADEQAALNIARSWLFLRSQEYKKYQTNKTTGNTDKRAFVETWQSFYRKKLKEVWKPAV

SEQ ID NO: 32699 - protein, 978 aa, synthetic construct
  REGION 1..978: note = engineered CasX variant
QEIKRANKIRRRLVKDSNTKKAGKTGPMKTLLVRVMTPDLRERLENLRKKPENIPQPISNTSRANLNKLLTDYTEMKKAILHVYWEEFQKDPVGLMSRVAQPASKKIDQNKLKPEMDEKGNLTTAGFACSQCGQPLFVYKLEQVSEKGKAYTNYFGRCNVAEHEKLILLAQLKPEKDSDEAVTYSLGKFGQRALDFYSIHVTKESTHPVKPLAQIAGNRYASAPVGKALSDACMGTIASFLSKYQDIIIEHQKVVKGNQKRLESLRELAGKENLEYPSVTLPPQPHTKEGVDAYNEVIARVRMWVNLNLWQKLKLSRDDAKPLLRLKGFPSFPLVERQANEVDWWDMVCNVKKLINEKKEDGKVFWQNLAGYKRQEALRPYLSSEEDRKKGKKFARYQLGDLLLHLEKKHGEDWGKVYDEAWERIDKKVEGLSKHIKLEEERRSEDAQSKAALTDWLRAKASFVIEGLKEADKDEFCRCELKLQKWYGDLRGKPFAIEAENSILDISGFSKQYNCAFIWQKDGVKKLNLYLIINYFKGGKLRFKKIKPEAFEANRFYTVINKKSGEIVPMEVNFNFDDPNLIILPLAFGKRQGREFIWNDLLSLETGSLKLANGRVIEKTLYNRRTRQDEPALFVALTFERREVLDSSNIKPMNLIGVDRGENIPAVIALTDPEGCPLSRFKDSLGNPTHILRIRESYKEKQRTIQAKKEVEQRRAGGYSRKYASKAKNLADDMVRNTARDLLYYAVTQDAMLIFENLSRGFGRQGKRTFMAERQYTRMEDWLTAKLAYEGLPSKTYLSKTLAQYTSKTCSNCGFTITSADYDRVLEKLKKTATGWMTTINGKELKVEGQITYYNRYKRQNVVKDLSVELDRLSEESVNNDISSWTKGRSGEALSLLKKRFSHRPVQEKFVCLNCGFETHADEQAALNIARSWLFLRSQEYKKYQTNKTTGNTDKRAFVETWQSFYRKKLKEVWKPAV

SEQ ID NO: 32700 - protein, 978 aa, synthetic construct
  REGION 1..978: note = engineered CasX variant
QEIKRANKIRRRLVKDSNTKKAGKTGPMKTLLVRVMTPDLRERLENLRKKPENIPQPISNTSRANLNKLLTDYTEMKKAILHVYWEEFQKDPVGLMSRVAQPASKKIDQNKLKPEMDEKGNLTTAGFACSQCGQPLFVYKLEQVSEKGKAYTNYFGRCNVAEHEKLILLAQLKPEKDSDEAVTYSLGKFGQRALDFYSIHVTKESTHPVKPLAQIAGNRYASVPVGKALSDACMGTIASFLSKYQDIIIEHQKVVKGNQKRLESLRELAGKENLEYPSVTLPPQPHTKEGVDAYNEVIARVRMWVNLNLWQKLKLSRDDAKPLLRLKGFPSFPLVERQANEVDWWDMVCNVKKLINEKKEDGKVFWQNLAGYKRQEALRPYLSSEEDRKKGKKFARYQLGDLLLHLEKKHGEDWGKVYDEAWERIDKKVEGLSKHIKLEEERRSEDAQSKAALTDWLRAKASFVIEGLKEADKDEFCRCELKLQKWYGDLRGKPFAIEAENSILDISGFSKQYNCAFIWQKDGVKKLNLYLIINYFKGGKLRFKKIKPEAFEANRFYTVINKKSGEIVPMEVNFNFDDPNLIILPLAFGKRQGREFIWNDLLSLETGSLKLANGRVIEKTLYNRRTRQDEPALFVALTFERREVLDSSNIKPMNLIGVDRGENIPAVIALTDPEGCPLSRFKDSLGNPTHILRIRESYKEKQRTIQAKKEVEQRRAGGYSRKYASKAKNLADDMVRNTARDLLYYAVTQDAMLIFENLSRGFGRQGKRTFMAERQYTRMEDWLTAKLAYEGLPSKTYLSKTLAQYTSKTCSNCGFTITSADYDRVLEKLKKTATGWMTTINGKELKVEGQITYYNRYKRQNVVKDLSVELDRLSEESVNNDISSWTKGRSGEALSLLKKRFSHRPVQEKFVCLNCGFETHADEQAALNIARSWLFLRSQEYKKYQTNKTTGNTDKRAFVETWQSFYRKKLKEVWKPAV

SEQ ID NO: 32701 - protein, 978 aa, synthetic construct
  REGION 1..978: note = engineered CasX variant
QEIKRANKIRRRLVKDSNTKKAGKTGPMKTLLVRVMTPDLRERLENLRKKPENIPQPISNTSRANLNKLLTDYTEMKKAILHVYWEEFQKDPVGLMSRVAQPASKKIDQNKLKPEMDEKGNLTTAGFACSQCGQPLFVYKLEQVSEKGKAYTNYFGRCNVAEHEKLIKLAQLKPEKDSDEAVTYSLGKFGQRALDFYSIHVTKESTHPVKPLAQIAGNRYASGPVGKALSDACMGTIASFLSKYQDIIIEHQKVVKGNQKRLESLRELAGKENLEYPSVTLPPQPHTKEGVDAYNEVIARVRMWVNLNLWQKLKLSRDDAKPLLRLKGFPSFPLVERQANEVDWWDMVCNVKKLINEKKEDGKVFWQNLAGYKRQEALRPYLSSEEDRKKGKKFARYQLGDLLLHLEKKHGEDWGKVYDEAWERIDKKVEGLSKHIKLEEERRSEDAQSKAALTDWLRAKASFVIEGLKEADKDEFCRCELKLQKWYGDLRGKPFAIEAENSILDISGFSKQYNCAFIWQKDGVKKLNLYLIINYFKGGKLRFKKIKPEAFEANRFYTVINKKSGEIVPMEVNFNFDDPNLIILPLAFGKRQGREFIWNDLLSLETGSLKLANGRVIEKTLYNRRTRQDEPALFVALTFERREVLDSSNIKPMNLIGVDRGENIPAVIALTDPEGCPLSRFKDSLGNPTHILRIRESYKEKQRTIQAKKEVEQRRAGGYSRKYASKAKNLADDMVRNTARDLLYYAVTQDAMLIFENLSRGFGRQGKRTFMAERQYTRMEDWLTAKLAYEGLPSKTYLSKTLAQYTSKTCSNCGFTITSADYDRVLEKLKKTATGWMTTINGKELKVEGQITYYNRYKRQNVVKDLSVELDRLSEESVNNDISSWTKGRSGEALSLLKKRFSHRPVQEKFVCLNCGFETHADEQAALNIARSWLFLRSQEYKKYQTNKTTGNTDKRAFVETWQSFYRKKLKEVWKPAV

SEQ ID NO: 32702 - protein, 977 aa, synthetic construct
  REGION 1..977: note = engineered CasX variant
QEIKRANKIRRRLVKDSNTKKAGKTGPMKTLLVRVMTPDLRERLENLRKKPENIPQPISNTSRANLNKLLTDYTEMKKAILHVYWEEFQKDPVGLMSRVAQPASKKIDQNKLKPEMDEKGNLTTAGFACSQCGQPLFVYKLEQVSEKGKAYTNYFGRCNVAEHEKLILLAQLKPEKDSDEAVTYSLGKFGQRALDFYSIHVTKESTHPVKPLAQIAGNRYASPVGKALSDACMGTIASFLSKYQDIIIEHQKVVKGNQKRLESLRELAGKENLEYPSVTLPPQPHTKEGVDAYNEVIARVRMWVNLNLWQKLKLSRDDAKPLLRLKGFPSFPLVERQANEVDWWDMVCNVKKLINEKKEDGKVFWQNLAGYKRQEALRPYLSSEEDRKKGKKFARYQLGDLLLHLEKKHGEDWGKVYDEAWERIDKKVEGLSKHIKLEEERRSEDAQSKAALTDWLRAKASFVIEGLKEADKDEFCRCELKLQKWYGDLRGKPFAIEAENSILDISGFSKQYNCAFIWQKDGVKKLNLYLIINYFKGGKLRFKKIKPEAFEANRFYTVINKKSGEIVPMEVNFNFDDPNLIILPLAFGKRQGREFIWNDLLSLETGSLKLANGRVIEKTLYNRRTRQDEPALFVALTFERREVLDSSNIKPMNLIGVDRGENIPAVIALTDPEGCPLSRFKDSLGNPTHILRIRESYKEKQRTIQAKKEVEQRRAGGYSRKYASKAKNLADDMVRNTARDLLYYAVTQDAMLIFENLSRGFGRQGKRTFMAERQYTRMEDWLTAKLAYEGLPSKTYLSKTLAQYTSKTCSNCGFTITSADYDRVLEKLKKTATGWMTTINGKELKVEGQITYYNRYKRQNVVKDLSVELDRLSEESVNNDISSWTKGRSGEALSLLKKRFSHRPVQEKFVCLNCGFETHADEQAALNIARSWLFLRSQEYKKYQTNKTTGNTDKRAFVETWQSFYRKKLKEVWKPAV

SEQ ID NO: 32703 - protein, 978 aa, synthetic construct
  REGION 1..978: note = engineered CasX variant
QEIKRANKIRRRLVKDSNTKKAGKTGPMKTLLVRVMTPDLRERLENLRKKPENIPQPISNTSRANLNKLLTDYTEMKKAILHVYWEEFQKDPVGLMSRVAQPASKKIDQNKLKPEMDEKGNLTTAGFACSQCGQPLFVYKLEQVSEKGKAYTNYFGRCNVAEHEKLILLAQLKPEKDSDEAVTYSLGKFGQRALDFYSIHVTKESTHPVKPLAQIAGNRYASYPVGKALSDACMGTIASFLSKYQDIIIEHQKVVKGNQKRLESLRELAGKENLEYPSVTLPPQPHTKEGVDAYNEVIARVRMWVNLNLWQKLKLSRDDAKPLLRLKGFPSFPLVERQANEVDWWDMVCNVKKLINEKKEDGKVFWQNLAGYKRQEALRPYLSSEEDRKKGKKFARYQLGDLLLHLEKKHGEDWGKVYDEAWERIDKKVEGLSKHIKLEEERRSEDAQSKAALTDWLRAKASFVIEGLKEADKDEFCRCELKLQKWYGDLRGKPFAIEAENSILDISGFSKQYNCAFIWQKDGVKKLNLYLIINYFKGGKLRFKKIKPEAFEANRFYTVINKKSGEIVPMEVNFNFDDPNLIILPLAFGKRQGREFIWNDLLSLETGSLKLANGRVIEKTLYNRRTRQDEPALFVALTFERREVLDSSNIKPMNLIGVDRGENIPAVIALTDPEGCPLSRFKDSLGNPTHILRIGESYKEKQRTIQAKKEVEQRRAGGYSRKYASKAKNLADDMVRNTARDLLYYAVTQDAMLIFENLSRGFGRQGKRTFSAERQYTRMEDWLTAKLAYEGLPSKTYLSKTLAQYTSKTCSNCGFTITSADYDRVLEKLKKTATGWMTTINGKELKVEGQITYYNRYKRQNVVKDLSVELDRLSEESVNNDISSWTKGRSGEALSLLKKRFSHRPVQEKFVCLNCGFETHADEQAALNIARSWLFLRSQEYKKYQTNKTTGNTDKRAFVETWQSFYRKKLKEVWKPAV

SEQ ID NO: 32704 - protein, 978 aa, synthetic construct
  REGION 1..978: note = engineered CasX variant
QEIKRANKIRRRLVKDSNTKKAGKTGPMKTLLVRVMTPDLRERLENLRKKPENIPQPISNTSRANLNKLLTDYTEMKKAILHVYWEEFQKDPVGLMSRVAQPASKKIDQNKLKPEMDEKGNLTTAGFACSQCGQPLFVYKLEQVSEKGKAYTNYFGRCNVAEHEKLILLAQLKPEKDSDEAVTYSLGKFGQRALDFYSIHVTKESTHPVKPLAQIAGNRYASHPVGKALSDACMGTIASFLSKYQDIIIEHQKVVKGNQKRLESLRELAGKENLEYPSVTLPPQPHTKEGVDAYNEVIARVRMWVNLNLWQKLKLSRDDAKPLLRLKGFPSFPLVERQANEVDWWDMVCNVKKLINEKKEDGKVFWQNLAGYKRQEALRPYLSSEEDRKKGKKFARYQLGDLLLHLEKKHGEDWGKVYDEAWERIDKKVEGLSKHIKLEEERRSEDAQSKAALTDWLRAKASFVIEGLKEADKDEFCRCELKLQKWYGDLRGKPFAIEAENSILDISGFSKQYNCAFIWQKDGVKKLNLYLIINYFKGGKLRFKKIKPEAFEANRFYTVINKKSGEIVPMEVNFNFDDPNLIILPLAFGKRQGREFIWNDLLSLETGSLKLANGRVIEKTLYNRRTRQDEPALFVALTFERREVLDSSNIKPMNLIGVDRGENIPAVIALTDPEGCPLSRFKDSLGNPTHILRIGESYKEKQRTIQAKKEVEQRRAGGYSRKYASKAKNLADDMVRNTARDLLYYAVTQDAMLIFENLSRGFGRQGKRTFSAERQYTRMEDWLTAKLAYEGLPSKTYLSKTLAQYTSKTCSNCGFTITSADYDRVLEKLKKTATGWMTTINGKELKVEGQITYYNRYKRQNVVKDLSVELDRLSEESVNNDISSWTKGRSGEALSLLKKRFSHRPVQEKFVCLNCGFETHADEQAALNIARSWLFLRSQEYKKYQTNKTTGNTDKRAFVETWQSFYRKKLKEVWKPAV

SEQ ID NO: 32705 - protein, 978 aa, synthetic construct
  REGION 1..978: note = engineered CasX variant
QEIKRANKIRRRLVKDSNTKKAGKTGPMKTLLVRVMTPDLRERLENLRKKPENIPQPISNTSRANLNKLLTDYTEMKKAILHVYWEEFQKDPVGLMSRVAQPASKKIDQNKLKPEMDEKGNLTTAGFACSQCGQPLFVYKLEQVSEKGKAYTNYFGRCNVAEHEKLILLAQLKPEKDSDEAVTYSLGKFGQRALDFYSIHVTKESTHPVKPLAQIAGNRYASSPVGKALSDACMGTIASFLSKYQDIIIEHQKVVKGNQKRLESLRELAGKENLEYPSVTLPPQPHTKEGVDAYNEVIARVRMWVNLNLWQKLKLSRDDAKPLLRLKGFPSFPLVERQANEVDWWDMVCNVKKLINEKKEDGKVFWQNLAGYKRQEALRPYLSSEEDRKKGKKFARYQLGDLLLHLEKKHGEDWGKVYDEAWERIDKKVEGLSKHIKLEEERRSEDAQSKAALTDWLRAKASFVIEGLKEADKDEFCRCELKLQKWYGDLRGKPFAIEAENSILDISGFSKQYNCAFIWQKDGVKKLNLYLIINYFKGGKLRFKKIKPEAFEANRFYTVINKKSGEIVPMEVNFNFDDPNLIILPLAFGKRQGREFIWNDLLSLETGSLKLANGRVIEKTLYNRRTRQDEPALFVALTFERREVLDSSNIKPMNLIGVDRGENIPAVIALTDPEGCPLSRFKDSLGNPTHILRIGESYKEKQRTIQAKKEVEQRRAGGYSRKYASKAKNLADDMVRNTARDLLYYAVTQDAMLIFENLSRGFGRQGKRTFSAERQYTRMEDWLTAKLAYEGLPSKTYLSKTLAQYTSKTCSNCGFTITSADYDRVLEKLKKTATGWMTTINGKELKVEGQITYYNRYKRQNVVKDLSVELDRLSEESVNNDISSWTKGRSGEALSLLKKRFSHRPVQEKFVCLNCGFETHADEQAALNIARSWLFLRSQEYKKYQTNKTTGNTDKRAFVETWQSFYRKKLKEVWKPAV

SEQ ID NO: 32706 - protein, 978 aa, synthetic construct
  REGION 1..978: note = engineered CasX variant
QEIKRANKIRRRLVKDSNTKKAGKTGPMKTLLVRVMTPDLRERLENLRKKPENIPQPISNTSRANLNKLLTDYTEMKKAILHVYWEEFQKDPVGLMSRVAQPASKKIDQNKLKPEMDEKGNLTTAGFACSQCGQPLFVYKLEQVSEKGKAYTNYFGRCNVAEHEKLILLAQLKPEKDSDEAVTYSLGKFGQRALDFYSIHVTKESTHPVKPLAQIAGNRYASTPVGKALSDACMGTIASFLSKYQDIIIEHQKVVKGNQKRLESLRELAGKENLEYPSVTLPPQPHTKEGVDAYNEVIARVRMWVNLNLWQKLKLSRDDAKPLLRLKGFPSFPLVERQANEVDWWDMVCNVKKLINEKKEDGKVFWQNLAGYKRQEALRPYLSSEEDRKKGKKFARYQLGDLLLHLEKKHGEDWGKVYDEAWERIDKKVEGLSKHIKLEEERRSEDAQSKAALTDWLRAKASFVIEGLKEADKDEFCRCELKLQKWYGDLRGKPFAIEAENSILDISGFSKQYNCAFIWQKDGVKKLNLYLIINYFKGGKLRFKKIKPEAFEANRFYTVINKKSGEIVPMEVNFNFDDPNLIILPLAFGKRQGREFIWNDLLSLETGSLKLANGRVIEKTLYNRRTRQDEPALFVALTFERREVLDSSNIKPMNLIGVDRGENIPAVIALTDPEGCPLSRFKDSLGNPTHILRIGESYKEKQRTIQAKKEVEQRRAGGYSRKYASKAKNLADDMVRNTARDLLYYAVTQDAMLIFENLSRGFGRQGKRTFSAERQYTRMEDWLTAKLAYEGLPSKTYLSKTLAQYTSKTCSNCGFTITSADYDRVLEKLKKTATGWMTTINGKELKVEGQITYYNRYKRQNVVKDLSVELDRLSEESVNNDISSWTKGRSGEALSLLKKRFSHRPVQEKFVCLNCGFETHADEQAALNIARSWLFLRSQEYKKYQTNKTTGNTDKRAFVETWQSFYRKKLKEVWKPAV

SEQ ID NO: 32707 - protein, 978 aa, synthetic construct
  REGION 1..978: note = engineered CasX variant
QEIKRANKIRRRLVKDSNTKKAGKTGPMKTLLVRVMTPDLRERLENLRKKPENIPQPISNTSRANLNKLLTDYTEMKKAILHVYWEEFQKDPVGLMSRVAQPASKKIDQNKLKPEMDEKGNLTTAGFACSQCGQPLFVYKLEQVSEKGKAYTNYFGRCNVAEHEKLILLAQLKPEKDSDEAVTYSLGKFGQRALDFYSIHVTKESTHPVKPLAQIAGNRYASAPVGKALSDACMGTIASFLSKYQDIIIEHQKVVKGNQKRLESLRELAGKENLEYPSVTLPPQPHTKEGVDAYNEVIARVRMWVNLNLWQKLKLSRDDAKPLLRLKGFPSFPLVERQANEVDWWDMVCNVKKLINEKKEDGKVFWQNLAGYKRQEALRPYLSSEEDRKKGKKFARYQLGDLLLHLEKKHGEDWGKVYDEAWERIDKKVEGLSKHIKLEEERRSEDAQSKAALTDWLRAKASFVIEGLKEADKDEFCRCELKLQKWYGDLRGKPFAIEAENSILDISGFSKQYNCAFIWQKDGVKKLNLYLIINYFKGGKLRFKKIKPEAFEANRFYTVINKKSGEIVPMEVNFNFDDPNLIILPLAFGKRQGREFIWNDLLSLETGSLKLANGRVIEKTLYNRRTRQDEPALFVALTFERREVLDSSNIKPMNLIGVDRGENIPAVIALTDPEGCPLSRFKDSLGNPTHILRIGESYKEKQRTIQAKKEVEQRRAGGYSRKYASKAKNLADDMVRNTARDLLYYAVTQDAMLIFENLSRGFGRQGKRTFSAERQYTRMEDWLTAKLAYEGLPSKTYLSKTLAQYTSKTCSNCGFTITSADYDRVLEKLKKTATGWMTTINGKELKVEGQITYYNRYKRQNVVKDLSVELDRLSEESVNNDISSWTKGRSGEALSLLKKRFSHRPVQEKFVCLNCGFETHADEQAALNIARSWLFLRSQEYKKYQTNKTTGNTDKRAFVETWQSFYRKKLKEVWKPAV

SEQ ID NO: 32708 - protein, 978 aa, synthetic construct
  REGION 1..978: note = engineered CasX variant
QEIKRANKIRRRLVKDSNTKKAGKTGPMKTLLVRVMTPDLRERLENLRKKPENIPQPISNTSRANLNKLLTDYTEMKKAILHVYWEEFQKDPVGLMSRVAQPASKKIDQNKLKPEMDEKGNLTTAGFACSQCGQPLFVYKLEQVSEKGKAYTNYFGRCNVAEHEKLILLAQLKPEKDSDEAVTYSLGKFGQRALDFYSIHVTKESTHPVKPLAQIAGNRYASVPVGKALSDACMGTIASFLSKYQDIIIEHQKVVKGNQKRLESLRELAGKENLEYPSVTLPPQPHTKEGVDAYNEVIARVRMWVNLNLWQKLKLSRDDAKPLLRLKGFPSFPLVERQANEVDWWDMVCNVKKLINEKKEDGKVFWQNLAGYKRQEALRPYLSSEEDRKKGKKFARYQLGDLLLHLEKKHGEDWGKVYDEAWERIDKKVEGLSKHIKLEEERRSEDAQSKAALTDWLRAKASFVIEGLKEADKDEFCRCELKLQKWYGDLRGKPFAIEAENSILDISGFSKQYNCAFIWQKDGVKKLNLYLIINYFKGGKLRFKKIKPEAFEANRFYTVINKKSGEIVPMEVNFNFDDPNLIILPLAFGKRQGREFIWNDLLSLETGSLKLANGRVIEKTLYNRRTRQDEPALFVALTFERREVLDSSNIKPMNLIGVDRGENIPAVIALTDPEGCPLSRFKDSLGNPTHILRIGESYKEKQRTIQAKKEVEQRRAGGYSRKYASKAKNLADDMVRNTARDLLYYAVTQDAMLIFENLSRGFGRQGKRTFSAERQYTRMEDWLTAKLAYEGLPSKTYLSKTLAQYTSKTCSNCGFTITSADYDRVLEKLKKTATGWMTTINGKELKVEGQITYYNRYKRQNVVKDLSVELDRLSEESVNNDISSWTKGRSGEALSLLKKRFSHRPVQEKFVCLNCGFETHADEQAALNIARSWLFLRSQEYKKYQTNKTTGNTDKRAFVETWQSFYRKKLKEVWKPAV

SEQ ID NO: 32709 - protein, 978 aa, synthetic construct
  REGION 1..978: note = engineered CasX variant
QEIKRANKIRRRLVKDSNTKKAGKTGPMKTLLVRVMTPDLRERLENLRKKPENIPQPISNTSRANLNKLLTDYTEMKKAILHVYWEEFQKDPVGLMSRVAQPASKKIDQNKLKPEMDEKGNLTTAGFACSQCGQPLFVYKLEQVSEKGKAYTNYFGRCNVAEHEKLIKLAQLKPEKDSDEAVTYSLGKFGQRALDFYSIHVTKESTHPVKPLAQIAGNRYASGPVGKALSDACMGTIASFLSKYQDIIIEHQKVVKGNQKRLESLRELAGKENLEYPSVTLPPQPHTKEGVDAYNEVIARVRMWVNLNLWQKLKLSRDDAKPLLRLKGFPSFPLVERQANEVDWWDMVCNVKKLINEKKEDGKVFWQNLAGYKRQEALRPYLSSEEDRKKGKKFARYQLGDLLLHLEKKHGEDWGKVYDEAWERIDKKVEGLSKHIKLEEERRSEDAQSKAALTDWLRAKASFVIEGLKEADKDEFCRCELKLQKWYGDLRGKPFAIEAENSILDISGFSKQYNCAFIWQKDGVKKLNLYLIINYFKGGKLRFKKIKPEAFEANRFYTVINKKSGEIVPMEVNFNFDDPNLIILPLAFGKRQGREFIWNDLLSLETGSLKLANGRVIEKTLYNRRTRQDEPALFVALTFERREVLDSSNIKPMNLIGVDRGENIPAVIALTDPEGCPLSRFKDSLGNPTHILRIGESYKEKQRTIQAKKEVEQRRAGGYSRKYASKAKNLADDMVRNTARDLLYYAVTQDAMLIFENLSRGFGRQGKRTFSAERQYTRMEDWLTAKLAYEGLPSKTYLSKTLAQYTSKTCSNCGFTITSADYDRVLEKLKKTATGWMTTINGKELKVEGQITYYNRYKRQNVVKDLSVELDRLSEESVNNDISSWTKGRSGEALSLLKKRFSHRPVQEKFVCLNCGFETHADEQAALNIARSWLFLRSQEYKKYQTNKTTGNTDKRAFVETWQSFYRKKLKEVWKPAV

SEQ ID NO: 32710 - protein, 977 aa, synthetic construct
  REGION 1..977: note = engineered CasX variant
QEIKRANKIRRRLVKDSNTKKAGKTGPMKTLLVRVMTPDLRERLENLRKKPENIPQPISNTSRANLNKLLTDYTEMKKAILHVYWEEFQKDPVGLMSRVAQPASKKIDQNKLKPEMDEKGNLTTAGFACSQCGQPLFVYKLEQVSEKGKAYTNYFGRCNVAEHEKLILLAQLKPEKDSDEAVTYSLGKFGQRALDFYSIHVTKESTHPVKPLAQIAGNRYASPVGKALSDACMGTIASFLSKYQDIIIEHQKVVKGNQKRLESLRELAGKENLEYPSVTLPPQPHTKEGVDAYNEVIARVRMWVNLNLWQKLKLSRDDAKPLLRLKGFPSFPLVERQANEVDWWDMVCNVKKLINEKKEDGKVFWQNLAGYKRQEALRPYLSSEEDRKKGKKFARYQLGDLLLHLEKKHGEDWGKVYDEAWERIDKKVEGLSKHIKLEEERRSEDAQSKAALTDWLRAKASFVIEGLKEADKDEFCRCELKLQKWYGDLRGKPFAIEAENSILDISGFSKQYNCAFIWQKDGVKKLNLYLIINYFKGGKLRFKKIKPEAFEANRFYTVINKKSGEIVPMEVNFNFDDPNLIILPLAFGKRQGREFIWNDLLSLETGSLKLANGRVIEKTLYNRRTRQDEPALFVALTFERREVLDSSNIKPMNLIGVDRGENIPAVIALTDPEGCPLSRFKDSLGNPTHILRIGESYKEKQRTIQAKKEVEQRRAGGYSRKYASKAKNLADDMVRNTARDLLYYAVTQDAMLIFENLSRGFGRQGKRTFSAERQYTRMEDWLTAKLAYEGLPSKTYLSKTLAQYTSKTCSNCGFTITSADYDRVLEKLKKTATGWMTTINGKELKVEGQITYYNRYKRQNVVKDLSVELDRLSEESVNNDISSWTKGRSGEALSLLKKRFSHRPVQEKFVCLNCGFETHADEQAALNIARSWLFLRSQEYKKYQTNKTTGNTDKRAFVETWQSFYRKKLKEVWKPAV

SEQ ID NO: 32711 - protein, 978 aa, synthetic construct
  REGION 1..978: note = engineered CasX variant
QEIKRANKIRRRLVKDSNTKKAGKTGPMKTLLVRVMTPDLRERLENLRKKPENIPQPISNTSRANLNKLLTDYTEMKKAILHVYWEEFQKDPVGLMSRVAQPASKKIDQNKLKPEMDEKGNLTTAGFACSQCGQPLFVYKLEQVSEKGKAYTNYFGRCNVAEHEKLILLAQLKPEKDSDEAVTYSLGKFGQRALDFYSIHVTKESTHPVKPLAQIAGNRYASYPVGKALSDACMGTIASFLSKYQDIIIEHQKVVKGNQKRLESLRELAGKENLEYPSVTLPPQPHTKEGVDAYNEVIARVRMWVNLNLWQKLKLSRDDAKPLLRLKGFPSFPLVERQANEVDWWDMVCNVKKLINEKKEDGKVFWQNLAGYKRQEALRPYLSSEEDRKKGKKFARYQLGDLLLHLEKKHGEDWGKVYDEAWERIDKKVEGLSKHIKLEEERRSEDAQSKAALTDWLRAKASFVIEGLKEADKDEFCRCELKLQKWYGDLRGKPFAIEAENSILDISGFSKQYNCAFIWQKDGVKKLNLYLIINYFKGGKLRFKKIKPEAFEANRFYTVINKKSGEIVPMEVNFNFDDPNLIILPLAFGKRQGREFIWNDLLSLETGSLKLANGRVIEKTLYNRRTRQDEPALFVALTFERREVLDSSNIKPMNLIGVDRGENIPAVIALTDPEGCPLSRFKDSLGNPTHILRIGESYKEKQRTIQAKKEVEQRRAGGYSRKYASKAKNLADDMVRNTARDLLYYAVTQDAMLIFENLSRGFGRQGKRTFMAERQYTRMEDWLTAKLAYEGLPSKTYLSKTLAQYTSKTCSNCGFTITSADYDRVLEKLKKTATGWMTTINGKELKVEGQITYYNRYKRQNVVKDLSVELDRLSEESVNNDISSWDKGRSGEALSLLKKRFSHRPVQEKFVCLNCGFETHADEQAALNIARSWLFLRSQEYKKYQTNKTTGNTDKRAFVETWQSFYRKKLKEVWKPAV

SEQ ID NO: 32712 - protein, 978 aa, synthetic construct
  REGION 1..978: note = engineered CasX variant
QEIKRANKIRRRLVKDSNTKKAGKTGPMKTLLVRVMTPDLRERLENLRKKPENIPQPISNTSRANLNKLLTDYTEMKKAILHVYWEEFQKDPVGLMSRVAQPASKKIDQNKLKPEMDEKGNLTTAGFACSQCGQPLFVYKLEQVSEKGKAYTNYFGRCNVAEHEKLILLAQLKPEKDSDEAVTYSLGKFGQRALDFYSIHVTKESTHPVKPLAQIAGNRYASHPVGKALSDACMGTIASFLSKYQDIIIEHQKVVKGNQKRLESLRELAGKENLEYPSVTLPPQPHTKEGVDAYNEVIARVRMWVNLNLWQKLKLSRDDAKPLLRLKGFPSFPLVERQANEVDWWDMVCNVKKLINEKKEDGKVFWQNLAGYKRQEALRPYLSSEEDRKKGKKFARYQLGDLLLHLEKKHGEDWGKVYDEAWERIDKKVEGLSKHIKLEEERRSEDAQSKAALTDWLRAKASFVIEGLKEADKDEFCRCELKLQKWYGDLRGKPFAIEAENSILDISGFSKQYNCAFIWQKDGVKKLNLYLIINYFKGGKLRFKKIKPEAFEANRFYTVINKKSGEIVPMEVNFNFDDPNLIILPLAFGKRQGREFIWNDLLSLETGSLKLANGRVIEKTLYNRRTRQDEPALFVALTFERREVLDSSNIKPMNLIGVDRGENIPAVIALTDPEGCPLSRFKDSLGNPTHILRIGESYKEKQRTIQAKKEVEQRRAGGYSRKYASKAKNLADDMVRNTARDLLYYAVTQDAMLIFENLSRGFGRQGKRTFMAERQYTRMEDWLTAKLAYEGLPSKTYLSKTLAQYTSKTCSNCGFTITSADYDRVLEKLKKTATGWMTTINGKELKVEGQITYYNRYKRQNVVKDLSVELDRLSEESVNNDISSWDKGRSGEALSLLKKRFSHRPVQEKFVCLNCGFETHADEQAALNIARSWLFLRSQEYKKYQTNKTTGNTDKRAFVETWQSFYRKKLKEVWKPAV

SEQ ID NO: 32713 - protein, 978 aa, synthetic construct
  REGION 1..978: note = engineered CasX variant
QEIKRANKIRRRLVKDSNTKKAGKTGPMKTLLVRVMTPDLRERLENLRKKPENIPQPISNTSRANLNKLLTDYTEMKKAILHVYWEEFQKDPVGLMSRVAQPASKKIDQNKLKPEMDEKGNLTTAGFACSQCGQPLFVYKLEQVSEKGKAYTNYFGRCNVAEHEKLILLAQLKPEKDSDEAVTYSLGKFGQRALDFYSIHVTKESTHPVKPLAQIAGNRYASSPVGKALSDACMGTIASFLSKYQDIIIEHQKVVKGNQKRLESLRELAGKENLEYPSVTLPPQPHTKEGVDAYNEVIARVRMWVNLNLWQKLKLSRDDAKPLLRLKGFPSFPLVERQANEVDWWDMVCNVKKLINEKKEDGKVFWQNLAGYKRQEALRPYLSSEEDRKKGKKFARYQLGDLLLHLEKKHGEDWGKVYDEAWERIDKKVEGLSKHIKLEEERRSEDAQSKAALTDWLRAKASFVIEGLKEADKDEFCRCELKLQKWYGDLRGKPFAIEAENSILDISGFSKQYNCAFIWQKDGVKKLNLYLIINYFKGGKLRFKKIKPEAFEANRFYTVINKKSGEIVPMEVNFNFDDPNLIILPLAFGKRQGREFIWNDLLSLETGSLKLANGRVIEKTLYNRRTRQDEPALFVALTFERREVLDSSNIKPMNLIGVDRGENIPAVIALTDPEGCPLSRFKDSLGNPTHILRIGESYKEKQRTIQAKKEVEQRRAGGYSRKYASKAKNLADDMVRNTARDLLYYAVTQDAMLIFENLSRGFGRQGKRTFMAERQYTRMEDWLTAKLAYEGLPSKTYLSKTLAQYTSKTCSNCGFTITSADYDRVLEKLKKTATGWMTTINGKELKVEGQITYYNRYKRQNVVKDLSVELDRLSEESVNNDISSWDKGRSGEALSLLKKRFSHRPVQEKFVCLNCGFETHADEQAALNIARSWLFLRSQEYKKYQTNKTTGNTDKRAFVETWQSFYRKKLKEVWKPAV

SEQ ID NO: 32714 - protein, 978 aa, synthetic construct
  REGION 1..978: note = engineered CasX variant
QEIKRANKIRRRLVKDSNTKKAGKTGPMKTLLVRVMTPDLRERLENLRKKPENIPQPISNTSRANLNKLLTDYTEMKKAILHVYWEEFQKDPVGLMSRVAQPASKKIDQNKLKPEMDEKGNLTTAGFACSQCGQPLFVYKLEQVSEKGKAYTNYFGRCNVAEHEKLILLAQLKPEKDSDEAVTYSLGKFGQRALDFYSIHVTKESTHPVKPLAQIAGNRYASTPVGKALSDACMGTIASFLSKYQDIIIEHQKVVKGNQKRLESLRELAGKENLEYPSVTLPPQPHTKEGVDAYNEVIARVRMWVNLNLWQKLKLSRDDAKPLLRLKGFPSFPLVERQANEVDWWDMVCNVKKLINEKKEDGKVFWQNLAGYKRQEALRPYLSSEEDRKKGKKFARYQLGDLLLHLEKKHGEDWGKVYDEAWERIDKKVEGLSKHIKLEEERRSEDAQSKAALTDWLRAKASFVIEGLKEADKDEFCRCELKLQKWYGDLRGKPFAIEAENSILDISGFSKQYNCAFIWQKDGVKKLNLYLIINYFKGGKLRFKKIKPEAFEANRFYTVINKKSGEIVPMEVNFNFDDPNLIILPLAFGKRQGREFIWNDLLSLETGSLKLANGRVIEKTLYNRRTRQDEPALFVALTFERREVLDSSNIKPMNLIGVDRGENIPAVIALTDPEGCPLSRFKDSLGNPTHILRIGESYKEKQRTIQAKKEVEQRRAGGYSRKYASKAKNLADDMVRNTARDLLYYAVTQDAMLIFENLSRGFGRQGKRTFMAERQYTRMEDWLTAKLAYEGLPSKTYLSKTLAQYTSKTCSNCGFTITSADYDRVLEKLKKTATGWMTTINGKELKVEGQITYYNRYKRQNVVKDLSVELDRLSEESVNNDISSWDKGRSGEALSLLKKRFSHRPVQEKFVCLNCGFETHADEQAALNIARSWLFLRSQEYKKYQTNKTTGNTDKRAFVETWQSFYRKKLKEVWKPAV

SEQ ID NO: 32715 - protein, 978 aa, synthetic construct
  REGION 1..978: note = engineered CasX variant
QEIKRANKIRRRLVKDSNTKKAGKTGPMKTLLVRVMTPDLRERLENLRKKPENIPQPISNTSRANLNKLLTDYTEMKKAILHVYWEEFQKDPVGLMSRVAQPASKKIDQNKLKPEMDEKGNLTTAGFACSQCGQPLFVYKLEQVSEKGKAYTNYFGRCNVAEHEKLILLAQLKPEKDSDEAVTYSLGKFGQRALDFYSIHVTKESTHPVKPLAQIAGNRYASAPVGKALSDACMGTIASFLSKYQDIIIEHQKVVKGNQKRLESLRELAGKENLEYPSVTLPPQPHTKEGVDAYNEVIARVRMWVNLNLWQKLKLSRDDAKPLLRLKGFPSFPLVERQANEVDWWDMVCNVKKLINEKKEDGKVFWQNLAGYKRQEALRPYLSSEEDRKKGKKFARYQLGDLLLHLEKKHGEDWGKVYDEAWERIDKKVEGLSKHIKLEEERRSEDAQSKAALTDWLRAKASFVIEGLKEADKDEFCRCELKLQKWYGDLRGKPFAIEAENSILDISGFSKQYNCAFIWQKDGVKKLNLYLIINYFKGGKLRFKKIKPEAFEANRFYTVINKKSGEIVPMEVNFNFDDPNLIILPLAFGKRQGREFIWNDLLSLETGSLKLANGRVIEKTLYNRRTRQDEPALFVALTFERREVLDSSNIKPMNLIGVDRGENIPAVIALTDPEGCPLSRFKDSLGNPTHILRIGESYKEKQRTIQAKKEVEQRRAGGYSRKYASKAKNLADDMVRNTARDLLYYAVTQDAMLIFENLSRGFGRQGKRTFMAERQYTRMEDWLTAKLAYEGLPSKTYLSKTLAQYTSKTCSNCGFTITSADYDRVLEKLKKTATGWMTTINGKELKVEGQITYYNRYKRQNVVKDLSVELDRLSEESVNNDISSWDKGRSGEALSLLKKRFSHRPVQEKFVCLNCGFETHADEQAALNIARSWLFLRSQEYKKYQTNKTTGNTDKRAFVETWQSFYRKKLKEVWKPAV

SEQ ID NO: 32716 - protein, 978 aa, synthetic construct
  REGION 1..978: note = engineered CasX variant
QEIKRANKIRRRLVKDSNTKKAGKTGPMKTLLVRVMTPDLRERLENLRKKPENIPQPISNTSRANLNKLLTDYTEMKKAILHVYWEEFQKDPVGLMSRVAQPASKKIDQNKLKPEMDEKGNLTTAGFACSQCGQPLFVYKLEQVSEKGKAYTNYFGRCNVAEHEKLILLAQLKPEKDSDEAVTYSLGKFGQRALDFYSIHVTKESTHPVKPLAQIAGNRYASVPVGKALSDACMGTIASFLSKYQDIIIEHQKVVKGNQKRLESLRELAGKENLEYPSVTLPPQPHTKEGVDAYNEVIARVRMWVNLNLWQKLKLSRDDAKPLLRLKGFPSFPLVERQANEVDWWDMVCNVKKLINEKKEDGKVFWQNLAGYKRQEALRPYLSSEEDRKKGKKFARYQLGDLLLHLEKKHGEDWGKVYDEAWERIDKKVEGLSKHIKLEEERRSEDAQSKAALTDWLRAKASFVIEGLKEADKDEFCRCELKLQKWYGDLRGKPFAIEAENSILDISGFSKQYNCAFIWQKDGVKKLNLYLIINYFKGGKLRFKKIKPEAFEANRFYTVINKKSGEIVPMEVNFNFDDPNLIILPLAFGKRQGREFIWNDLLSLETGSLKLANGRVIEKTLYNRRTRQDEPALFVALTFERREVLDSSNIKPMNLIGVDRGENIPAVIALTDPEGCPLSRFKDSLGNPTHILRIGESYKEKQRTIQAKKEVEQRRAGGYSRKYASKAKNLADDMVRNTARDLLYYAVTQDAMLIFENLSRGFGRQGKRTFMAERQYTRMEDWLTAKLAYEGLPSKTYLSKTLAQYTSKTCSNCGFTITSADYDRVLEKLKKTATGWMTTINGKELKVEGQITYYNRYKRQNVVKDLSVELDRLSEESVNNDISSWDKGRSGEALSLLKKRFSHRPVQEKFVCLNCGFETHADEQAALNIARSWLFLRSQEYKKYQTNKTTGNTDKRAFVETWQSFYRKKLKEVWKPAV

SEQ ID NO: 32717 - protein, 978 aa, synthetic construct
  REGION 1..978: note = engineered CasX variant
QEIKRANKIRRRLVKDSNTKKAGKTGPMKTLLVRVMTPDLRERLENLRKKPENIPQPISNTSRANLNKLLTDYTEMKKAILHVYWEEFQKDPVGLMSRVAQPASKKIDQNKLKPEMDEKGNLTTAGFACSQCGQPLFVYKLEQVSEKGKAYTNYFGRCNVAEHEKLIKLAQLKPEKDSDEAVTYSLGKFGQRALDFYSIHVTKESTHPVKPLAQIAGNRYASGPVGKALSDACMGTIASFLSKYQDIIIEHQKVVKGNQKRLESLRELAGKENLEYPSVTLPPQPHTKEGVDAYNEVIARVRMWVNLNLWQKLKLSRDDAKPLLRLKGFPSFPLVERQANEVDWWDMVCNVKKLINEKKEDGKVFWQNLAGYKRQEALRPYLSSEEDRKKGKKFARYQLGDLLLHLEKKHGEDWGKVYDEAWERIDKKVEGLSKHIKLEEERRSEDAQSKAALTDWLRAKASFVIEGLKEADKDEFCRCELKLQKWYGDLRGKPFAIEAENSILDISGFSKQYNCAFIWQKDGVKKLNLYLIINYFKGGKLRFKKIKPEAFEANRFYTVINKKSGEIVPMEVNFNFDDPNLIILPLAFGKRQGREFIWNDLLSLETGSLKLANGRVIEKTLYNRRTRQDEPALFVALTFERREVLDSSNIKPMNLIGVDRGENIPAVIALTDPEGCPLSRFKDSLGNPTHILRIGESYKEKQRTIQAKKEVEQRRAGGYSRKYASKAKNLADDMVRNTARDLLYYAVTQDAMLIFENLSRGFGRQGKRTFMAERQYTRMEDWLTAKLAYEGLPSKTYLSKTLAQYTSKTCSNCGFTITSADYDRVLEKLKKTATGWMTTINGKELKVEGQITYYNRYKRQNVVKDLSVELDRLSEESVNNDISSWDKGRSGEALSLLKKRFSHRPVQEKFVCLNCGFETHADEQAALNIARSWLFLRSQEYKKYQTNKTTGNTDKRAFVETWQSFYRKKLKEVWKPAV

SEQ ID NO: 32718 - protein, 977 aa, synthetic construct
  REGION 1..977: note = engineered CasX variant
QEIKRANKIRRRLVKDSNTKKAGKTGPMKTLLVRVMTPDLRERLENLRKKPENIPQPISNTSRANLNKLLTDYTEMKKAILHVYWEEFQKDPVGLMSRVAQPASKKIDQNKLKPEMDEKGNLTTAGFACSQCGQPLFVYKLEQVSEKGKAYTNYFGRCNVAEHEKLILLAQLKPEKDSDEAVTYSLGKFGQRALDFYSIHVTKESTHPVKPLAQIAGNRYASPVGKALSDACMGTIASFLSKYQDIIIEHQKVVKGNQKRLESLRELAGKENLEYPSVTLPPQPHTKEGVDAYNEVIARVRMWVNLNLWQKLKLSRDDAKPLLRLKGFPSFPLVERQANEVDWWDMVCNVKKLINEKKEDGKVFWQNLAGYKRQEALRPYLSSEEDRKKGKKFARYQLGDLLLHLEKKHGEDWGKVYDEAWERIDKKVEGLSKHIKLEEERRSEDAQSKAALTDWLRAKASFVIEGLKEADKDEFCRCELKLQKWYGDLRGKPFAIEAENSILDISGFSKQYNCAFIWQKDGVKKLNLYLIINYFKGGKLRFKKIKPEAFEANRFYTVINKKSGEIVPMEVNFNFDDPNLIILPLAFGKRQGREFIWNDLLSLETGSLKLANGRVIEKTLYNRRTRQDEPALFVALTFERREVLDSSNIKPMNLIGVDRGENIPAVIALTDPEGCPLSRFKDSLGNPTHILRIGESYKEKQRTIQAKKEVEQRRAGGYSRKYASKAKNLADDMVRNTARDLLYYAVTQDAMLIFENLSRGFGRQGKRTFMAERQYTRMEDWLTAKLAYEGLPSKTYLSKTLAQYTSKTCSNCGFTITSADYDRVLEKLKKTATGWMTTINGKELKVEGQITYYNRYKRQNVVKDLSVELDRLSEESVNNDISSWDKGRSGEALSLLKKRFSHRPVQEKFVCLNCGFETHADEQAALNIARSWLFLRSQEYKKYQTNKTTGNTDKRAFVETWQSFYRKKLKEVWKPAV

SEQ ID NO: 32719 - protein, 978 aa, synthetic construct
  REGION 1..978: note = engineered CasX variant
QEIKRANKIRRRLVKDSNTKKAGKTGPMKTLLVRVMTPDLRERLENLRKKPENIPQPISNTSRANLNKLLTDYTEMKKAILHVYWEEFQVDPVGLMSRVAQPASKKIDQNKLKPEMDEKGNLTTAGFACSQCGQPLFVYKLEQVSEKGKAYTNYFGRCNVAEHEKLILLAQLKPEKDSDEAVTYSLGKFGQRALDFYSIHVTKESTHPVKPLAQIAGNRYASYPVGKALSDACMGTIASFLSKYQDIIIEHQKVVKGNQKRLESLRELAGKENLEYPSVTLPPQPHTKEGVDAYNEVIARVRMWVNLNLWQKLKLSRDDAKPLLRLKGFPSFPLVERQANEVDWWDMVCNVKKLINEKKEDGKVFWQNLAGYKRQEALRPYLSSEEDRKKGKKFARYQLGDLLLHLEKKHGEDWGKVYDEAWERIDKKVEGLSKHIKLEEERRSEDAQSKAALTDWLRAKASFVIEGLKEADKDEFCRCELKLQKWYGDLRGKPFAIEAENSILDISGFSKQYNCAFIWQKDGVKKLNLYLIINYFKGGKLRFKKIKPEAFEANRFYTVINKKSGEIVPMEVNFNFDDPNLIILPLAFGKRQGREFIWNDLLSLETGSLKLANGRVIEKTLYNRRTRQDEPALFVALTFERREVLDSSNIKPMNLIGVDRGENIPAVIALTDPEGCPLSRFKDSLGNPTHILRIGESYKEKQRTIQAKKEVEQRRAGGYSRKYASKAKNLADDMVRNTARDLLYYAVTQDAMLIFENLSRGFGRQGKRTFMAERQYTRMEDWLTAKLAYEGLPSKTYLSKTLAQYTSKTCSNCGFTITSADYDRVLEKLKKTATGWMTTINGKELKVEGQITYYNRYKRQNVVKDLSVELDRLSEESVNNDISSWTKGRSGEALSLLKKRFSHRPVQEKFVCLNCGFETHADEQAALNIARSWLFLRSQEYKKYQTNKTTGNTDKRAFVETWQSFYRKKLKEVWKPAV

SEQ ID NO: 32720 - protein, 978 aa, synthetic construct
  REGION 1..978: note = engineered CasX variant
QEIKRANKIRRRLVKDSNTKKAGKTGPMKTLLVRVMTPDLRERLENLRKKPENIPQPISNTSRANLNKLLTDYTEMKKAILHVYWEEFQVDPVGLMSRVAQPASKKIDQNKLKPEMDEKGNLTTAGFACSQCGQPLFVYKLEQVSEKGKAYTNYFGRCNVAEHEKLILLAQLKPEKDSDEAVTYSLGKFGQRALDFYSIHVTKESTHPVKPLAQIAGNRYASHPVGKALSDACMGTIASFLSKYQDIIIEHQKVVKGNQKRLESLRELAGKENLEYPSVTLPPQPHTKEGVDAYNEVIARVRMWVNLNLWQKLKLSRDDAKPLLRLKGFPSFPLVERQANEVDWWDMVCNVKKLINEKKEDGKVFWQNLAGYKRQEALRPYLSSEEDRKKGKKFARYQLGDLLLHLEKKHGEDWGKVYDEAWERIDKKVEGLSKHIKLEEERRSEDAQSKAALTDWLRAKASFVIEGLKEADKDEFCRCELKLQKWYGDLRGKPFAIEAENSILDISGFSKQYNCAFIWQKDGVKKLNLYLIINYFKGGKLRFKKIKPEAFEANRFYTVINKKSGEIVPMEVNFNFDDPNLIILPLAFGKRQGREFIWNDLLSLETGSLKLANGRVIEKTLYNRRTRQDEPALFVALTFERREVLDSSNIKPMNLIGVDRGENIPAVIALTDPEGCPLSRFKDSLGNPTHILRIGESYKEKQRTIQAKKEVEQRRAGGYSRKYASKAKNLADDMVRNTARDLLYYAVTQDAMLIFENLSRGFGRQGKRTFMAERQYTRMEDWLTAKLAYEGLPSKTYLSKTLAQYTSKTCSNCGFTITSADYDRVLEKLKKTATGWMTTINGKELKVEGQITYYNRYKRQNVVKDLSVELDRLSEESVNNDISSWTKGRSGEALSLLKKRFSHRPVQEKFVCLNCGFETHADEQAALNIARSWLFLRSQEYKKYQTNKTTGNTDKRAFVETWQSFYRKKLKEVWKPAV

SEQ ID NO: 32721 - protein, 978 aa, synthetic construct
  REGION 1..978: note = engineered CasX variant
QEIKRANKIRRRLVKDSNTKKAGKTGPMKTLLVRVMTPDLRERLENLRKKPENIPQPISNTSRANLNKLLTDYTEMKKAILHVYWEEFQVDPVGLMSRVAQPASKKIDQNKLKPEMDEKGNLTTAGFACSQCGQPLFVYKLEQVSEKGKAYTNYFGRCNVAEHEKLILLAQLKPEKDSDEAVTYSLGKFGQRALDFYSIHVTKESTHPVKPLAQIAGNRYASSPVGKALSDACMGTIASFLSKYQDIIIEHQKVVKGNQKRLESLRELAGKENLEYPSVTLPPQPHTKEGVDAYNEVIARVRMWVNLNLWQKLKLSRDDAKPLLRLKGFPSFPLVERQANEVDWWDMVCNVKKLINEKKEDGKVFWQNLAGYKRQEALRPYLSSEEDRKKGKKFARYQLGDLLLHLEKKHGEDWGKVYDEAWERIDKKVEGLSKHIKLEEERRSEDAQSKAALTDWLRAKASFVIEGLKEADKDEFCRCELKLQKWYGDLRGKPFAIEAENSILDISGFSKQYNCAFIWQKDGVKKLNLYLIINYFKGGKLRFKKIKPEAFEANRFYTVINKKSGEIVPMEVNFNFDDPNLIILPLAFGKRQGREFIWNDLLSLETGSLKLANGRVIEKTLYNRRTRQDEPALFVALTFERREVLDSSNIKPMNLIGVDRGENIPAVIALTDPEGCPLSRFKDSLGNPTHILRIGESYKEKQRTIQAKKEVEQRRAGGYSRKYASKAKNLADDMVRNTARDLLYYAVTQDAMLIFENLSRGFGRQGKRTFMAERQYTRMEDWLTAKLAYEGLPSKTYLSKTLAQYTSKTCSNCGFTITSADYDRVLEKLKKTATGWMTTINGKELKVEGQITYYNRYKRQNVVKDLSVELDRLSEESVNNDISSWTKGRSGEALSLLKKRFSHRPVQEKFVCLNCGFETHADEQAALNIARSWLFLRSQEYKKYQTNKTTGNTDKRAFVETWQSFYRKKLKEVWKPAV

SEQ ID NO: 32722 - protein, 978 aa, synthetic construct
  REGION 1..978: note = engineered CasX variant
QEIKRANKIRRRLVKDSNTKKAGKTGPMKTLLVRVMTPDLRERLENLRKKPENIPQPISNTSRANLNKLLTDYTEMKKAILHVYWEEFQVDPVGLMSRVAQPASKKIDQNKLKPEMDEKGNLTTAGFACSQCGQPLFVYKLEQVSEKGKAYTNYFGRCNVAEHEKLILLAQLKPEKDSDEAVTYSLGKFGQRALDFYSIHVTKESTHPVKPLAQIAGNRYASTPVGKALSDACMGTIASFLSKYQDIIIEHQKVVKGNQKRLESLRELAGKENLEYPSVTLPPQPHTKEGVDAYNEVIARVRMWVNLNLWQKLKLSRDDAKPLLRLKGFPSFPLVERQANEVDWWDMVCNVKKLINEKKEDGKVFWQNLAGYKRQEALRPYLSSEEDRKKGKKFARYQLGDLLLHLEKKHGEDWGKVYDEAWERIDKKVEGLSKHIKLEEERRSEDAQSKAALTDWLRAKASFVIEGLKEADKDEFCRCELKLQKWYGDLRGKPFAIEAENSILDISGFSKQYNCAFIWQKDGVKKLNLYLIINYFKGGKLRFKKIKPEAFEANRFYTVINKKSGEIVPMEVNFNFDDPNLIILPLAFGKRQGREFIWNDLLSLETGSLKLANGRVIEKTLYNRRTRQDEPALFVALTFERREVLDSSNIKPMNLIGVDRGENIPAVIALTDPEGCPLSRFKDSLGNPTHILRIGESYKEKQRTIQAKKEVEQRRAGGYSRKYASKAKNLADDMVRNTARDLLYYAVTQDAMLIFENLSRGFGRQGKRTFMAERQYTRMEDWLTAKLAYEGLPSKTYLSKTLAQYTSKTCSNCGFTITSADYDRVLEKLKKTATGWMTTINGKELKVEGQITYYNRYKRQNVVKDLSVELDRLSEESVNNDISSWTKGRSGEALSLLKKRFSHRPVQEKFVCLNCGFETHADEQAALNIARSWLFLRSQEYKKYQTNKTTGNTDKRAFVETWQSFYRKKLKEVWKPAV

SEQ ID NO: 32723 - protein, 978 aa, synthetic construct
  REGION 1..978: note = engineered CasX variant
QEIKRANKIRRRLVKDSNTKKAGKTGPMKTLLVRVMTPDLRERLENLRKKPENIPQPISNTSRANLNKLLTDYTEMKKAILHVYWEEFQVDPVGLMSRVAQPASKKIDQNKLKPEMDEKGNLTTAGFACSQCGQPLFVYKLEQVSEKGKAYTNYFGRCNVAEHEKLILLAQLKPEKDSDEAVTYSLGKFGQRALDFYSIHVTKESTHPVKPLAQIAGNRYASAPVGKALSDACMGTIASFLSKYQDIIIEHQKVVKGNQKRLESLRELAGKENLEYPSVTLPPQPHTKEGVDAYNEVIARVRMWVNLNLWQKLKLSRDDAKPLLRLKGFPSFPLVERQANEVDWWDMVCNVKKLINEKKEDGKVFWQNLAGYKRQEALRPYLSSEEDRKKGKKFARYQLGDLLLHLEKKHGEDWGKVYDEAWERIDKKVEGLSKHIKLEEERRSEDAQSKAALTDWLRAKASFVIEGLKEADKDEFCRCELKLQKWYGDLRGKPFAIEAENSILDISGFSKQYNCAFIWQKDGVKKLNLYLIINYFKGGKLRFKKIKPEAFEANRFYTVINKKSGEIVPMEVNFNFDDPNLIILPLAFGKRQGREFIWNDLLSLETGSLKLANGRVIEKTLYNRRTRQDEPALFVALTFERREVLDSSNIKPMNLIGVDRGENIPAVIALTDPEGCPLSRFKDSLGNPTHILRIGESYKEKQRTIQAKKEVEQRRAGGYSRKYASKAKNLADDMVRNTARDLLYYAVTQDAMLIFENLSRGFGRQGKRTFMAERQYTRMEDWLTAKLAYEGLPSKTYLSKTLAQYTSKTCSNCGFTITSADYDRVLEKLKKTATGWMTTINGKELKVEGQITYYNRYKRQNVVKDLSVELDRLSEESVNNDISSWTKGRSGEALSLLKKRFSHRPVQEKFVCLNCGFETHADEQAALNIARSWLFLRSQEYKKYQTNKTTGNTDKRAFVETWQSFYRKKLKEVWKPAV

SEQ ID NO: 32724 - protein, 978 aa, synthetic construct
  REGION 1..978: note = engineered CasX variant
QEIKRANKIRRRLVKDSNTKKAGKTGPMKTLLVRVMTPDLRERLENLRKKPENIPQPISNTSRANLNKLLTDYTEMKKAILHVYWEEFQVDPVGLMSRVAQPASKKIDQNKLKPEMDEKGNLTTAGFACSQCGQPLFVYKLEQVSEKGKAYTNYFGRCNVAEHEKLILLAQLKPEKDSDEAVTYSLGKFGQRALDFYSIHVTKESTHPVKPLAQIAGNRYASVPVGKALSDACMGTIASFLSKYQDIIIEHQKVVKGNQKRLESLRELAGKENLEYPSVTLPPQPHTKEGVDAYNEVIARVRMWVNLNLWQKLKLSRDDAKPLLRLKGFPSFPLVERQANEVDWWDMVCNVKKLINEKKEDGKVFWQNLAGYKRQEALRPYLSSEEDRKKGKKFARYQLGDLLLHLEKKHGEDWGKVYDEAWERIDKKVEGLSKHIKLEEERRSEDAQSKAALTDWLRAKASFVIEGLKEADKDEFCRCELKLQKWYGDLRGKPFAIEAENSILDISGFSKQYNCAFIWQKDGVKKLNLYLIINYFKGGKLRFKKIKPEAFEANRFYTVINKKSGEIVPMEVNFNFDDPNLIILPLAFGKRQGREFIWNDLLSLETGSLKLANGRVIEKTLYNRRTRQDEPALFVALTFERREVLDSSNIKPMNLIGVDRGENIPAVIALTDPEGCPLSRFKDSLGNPTHILRIGESYKEKQRTIQAKKEVEQRRAGGYSRKYASKAKNLADDMVRNTARDLLYYAVTQDAMLIFENLSRGFGRQGKRTFMAERQYTRMEDWLTAKLAYEGLPSKTYLSKTLAQYTSKTCSNCGFTITSADYDRVLEKLKKTATGWMTTINGKELKVEGQITYYNRYKRQNVVKDLSVELDRLSEESVNNDISSWTKGRSGEALSLLKKRFSHRPVQEKFVCLNCGFETHADEQAALNIARSWLFLRSQEYKKYQTNKTTGNTDKRAFVETWQSFYRKKLKEVWKPAV

SEQ ID NO: 32725 - protein, 978 aa, synthetic construct
  REGION 1..978: note = engineered CasX variant
QEIKRANKIRRRLVKDSNTKKAGKTGPMKTLLVRVMTPDLRERLENLRKKPENIPQPISNTSRANLNKLLTDYTEMKKAILHVYWEEFQVDPVGLMSRVAQPASKKIDQNKLKPEMDEKGNLTTAGFACSQCGQPLFVYKLEQVSEKGKAYTNYFGRCNVAEHEKLIKLAQLKPEKDSDEAVTYSLGKFGQRALDFYSIHVTKESTHPVKPLAQIAGNRYASGPVGKALSDACMGTIASFLSKYQDIIIEHQKVVKGNQKRLESLRELAGKENLEYPSVTLPPQPHTKEGVDAYNEVIARVRMWVNLNLWQKLKLSRDDAKPLLRLKGFPSFPLVERQANEVDWWDMVCNVKKLINEKKEDGKVFWQNLAGYKRQEALRPYLSSEEDRKKGKKFARYQLGDLLLHLEKKHGEDWGKVYDEAWERIDKKVEGLSKHIKLEEERRSEDAQSKAALTDWLRAKASFVIEGLKEADKDEFCRCELKLQKWYGDLRGKPFAIEAENSILDISGFSKQYNCAFIWQKDGVKKLNLYLIINYFKGGKLRFKKIKPEAFEANRFYTVINKKSGEIVPMEVNFNFDDPNLIILPLAFGKRQGREFIWNDLLSLETGSLKLANGRVIEKTLYNRRTRQDEPALFVALTFERREVLDSSNIKPMNLIGVDRGENIPAVIALTDPEGCPLSRFKDSLGNPTHILRIGESYKEKQRTIQAKKEVEQRRAGGYSRKYASKAKNLADDMVRNTARDLLYYAVTQDAMLIFENLSRGFGRQGKRTFMAERQYTRMEDWLTAKLAYEGLPSKTYLSKTLAQYTSKTCSNCGFTITSADYDRVLEKLKKTATGWMTTINGKELKVEGQITYYNRYKRQNVVKDLSVELDRLSEESVNNDISSWTKGRSGEALSLLKKRFSHRPVQEKFVCLNCGFETHADEQAALNIARSWLFLRSQEYKKYQTNKTTGNTDKRAFVETWQSFYRKKLKEVWKPAV

SEQ ID NO: 32726 - protein, 977 aa, synthetic construct
  REGION 1..977: note = engineered CasX variant
QEIKRANKIRRRLVKDSNTKKAGKTGPMKTLLVRVMTPDLRERLENLRKKPENIPQPISNTSRANLNKLLTDYTEMKKAILHVYWEEFQVDPVGLMSRVAQPASKKIDQNKLKPEMDEKGNLTTAGFACSQCGQPLFVYKLEQVSEKGKAYTNYFGRCNVAEHEKLILLAQLKPEKDSDEAVTYSLGKFGQRALDFYSIHVTKESTHPVKPLAQIAGNRYASPVGKALSDACMGTIASFLSKYQDIIIEHQKVVKGNQKRLESLRELAGKENLEYPSVTLPPQPHTKEGVDAYNEVIARVRMWVNLNLWQKLKLSRDDAKPLLRLKGFPSFPLVERQANEVDWWDMVCNVKKLINEKKEDGKVFWQNLAGYKRQEALRPYLSSEEDRKKGKKFARYQLGDLLLHLEKKHGEDWGKVYDEAWERIDKKVEGLSKHIKLEEERRSEDAQSKAALTDWLRAKASFVIEGLKEADKDEFCRCELKLQKWYGDLRGKPFAIEAENSILDISGFSKQYNCAFIWQKDGVKKLNLYLIINYFKGGKLRFKKIKPEAFEANRFYTVINKKSGEIVPMEVNFNFDDPNLIILPLAFGKRQGREFIWNDLLSLETGSLKLANGRVIEKTLYNRRTRQDEPALFVALTFERREVLDSSNIKPMNLIGVDRGENIPAVIALTDPEGCPLSRFKDSLGNPTHILRIGESYKEKQRTIQAKKEVEQRRAGGYSRKYASKAKNLADDMVRNTARDLLYYAVTQDAMLIFENLSRGFGRQGKRTFMAERQYTRMEDWLTAKLAYEGLPSKTYLSKTLAQYTSKTCSNCGFTITSADYDRVLEKLKKTATGWMTTINGKELKVEGQITYYNRYKRQNVVKDLSVELDRLSEESVNNDISSWTKGRSGEALSLLKKRFSHRPVQEKFVCLNCGFETHADEQAALNIARSWLFLRSQEYKKYQTNKTTGNTDKRAFVETWQSFYRKKLKEVWKPAV

SEQ ID NO: 32727 - protein, 979 aa, synthetic construct
  REGION 1..979: note = engineered CasX variant
QEIKRALNKIRRRLVKDSNTKKAGKTGPMKTLLVRVMTPDLRERLENLRKKPENIPQPISNTSRANLNKLLTDYTEMKKAILHVYWEEFQKDPVGLMSRVAQPASKKIDQNKLKPEMDEKGNLTTAGFACSQCGQPLFVYKLEQVSEKGKAYTNYFGRCNVAEHEKLILLAQLKPEKDSDEAVTYSLGKFGQRALDFYSIHVTKESTHPVKPLAQIAGNRYASYPVGKALSDACMGTIASFLSKYQDIIIEHQKVVKGNQKRLESLRELAGKENLEYPSVTLPPQPHTKEGVDAYNEVIARVRMWVNLNLWQKLKLSRDDAKPLLRLKGFPSFPLVERQANEVDWWDMVCNVKKLINEKKEDGKVFWQNLAGYKRQEALRPYLSSEEDRKKGKKFARYQLGDLLLHLEKKHGEDWGKVYDEAWERIDKKVEGLSKHIKLEEERRSEDAQSKAALTDWLRAKASFVIEGLKEADKDEFCRCELKLQKWYGDLRGKPFAIEAENSILDISGFSKQYNCAFIWQKDGVKKLNLYLIINYFKGGKLRFKKIKPEAFEANRFYTVINKKSGEIVPMEVNFNFDDPNLIILPLAFGKRQGREFIWNDLLSLETGSLKLANGRVIEKTLYNRRTRQDEPALFVALTFERREVLDSSNIKPMNLIGVDRGENIPAVIALTDPEGCPLSRFKDSLGNPTHILRIGESYKEKQRTIQAKKEVEQRRAGGYSRKYASKAKNLADDMVRNTARDLLYYAVTQDAMLIFENLSRGFGRQGKRTFMAERQYTRMEDWLTAKLAYEGLPSKTYLSKTLAQYTSKTCSNCGFTITSADYDRVLEKLKKTATGWMTTINGKELKVEGQITYYNRYKRQNVVKDLSVELDRLSEESVNNDISSWTKGRSGEALSLLKKRFSHRPVQEKFVCLNCGFETHADEQAALNIARSWLFLRSQEYKKYQTNKTTGNTDKRAFVETWQSFYRKKLKEVWKPAV

SEQ ID NO: 32728 - protein, 979 aa, synthetic construct
  REGION 1..979: note = engineered CasX variant
QEIKRALNKIRRRLVKDSNTKKAGKTGPMKTLLVRVMTPDLRERLENLRKKPENIPQPISNTSRANLNKLLTDYTEMKKAILHVYWEEFQKDPVGLMSRVAQPASKKIDQNKLKPEMDEKGNLTTAGFACSQCGQPLFVYKLEQVSEKGKAYTNYFGRCNVAEHEKLILLAQLKPEKDSDEAVTYSLGKFGQRALDFYSIHVTKESTHPVKPLAQIAGNRYASHPVGKALSDACMGTIASFLSKYQDIIIEHQKVVKGNQKRLESLRELAGKENLEYPSVTLPPQPHTKEGVDAYNEVIARVRMWVNLNLWQKLKLSRDDAKPLLRLKGFPSFPLVERQANEVDWWDMVCNVKKLINEKKEDGKVFWQNLAGYKRQEALRPYLSSEEDRKKGKKFARYQLGDLLLHLEKKHGEDWGKVYDEAWERIDKKVEGLSKHIKLEEERRSEDAQSKAALTDWLRAKASFVIEGLKEADKDEFCRCELKLQKWYGDLRGKPFAIEAENSILDISGFSKQYNCAFIWQKDGVKKLNLYLIINYFKGGKLRFKKIKPEAFEANRFYTVINKKSGEIVPMEVNFNFDDPNLIILPLAFGKRQGREFIWNDLLSLETGSLKLANGRVIEKTLYNRRTRQDEPALFVALTFERREVLDSSNIKPMNLIGVDRGENIPAVIALTDPEGCPLSRFKDSLGNPTHILRIGESYKEKQRTIQAKKEVEQRRAGGYSRKYASKAKNLADDMVRNTARDLLYYAVTQDAMLIFENLSRGFGRQGKRTFMAERQYTRMEDWLTAKLAYEGLPSKTYLSKTLAQYTSKTCSNCGFTITSADYDRVLEKLKKTATGWMTTINGKELKVEGQITYYNRYKRQNVVKDLSVELDRLSEESVNNDISSWTKGRSGEALSLLKKRFSHRPVQEKFVCLNCGFETHADEQAALNIARSWLFLRSQEYKKYQTNKTTGNTDKRAFVETWQSFYRKKLKEVWKPAV

SEQ ID NO: 32729 - protein, 979 aa, synthetic construct
  REGION 1..979: note = engineered CasX variant
QEIKRALNKIRRRLVKDSNTKKAGKTGPMKTLLVRVMTPDLRERLENLRKKPENIPQPISNTSRANLNKLLTDYTEMKKAILHVYWEEFQKDPVGLMSRVAQPASKKIDQNKLKPEMDEKGNLTTAGFACSQCGQPLFVYKLEQVSEKGKAYTNYFGRCNVAEHEKLILLAQLKPEKDSDEAVTYSLGKFGQRALDFYSIHVTKESTHPVKPLAQIAGNRYASSPVGKALSDACMGTIASFLSKYQDIIIEHQKVVKGNQKRLESLRELAGKENLEYPSVTLPPQPHTKEGVDAYNEVIARVRMWVNLNLWQKLKLSRDDAKPLLRLKGFPSFPLVERQANEVDWWDMVCNVKKLINEKKEDGKVFWQNLAGYKRQEALRPYLSSEEDRKKGKKFARYQLGDLLLHLEKKHGEDWGKVYDEAWERIDKKVEGLSKHIKLEEERRSEDAQSKAALTDWLRAKASFVIEGLKEADKDEFCRCELKLQKWYGDLRGKPFAIEAENSILDISGFSKQYNCAFIWQKDGVKKLNLYLIINYFKGGKLRFKKIKPEAFEANRFYTVINKKSGEIVPMEVNFNFDDPNLIILPLAFGKRQGREFIWNDLLSLETGSLKLANGRVIEKTLYNRRTRQDEPALFVALTFERREVLDSSNIKPMNLIGVDRGENIPAVIALTDPEGCPLSRFKDSLGNPTHILRIGESYKEKQRTIQAKKEVEQRRAGGYSRKYASKAKNLADDMVRNTARDLLYYAVTQDAMLIFENLSRGFGRQGKRTFMAERQYTRMEDWLTAKLAYEGLPSKTYLSKTLAQYTSKTCSNCGFTITSADYDRVLEKLKKTATGWMTTINGKELKVEGQITYYNRYKRQNVVKDLSVELDRLSEESVNNDISSWTKGRSGEALSLLKKRFSHRPVQEKFVCLNCGFETHADEQAALNIARSWLFLRSQEYKKYQTNKTTGNTDKRAFVETWQSFYRKKLKEVWKPAV

SEQ ID NO: 32730 - protein, 979 aa, synthetic construct
  REGION 1..979: note = engineered CasX variant
QEIKRALNKIRRRLVKDSNTKKAGKTGPMKTLLVRVMTPDLRERLENLRKKPENIPQPISNTSRANLNKLLTDYTEMKKAILHVYWEEFQKDPVGLMSRVAQPASKKIDQNKLKPEMDEKGNLTTAGFACSQCGQPLFVYKLEQVSEKGKAYTNYFGRCNVAEHEKLILLAQLKPEKDSDEAVTYSLGKFGQRALDFYSIHVTKESTHPVKPLAQIAGNRYASTPVGKALSDACMGTIASFLSKYQDIIIEHQKVVKGNQKRLESLRELAGKENLEYPSVTLPPQPHTKEGVDAYNEVIARVRMWVNLNLWQKLKLSRDDAKPLLRLKGFPSFPLVERQANEVDWWDMVCNVKKLINEKKEDGKVFWQNLAGYKRQEALRPYLSSEEDRKKGKKFARYQLGDLLLHLEKKHGEDWGKVYDEAWERIDKKVEGLSKHIKLEEERRSEDAQSKAALTDWLRAKASFVIEGLKEADKDEFCRCELKLQKWYGDLRGKPFAIEAENSILDISGFSKQYNCAFIWQKDGVKKLNLYLIINYFKGGKLRFKKIKPEAFEANRFYTVINKKSGEIVPMEVNFNFDDPNLIILPLAFGKRQGREFIWNDLLSLETGSLKLANGRVIEKTLYNRRTRQDEPALFVALTFERREVLDSSNIKPMNLIGVDRGENIPAVIALTDPEGCPLSRFKDSLGNPTHILRIGESYKEKQRTIQAKKEVEQRRAGGYSRKYASKAKNLADDMVRNTARDLLYYAVTQDAMLIFENLSRGFGRQGKRTFMAERQYTRMEDWLTAKLAYEGLPSKTYLSKTLAQYTSKTCSNCGFTITSADYDRVLEKLKKTATGWMTTINGKELKVEGQITYYNRYKRQNVVKDLSVELDRLSEESVNNDISSWTKGRSGEALSLLKKRFSHRPVQEKFVCLNCGFETHADEQAALNIARSWLFLRSQEYKKYQTNKTTGNTDKRAFVETWQSFYRKKLKEVWKPAV

SEQ ID NO: 32731 - protein, 979 aa, synthetic construct
  REGION 1..979: note = engineered CasX variant
QEIKRALNKIRRRLVKDSNTKKAGKTGPMKTLLVRVMTPDLRERLENLRKKPENIPQPISNTSRANLNKLLTDYTEMKKAILHVYWEEFQKDPVGLMSRVAQPASKKIDQNKLKPEMDEKGNLTTAGFACSQCGQPLFVYKLEQVSEKGKAYTNYFGRCNVAEHEKLILLAQLKPEKDSDEAVTYSLGKFGQRALDFYSIHVTKESTHPVKPLAQIAGNRYASAPVGKALSDACMGTIASFLSKYQDIIIEHQKVVKGNQKRLESLRELAGKENLEYPSVTLPPQPHTKEGVDAYNEVIARVRMWVNLNLWQKLKLSRDDAKPLLRLKGFPSFPLVERQANEVDWWDMVCNVKKLINEKKEDGKVFWQNLAGYKRQEALRPYLSSEEDRKKGKKFARYQLGDLLLHLEKKHGEDWGKVYDEAWERIDKKVEGLSKHIKLEEERRSEDAQSKAALTDWLRAKASFVIEGLKEADKDEFCRCELKLQKWYGDLRGKPFAIEAENSILDISGFSKQYNCAFIWQKDGVKKLNLYLIINYFKGGKLRFKKIKPEAFEANRFYTVINKKSGEIVPMEVNFNFDDPNLIILPLAFGKRQGREFIWNDLLSLETGSLKLANGRVIEKTLYNRRTRQDEPALFVALTFERREVLDSSNIKPMNLIGVDRGENIPAVIALTDPEGCPLSRFKDSLGNPTHILRIGESYKEKQRTIQAKKEVEQRRAGGYSRKYASKAKNLADDMVRNTARDLLYYAVTQDAMLIFENLSRGFGRQGKRTFMAERQYTRMEDWLTAKLAYEGLPSKTYLSKTLAQYTSKTCSNCGFTITSADYDRVLEKLKKTATGWMTTINGKELKVEGQITYYNRYKRQNVVKDLSVELDRLSEESVNNDISSWTKGRSGEALSLLKKRFSHRPVQEKFVCLNCGFETHADEQAALNIARSWLFLRSQEYKKYQTNKTTGNTDKRAFVETWQSFYRKKLKEVWKPAV

SEQ ID NO: 32732 - protein, 979 aa, synthetic construct
  REGION 1..979: note = engineered CasX variant
QEIKRALNKIRRRLVKDSNTKKAGKTGPMKTLLVRVMTPDLRERLENLRKKPENIPQPISNTSRANLNKLLTDYTEMKKAILHVYWEEFQKDPVGLMSRVAQPASKKIDQNKLKPEMDEKGNLTTAGFACSQCGQPLFVYKLEQVSEKGKAYTNYFGRCNVAEHEKLILLAQLKPEKDSDEAVTYSLGKFGQRALDFYSIHVTKESTHPVKPLAQIAGNRYASVPVGKALSDACMGTIASFLSKYQDIIIEHQKVVKGNQKRLESLRELAGKENLEYPSVTLPPQPHTKEGVDAYNEVIARVRMWVNLNLWQKLKLSRDDAKPLLRLKGFPSFPLVERQANEVDWWDMVCNVKKLINEKKEDGKVFWQNLAGYKRQEALRPYLSSEEDRKKGKKFARYQLGDLLLHLEKKHGEDWGKVYDEAWERIDKKVEGLSKHIKLEEERRSEDAQSKAALTDWLRAKASFVIEGLKEADKDEFCRCELKLQKWYGDLRGKPFAIEAENSILDISGFSKQYNCAFIWQKDGVKKLNLYLIINYFKGGKLRFKKIKPEAFEANRFYTVINKKSGEIVPMEVNFNFDDPNLIILPLAFGKRQGREFIWNDLLSLETGSLKLANGRVIEKTLYNRRTRQDEPALFVALTFERREVLDSSNIKPMNLIGVDRGENIPAVIALTDPEGCPLSRFKDSLGNPTHILRIGESYKEKQRTIQAKKEVEQRRAGGYSRKYASKAKNLADDMVRNTARDLLYYAVTQDAMLIFENLSRGFGRQGKRTFMAERQYTRMEDWLTAKLAYEGLPSKTYLSKTLAQYTSKTCSNCGFTITSADYDRVLEKLKKTATGWMTTINGKELKVEGQITYYNRYKRQNVVKDLSVELDRLSEESVNNDISSWTKGRSGEALSLLKKRFSHRPVQEKFVCLNCGFETHADEQAALNIARSWLFLRSQEYKKYQTNKTTGNTDKRAFVETWQSFYRKKLKEVWKPAV

SEQ ID NO: 32733 - protein, 979 aa, synthetic construct
  REGION 1..979: note = engineered CasX variant
QEIKRALNKIRRRLVKDSNTKKAGKTGPMKTLLVRVMTPDLRERLENLRKKPENIPQPISNTSRANLNKLLTDYTEMKKAILHVYWEEFQKDPVGLMSRVAQPASKKIDQNKLKPEMDEKGNLTTAGFACSQCGQPLFVYKLEQVSEKGKAYTNYFGRCNVAEHEKLIKLAQLKPEKDSDEAVTYSLGKFGQRALDFYSIHVTKESTHPVKPLAQIAGNRYASGPVGKALSDACMGTIASFLSKYQDIIIEHQKVVKGNQKRLESLRELAGKENLEYPSVTLPPQPHTKEGVDAYNEVIARVRMWVNLNLWQKLKLSRDDAKPLLRLKGFPSFPLVERQANEVDWWDMVCNVKKLINEKKEDGKVFWQNLAGYKRQEALRPYLSSEEDRKKGKKFARYQLGDLLLHLEKKHGEDWGKVYDEAWERIDKKVEGLSKHIKLEEERRSEDAQSKAALTDWLRAKASFVIEGLKEADKDEFCRCELKLQKWYGDLRGKPFAIEAENSILDISGFSKQYNCAFIWQKDGVKKLNLYLIINYFKGGKLRFKKIKPEAFEANRFYTVINKKSGEIVPMEVNFNFDDPNLIILPLAFGKRQGREFIWNDLLSLETGSLKLANGRVIEKTLYNRRTRQDEPALFVALTFERREVLDSSNIKPMNLIGVDRGENIPAVIALTDPEGCPLSRFKDSLGNPTHILRIGESYKEKQRTIQAKKEVEQRRAGGYSRKYASKAKNLADDMVRNTARDLLYYAVTQDAMLIFENLSRGFGRQGKRTFMAERQYTRMEDWLTAKLAYEGLPSKTYLSKTLAQYTSKTCSNCGFTITSADYDRVLEKLKKTATGWMTTINGKELKVEGQITYYNRYKRQNVVKDLSVELDRLSEESVNNDISSWTKGRSGEALSLLKKRFSHRPVQEKFVCLNCGFETHADEQAALNIARSWLFLRSQEYKKYQTNKTTGNTDKRAFVETWQSFYRKKLKEVWKPAV

SEQ ID NO: 32734 - protein, 978 aa, synthetic construct
  REGION 1..978: note = engineered CasX variant
QEIKRALNKIRRRLVKDSNTKKAGKTGPMKTLLVRVMTPDLRERLENLRKKPENIPQPISNTSRANLNKLLTDYTEMKKAILHVYWEEFQKDPVGLMSRVAQPASKKIDQNKLKPEMDEKGNLTTAGFACSQCGQPLFVYKLEQVSEKGKAYTNYFGRCNVAEHEKLILLAQLKPEKDSDEAVTYSLGKFGQRALDFYSIHVTKESTHPVKPLAQIAGNRYASPVGKALSDACMGTIASFLSKYQDIIIEHQKVVKGNQKRLESLRELAGKENLEYPSVTLPPQPHTKEGVDAYNEVIARVRMWVNLNLWQKLKLSRDDAKPLLRLKGFPSFPLVERQANEVDWWDMVCNVKKLINEKKEDGKVFWQNLAGYKRQEALRPYLSSEEDRKKGKKFARYQLGDLLLHLEKKHGEDWGKVYDEAWERIDKKVEGLSKHIKLEEERRSEDAQSKAALTDWLRAKASFVIEGLKEADKDEFCRCELKLQKWYGDLRGKPFAIEAENSILDISGFSKQYNCAFIWQKDGVKKLNLYLIINYFKGGKLRFKKIKPEAFEANRFYTVINKKSGEIVPMEVNFNFDDPNLIILPLAFGKRQGREFIWNDLLSLETGSLKLANGRVIEKTLYNRRTRQDEPALFVALTFERREVLDSSNIKPMNLIGVDRGENIPAVIALTDPEGCPLSRFKDSLGNPTHILRIGESYKEKQRTIQAKKEVEQRRAGGYSRKYASKAKNLADDMVRNTARDLLYYAVTQDAMLIFENLSRGFGRQGKRTFMAERQYTRMEDWLTAKLAYEGLPSKTYLSKTLAQYTSKTCSNCGFTITSADYDRVLEKLKKTATGWMTTINGKELKVEGQITYYNRYKRQNVVKDLSVELDRLSEESVNNDISSWTKGRSGEALSLLKKRFSHRPVQEKFVCLNCGFETHADEQAALNIARSWLFLRSQEYKKYQTNKTTGNTDKRAFVETWQSFYRKKLKEVWKPAV

SEQ ID NO: 32735 - protein, 978 aa, synthetic construct
  REGION 1..978: note = engineered CasX variant
QEIKRANKIRRRLVKDSNTKKAGKTGPMKTLLVRVMTPDLRERLENLRKKPENIPQPISNTSRANLNKLLTDYTEMKKAILHVYWEEFQKDPVGLMSRVAQPASKKIDQNKLKPEMDEKGNLTTAGFACSQCGQPLFVYKLEQVSEKGKAYTNYVGRCNVAEHEKLILLAQLKPEKDSDEAVTYSLGKFGQRALDFYSIHVTKESTHPVKPLAQIAGNRYASYPVGKALSDACMGTIASFLSKYQDIIIEHQKVVKGNQKRLESLRELAGKENLEYPSVTLPPQPHTKEGVDAYNEVIARVRMWVNLNLWQKLKLSRDDAKPLLRLKGFPSFPLVERQANEVDWWDMVCNVKKLINEKKEDGKVFWQNLAGYKRQEALRPYLSSEEDRKKGKKFARYQLGDLLLHLEKKHGEDWGKVYDEAWERIDKKVEGLSKHIKLEEERRSEDAQSKAALTDWLRAKASFVIEGLKEADKDEFCRCELKLQKWYGDLRGKPFAIEAENSILDISGFSKQYNCAFIWQKDGVKKLNLYLIINYFKGGKLRFKKIKPEAFEANRFYTVINKKSGEIVPMEVNFNFDDPNLIILPLAFGKRQGREFIWNDLLSLETGSLKLANGRVIEKTLYNRRTRQDEPALFVALTFERREVLDSSNIKPMNLIGVDRGENIPAVIALTDPEGCPLSRFKDSLGNPTHILRIGESYKEKQRTIQAKKEVEQRRAGGYSRKYASKAKNLADDMVRNTARDLLYYAVTQDAMLIFENLSRGFGRQGKRTFMAERQYTRMEDWLTAKLAYEGLPSKTYLSKTLAQYTSKTCSNCGFTITSADYDRVLEKLKKTATGWMTTINGKELKVEGQITYYNRYKRQNVVKDLSVELDRLSEESVNNDISSWTKGRSGEALSLLKKRFSHRPVQEKFVCLNCGFETHADEQAALNIARSWLFLRSQEYKKYQTNKTTGNTDKRAFVETWQSFYRKKLKEVWKPAV

SEQ ID NO: 32736 - protein, 978 aa, synthetic construct
  REGION 1..978: note = engineered CasX variant
QEIKRANKIRRRLVKDSNTKKAGKTGPMKTLLVRVMTPDLRERLENLRKKPENIPQPISNTSRANLNKLLTDYTEMKKAILHVYWEEFQKDPVGLMSRVAQPASKKIDQNKLKPEMDEKGNLTTAGFACSQCGQPLFVYKLEQVSEKGKAYTNYVGRCNVAEHEKLILLAQLKPEKDSDEAVTYSLGKFGQRALDFYSIHVTKESTHPVKPLAQIAGNRYASHPVGKALSDACMGTIASFLSKYQDIIIEHQKVVKGNQKRLESLRELAGKENLEYPSVTLPPQPHTKEGVDAYNEVIARVRMWVNLNLWQKLKLSRDDAKPLLRLKGFPSFPLVERQANEVDWWDMVCNVKKLINEKKEDGKVFWQNLAGYKRQEALRPYLSSEEDRKKGKKFARYQLGDLLLHLEKKHGEDWGKVYDEAWERIDKKVEGLSKHIKLEEERRSEDAQSKAALTDWLRAKASFVIEGLKEADKDEFCRCELKLQKWYGDLRGKPFAIEAENSILDISGFSKQYNCAFIWQKDGVKKLNLYLIINYFKGGKLRFKKIKPEAFEANRFYTVINKKSGEIVPMEVNFNFDDPNLIILPLAFGKRQGREFIWNDLLSLETGSLKLANGRVIEKTLYNRRTRQDEPALFVALTFERREVLDSSNIKPMNLIGVDRGENIPAVIALTDPEGCPLSRFKDSLGNPTHILRIGESYKEKQRTIQAKKEVEQRRAGGYSRKYASKAKNLADDMVRNTARDLLYYAVTQDAMLIFENLSRGFGRQGKRTFMAERQYTRMEDWLTAKLAYEGLPSKTYLSKTLAQYTSKTCSNCGFTITSADYDRVLEKLKKTATGWMTTINGKELKVEGQITYYNRYKRQNVVKDLSVELDRLSEESVNNDISSWTKGRSGEALSLLKKRFSHRPVQEKFVCLNCGFETHADEQAALNIARSWLFLRSQEYKKYQTNKTTGNTDKRAFVETWQSFYRKKLKEVWKPAV

SEQ ID NO: 32737 - protein, 978 aa, synthetic construct
  REGION 1..978: note = engineered CasX variant
QEIKRANKIRRRLVKDSNTKKAGKTGPMKTLLVRVMTPDLRERLENLRKKPENIPQPISNTSRANLNKLLTDYTEMKKAILHVYWEEFQKDPVGLMSRVAQPASKKIDQNKLKPEMDEKGNLTTAGFACSQCGQPLFVYKLEQVSEKGKAYTNYVGRCNVAEHEKLILLAQLKPEKDSDEAVTYSLGKFGQRALDFYSIHVTKESTHPVKPLAQIAGNRYASSPVGKALSDACMGTIASFLSKYQDIIIEHQKVVKGNQKRLESLRELAGKENLEYPSVTLPPQPHTKEGVDAYNEVIARVRMWVNLNLWQKLKLSRDDAKPLLRLKGFPSFPLVERQANEVDWWDMVCNVKKLINEKKEDGKVFWQNLAGYKRQEALRPYLSSEEDRKKGKKFARYQLGDLLLHLEKKHGEDWGKVYDEAWERIDKKVEGLSKHIKLEEERRSEDAQSKAALTDWLRAKASFVIEGLKEADKDEFCRCELKLQKWYGDLRGKPFAIEAENSILDISGFSKQYNCAFIWQKDGVKKLNLYLIINYFKGGKLRFKKIKPEAFEANRFYTVINKKSGEIVPMEVNFNFDDPNLIILPLAFGKRQGREFIWNDLLSLETGSLKLANGRVIEKTLYNRRTRQDEPALFVALTFERREVLDSSNIKPMNLIGVDRGENIPAVIALTDPEGCPLSRFKDSLGNPTHILRIGESYKEKQRTIQAKKEVEQRRAGGYSRKYASKAKNLADDMVRNTARDLLYYAVTQDAMLIFENLSRGFGRQGKRTFMAERQYTRMEDWLTAKLAYEGLPSKTYLSKTLAQYTSKTCSNCGFTITSADYDRVLEKLKKTATGWMTTINGKELKVEGQITYYNRYKRQNVVKDLSVELDRLSEESVNNDISSWTKGRSGEALSLLKKRFSHRPVQEKFVCLNCGFETHADEQAALNIARSWLFLRSQEYKKYQTNKTTGNTDKRAFVETWQSFYRKKLKEVWKPAV

SEQ ID NO: 32738 - protein, 978 aa, synthetic construct
  REGION 1..978: note = engineered CasX variant
QEIKRANKIRRRLVKDSNTKKAGKTGPMKTLLVRVMTPDLRERLENLRKKPENIPQPISNTSRANLNKLLTDYTEMKKAILHVYWEEFQKDPVGLMSRVAQPASKKIDQNKLKPEMDEKGNLTTAGFACSQCGQPLFVYKLEQVSEKGKAYTNYVGRCNVAEHEKLILLAQLKPEKDSDEAVTYSLGKFGQRALDFYSIHVTKESTHPVKPLAQIAGNRYASTPVGKALSDACMGTIASFLSKYQDIIIEHQKVVKGNQKRLESLRELAGKENLEYPSVTLPPQPHTKEGVDAYNEVIARVRMWVNLNLWQKLKLSRDDAKPLLRLKGFPSFPLVERQANEVDWWDMVCNVKKLINEKKEDGKVFWQNLAGYKRQEALRPYLSSEEDRKKGKKFARYQLGDLLLHLEKKHGEDWGKVYDEAWERIDKKVEGLSKHIKLEEERRSEDAQSKAALTDWLRAKASFVIEGLKEADKDEFCRCELKLQKWYGDLRGKPFAIEAENSILDISGFSKQYNCAFIWQKDGVKKLNLYLIINYFKGGKLRFKKIKPEAFEANRFYTVINKKSGEIVPMEVNFNFDDPNLIILPLAFGKRQGREFIWNDLLSLETGSLKLANGRVIEKTLYNRRTRQDEPALFVALTFERREVLDSSNIKPMNLIGVDRGENIPAVIALTDPEGCPLSRFKDSLGNPTHILRIGESYKEKQRTIQAKKEVEQRRAGGYSRKYASKAKNLADDMVRNTARDLLYYAVTQDAMLIFENLSRGFGRQGKRTFMAERQYTRMEDWLTAKLAYEGLPSKTYLSKTLAQYTSKTCSNCGFTITSADYDRVLEKLKKTATGWMTTINGKELKVEGQITYYNRYKRQNVVKDLSVELDRLSEESVNNDISSWTKGRSGEALSLLKKRFSHRPVQEKFVCLNCGFETHADEQAALNIARSWLFLRSQEYKKYQTNKTTGNTDKRAFVETWQSFYRKKLKEVWKPAV

SEQ ID NO: 32739 - protein, 978 aa, synthetic construct
  REGION 1..978: note = engineered CasX variant
QEIKRANKIRRRLVKDSNTKKAGKTGPMKTLLVRVMTPDLRERLENLRKKPENIPQPISNTSRANLNKLLTDYTEMKKAILHVYWEEFQKDPVGLMSRVAQPASKKIDQNKLKPEMDEKGNLTTAGFACSQCGQPLFVYKLEQVSEKGKAYTNYVGRCNVAEHEKLILLAQLKPEKDSDEAVTYSLGKFGQRALDFYSIHVTKESTHPVKPLAQIAGNRYASAPVGKALSDACMGTIASFLSKYQDIIIEHQKVVKGNQKRLESLRELAGKENLEYPSVTLPPQPHTKEGVDAYNEVIARVRMWVNLNLWQKLKLSRDDAKPLLRLKGFPSFPLVERQANEVDWWDMVCNVKKLINEKKEDGKVFWQNLAGYKRQEALRPYLSSEEDRKKGKKFARYQLGDLLLHLEKKHGEDWGKVYDEAWERIDKKVEGLSKHIKLEEERRSEDAQSKAALTDWLRAKASFVIEGLKEADKDEFCRCELKLQKWYGDLRGKPFAIEAENSILDISGFSKQYNCAFIWQKDGVKKLNLYLIINYFKGGKLRFKKIKPEAFEANRFYTVINKKSGEIVPMEVNFNFDDPNLIILPLAFGKRQGREFIWNDLLSLETGSLKLANGRVIEKTLYNRRTRQDEPALFVALTFERREVLDSSNIKPMNLIGVDRGENIPAVIALTDPEGCPLSRFKDSLGNPTHILRIGESYKEKQRTIQAKKEVEQRRAGGYSRKYASKAKNLADDMVRNTARDLLYYAVTQDAMLIFENLSRGFGRQGKRTFMAERQYTRMEDWLTAKLAYEGLPSKTYLSKTLAQYTSKTCSNCGFTITSADYDRVLEKLKKTATGWMTTINGKELKVEGQITYYNRYKRQNVVKDLSVELDRLSEESVNNDISSWTKGRSGEALSLLKKRFSHRPVQEKFVCLNCGFETHADEQAALNIARSWLFLRSQEYKKYQTNKTTGNTDKRAFVETWQSFYRKKLKEVWKPAV

SEQ ID NO: 32740 - protein, 978 aa, synthetic construct
  REGION 1..978: note = engineered CasX variant
QEIKRANKIRRRLVKDSNTKKAGKTGPMKTLLVRVMTPDLRERLENLRKKPENIPQPISNTSRANLNKLLTDYTEMKKAILHVYWEEFQKDPVGLMSRVAQPASKKIDQNKLKPEMDEKGNLTTAGFACSQCGQPLFVYKLEQVSEKGKAYTNYVGRCNVAEHEKLILLAQLKPEKDSDEAVTYSLGKFGQRALDFYSIHVTKESTHPVKPLAQIAGNRYASVPVGKALSDACMGTIASFLSKYQDIIIEHQKVVKGNQKRLESLRELAGKENLEYPSVTLPPQPHTKEGVDAYNEVIARVRMWVNLNLWQKLKLSRDDAKPLLRLKGFPSFPLVERQANEVDWWDMVCNVKKLINEKKEDGKVFWQNLAGYKRQEALRPYLSSEEDRKKGKKFARYQLGDLLLHLEKKHGEDWGKVYDEAWERIDKKVEGLSKHIKLEEERRSEDAQSKAALTDWLRAKASFVIEGLKEADKDEFCRCELKLQKWYGDLRGKPFAIEAENSILDISGFSKQYNCAFIWQKDGVKKLNLYLIINYFKGGKLRFKKIKPEAFEANRFYTVINKKSGEIVPMEVNFNFDDPNLIILPLAFGKRQGREFIWNDLLSLETGSLKLANGRVIEKTLYNRRTRQDEPALFVALTFERREVLDSSNIKPMNLIGVDRGENIPAVIALTDPEGCPLSRFKDSLGNPTHILRIGESYKEKQRTIQAKKEVEQRRAGGYSRKYASKAKNLADDMVRNTARDLLYYAVTQDAMLIFENLSRGFGRQGKRTFMAERQYTRMEDWLTAKLAYEGLPSKTYLSKTLAQYTSKTCSNCGFTITSADYDRVLEKLKKTATGWMTTINGKELKVEGQITYYNRYKRQNVVKDLSVELDRLSEESVNNDISSWTKGRSGEALSLLKKRFSHRPVQEKFVCLNCGFETHADEQAALNIARSWLFLRSQEYKKYQTNKTTGNTDKRAFVETWQSFYRKKLKEVWKPAV

SEQ ID NO: 32741 - protein, 978 aa, synthetic construct
  REGION 1..978: note = engineered CasX variant
QEIKRANKIRRRLVKDSNTKKAGKTGPMKTLLVRVMTPDLRERLENLRKKPENIPQPISNTSRANLNKLLTDYTEMKKAILHVYWEEFQKDPVGLMSRVAQPASKKIDQNKLKPEMDEKGNLTTAGFACSQCGQPLFVYKLEQVSEKGKAYTNYVGRCNVAEHEKLIKLAQLKPEKDSDEAVTYSLGKFGQRALDFYSIHVTKESTHPVKPLAQIAGNRYASGPVGKALSDACMGTIASFLSKYQDIIIEHQKVVKGNQKRLESLRELAGKENLEYPSVTLPPQPHTKEGVDAYNEVIARVRMWVNLNLWQKLKLSRDDAKPLLRLKGFPSFPLVERQANEVDWWDMVCNVKKLINEKKEDGKVFWQNLAGYKRQEALRPYLSSEEDRKKGKKFARYQLGDLLLHLEKKHGEDWGKVYDEAWERIDKKVEGLSKHIKLEEERRSEDAQSKAALTDWLRAKASFVIEGLKEADKDEFCRCELKLQKWYGDLRGKPFAIEAENSILDISGFSKQYNCAFIWQKDGVKKLNLYLIINYFKGGKLRFKKIKPEAFEANRFYTVINKKSGEIVPMEVNFNFDDPNLIILPLAFGKRQGREFIWNDLLSLETGSLKLANGRVIEKTLYNRRTRQDEPALFVALTFERREVLDSSNIKPMNLIGVDRGENIPAVIALTDPEGCPLSRFKDSLGNPTHILRIGESYKEKQRTIQAKKEVEQRRAGGYSRKYASKAKNLADDMVRNTARDLLYYAVTQDAMLIFENLSRGFGRQGKRTFMAERQYTRMEDWLTAKLAYEGLPSKTYLSKTLAQYTSKTCSNCGFTITSADYDRVLEKLKKTATGWMTTINGKELKVEGQITYYNRYKRQNVVKDLSVELDRLSEESVNNDISSWTKGRSGEALSLLKKRFSHRPVQEKFVCLNCGFETHADEQAALNIARSWLFLRSQEYKKYQTNKTTGNTDKRAFVETWQSFYRKKLKEVWKPAV

SEQ ID NO: 32742 - protein, 977 aa, synthetic construct
  REGION 1..977: note = engineered CasX variant
QEIKRANKIRRRLVKDSNTKKAGKTGPMKTLLVRVMTPDLRERLENLRKKPENIPQPISNTSRANLNKLLTDYTEMKKAILHVYWEEFQKDPVGLMSRVAQPASKKIDQNKLKPEMDEKGNLTTAGFACSQCGQPLFVYKLEQVSEKGKAYTNYVGRCNVAEHEKLILLAQLKPEKDSDEAVTYSLGKFGQRALDFYSIHVTKESTHPVKPLAQIAGNRYASPVGKALSDACMGTIASFLSKYQDIIIEHQKVVKGNQKRLESLRELAGKENLEYPSVTLPPQPHTKEGVDAYNEVIARVRMWVNLNLWQKLKLSRDDAKPLLRLKGFPSFPLVERQANEVDWWDMVCNVKKLINEKKEDGKVFWQNLAGYKRQEALRPYLSSEEDRKKGKKFARYQLGDLLLHLEKKHGEDWGKVYDEAWERIDKKVEGLSKHIKLEEERRSEDAQSKAALTDWLRAKASFVIEGLKEADKDEFCRCELKLQKWYGDLRGKPFAIEAENSILDISGFSKQYNCAFIWQKDGVKKLNLYLIINYFKGGKLRFKKIKPEAFEANRFYTVINKKSGEIVPMEVNFNFDDPNLIILPLAFGKRQGREFIWNDLLSLETGSLKLANGRVIEKTLYNRRTRQDEPALFVALTFERREVLDSSNIKPMNLIGVDRGENIPAVIALTDPEGCPLSRFKDSLGNPTHILRIGESYKEKQRTIQAKKEVEQRRAGGYSRKYASKAKNLADDMVRNTARDLLYYAVTQDAMLIFENLSRGFGRQGKRTFMAERQYTRMEDWLTAKLAYEGLPSKTYLSKTLAQYTSKTCSNCGFTITSADYDRVLEKLKKTATGWMTTINGKELKVEGQITYYNRYKRQNVVKDLSVELDRLSEESVNNDISSWTKGRSGEALSLLKKRFSHRPVQEKFVCLNCGFETHADEQAALNIARSWLFLRSQEYKKYQTNKTTGNTDKRAFVETWQSFYRKKLKEVWKPAV

SEQ ID NO: 32743 - protein, 978 aa, synthetic construct
  REGION 1..978: note = engineered CasX variant
QEIKRANKIRRRLVKDSNTKKAGKTGPMKTLLVRVMTPDLRERLENLRKKPENIPQPISNTSRANLNKLLTDYTEMKKAILHVYWEEFQKDPVGLMSRVAQPASKKIDQNKLKPEMDEKGNLTTAGFACSQCGQPLFVYKLEQVSEKGKAYTNYFGRCNVAEHEKLILLAQLKPEKDSDEAVTYSLGKFGQRALDFYSIHVTKESTHPVKPLAQIAGNRYASYPVGKALSDACMGTIASFLSKYQDIIIEHQKVVKGNQKRLESLRELAGKENLEYPSVTLPPQPHTKEGVDAYNEVIARVRMWVNLNLWQKLKLSRDDAKPLLRLKGFPSFPLVERQANEVDWWDMVCNVKKLINEKKEDGKVFWQNLAGYKRQEALRPYLSSEEDRKKGKKFARYQLGDLLLHLEKKHGEDWGKVYDEAWERIDKKVEGLSKHIKLEEERRSEDAQSKAALTDWLRAKASFVIEGLKEADKDEFCRCELKLQKWYGDLRGKPFAIEAENSILDISGFSKQYNCAFIWQKDGVKKLNLYLIINYFKGGKLRFKKIKPEAFEANRFYTVINKKSGEIVPMEVNFNFDDPNLIILPLAFGKRQGREFIWNDLLSLETGSLKLANGRVIEKTLYNRRTRQDEPALFVALTFERREVLDSSNIKPMNLIGVDRGENIPAVIALTDPEGCPLSRFKDSLGNPTHILRIGESYKEKQRTIQAKKEVEQRRAGGYSRKYASKAKNLADDMVRNTARDLLYYAVTQDAMLIFENLSRGFGRQGKRTFMAERQYTRMEDWLTAKLAYEGLASKTYLSKTLAQYTSKTCSNCGFTITSADYDRVLEKLKKTATGWMTTINGKELKVEGQITYYNRYKRQNVVKDLSVELDRLSEESVNNDISSWTKGRSGEALSLLKKRFSHRPVQEKFVCLNCGFETHADEQAALNIARSWLFLRSQEYKKYQTNKTTGNTDKRAFVETWQSFYRKKLKEVWKPAV

SEQ ID NO: 32744 - protein, 978 aa, synthetic construct
  REGION 1..978: note = engineered CasX variant
QEIKRANKIRRRLVKDSNTKKAGKTGPMKTLLVRVMTPDLRERLENLRKKPENIPQPISNTSRANLNKLLTDYTEMKKAILHVYWEEFQKDPVGLMSRVAQPASKKIDQNKLKPEMDEKGNLTTAGFACSQCGQPLFVYKLEQVSEKGKAYTNYFGRCNVAEHEKLILLAQLKPEKDSDEAVTYSLGKFGQRALDFYSIHVTKESTHPVKPLAQIAGNRYASHPVGKALSDACMGTIASFLSKYQDIIIEHQKVVKGNQKRLESLRELAGKENLEYPSVTLPPQPHTKEGVDAYNEVIARVRMWVNLNLWQKLKLSRDDAKPLLRLKGFPSFPLVERQANEVDWWDMVCNVKKLINEKKEDGKVFWQNLAGYKRQEALRPYLSSEEDRKKGKKFARYQLGDLLLHLEKKHGEDWGKVYDEAWERIDKKVEGLSKHIKLEEERRSEDAQSKAALTDWLRAKASFVIEGLKEADKDEFCRCELKLQKWYGDLRGKPFAIEAENSILDISGFSKQYNCAFIWQKDGVKKLNLYLIINYFKGGKLRFKKIKPEAFEANRFYTVINKKSGEIVPMEVNFNFDDPNLIILPLAFGKRQGREFIWNDLLSLETGSLKLANGRVIEKTLYNRRTRQDEPALFVALTFERREVLDSSNIKPMNLIGVDRGENIPAVIALTDPEGCPLSRFKDSLGNPTHILRIGESYKEKQRTIQAKKEVEQRRAGGYSRKYASKAKNLADDMVRNTARDLLYYAVTQDAMLIFENLSRGFGRQGKRTFMAERQYTRMEDWLTAKLAYEGLASKTYLSKTLAQYTSKTCSNCGFTITSADYDRVLEKLKKTATGWMTTINGKELKVEGQITYYNRYKRQNVVKDLSVELDRLSEESVNNDISSWTKGRSGEALSLLKKRFSHRPVQEKFVCLNCGFETHADEQAALNIARSWLFLRSQEYKKYQTNKTTGNTDKRAFVETWQSFYRKKLKEVWKPAV

SEQ ID NO: 32745 - protein, 978 aa, synthetic construct
  REGION 1..978: note = engineered CasX variant
QEIKRANKIRRRLVKDSNTKKAGKTGPMKTLLVRVMTPDLRERLENLRKKPENIPQPISNTSRANLNKLLTDYTEMKKAILHVYWEEFQKDPVGLMSRVAQPASKKIDQNKLKPEMDEKGNLTTAGFACSQCGQPLFVYKLEQVSEKGKAYTNYFGRCNVAEHEKLILLAQLKPEKDSDEAVTYSLGKFGQRALDFYSIHVTKESTHPVKPLAQIAGNRYASSPVGKALSDACMGTIASFLSKYQDIIIEHQKVVKGNQKRLESLRELAGKENLEYPSVTLPPQPHTKEGVDAYNEVIARVRMWVNLNLWQKLKLSRDDAKPLLRLKGFPSFPLVERQANEVDWWDMVCNVKKLINEKKEDGKVFWQNLAGYKRQEALRPYLSSEEDRKKGKKFARYQLGDLLLHLEKKHGEDWGKVYDEAWERIDKKVEGLSKHIKLEEERRSEDAQSKAALTDWLRAKASFVIEGLKEADKDEFCRCELKLQKWYGDLRGKPFAIEAENSILDISGFSKQYNCAFIWQKDGVKKLNLYLIINYFKGGKLRFKKIKPEAFEANRFYTVINKKSGEIVPMEVNFNFDDPNLIILPLAFGKRQGREFIWNDLLSLETGSLKLANGRVIEKTLYNRRTRQDEPALFVALTFERREVLDSSNIKPMNLIGVDRGENIPAVIALTDPEGCPLSRFKDSLGNPTHILRIGESYKEKQRTIQAKKEVEQRRAGGYSRKYASKAKNLADDMVRNTARDLLYYAVTQDAMLIFENLSRGFGRQGKRTFMAERQYTRMEDWLTAKLAYEGLASKTYLSKTLAQYTSKTCSNCGFTITSADYDRVLEKLKKTATGWMTTINGKELKVEGQITYYNRYKRQNVVKDLSVELDRLSEESVNNDISSWTKGRSGEALSLLKKRFSHRPVQEKFVCLNCGFETHADEQAALNIARSWLFLRSQEYKKYQTNKTTGNTDKRAFVETWQSFYRKKLKEVWKPAV

SEQ ID NO: 32746 - protein, 978 aa, synthetic construct
  REGION 1..978: note = engineered CasX variant
QEIKRANKIRRRLVKDSNTKKAGKTGPMKTLLVRVMTPDLRERLENLRKKPENIPQPISNTSRANLNKLLTDYTEMKKAILHVYWEEFQKDPVGLMSRVAQPASKKIDQNKLKPEMDEKGNLTTAGFACSQCGQPLFVYKLEQVSEKGKAYTNYFGRCNVAEHEKLILLAQLKPEKDSDEAVTYSLGKFGQRALDFYSIHVTKESTHPVKPLAQIAGNRYASTPVGKALSDACMGTIASFLSKYQDIIIEHQKVVKGNQKRLESLRELAGKENLEYPSVTLPPQPHTKEGVDAYNEVIARVRMWVNLNLWQKLKLSRDDAKPLLRLKGFPSFPLVERQANEVDWWDMVCNVKKLINEKKEDGKVFWQNLAGYKRQEALRPYLSSEEDRKKGKKFARYQLGDLLLHLEKKHGEDWGKVYDEAWERIDKKVEGLSKHIKLEEERRSEDAQSKAALTDWLRAKASFVIEGLKEADKDEFCRCELKLQKWYGDLRGKPFAIEAENSILDISGFSKQYNCAFIWQKDGVKKLNLYLIINYFKGGKLRFKKIKPEAFEANRFYTVINKKSGEIVPMEVNFNFDDPNLIILPLAFGKRQGREFIWNDLLSLETGSLKLANGRVIEKTLYNRRTRQDEPALFVALTFERREVLDSSNIKPMNLIGVDRGENIPAVIALTDPEGCPLSRFKDSLGNPTHILRIGESYKEKQRTIQAKKEVEQRRAGGYSRKYASKAKNLADDMVRNTARDLLYYAVTQDAMLIFENLSRGFGRQGKRTFMAERQYTRMEDWLTAKLAYEGLASKTYLSKTLAQYTSKTCSNCGFTITSADYDRVLEKLKKTATGWMTTINGKELKVEGQITYYNRYKRQNVVKDLSVELDRLSEESVNNDISSWTKGRSGEALSLLKKRFSHRPVQEKFVCLNCGFETHADEQAALNIARSWLFLRSQEYKKYQTNKTTGNTDKRAFVETWQSFYRKKLKEVWKPAV

SEQ ID NO: 32747 - protein, 978 aa, synthetic construct
  REGION 1..978: note = engineered CasX variant
QEIKRANKIRRRLVKDSNTKKAGKTGPMKTLLVRVMTPDLRERLENLRKKPENIPQPISNTSRANLNKLLTDYTEMKKAILHVYWEEFQKDPVGLMSRVAQPASKKIDQNKLKPEMDEKGNLTTAGFACSQCGQPLFVYKLEQVSEKGKAYTNYFGRCNVAEHEKLILLAQLKPEKDSDEAVTYSLGKFGQRALDFYSIHVTKESTHPVKPLAQIAGNRYASAPVGKALSDACMGTIASFLSKYQDIIIEHQKVVKGNQKRLESLRELAGKENLEYPSVTLPPQPHTKEGVDAYNEVIARVRMWVNLNLWQKLKLSRDDAKPLLRLKGFPSFPLVERQANEVDWWDMVCNVKKLINEKKEDGKVFWQNLAGYKRQEALRPYLSSEEDRKKGKKFARYQLGDLLLHLEKKHGEDWGKVYDEAWERIDKKVEGLSKHIKLEEERRSEDAQSKAALTDWLRAKASFVIEGLKEADKDEFCRCELKLQKWYGDLRGKPFAIEAENSILDISGFSKQYNCAFIWQKDGVKKLNLYLIINYFKGGKLRFKKIKPEAFEANRFYTVINKKSGEIVPMEVNFNFDDPNLIILPLAFGKRQGREFIWNDLLSLETGSLKLANGRVIEKTLYNRRTRQDEPALFVALTFERREVLDSSNIKPMNLIGVDRGENIPAVIALTDPEGCPLSRFKDSLGNPTHILRIGESYKEKQRTIQAKKEVEQRRAGGYSRKYASKAKNLADDMVRNTARDLLYYAVTQDAMLIFENLSRGFGRQGKRTFMAERQYTRMEDWLTAKLAYEGLASKTYLSKTLAQYTSKTCSNCGFTITSADYDRVLEKLKKTATGWMTTINGKELKVEGQITYYNRYKRQNVVKDLSVELDRLSEESVNNDISSWTKGRSGEALSLLKKRFSHRPVQEKFVCLNCGFETHADEQAALNIARSWLFLRSQEYKKYQTNKTTGNTDKRAFVETWQSFYRKKLKEVWKPAV

SEQ ID NO: 32748 - protein, 978 aa, synthetic construct
  REGION 1..978: note = engineered CasX variant
QEIKRANKIRRRLVKDSNTKKAGKTGPMKTLLVRVMTPDLRERLENLRKKPENIPQPISNTSRANLNKLLTDYTEMKKAILHVYWEEFQKDPVGLMSRVAQPASKKIDQNKLKPEMDEKGNLTTAGFACSQCGQPLFVYKLEQVSEKGKAYTNYFGRCNVAEHEKLILLAQLKPEKDSDEAVTYSLGKFGQRALDFYSIHVTKESTHPVKPLAQIAGNRYASVPVGKALSDACMGTIASFLSKYQDIIIEHQKVVKGNQKRLESLRELAGKENLEYPSVTLPPQPHTKEGVDAYNEVIARVRMWVNLNLWQKLKLSRDDAKPLLRLKGFPSFPLVERQANEVDWWDMVCNVKKLINEKKEDGKVFWQNLAGYKRQEALRPYLSSEEDRKKGKKFARYQLGDLLLHLEKKHGEDWGKVYDEAWERIDKKVEGLSKHIKLEEERRSEDAQSKAALTDWLRAKASFVIEGLKEADKDEFCRCELKLQKWYGDLRGKPFAIEAENSILDISGFSKQYNCAFIWQKDGVKKLNLYLIINYFKGGKLRFKKIKPEAFEANRFYTVINKKSGEIVPMEVNFNFDDPNLIILPLAFGKRQGREFIWNDLLSLETGSLKLANGRVIEKTLYNRRTRQDEPALFVALTFERREVLDSSNIKPMNLIGVDRGENIPAVIALTDPEGCPLSRFKDSLGNPTHILRIGESYKEKQRTIQAKKEVEQRRAGGYSRKYASKAKNLADDMVRNTARDLLYYAVTQDAMLIFENLSRGFGRQGKRTFMAERQYTRMEDWLTAKLAYEGLASKTYLSKTLAQYTSKTCSNCGFTITSADYDRVLEKLKKTATGWMTTINGKELKVEGQITYYNRYKRQNVVKDLSVELDRLSEESVNNDISSWTKGRSGEALSLLKKRFSHRPVQEKFVCLNCGFETHADEQAALNIARSWLFLRSQEYKKYQTNKTTGNTDKRAFVETWQSFYRKKLKEVWKPAV

SEQ ID NO: 32749 - protein, 978 aa, synthetic construct
  REGION 1..978: note = engineered CasX variant
QEIKRANKIRRRLVKDSNTKKAGKTGPMKTLLVRVMTPDLRERLENLRKKPENIPQPISNTSRANLNKLLTDYTEMKKAILHVYWEEFQKDPVGLMSRVAQPASKKIDQNKLKPEMDEKGNLTTAGFACSQCGQPLFVYKLEQVSEKGKAYTNYFGRCNVAEHEKLIKLAQLKPEKDSDEAVTYSLGKFGQRALDFYSIHVTKESTHPVKPLAQIAGNRYASGPVGKALSDACMGTIASFLSKYQDIIIEHQKVVKGNQKRLESLRELAGKENLEYPSVTLPPQPHTKEGVDAYNEVIARVRMWVNLNLWQKLKLSRDDAKPLLRLKGFPSFPLVERQANEVDWWDMVCNVKKLINEKKEDGKVFWQNLAGYKRQEALRPYLSSEEDRKKGKKFARYQLGDLLLHLEKKHGEDWGKVYDEAWERIDKKVEGLSKHIKLEEERRSEDAQSKAALTDWLRAKASFVIEGLKEADKDEFCRCELKLQKWYGDLRGKPFAIEAENSILDISGFSKQYNCAFIWQKDGVKKLNLYLIINYFKGGKLRFKKIKPEAFEANRFYTVINKKSGEIVPMEVNFNFDDPNLIILPLAFGKRQGREFIWNDLLSLETGSLKLANGRVIEKTLYNRRTRQDEPALFVALTFERREVLDSSNIKPMNLIGVDRGENIPAVIALTDPEGCPLSRFKDSLGNPTHILRIGESYKEKQRTIQAKKEVEQRRAGGYSRKYASKAKNLADDMVRNTARDLLYYAVTQDAMLIFENLSRGFGRQGKRTFMAERQYTRMEDWLTAKLAYEGLASKTYLSKTLAQYTSKTCSNCGFTITSADYDRVLEKLKKTATGWMTTINGKELKVEGQITYYNRYKRQNVVKDLSVELDRLSEESVNNDISSWTKGRSGEALSLLKKRFSHRPVQEKFVCLNCGFETHADEQAALNIARSWLFLRSQEYKKYQTNKTTGNTDKRAFVETWQSFYRKKLKEVWKPAV

SEQ ID NO: 32750 - protein, 977 aa, synthetic construct
  REGION 1..977: note = engineered CasX variant
QEIKRANKIRRRLVKDSNTKKAGKTGPMKTLLVRVMTPDLRERLENLRKKPENIPQPISNTSRANLNKLLTDYTEMKKAILHVYWEEFQKDPVGLMSRVAQPASKKIDQNKLKPEMDEKGNLTTAGFACSQCGQPLFVYKLEQVSEKGKAYTNYFGRCNVAEHEKLILLAQLKPEKDSDEAVTYSLGKFGQRALDFYSIHVTKESTHPVKPLAQIAGNRYASPVGKALSDACMGTIASFLSKYQDIIIEHQKVVKGNQKRLESLRELAGKENLEYPSVTLPPQPHTKEGVDAYNEVIARVRMWVNLNLWQKLKLSRDDAKPLLRLKGFPSFPLVERQANEVDWWDMVCNVKKLINEKKEDGKVFWQNLAGYKRQEALRPYLSSEEDRKKGKKFARYQLGDLLLHLEKKHGEDWGKVYDEAWERIDKKVEGLSKHIKLEEERRSEDAQSKAALTDWLRAKASFVIEGLKEADKDEFCRCELKLQKWYGDLRGKPFAIEAENSILDISGFSKQYNCAFIWQKDGVKKLNLYLIINYFKGGKLRFKKIKPEAFEANRFYTVINKKSGEIVPMEVNFNFDDPNLIILPLAFGKRQGREFIWNDLLSLETGSLKLANGRVIEKTLYNRRTRQDEPALFVALTFERREVLDSSNIKPMNLIGVDRGENIPAVIALTDPEGCPLSRFKDSLGNPTHILRIGESYKEKQRTIQAKKEVEQRRAGGYSRKYASKAKNLADDMVRNTARDLLYYAVTQDAMLIFENLSRGFGRQGKRTFMAERQYTRMEDWLTAKLAYEGLASKTYLSKTLAQYTSKTCSNCGFTITSADYDRVLEKLKKTATGWMTTINGKELKVEGQITYYNRYKRQNVVKDLSVELDRLSEESVNNDISSWTKGRSGEALSLLKKRFSHRPVQEKFVCLNCGFETHADEQAALNIARSWLFLRSQEYKKYQTNKTTGNTDKRAFVETWQSFYRKKLKEVWKPAV

SEQ ID NO: 32751 - protein, 978 aa, synthetic construct
  REGION 1..978: note = engineered CasX variant
QEIKRANKIRRRLVKDSNTKKAGKTGPMKTLLVRVMTPDLRERLENLRKKPENIPQPISNTSRANLNKLLTDYTEMKKAILHVYWEEFQKDPVGLMSRVAQPASKKIDQNKLKPEMDEKGNLTTAGFACSQCGQPLFVYKLEQVSEKGKAYTNYFGRCNVAEHEKLILLAQLKPEKDSDEAVTYSLGKFGQRALDFYSIHVTKESTHPVKPLAQIAGNRYASYPVGKALSDACMGTIASFLSKYQDIIIEHQKVVKGNQKRLESLRELAGKENLEYPSVTLPPQPHTKEGVDAYNEVIARVRMWVNLNLWQKLKLSRDDAKPLLRLKGFPSFPLVERQANEVDWWDMVCNVKKLINEKKEDGKVFWQNLAGYKRQEALRPYLSSEEDRKKGKKFARYQLGDLLLHLEKKHGEDWGKVYDEAWERIDKKVEGLSKHIKLEEERRSEDAQSKAALTDWLRAKASFVIEGLKEADKDEFCRCELKLQKWYGDLRGKPFAIEAENSILDISGFSKQYNCAFIWQKDGVKKLNLYLIINYFKGGKLRFKKIKPEAFEANRFYTVINKKSGEIVPMEVNFNFDDPNLIILPLAFGKRQGREFIWNDLLSLETGSLKLANGRVIEKTLYNRRTRQDEPALFVALTFERREVLDSSNIKPMNLIGVDRGENIPAVIALTDPEGCPLSRFKDSLGNPTHILRIGESYKEKQRTIQAKKEVEQRRAGGYSRKYASKAKNLADDMVRNTARDLLYYAVTQDAMLIFENLSRGFGRQGKRTFMAERQYTRMEDWLTAKLAYEGLPSKVYLSKTLAQYTSKTCSNCGFTITSADYDRVLEKLKKTATGWMTTINGKELKVEGQITYYNRYKRQNVVKDLSVELDRLSEESVNNDISSWTKGRSGEALSLLKKRFSHRPVQEKFVCLNCGFETHADEQAALNIARSWLFLRSQEYKKYQTNKTTGNTDKRAFVETWQSFYRKKLKEVWKPAV

SEQ ID NO: 32752 - protein, 978 aa, synthetic construct
  REGION 1..978: note = engineered CasX variant
QEIKRANKIRRRLVKDSNTKKAGKTGPMKTLLVRVMTPDLRERLENLRKKPENIPQPISNTSRANLNKLLTDYTEMKKAILHVYWEEFQKDPVGLMSRVAQPASKKIDQNKLKPEMDEKGNLTTAGFACSQCGQPLFVYKLEQVSEKGKAYTNYFGRCNVAEHEKLILLAQLKPEKDSDEAVTYSLGKFGQRALDFYSIHVTKESTHPVKPLAQIAGNRYASHPVGKALSDACMGTIASFLSKYQDIIIEHQKVVKGNQKRLESLRELAGKENLEYPSVTLPPQPHTKEGVDAYNEVIARVRMWVNLNLWQKLKLSRDDAKPLLRLKGFPSFPLVERQANEVDWWDMVCNVKKLINEKKEDGKVFWQNLAGYKRQEALRPYLSSEEDRKKGKKFARYQLGDLLLHLEKKHGEDWGKVYDEAWERIDKKVEGLSKHIKLEEERRSEDAQSKAALTDWLRAKASFVIEGLKEADKDEFCRCELKLQKWYGDLRGKPFAIEAENSILDISGFSKQYNCAFIWQKDGVKKLNLYLIINYFKGGKLRFKKIKPEAFEANRFYTVINKKSGEIVPMEVNFNFDDPNLIILPLAFGKRQGREFIWNDLLSLETGSLKLANGRVIEKTLYNRRTRQDEPALFVALTFERREVLDSSNIKPMNLIGVDRGENIPAVIALTDPEGCPLSRFKDSLGNPTHILRIGESYKEKQRTIQAKKEVEQRRAGGYSRKYASKAKNLADDMVRNTARDLLYYAVTQDAMLIFENLSRGFGRQGKRTFMAERQYTRMEDWLTAKLAYEGLPSKVYLSKTLAQYTSKTCSNCGFTITSADYDRVLEKLKKTATGWMTTINGKELKVEGQITYYNRYKRQNVVKDLSVELDRLSEESVNNDISSWTKGRSGEALSLLKKRFSHRPVQEKFVCLNCGFETHADEQAALNIARSWLFLRSQEYKKYQTNKTTGNTDKRAFVETWQSFYRKKLKEVWKPAV

SEQ ID NO: 32753 - protein, 978 aa, synthetic construct
  REGION 1..978: note = engineered CasX variant
QEIKRANKIRRRLVKDSNTKKAGKTGPMKTLLVRVMTPDLRERLENLRKKPENIPQPISNTSRANLNKLLTDYTEMKKAILHVYWEEFQKDPVGLMSRVAQPASKKIDQNKLKPEMDEKGNLTTAGFACSQCGQPLFVYKLEQVSEKGKAYTNYFGRCNVAEHEKLILLAQLKPEKDSDEAVTYSLGKFGQRALDFYSIHVTKESTHPVKPLAQIAGNRYASSPVGKALSDACMGTIASFLSKYQDIIIEHQKVVKGNQKRLESLRELAGKENLEYPSVTLPPQPHTKEGVDAYNEVIARVRMWVNLNLWQKLKLSRDDAKPLLRLKGFPSFPLVERQANEVDWWDMVCNVKKLINEKKEDGKVFWQNLAGYKRQEALRPYLSSEEDRKKGKKFARYQLGDLLLHLEKKHGEDWGKVYDEAWERIDKKVEGLSKHIKLEEERRSEDAQSKAALTDWLRAKASFVIEGLKEADKDEFCRCELKLQKWYGDLRGKPFAIEAENSILDISGFSKQYNCAFIWQKDGVKKLNLYLIINYFKGGKLRFKKIKPEAFEANRFYTVINKKSGEIVPMEVNFNFDDPNLIILPLAFGKRQGREFIWNDLLSLETGSLKLANGRVIEKTLYNRRTRQDEPALFVALTFERREVLDSSNIKPMNLIGVDRGENIPAVIALTDPEGCPLSRFKDSLGNPTHILRIGESYKEKQRTIQAKKEVEQRRAGGYSRKYASKAKNLADDMVRNTARDLLYYAVTQDAMLIFENLSRGFGRQGKRTFMAERQYTRMEDWLTAKLAYEGLPSKVYLSKTLAQYTSKTCSNCGFTITSADYDRVLEKLKKTATGWMTTINGKELKVEGQITYYNRYKRQNVVKDLSVELDRLSEESVNNDISSWTKGRSGEALSLLKKRFSHRPVQEKFVCLNCGFETHADEQAALNIARSWLFLRSQEYKKYQTNKTTGNTDKRAFVETWQSFYRKKLKEVWKPAV

SEQ ID NO: 32754 - protein, 978 aa, synthetic construct
  REGION 1..978: note = engineered CasX variant
QEIKRANKIRRRLVKDSNTKKAGKTGPMKTLLVRVMTPDLRERLENLRKKPENIPQPISNTSRANLNKLLTDYTEMKKAILHVYWEEFQKDPVGLMSRVAQPASKKIDQNKLKPEMDEKGNLTTAGFACSQCGQPLFVYKLEQVSEKGKAYTNYFGRCNVAEHEKLILLAQLKPEKDSDEAVTYSLGKFGQRALDFYSIHVTKESTHPVKPLAQIAGNRYASTPVGKALSDACMGTIASFLSKYQDIIIEHQKVVKGNQKRLESLRELAGKENLEYPSVTLPPQPHTKEGVDAYNEVIARVRMWVNLNLWQKLKLSRDDAKPLLRLKGFPSFPLVERQANEVDWWDMVCNVKKLINEKKEDGKVFWQNLAGYKRQEALRPYLSSEEDRKKGKKFARYQLGDLLLHLEKKHGEDWGKVYDEAWERIDKKVEGLSKHIKLEEERRSEDAQSKAALTDWLRAKASFVIEGLKEADKDEFCRCELKLQKWYGDLRGKPFAIEAENSILDISGFSKQYNCAFIWQKDGVKKLNLYLIINYFKGGKLRFKKIKPEAFEANRFYTVINKKSGEIVPMEVNFNFDDPNLIILPLAFGKRQGREFIWNDLLSLETGSLKLANGRVIEKTLYNRRTRQDEPALFVALTFERREVLDSSNIKPMNLIGVDRGENIPAVIALTDPEGCPLSRFKDSLGNPTHILRIGESYKEKQRTIQAKKEVEQRRAGGYSRKYASKAKNLADDMVRNTARDLLYYAVTQDAMLIFENLSRGFGRQGKRTFMAERQYTRMEDWLTAKLAYEGLPSKVYLSKTLAQYTSKTCSNCGFTITSADYDRVLEKLKKTATGWMTTINGKELKVEGQITYYNRYKRQNVVKDLSVELDRLSEESVNNDISSWTKGRSGEALSLLKKRFSHRPVQEKFVCLNCGFETHADEQAALNIARSWLFLRSQEYKKYQTNKTTGNTDKRAFVETWQSFYRKKLKEVWKPAV

SEQ ID NO: 32755 - protein, 978 aa, synthetic construct
  REGION 1..978: note = engineered CasX variant
QEIKRANKIRRRLVKDSNTKKAGKTGPMKTLLVRVMTPDLRERLENLRKKPENIPQPISNTSRANLNKLLTDYTEMKKAILHVYWEEFQKDPVGLMSRVAQPASKKIDQNKLKPEMDEKGNLTTAGFACSQCGQPLFVYKLEQVSEKGKAYTNYFGRCNVAEHEKLILLAQLKPEKDSDEAVTYSLGKFGQRALDFYSIHVTKESTHPVKPLAQIAGNRYASAPVGKALSDACMGTIASFLSKYQDIIIEHQKVVKGNQKRLESLRELAGKENLEYPSVTLPPQPHTKEGVDAYNEVIARVRMWVNLNLWQKLKLSRDDAKPLLRLKGFPSFPLVERQANEVDWWDMVCNVKKLINEKKEDGKVFWQNLAGYKRQEALRPYLSSEEDRKKGKKFARYQLGDLLLHLEKKHGEDWGKVYDEAWERIDKKVEGLSKHIKLEEERRSEDAQSKAALTDWLRAKASFVIEGLKEADKDEFCRCELKLQKWYGDLRGKPFAIEAENSILDISGFSKQYNCAFIWQKDGVKKLNLYLIINYFKGGKLRFKKIKPEAFEANRFYTVINKKSGEIVPMEVNFNFDDPNLIILPLAFGKRQGREFIWNDLLSLETGSLKLANGRVIEKTLYNRRTRQDEPALFVALTFERREVLDSSNIKPMNLIGVDRGENIPAVIALTDPEGCPLSRFKDSLGNPTHILRIGESYKEKQRTIQAKKEVEQRRAGGYSRKYASKAKNLADDMVRNTARDLLYYAVTQDAMLIFENLSRGFGRQGKRTFMAERQYTRMEDWLTAKLAYEGLPSKVYLSKTLAQYTSKTCSNCGFTITSADYDRVLEKLKKTATGWMTTINGKELKVEGQITYYNRYKRQNVVKDLSVELDRLSEESVNNDISSWTKGRSGEALSLLKKRFSHRPVQEKFVCLNCGFETHADEQAALNIARSWLFLRSQEYKKYQTNKTTGNTDKRAFVETWQSFYRKKLKEVWKPAV

SEQ ID NO: 32756 - protein, 978 aa, synthetic construct
  REGION 1..978: note = engineered CasX variant
QEIKRANKIRRRLVKDSNTKKAGKTGPMKTLLVRVMTPDLRERLENLRKKPENIPQPISNTSRANLNKLLTDYTEMKKAILHVYWEEFQKDPVGLMSRVAQPASKKIDQNKLKPEMDEKGNLTTAGFACSQCGQPLFVYKLEQVSEKGKAYTNYFGRCNVAEHEKLILLAQLKPEKDSDEAVTYSLGKFGQRALDFYSIHVTKESTHPVKPLAQIAGNRYASVPVGKALSDACMGTIASFLSKYQDIIIEHQKVVKGNQKRLESLRELAGKENLEYPSVTLPPQPHTKEGVDAYNEVIARVRMWVNLNLWQKLKLSRDDAKPLLRLKGFPSFPLVERQANEVDWWDMVCNVKKLINEKKEDGKVFWQNLAGYKRQEALRPYLSSEEDRKKGKKFARYQLGDLLLHLEKKHGEDWGKVYDEAWERIDKKVEGLSKHIKLEEERRSEDAQSKAALTDWLRAKASFVIEGLKEADKDEFCRCELKLQKWYGDLRGKPFAIEAENSILDISGFSKQYNCAFIWQKDGVKKLNLYLIINYFKGGKLRFKKIKPEAFEANRFYTVINKKSGEIVPMEVNFNFDDPNLIILPLAFGKRQGREFIWNDLLSLETGSLKLANGRVIEKTLYNRRTRQDEPALFVALTFERREVLDSSNIKPMNLIGVDRGENIPAVIALTDPEGCPLSRFKDSLGNPTHILRIGESYKEKQRTIQAKKEVEQRRAGGYSRKYASKAKNLADDMVRNTARDLLYYAVTQDAMLIFENLSRGFGRQGKRTFMAERQYTRMEDWLTAKLAYEGLPSKVYLSKTLAQYTSKTCSNCGFTITSADYDRVLEKLKKTATGWMTTINGKELKVEGQITYYNRYKRQNVVKDLSVELDRLSEESVNNDISSWTKGRSGEALSLLKKRFSHRPVQEKFVCLNCGFETHADEQAALNIARSWLFLRSQEYKKYQTNKTTGNTDKRAFVETWQSFYRKKLKEVWKPAV

SEQ ID NO: 32757 - protein, 978 aa, synthetic construct
  REGION 1..978: note = engineered CasX variant
QEIKRANKIRRRLVKDSNTKKAGKTGPMKTLLVRVMTPDLRERLENLRKKPENIPQPISNTSRANLNKLLTDYTEMKKAILHVYWEEFQKDPVGLMSRVAQPASKKIDQNKLKPEMDEKGNLTTAGFACSQCGQPLFVYKLEQVSEKGKAYTNYFGRCNVAEHEKLIKLAQLKPEKDSDEAVTYSLGKFGQRALDFYSIHVTKESTHPVKPLAQIAGNRYASGPVGKALSDACMGTIASFLSKYQDIIIEHQKVVKGNQKRLESLRELAGKENLEYPSVTLPPQPHTKEGVDAYNEVIARVRMWVNLNLWQKLKLSRDDAKPLLRLKGFPSFPLVERQANEVDWWDMVCNVKKLINEKKEDGKVFWQNLAGYKRQEALRPYLSSEEDRKKGKKFARYQLGDLLLHLEKKHGEDWGKVYDEAWERIDKKVEGLSKHIKLEEERRSEDAQSKAALTDWLRAKASFVIEGLKEADKDEFCRCELKLQKWYGDLRGKPFAIEAENSILDISGFSKQYNCAFIWQKDGVKKLNLYLIINYFKGGKLRFKKIKPEAFEANRFYTVINKKSGEIVPMEVNFNFDDPNLIILPLAFGKRQGREFIWNDLLSLETGSLKLANGRVIEKTLYNRRTRQDEPALFVALTFERREVLDSSNIKPMNLIGVDRGENIPAVIALTDPEGCPLSRFKDSLGNPTHILRIGESYKEKQRTIQAKKEVEQRRAGGYSRKYASKAKNLADDMVRNTARDLLYYAVTQDAMLIFENLSRGFGRQGKRTFMAERQYTRMEDWLTAKLAYEGLPSKVYLSKTLAQYTSKTCSNCGFTITSADYDRVLEKLKKTATGWMTTINGKELKVEGQITYYNRYKRQNVVKDLSVELDRLSEESVNNDISSWTKGRSGEALSLLKKRFSHRPVQEKFVCLNCGFETHADEQAALNIARSWLFLRSQEYKKYQTNKTTGNTDKRAFVETWQSFYRKKLKEVWKPAV

SEQ ID NO: 32758 - protein, 977 aa, synthetic construct
  REGION 1..977: note = engineered CasX variant
QEIKRANKIRRRLVKDSNTKKAGKTGPMKTLLVRVMTPDLRERLENLRKKPENIPQPISNTSRANLNKLLTDYTEMKKAILHVYWEEFQKDPVGLMSRVAQPASKKIDQNKLKPEMDEKGNLTTAGFACSQCGQPLFVYKLEQVSEKGKAYTNYFGRCNVAEHEKLILLAQLKPEKDSDEAVTYSLGKFGQRALDFYSIHVTKESTHPVKPLAQIAGNRYASPVGKALSDACMGTIASFLSKYQDIIIEHQKVVKGNQKRLESLRELAGKENLEYPSVTLPPQPHTKEGVDAYNEVIARVRMWVNLNLWQKLKLSRDDAKPLLRLKGFPSFPLVERQANEVDWWDMVCNVKKLINEKKEDGKVFWQNLAGYKRQEALRPYLSSEEDRKKGKKFARYQLGDLLLHLEKKHGEDWGKVYDEAWERIDKKVEGLSKHIKLEEERRSEDAQSKAALTDWLRAKASFVIEGLKEADKDEFCRCELKLQKWYGDLRGKPFAIEAENSILDISGFSKQYNCAFIWQKDGVKKLNLYLIINYFKGGKLRFKKIKPEAFEANRFYTVINKKSGEIVPMEVNFNFDDPNLIILPLAFGKRQGREFIWNDLLSLETGSLKLANGRVIEKTLYNRRTRQDEPALFVALTFERREVLDSSNIKPMNLIGVDRGENIPAVIALTDPEGCPLSRFKDSLGNPTHILRIGESYKEKQRTIQAKKEVEQRRAGGYSRKYASKAKNLADDMVRNTARDLLYYAVTQDAMLIFENLSRGFGRQGKRTFMAERQYTRMEDWLTAKLAYEGLPSKVYLSKTLAQYTSKTCSNCGFTITSADYDRVLEKLKKTATGWMTTINGKELKVEGQITYYNRYKRQNVVKDLSVELDRLSEESVNNDISSWTKGRSGEALSLLKKRFSHRPVQEKFVCLNCGFETHADEQAALNIARSWLFLRSQEYKKYQTNKTTGNTDKRAFVETWQSFYRKKLKEVWKPAV

SEQ ID NO: 32759 - protein, 979 aa, synthetic construct
  REGION 1..979: note = engineered CasX variant
QEIKRANKIRRRLVKDSNTKKAGKTGPMKTLLVRVMTPDLRERLENLRKKPENIPQPISNTSRANLNKLLTDYTEMKKAILHVYWEEFQKDPVGLMSRVAQPASKKIDQNKLKPEMDEKGNLTTAGFACSQCGQPLFVYKLEQVSEKGKAYTNYFGRCNVAEHEKLILLAQLKPEKDSDEAVTYSLGKFGQRALDFYSIHVTKESTHPVKPLAQIAGNRYASYPVGKALSDACMGTIASFLSKYQDIIIEHQKVVKGNQKRLESLRELAGKENLEYPSVTLPPQPHTKEGVDAYNEVIARVRMWVNLNLWQKLKLSRDDAKPLLRLKGFPSFPLVERQANEVDWWDMVCNVKKLINEKKEDGKVFWQNLAGYKRQEALRPYLSSEEDRKKGKKFARYQLGDLLLHLEKKHGEDWGKVYDEAWERIDKKVEGLSKHIKLEEERRSEDAQSKAALTDWLRAKASFVIEGLKEADKDEFCRCELKLQKWYGDLRGKPFAIEAENSILDISGFSKQYNCAFIWQKDGVKKLNLYLIINYFKGGKLRFKKIKPEAFEANRFYTVINKKSGEIVPMEVNFNFDDPNLIILPLAFGKRQGREFIWNDLLSLETGSLKLANGRVIEKTLYNRRTRQDEPALFVALTFERREVLDSSNIKPMNLIGVDRGENIPAVIALTDPEGCPLSRFKDSLGNPTHILRIGESYKEKQRTIQAKKEVEQRRAGGYSRKYASKAKNLADDMVRNTARDLLYYAVTQDAMLIFENLSRGFGRQGKRTFMAERQYTRMEDWLTAKLAYEGPLPSKTYLSKTLAQYTSKTCSNCGFTITSADYDRVLEKLKKTATGWMTTINGKELKVEGQITYYNRYKRQNVVKDLSVELDRLSEESVNNDISSWTKGRSGEALSLLKKRFSHRPVQEKFVCLNCGFETHADEQAALNIARSWLFLRSQEYKKYQTNKTTGNTDKRAFVETWQSFYRKKLKEVWKPAV

SEQ ID NO: 32760 - protein, 979 aa, synthetic construct
  REGION 1..979: note = engineered CasX variant
QEIKRANKIRRRLVKDSNTKKAGKTGPMKTLLVRVMTPDLRERLENLRKKPENIPQPISNTSRANLNKLLTDYTEMKKAILHVYWEEFQKDPVGLMSRVAQPASKKIDQNKLKPEMDEKGNLTTAGFACSQCGQPLFVYKLEQVSEKGKAYTNYFGRCNVAEHEKLILLAQLKPEKDSDEAVTYSLGKFGQRALDFYSIHVTKESTHPVKPLAQIAGNRYASHPVGKALSDACMGTIASFLSKYQDIIIEHQKVVKGNQKRLESLRELAGKENLEYPSVTLPPQPHTKEGVDAYNEVIARVRMWVNLNLWQKLKLSRDDAKPLLRLKGFPSFPLVERQANEVDWWDMVCNVKKLINEKKEDGKVFWQNLAGYKRQEALRPYLSSEEDRKKGKKFARYQLGDLLLHLEKKHGEDWGKVYDEAWERIDKKVEGLSKHIKLEEERRSEDAQSKAALTDWLRAKASFVIEGLKEADKDEFCRCELKLQKWYGDLRGKPFAIEAENSILDISGFSKQYNCAFIWQKDGVKKLNLYLIINYFKGGKLRFKKIKPEAFEANRFYTVINKKSGEIVPMEVNFNFDDPNLIILPLAFGKRQGREFIWNDLLSLETGSLKLANGRVIEKTLYNRRTRQDEPALFVALTFERREVLDSSNIKPMNLIGVDRGENIPAVIALTDPEGCPLSRFKDSLGNPTHILRIGESYKEKQRTIQAKKEVEQRRAGGYSRKYASKAKNLADDMVRNTARDLLYYAVTQDAMLIFENLSRGFGRQGKRTFMAERQYTRMEDWLTAKLAYEGPLPSKTYLSKTLAQYTSKTCSNCGFTITSADYDRVLEKLKKTATGWMTTINGKELKVEGQITYYNRYKRQNVVKDLSVELDRLSEESVNNDISSWTKGRSGEALSLLKKRFSHRPVQEKFVCLNCGFETHADEQAALNIARSWLFLRSQEYKKYQTNKTTGNTDKRAFVETWQSFYRKKLKEVWKPAV

SEQ ID NO: 32761 - protein, 979 aa, synthetic construct
  REGION 1..979: note = engineered CasX variant
QEIKRANKIRRRLVKDSNTKKAGKTGPMKTLLVRVMTPDLRERLENLRKKPENIPQPISNTSRANLNKLLTDYTEMKKAILHVYWEEFQKDPVGLMSRVAQPASKKIDQNKLKPEMDEKGNLTTAGFACSQCGQPLFVYKLEQVSEKGKAYTNYFGRCNVAEHEKLILLAQLKPEKDSDEAVTYSLGKFGQRALDFYSIHVTKESTHPVKPLAQIAGNRYASSPVGKALSDACMGTIASFLSKYQDIIIEHQKVVKGNQKRLESLRELAGKENLEYPSVTLPPQPHTKEGVDAYNEVIARVRMWVNLNLWQKLKLSRDDAKPLLRLKGFPSFPLVERQANEVDWWDMVCNVKKLINEKKEDGKVFWQNLAGYKRQEALRPYLSSEEDRKKGKKFARYQLGDLLLHLEKKHGEDWGKVYDEAWERIDKKVEGLSKHIKLEEERRSEDAQSKAALTDWLRAKASFVIEGLKEADKDEFCRCELKLQKWYGDLRGKPFAIEAENSILDISGFSKQYNCAFIWQKDGVKKLNLYLIINYFKGGKLRFKKIKPEAFEANRFYTVINKKSGEIVPMEVNFNFDDPNLIILPLAFGKRQGREFIWNDLLSLETGSLKLANGRVIEKTLYNRRTRQDEPALFVALTFERREVLDSSNIKPMNLIGVDRGENIPAVIALTDPEGCPLSRFKDSLGNPTHILRIGESYKEKQRTIQAKKEVEQRRAGGYSRKYASKAKNLADDMVRNTARDLLYYAVTQDAMLIFENLSRGFGRQGKRTFMAERQYTRMEDWLTAKLAYEGPLPSKTYLSKTLAQYTSKTCSNCGFTITSADYDRVLEKLKKTATGWMTTINGKELKVEGQITYYNRYKRQNVVKDLSVELDRLSEESVNNDISSWTKGRSGEALSLLKKRFSHRPVQEKFVCLNCGFETHADEQAALNIARSWLFLRSQEYKKYQTNKTTGNTDKRAFVETWQSFYRKKLKEVWKPAV

SEQ ID NO: 32762 - protein, 979 aa, synthetic construct
  REGION 1..979: note = engineered CasX variant
QEIKRANKIRRRLVKDSNTKKAGKTGPMKTLLVRVMTPDLRERLENLRKKPENIPQPISNTSRANLNKLLTDYTEMKKAILHVYWEEFQKDPVGLMSRVAQPASKKIDQNKLKPEMDEKGNLTTAGFACSQCGQPLFVYKLEQVSEKGKAYTNYFGRCNVAEHEKLILLAQLKPEKDSDEAVTYSLGKFGQRALDFYSIHVTKESTHPVKPLAQIAGNRYASTPVGKALSDACMGTIASFLSKYQDIIIEHQKVVKGNQKRLESLRELAGKENLEYPSVTLPPQPHTKEGVDAYNEVIARVRMWVNLNLWQKLKLSRDDAKPLLRLKGFPSFPLVERQANEVDWWDMVCNVKKLINEKKEDGKVFWQNLAGYKRQEALRPYLSSEEDRKKGKKFARYQLGDLLLHLEKKHGEDWGKVYDEAWERIDKKVEGLSKHIKLEEERRSEDAQSKAALTDWLRAKASFVIEGLKEADKDEFCRCELKLQKWYGDLRGKPFAIEAENSILDISGFSKQYNCAFIWQKDGVKKLNLYLIINYFKGGKLRFKKIKPEAFEANRFYTVINKKSGEIVPMEVNFNFDDPNLIILPLAFGKRQGREFIWNDLLSLETGSLKLANGRVIEKTLYNRRTRQDEPALFVALTFERREVLDSSNIKPMNLIGVDRGENIPAVIALTDPEGCPLSRFKDSLGNPTHILRIGESYKEKQRTIQAKKEVEQRRAGGYSRKYASKAKNLADDMVRNTARDLLYYAVTQDAMLIFENLSRGFGRQGKRTFMAERQYTRMEDWLTAKLAYEGPLPSKTYLSKTLAQYTSKTCSNCGFTITSADYDRVLEKLKKTATGWMTTINGKELKVEGQITYYNRYKRQNVVKDLSVELDRLSEESVNNDISSWTKGRSGEALSLLKKRFSHRPVQEKFVCLNCGFETHADEQAALNIARSWLFLRSQEYKKYQTNKTTGNTDKRAFVETWQSFYRKKLKEVWKPAV

SEQ ID NO: 32763 - protein, 979 aa, synthetic construct
  REGION 1..979: note = engineered CasX variant
QEIKRANKIRRRLVKDSNTKKAGKTGPMKTLLVRVMTPDLRERLENLRKKPENIPQPISNTSRANLNKLLTDYTEMKKAILHVYWEEFQKDPVGLMSRVAQPASKKIDQNKLKPEMDEKGNLTTAGFACSQCGQPLFVYKLEQVSEKGKAYTNYFGRCNVAEHEKLILLAQLKPEKDSDEAVTYSLGKFGQRALDFYSIHVTKESTHPVKPLAQIAGNRYASAPVGKALSDACMGTIASFLSKYQDIIIEHQKVVKGNQKRLESLRELAGKENLEYPSVTLPPQPHTKEGVDAYNEVIARVRMWVNLNLWQKLKLSRDDAKPLLRLKGFPSFPLVERQANEVDWWDMVCNVKKLINEKKEDGKVFWQNLAGYKRQEALRPYLSSEEDRKKGKKFARYQLGDLLLHLEKKHGEDWGKVYDEAWERIDKKVEGLSKHIKLEEERRSEDAQSKAALTDWLRAKASFVIEGLKEADKDEFCRCELKLQKWYGDLRGKPFAIEAENSILDISGFSKQYNCAFIWQKDGVKKLNLYLIINYFKGGKLRFKKIKPEAFEANRFYTVINKKSGEIVPMEVNFNFDDPNLIILPLAFGKRQGREFIWNDLLSLETGSLKLANGRVIEKTLYNRRTRQDEPALFVALTFERREVLDSSNIKPMNLIGVDRGENIPAVIALTDPEGCPLSRFKDSLGNPTHILRIGESYKEKQRTIQAKKEVEQRRAGGYSRKYASKAKNLADDMVRNTARDLLYYAVTQDAMLIFENLSRGFGRQGKRTFMAERQYTRMEDWLTAKLAYEGPLPSKTYLSKTLAQYTSKTCSNCGFTITSADYDRVLEKLKKTATGWMTTINGKELKVEGQITYYNRYKRQNVVKDLSVELDRLSEESVNNDISSWTKGRSGEALSLLKKRFSHRPVQEKFVCLNCGFETHADEQAALNIARSWLFLRSQEYKKYQTNKTTGNTDKRAFVETWQSFYRKKLKEVWKPAV

SEQ ID NO: 32764 - protein, 979 aa, synthetic construct
  REGION 1..979: note = engineered CasX variant
QEIKRANKIRRRLVKDSNTKKAGKTGPMKTLLVRVMTPDLRERLENLRKKPENIPQPISNTSRANLNKLLTDYTEMKKAILHVYWEEFQKDPVGLMSRVAQPASKKIDQNKLKPEMDEKGNLTTAGFACSQCGQPLFVYKLEQVSEKGKAYTNYFGRCNVAEHEKLILLAQLKPEKDSDEAVTYSLGKFGQRALDFYSIHVTKESTHPVKPLAQIAGNRYASVPVGKALSDACMGTIASFLSKYQDIIIEHQKVVKGNQKRLESLRELAGKENLEYPSVTLPPQPHTKEGVDAYNEVIARVRMWVNLNLWQKLKLSRDDAKPLLRLKGFPSFPLVERQANEVDWWDMVCNVKKLINEKKEDGKVFWQNLAGYKRQEALRPYLSSEEDRKKGKKFARYQLGDLLLHLEKKHGEDWGKVYDEAWERIDKKVEGLSKHIKLEEERRSEDAQSKAALTDWLRAKASFVIEGLKEADKDEFCRCELKLQKWYGDLRGKPFAIEAENSILDISGFSKQYNCAFIWQKDGVKKLNLYLIINYFKGGKLRFKKIKPEAFEANRFYTVINKKSGEIVPMEVNFNFDDPNLIILPLAFGKRQGREFIWNDLLSLETGSLKLANGRVIEKTLYNRRTRQDEPALFVALTFERREVLDSSNIKPMNLIGVDRGENIPAVIALTDPEGCPLSRFKDSLGNPTHILRIGESYKEKQRTIQAKKEVEQRRAGGYSRKYASKAKNLADDMVRNTARDLLYYAVTQDAMLIFENLSRGFGRQGKRTFMAERQYTRMEDWLTAKLAYEGPLPSKTYLSKTLAQYTSKTCSNCGFTITSADYDRVLEKLKKTATGWMTTINGKELKVEGQITYYNRYKRQNVVKDLSVELDRLSEESVNNDISSWTKGRSGEALSLLKKRFSHRPVQEKFVCLNCGFETHADEQAALNIARSWLFLRSQEYKKYQTNKTTGNTDKRAFVETWQSFYRKKLKEVWKPAV

SEQ ID NO: 32765 - protein, 979 aa, synthetic construct
  REGION 1..979: note = engineered CasX variant
QEIKRANKIRRRLVKDSNTKKAGKTGPMKTLLVRVMTPDLRERLENLRKKPENIPQPISNTSRANLNKLLTDYTEMKKAILHVYWEEFQKDPVGLMSRVAQPASKKIDQNKLKPEMDEKGNLTTAGFACSQCGQPLFVYKLEQVSEKGKAYTNYFGRCNVAEHEKLIKLAQLKPEKDSDEAVTYSLGKFGQRALDFYSIHVTKESTHPVKPLAQIAGNRYASGPVGKALSDACMGTIASFLSKYQDIIIEHQKVVKGNQKRLESLRELAGKENLEYPSVTLPPQPHTKEGVDAYNEVIARVRMWVNLNLWQKLKLSRDDAKPLLRLKGFPSFPLVERQANEVDWWDMVCNVKKLINEKKEDGKVFWQNLAGYKRQEALRPYLSSEEDRKKGKKFARYQLGDLLLHLEKKHGEDWGKVYDEAWERIDKKVEGLSKHIKLEEERRSEDAQSKAALTDWLRAKASFVIEGLKEADKDEFCRCELKLQKWYGDLRGKPFAIEAENSILDISGFSKQYNCAFIWQKDGVKKLNLYLIINYFKGGKLRFKKIKPEAFEANRFYTVINKKSGEIVPMEVNFNFDDPNLIILPLAFGKRQGREFIWNDLLSLETGSLKLANGRVIEKTLYNRRTRQDEPALFVALTFERREVLDSSNIKPMNLIGVDRGENIPAVIALTDPEGCPLSRFKDSLGNPTHILRIGESYKEKQRTIQAKKEVEQRRAGGYSRKYASKAKNLADDMVRNTARDLLYYAVTQDAMLIFENLSRGFGRQGKRTFMAERQYTRMEDWLTAKLAYEGPLPSKTYLSKTLAQYTSKTCSNCGFTITSADYDRVLEKLKKTATGWMTTINGKELKVEGQITYYNRYKRQNVVKDLSVELDRLSEESVNNDISSWTKGRSGEALSLLKKRFSHRPVQEKFVCLNCGFETHADEQAALNIARSWLFLRSQEYKKYQTNKTTGNTDKRAFVETWQSFYRKKLKEVWKPAV

SEQ ID NO: 32766 - protein, 978 aa, synthetic construct
  REGION 1..978: note = engineered CasX variant
QEIKRANKIRRRLVKDSNTKKAGKTGPMKTLLVRVMTPDLRERLENLRKKPENIPQPISNTSRANLNKLLTDYTEMKKAILHVYWEEFQKDPVGLMSRVAQPASKKIDQNKLKPEMDEKGNLTTAGFACSQCGQPLFVYKLEQVSEKGKAYTNYFGRCNVAEHEKLILLAQLKPEKDSDEAVTYSLGKFGQRALDFYSIHVTKESTHPVKPLAQIAGNRYASPVGKALSDACMGTIASFLSKYQDIIIEHQKVVKGNQKRLESLRELAGKENLEYPSVTLPPQPHTKEGVDAYNEVIARVRMWVNLNLWQKLKLSRDDAKPLLRLKGFPSFPLVERQANEVDWWDMVCNVKKLINEKKEDGKVFWQNLAGYKRQEALRPYLSSEEDRKKGKKFARYQLGDLLLHLEKKHGEDWGKVYDEAWERIDKKVEGLSKHIKLEEERRSEDAQSKAALTDWLRAKASFVIEGLKEADKDEFCRCELKLQKWYGDLRGKPFAIEAENSILDISGFSKQYNCAFIWQKDGVKKLNLYLIINYFKGGKLRFKKIKPEAFEANRFYTVINKKSGEIVPMEVNFNFDDPNLIILPLAFGKRQGREFIWNDLLSLETGSLKLANGRVIEKTLYNRRTRQDEPALFVALTFERREVLDSSNIKPMNLIGVDRGENIPAVIALTDPEGCPLSRFKDSLGNPTHILRIGESYKEKQRTIQAKKEVEQRRAGGYSRKYASKAKNLADDMVRNTARDLLYYAVTQDAMLIFENLSRGFGRQGKRTFMAERQYTRMEDWLTAKLAYEGPLPSKTYLSKTLAQYTSKTCSNCGFTITSADYDRVLEKLKKTATGWMTTINGKELKVEGQITYYNRYKRQNVVKDLSVELDRLSEESVNNDISSWTKGRSGEALSLLKKRFSHRPVQEKFVCLNCGFETHADEQAALNIARSWLFLRSQEYKKYQTNKTTGNTDKRAFVETWQSFYRKKLKEVWKPAV

SEQ ID NO: 32767 - protein, 979 aa, synthetic construct
  REGION 1..979: note = engineered CasX variant
QEIKRANKIRRRLVKDSNTKKAGKTGPMKTLLVRVMTPDLRERLENLRKKPENIPQPISNTSRANLNKLLTDYTEMKKAILHVYWEEFQKDPVGLMSRVAQPASKKIDQNKLKPEMDEKGNLTTAGFACSQCGQPLFVYKLEQVSEKGKAYTNYFGRCNVAEHEKLILLAQLKPEKDSDEAVTYSLGKFGQRALDFYSIHVTKESTHPVKPLAQIAGNRYASYPVGKALSDACMGTIASFLSKYQDIIIEHQKVVKGNQKRLESLRELAGKENLEYPSVTLPPQPHTKEGVDAYNEVIARVRMWVNLNLWQKLKLSRDDAKPLLRLKGFPSFPLVERQANEVDWWDMVCNVKKLINEKKEDGKVFWQNLAGYKRQEALRPYLSSEEDVRKKGKKFARYQLGDLLLHLEKKHGEDWGKVYDEAWERIDKKVEGLSKHIKLEEERRSEDAQSKAALTDWLRAKASFVIEGLKEADKDEFCRCELKLQKWYGDLRGKPFAIEAENSILDISGFSKQYNCAFIWQKDGVKKLNLYLIINYFKGGKLRFKKIKPEAFEANRFYTVINKKSGEIVPMEVNFNFDDPNLIILPLAFGKRQGREFIWNDLLSLETGSLKLANGRVIEKTLYNRRTRQDEPALFVALTFERREVLDSSNIKPMNLIGVDRGENIPAVIALTDPEGCPLSRFKDSLGNPTHILRIGESYKEKQRTIQAKKEVEQRRAGGYSRKYASKAKNLADDMVRNTARDLLYYAVTQDAMLIFENLSRGFGRQGKRTFMAERQYTRMEDWLTAKLAYEGLPSKTYLSKTLAQYTSKTCSNCGFTITSADYDRVLEKLKKTATGWMTTINGKELKVEGQITYYNRYKRQNVVKDLSVELDRLSEESVNNDISSWTKGRSGEALSLLKKRFSHRPVQEKFVCLNCGFETHADEQAALNIARSWLFLRSQEYKKYQTNKTTGNTDKRAFVETWQSFYRKKLKEVWKPAV

SEQ ID NO: 32768 - protein, 979 aa, synthetic construct
  REGION 1..979: note = engineered CasX variant
QEIKRANKIRRRLVKDSNTKKAGKTGPMKTLLVRVMTPDLRERLENLRKKPENIPQPISNTSRANLNKLLTDYTEMKKAILHVYWEEFQKDPVGLMSRVAQPASKKIDQNKLKPEMDEKGNLTTAGFACSQCGQPLFVYKLEQVSEKGKAYTNYFGRCNVAEHEKLILLAQLKPEKDSDEAVTYSLGKFGQRALDFYSIHVTKESTHPVKPLAQIAGNRYASHPVGKALSDACMGTIASFLSKYQDIIIEHQKVVKGNQKRLESLRELAGKENLEYPSVTLPPQPHTKEGVDAYNEVIARVRMWVNLNLWQKLKLSRDDAKPLLRLKGFPSFPLVERQANEVDWWDMVCNVKKLINEKKEDGKVFWQNLAGYKRQEALRPYLSSEEDVRKKGKKFARYQLGDLLLHLEKKHGEDWGKVYDEAWERIDKKVEGLSKHIKLEEERRSEDAQSKAALTDWLRAKASFVIEGLKEADKDEFCRCELKLQKWYGDLRGKPFAIEAENSILDISGFSKQYNCAFIWQKDGVKKLNLYLIINYFKGGKLRFKKIKPEAFEANRFYTVINKKSGEIVPMEVNFNFDDPNLIILPLAFGKRQGREFIWNDLLSLETGSLKLANGRVIEKTLYNRRTRQDEPALFVALTFERREVLDSSNIKPMNLIGVDRGENIPAVIALTDPEGCPLSRFKDSLGNPTHILRIGESYKEKQRTIQAKKEVEQRRAGGYSRKYASKAKNLADDMVRNTARDLLYYAVTQDAMLIFENLSRGFGRQGKRTFMAERQYTRMEDWLTAKLAYEGLPSKTYLSKTLAQYTSKTCSNCGFTITSADYDRVLEKLKKTATGWMTTINGKELKVEGQITYYNRYKRQNVVKDLSVELDRLSEESVNNDISSWTKGRSGEALSLLKKRFSHRPVQEKFVCLNCGFETHADEQAALNIARSWLFLRSQEYKKYQTNKTTGNTDKRAFVETWQSFYRKKLKEVWKPAV

SEQ ID NO: 32769 - protein, 979 aa, synthetic construct
  REGION 1..979: note = engineered CasX variant
QEIKRANKIRRRLVKDSNTKKAGKTGPMKTLLVRVMTPDLRERLENLRKKPENIPQPISNTSRANLNKLLTDYTEMKKAILHVYWEEFQKDPVGLMSRVAQPASKKIDQNKLKPEMDEKGNLTTAGFACSQCGQPLFVYKLEQVSEKGKAYTNYFGRCNVAEHEKLILLAQLKPEKDSDEAVTYSLGKFGQRALDFYSIHVTKESTHPVKPLAQIAGNRYASSPVGKALSDACMGTIASFLSKYQDIIIEHQKVVKGNQKRLESLRELAGKENLEYPSVTLPPQPHTKEGVDAYNEVIARVRMWVNLNLWQKLKLSRDDAKPLLRLKGFPSFPLVERQANEVDWWDMVCNVKKLINEKKEDGKVFWQNLAGYKRQEALRPYLSSEEDVRKKGKKFARYQLGDLLLHLEKKHGEDWGKVYDEAWERIDKKVEGLSKHIKLEEERRSEDAQSKAALTDWLRAKASFVIEGLKEADKDEFCRCELKLQKWYGDLRGKPFAIEAENSILDISGFSKQYNCAFIWQKDGVKKLNLYLIINYFKGGKLRFKKIKPEAFEANRFYTVINKKSGEIVPMEVNFNFDDPNLIILPLAFGKRQGREFIWNDLLSLETGSLKLANGRVIEKTLYNRRTRQDEPALFVALTFERREVLDSSNIKPMNLIGVDRGENIPAVIALTDPEGCPLSRFKDSLGNPTHILRIGESYKEKQRTIQAKKEVEQRRAGGYSRKYASKAKNLADDMVRNTARDLLYYAVTQDAMLIFENLSRGFGRQGKRTFMAERQYTRMEDWLTAKLAYEGLPSKTYLSKTLAQYTSKTCSNCGFTITSADYDRVLEKLKKTATGWMTTINGKELKVEGQITYYNRYKRQNVVKDLSVELDRLSEESVNNDISSWTKGRSGEALSLLKKRFSHRPVQEKFVCLNCGFETHADEQAALNIARSWLFLRSQEYKKYQTNKTTGNTDKRAFVETWQSFYRKKLKEVWKPAV

SEQ ID NO: 32770 - protein, 979 aa, synthetic construct
  REGION 1..979: note = engineered CasX variant
QEIKRANKIRRRLVKDSNTKKAGKTGPMKTLLVRVMTPDLRERLENLRKKPENIPQPISNTSRANLNKLLTDYTEMKKAILHVYWEEFQKDPVGLMSRVAQPASKKIDQNKLKPEMDEKGNLTTAGFACSQCGQPLFVYKLEQVSEKGKAYTNYFGRCNVAEHEKLILLAQLKPEKDSDEAVTYSLGKFGQRALDFYSIHVTKESTHPVKPLAQIAGNRYASTPVGKALSDACMGTIASFLSKYQDIIIEHQKVVKGNQKRLESLRELAGKENLEYPSVTLPPQPHTKEGVDAYNEVIARVRMWVNLNLWQKLKLSRDDAKPLLRLKGFPSFPLVERQANEVDWWDMVCNVKKLINEKKEDGKVFWQNLAGYKRQEALRPYLSSEEDVRKKGKKFARYQLGDLLLHLEKKHGEDWGKVYDEAWERIDKKVEGLSKHIKLEEERRSEDAQSKAALTDWLRAKASFVIEGLKEADKDEFCRCELKLQKWYGDLRGKPFAIEAENSILDISGFSKQYNCAFIWQKDGVKKLNLYLIINYFKGGKLRFKKIKPEAFEANRFYTVINKKSGEIVPMEVNFNFDDPNLIILPLAFGKRQGREFIWNDLLSLETGSLKLANGRVIEKTLYNRRTRQDEPALFVALTFERREVLDSSNIKPMNLIGVDRGENIPAVIALTDPEGCPLSRFKDSLGNPTHILRIGESYKEKQRTIQAKKEVEQRRAGGYSRKYASKAKNLADDMVRNTARDLLYYAVTQDAMLIFENLSRGFGRQGKRTFMAERQYTRMEDWLTAKLAYEGLPSKTYLSKTLAQYTSKTCSNCGFTITSADYDRVLEKLKKTATGWMTTINGKELKVEGQITYYNRYKRQNVVKDLSVELDRLSEESVNNDISSWTKGRSGEALSLLKKRFSHRPVQEKFVCLNCGFETHADEQAALNIARSWLFLRSQEYKKYQTNKTTGNTDKRAFVETWQSFYRKKLKEVWKPAV

SEQ ID NO: 32771 - protein, 979 aa, synthetic construct
  REGION 1..979: note = engineered CasX variant
QEIKRANKIRRRLVKDSNTKKAGKTGPMKTLLVRVMTPDLRERLENLRKKPENIPQPISNTSRANLNKLLTDYTEMKKAILHVYWEEFQKDPVGLMSRVAQPASKKIDQNKLKPEMDEKGNLTTAGFACSQCGQPLFVYKLEQVSEKGKAYTNYFGRCNVAEHEKLILLAQLKPEKDSDEAVTYSLGKFGQRALDFYSIHVTKESTHPVKPLAQIAGNRYASAPVGKALSDACMGTIASFLSKYQDIIIEHQKVVKGNQKRLESLRELAGKENLEYPSVTLPPQPHTKEGVDAYNEVIARVRMWVNLNLWQKLKLSRDDAKPLLRLKGFPSFPLVERQANEVDWWDMVCNVKKLINEKKEDGKVFWQNLAGYKRQEALRPYLSSEEDVRKKGKKFARYQLGDLLLHLEKKHGEDWGKVYDEAWERIDKKVEGLSKHIKLEEERRSEDAQSKAALTDWLRAKASFVIEGLKEADKDEFCRCELKLQKWYGDLRGKPFAIEAENSILDISGFSKQYNCAFIWQKDGVKKLNLYLIINYFKGGKLRFKKIKPEAFEANRFYTVINKKSGEIVPMEVNFNFDDPNLIILPLAFGKRQGREFIWNDLLSLETGSLKLANGRVIEKTLYNRRTRQDEPALFVALTFERREVLDSSNIKPMNLIGVDRGENIPAVIALTDPEGCPLSRFKDSLGNPTHILRIGESYKEKQRTIQAKKEVEQRRAGGYSRKYASKAKNLADDMVRNTARDLLYYAVTQDAMLIFENLSRGFGRQGKRTFMAERQYTRMEDWLTAKLAYEGLPSKTYLSKTLAQYTSKTCSNCGFTITSADYDRVLEKLKKTATGWMTTINGKELKVEGQITYYNRYKRQNVVKDLSVELDRLSEESVNNDISSWTKGRSGEALSLLKKRFSHRPVQEKFVCLNCGFETHADEQAALNIARSWLFLRSQEYKKYQTNKTTGNTDKRAFVETWQSFYRKKLKEVWKPAV

SEQ ID NO: 32772 - protein, 979 aa, synthetic construct
  REGION 1..979: note = engineered CasX variant
QEIKRANKIRRRLVKDSNTKKAGKTGPMKTLLVRVMTPDLRERLENLRKKPENIPQPISNTSRANLNKLLTDYTEMKKAILHVYWEEFQKDPVGLMSRVAQPASKKIDQNKLKPEMDEKGNLTTAGFACSQCGQPLFVYKLEQVSEKGKAYTNYFGRCNVAEHEKLILLAQLKPEKDSDEAVTYSLGKFGQRALDFYSIHVTKESTHPVKPLAQIAGNRYASVPVGKALSDACMGTIASFLSKYQDIIIEHQKVVKGNQKRLESLRELAGKENLEYPSVTLPPQPHTKEGVDAYNEVIARVRMWVNLNLWQKLKLSRDDAKPLLRLKGFPSFPLVERQANEVDWWDMVCNVKKLINEKKEDGKVFWQNLAGYKRQEALRPYLSSEEDVRKKGKKFARYQLGDLLLHLEKKHGEDWGKVYDEAWERIDKKVEGLSKHIKLEEERRSEDAQSKAALTDWLRAKASFVIEGLKEADKDEFCRCELKLQKWYGDLRGKPFAIEAENSILDISGFSKQYNCAFIWQKDGVKKLNLYLIINYFKGGKLRFKKIKPEAFEANRFYTVINKKSGEIVPMEVNFNFDDPNLIILPLAFGKRQGREFIWNDLLSLETGSLKLANGRVIEKTLYNRRTRQDEPALFVALTFERREVLDSSNIKPMNLIGVDRGENIPAVIALTDPEGCPLSRFKDSLGNPTHILRIGESYKEKQRTIQAKKEVEQRRAGGYSRKYASKAKNLADDMVRNTARDLLYYAVTQDAMLIFENLSRGFGRQGKRTFMAERQYTRMEDWLTAKLAYEGLPSKTYLSKTLAQYTSKTCSNCGFTITSADYDRVLEKLKKTATGWMTTINGKELKVEGQITYYNRYKRQNVVKDLSVELDRLSEESVNNDISSWTKGRSGEALSLLKKRFSHRPVQEKFVCLNCGFETHADEQAALNIARSWLFLRSQEYKKYQTNKTTGNTDKRAFVETWQSFYRKKLKEVWKPAV

SEQ ID NO: 32773 - protein, 979 aa, synthetic construct
  REGION 1..979: note = engineered CasX variant
QEIKRANKIRRRLVKDSNTKKAGKTGPMKTLLVRVMTPDLRERLENLRKKPENIPQPISNTSRANLNKLLTDYTEMKKAILHVYWEEFQKDPVGLMSRVAQPASKKIDQNKLKPEMDEKGNLTTAGFACSQCGQPLFVYKLEQVSEKGKAYTNYFGRCNVAEHEKLIKLAQLKPEKDSDEAVTYSLGKFGQRALDFYSIHVTKESTHPVKPLAQIAGNRYASGPVGKALSDACMGTIASFLSKYQDIIIEHQKVVKGNQKRLESLRELAGKENLEYPSVTLPPQPHTKEGVDAYNEVIARVRMWVNLNLWQKLKLSRDDAKPLLRLKGFPSFPLVERQANEVDWWDMVCNVKKLINEKKEDGKVFWQNLAGYKRQEALRPYLSSEEDVRKKGKKFARYQLGDLLLHLEKKHGEDWGKVYDEAWERIDKKVEGLSKHIKLEEERRSEDAQSKAALTDWLRAKASFVIEGLKEADKDEFCRCELKLQKWYGDLRGKPFAIEAENSILDISGFSKQYNCAFIWQKDGVKKLNLYLIINYFKGGKLRFKKIKPEAFEANRFYTVINKKSGEIVPMEVNFNFDDPNLIILPLAFGKRQGREFIWNDLLSLETGSLKLANGRVIEKTLYNRRTRQDEPALFVALTFERREVLDSSNIKPMNLIGVDRGENIPAVIALTDPEGCPLSRFKDSLGNPTHILRIGESYKEKQRTIQAKKEVEQRRAGGYSRKYASKAKNLADDMVRNTARDLLYYAVTQDAMLIFENLSRGFGRQGKRTFMAERQYTRMEDWLTAKLAYEGLPSKTYLSKTLAQYTSKTCSNCGFTITSADYDRVLEKLKKTATGWMTTINGKELKVEGQITYYNRYKRQNVVKDLSVELDRLSEESVNNDISSWTKGRSGEALSLLKKRFSHRPVQEKFVCLNCGFETHADEQAALNIARSWLFLRSQEYKKYQTNKTTGNTDKRAFVETWQSFYRKKLKEVWKPAV

SEQ ID NO: 32774 - protein, 978 aa, synthetic construct
  REGION 1..978: note = engineered CasX variant
QEIKRANKIRRRLVKDSNTKKAGKTGPMKTLLVRVMTPDLRERLENLRKKPENIPQPISNTSRANLNKLLTDYTEMKKAILHVYWEEFQKDPVGLMSRVAQPASKKIDQNKLKPEMDEKGNLTTAGFACSQCGQPLFVYKLEQVSEKGKAYTNYFGRCNVAEHEKLILLAQLKPEKDSDEAVTYSLGKFGQRALDFYSIHVTKESTHPVKPLAQIAGNRYASPVGKALSDACMGTIASFLSKYQDIIIEHQKVVKGNQKRLESLRELAGKENLEYPSVTLPPQPHTKEGVDAYNEVIARVRMWVNLNLWQKLKLSRDDAKPLLRLKGFPSFPLVERQANEVDWWDMVCNVKKLINEKKEDGKVFWQNLAGYKRQEALRPYLSSEEDVRKKGKKFARYQLGDLLLHLEKKHGEDWGKVYDEAWERIDKKVEGLSKHIKLEEERRSEDAQSKAALTDWLRAKASFVIEGLKEADKDEFCRCELKLQKWYGDLRGKPFAIEAENSILDISGFSKQYNCAFIWQKDGVKKLNLYLIINYFKGGKLRFKKIKPEAFEANRFYTVINKKSGEIVPMEVNFNFDDPNLIILPLAFGKRQGREFIWNDLLSLETGSLKLANGRVIEKTLYNRRTRQDEPALFVALTFERREVLDSSNIKPMNLIGVDRGENIPAVIALTDPEGCPLSRFKDSLGNPTHILRIGESYKEKQRTIQAKKEVEQRRAGGYSRKYASKAKNLADDMVRNTARDLLYYAVTQDAMLIFENLSRGFGRQGKRTFMAERQYTRMEDWLTAKLAYEGLPSKTYLSKTLAQYTSKTCSNCGFTITSADYDRVLEKLKKTATGWMTTINGKELKVEGQITYYNRYKRQNVVKDLSVELDRLSEESVNNDISSWTKGRSGEALSLLKKRFSHRPVQEKFVCLNCGFETHADEQAALNIARSWLFLRSQEYKKYQTNKTTGNTDKRAFVETWQSFYRKKLKEVWKPAV

SEQ ID NO: 32775 - protein, 978 aa, synthetic construct
  REGION 1..978: note = engineered CasX variant
QEIKRANKIRRRLVKDSNTKKAGKTGPMKTLLVRVMTPDLRERLENLRKKPENIPQPISNTSRANLNKLLTDYTEMKKAILHVYWEEFQKDPVGLMSRVAQPASKKIDQNKLKPEMDEKGNLTTAGFACSQCGQPLFVYKLEQVSEKGKAYTNYFGRCNVAEHEKLILLAQLKPEKDSDEAVTYSLGKFGQRALDFYSIHVTKESTHPVKPLAQIAGNRYASYPVGKALSDACMGTIASFLSKYQDIIIEHQKVVKGNQKRLESLRELAGKENLEYPSVTLPPQPHTKEGVDAYNEVIARVRMWVNLNLWQKLKLSRDDAKPLLRLKGFPSFPLVERQANEVDWWDMVCNVKKLINEKKEDGKVFWQNLAGYKRQEALRPYLSSEEDRKKGKKFARYQLGDLLLHLEKKHGEDWGKVYDEAWERIDKKVEGLSKHIKLEEERRSEDAQSKAALTDWLRAKASFVIEGLKEADKDEFCRCELKLQKWYGDLRGKPFAIEAENSILDISGFSKQYNCAFIWQKDGVKKLNLYLIINYFKGGKLRFKKIKPEAFEANRFYTVINKKSGEIVPMEVNFNFDDPNLIILPLAFGKRQGREFIWNDLLSLETGSLKLANGRVIEKTLYNRRTRQDEPALFVALTFERREVLDSSNIKPMNLIGVDRGENIPAVIALTDPEGCPLSRFKDSLGNPTHILRIGESYKEKQRTIQAKKEVEQRRAGGYSRKYASKAKNLADDMVRNTARDLLYYAVTQDAMLIFENLSRGFGRQGKRTFMAERQYTRMEDWLTAKLAYEGLPSKTYLSKTLAQYTSKTCSNCGFTITSADYDRMLEKLKKTATGWMTTINGKELKVEGQITYYNRYKRQNVVKDLSVELDRLSEESVNNDISSWTKGRSGEALSLLKKRFSHRPVQEKFVCLNCGFETHADEQAALNIARSWLFLRSQEYKKYQTNKTTGNTDKRAFVETWQSFYRKKLKEVWKPAV

SEQ ID NO: 32776 - protein, 978 aa, synthetic construct
  REGION 1..978: note = engineered CasX variant
QEIKRANKIRRRLVKDSNTKKAGKTGPMKTLLVRVMTPDLRERLENLRKKPENIPQPISNTSRANLNKLLTDYTEMKKAILHVYWEEFQKDPVGLMSRVAQPASKKIDQNKLKPEMDEKGNLTTAGFACSQCGQPLFVYKLEQVSEKGKAYTNYFGRCNVAEHEKLILLAQLKPEKDSDEAVTYSLGKFGQRALDFYSIHVTKESTHPVKPLAQIAGNRYASHPVGKALSDACMGTIASFLSKYQDIIIEHQKVVKGNQKRLESLRELAGKENLEYPSVTLPPQPHTKEGVDAYNEVIARVRMWVNLNLWQKLKLSRDDAKPLLRLKGFPSFPLVERQANEVDWWDMVCNVKKLINEKKEDGKVFWQNLAGYKRQEALRPYLSSEEDRKKGKKFARYQLGDLLLHLEKKHGEDWGKVYDEAWERIDKKVEGLSKHIKLEEERRSEDAQSKAALTDWLRAKASFVIEGLKEADKDEFCRCELKLQKWYGDLRGKPFAIEAENSILDISGFSKQYNCAFIWQKDGVKKLNLYLIINYFKGGKLRFKKIKPEAFEANRFYTVINKKSGEIVPMEVNFNFDDPNLIILPLAFGKRQGREFIWNDLLSLETGSLKLANGRVIEKTLYNRRTRQDEPALFVALTFERREVLDSSNIKPMNLIGVDRGENIPAVIALTDPEGCPLSRFKDSLGNPTHILRIGESYKEKQRTIQAKKEVEQRRAGGYSRKYASKAKNLADDMVRNTARDLLYYAVTQDAMLIFENLSRGFGRQGKRTFMAERQYTRMEDWLTAKLAYEGLPSKTYLSKTLAQYTSKTCSNCGFTITSADYDRMLEKLKKTATGWMTTINGKELKVEGQITYYNRYKRQNVVKDLSVELDRLSEESVNNDISSWTKGRSGEALSLLKKRFSHRPVQEKFVCLNCGFETHADEQAALNIARSWLFLRSQEYKKYQTNKTTGNTDKRAFVETWQSFYRKKLKEVWKPAV

SEQ ID NO: 32777 - protein, 978 aa, synthetic construct
  REGION 1..978: note = engineered CasX variant
QEIKRANKIRRRLVKDSNTKKAGKTGPMKTLLVRVMTPDLRERLENLRKKPENIPQPISNTSRANLNKLLTDYTEMKKAILHVYWEEFQKDPVGLMSRVAQPASKKIDQNKLKPEMDEKGNLTTAGFACSQCGQPLFVYKLEQVSEKGKAYTNYFGRCNVAEHEKLILLAQLKPEKDSDEAVTYSLGKFGQRALDFYSIHVTKESTHPVKPLAQIAGNRYASSPVGKALSDACMGTIASFLSKYQDIIIEHQKVVKGNQKRLESLRELAGKENLEYPSVTLPPQPHTKEGVDAYNEVIARVRMWVNLNLWQKLKLSRDDAKPLLRLKGFPSFPLVERQANEVDWWDMVCNVKKLINEKKEDGKVFWQNLAGYKRQEALRPYLSSEEDRKKGKKFARYQLGDLLLHLEKKHGEDWGKVYDEAWERIDKKVEGLSKHIKLEEERRSEDAQSKAALTDWLRAKASFVIEGLKEADKDEFCRCELKLQKWYGDLRGKPFAIEAENSILDISGFSKQYNCAFIWQKDGVKKLNLYLIINYFKGGKLRFKKIKPEAFEANRFYTVINKKSGEIVPMEVNFNFDDPNLIILPLAFGKRQGREFIWNDLLSLETGSLKLANGRVIEKTLYNRRTRQDEPALFVALTFERREVLDSSNIKPMNLIGVDRGENIPAVIALTDPEGCPLSRFKDSLGNPTHILRIGESYKEKQRTIQAKKEVEQRRAGGYSRKYASKAKNLADDMVRNTARDLLYYAVTQDAMLIFENLSRGFGRQGKRTFMAERQYTRMEDWLTAKLAYEGLPSKTYLSKTLAQYTSKTCSNCGFTITSADYDRMLEKLKKTATGWMTTINGKELKVEGQITYYNRYKRQNVVKDLSVELDRLSEESVNNDISSWTKGRSGEALSLLKKRFSHRPVQEKFVCLNCGFETHADEQAALNIARSWLFLRSQEYKKYQTNKTTGNTDKRAFVETWQSFYRKKLKEVWKPAV

SEQ ID NO: 32778 - protein, 978 aa, synthetic construct
  REGION 1..978: note = engineered CasX variant
QEIKRANKIRRRLVKDSNTKKAGKTGPMKTLLVRVMTPDLRERLENLRKKPENIPQPISNTSRANLNKLLTDYTEMKKAILHVYWEEFQKDPVGLMSRVAQPASKKIDQNKLKPEMDEKGNLTTAGFACSQCGQPLFVYKLEQVSEKGKAYTNYFGRCNVAEHEKLILLAQLKPEKDSDEAVTYSLGKFGQRALDFYSIHVTKESTHPVKPLAQIAGNRYASTPVGKALSDACMGTIASFLSKYQDIIIEHQKVVKGNQKRLESLRELAGKENLEYPSVTLPPQPHTKEGVDAYNEVIARVRMWVNLNLWQKLKLSRDDAKPLLRLKGFPSFPLVERQANEVDWWDMVCNVKKLINEKKEDGKVFWQNLAGYKRQEALRPYLSSEEDRKKGKKFARYQLGDLLLHLEKKHGEDWGKVYDEAWERIDKKVEGLSKHIKLEEERRSEDAQSKAALTDWLRAKASFVIEGLKEADKDEFCRCELKLQKWYGDLRGKPFAIEAENSILDISGFSKQYNCAFIWQKDGVKKLNLYLIINYFKGGKLRFKKIKPEAFEANRFYTVINKKSGEIVPMEVNFNFDDPNLIILPLAFGKRQGREFIWNDLLSLETGSLKLANGRVIEKTLYNRRTRQDEPALFVALTFERREVLDSSNIKPMNLIGVDRGENIPAVIALTDPEGCPLSRFKDSLGNPTHILRIGESYKEKQRTIQAKKEVEQRRAGGYSRKYASKAKNLADDMVRNTARDLLYYAVTQDAMLIFENLSRGFGRQGKRTFMAERQYTRMEDWLTAKLAYEGLPSKTYLSKTLAQYTSKTCSNCGFTITSADYDRMLEKLKKTATGWMTTINGKELKVEGQITYYNRYKRQNVVKDLSVELDRLSEESVNNDISSWTKGRSGEALSLLKKRFSHRPVQEKFVCLNCGFETHADEQAALNIARSWLFLRSQEYKKYQTNKTTGNTDKRAFVETWQSFYRKKLKEVWKPAV

SEQ ID NO: 32779 - protein, 978 aa, synthetic construct
  REGION 1..978: note = engineered CasX variant
QEIKRANKIRRRLVKDSNTKKAGKTGPMKTLLVRVMTPDLRERLENLRKKPENIPQPISNTSRANLNKLLTDYTEMKKAILHVYWEEFQKDPVGLMSRVAQPASKKIDQNKLKPEMDEKGNLTTAGFACSQCGQPLFVYKLEQVSEKGKAYTNYFGRCNVAEHEKLILLAQLKPEKDSDEAVTYSLGKFGQRALDFYSIHVTKESTHPVKPLAQIAGNRYASAPVGKALSDACMGTIASFLSKYQDIIIEHQKVVKGNQKRLESLRELAGKENLEYPSVTLPPQPHTKEGVDAYNEVIARVRMWVNLNLWQKLKLSRDDAKPLLRLKGFPSFPLVERQANEVDWWDMVCNVKKLINEKKEDGKVFWQNLAGYKRQEALRPYLSSEEDRKKGKKFARYQLGDLLLHLEKKHGEDWGKVYDEAWERIDKKVEGLSKHIKLEEERRSEDAQSKAALTDWLRAKASFVIEGLKEADKDEFCRCELKLQKWYGDLRGKPFAIEAENSILDISGFSKQYNCAFIWQKDGVKKLNLYLIINYFKGGKLRFKKIKPEAFEANRFYTVINKKSGEIVPMEVNFNFDDPNLIILPLAFGKRQGREFIWNDLLSLETGSLKLANGRVIEKTLYNRRTRQDEPALFVALTFERREVLDSSNIKPMNLIGVDRGENIPAVIALTDPEGCPLSRFKDSLGNPTHILRIGESYKEKQRTIQAKKEVEQRRAGGYSRKYASKAKNLADDMVRNTARDLLYYAVTQDAMLIFENLSRGFGRQGKRTFMAERQYTRMEDWLTAKLAYEGLPSKTYLSKTLAQYTSKTCSNCGFTITSADYDRMLEKLKKTATGWMTTINGKELKVEGQITYYNRYKRQNVVKDLSVELDRLSEESVNNDISSWTKGRSGEALSLLKKRFSHRPVQEKFVCLNCGFETHADEQAALNIARSWLFLRSQEYKKYQTNKTTGNTDKRAFVETWQSFYRKKLKEVWKPAV

SEQ ID NO: 32780 - protein, 978 aa, synthetic construct
  REGION 1..978: note = engineered CasX variant
QEIKRANKIRRRLVKDSNTKKAGKTGPMKTLLVRVMTPDLRERLENLRKKPENIPQPISNTSRANLNKLLTDYTEMKKAILHVYWEEFQKDPVGLMSRVAQPASKKIDQNKLKPEMDEKGNLTTAGFACSQCGQPLFVYKLEQVSEKGKAYTNYFGRCNVAEHEKLILLAQLKPEKDSDEAVTYSLGKFGQRALDFYSIHVTKESTHPVKPLAQIAGNRYASVPVGKALSDACMGTIASFLSKYQDIIIEHQKVVKGNQKRLESLRELAGKENLEYPSVTLPPQPHTKEGVDAYNEVIARVRMWVNLNLWQKLKLSRDDAKPLLRLKGFPSFPLVERQANEVDWWDMVCNVKKLINEKKEDGKVFWQNLAGYKRQEALRPYLSSEEDRKKGKKFARYQLGDLLLHLEKKHGEDWGKVYDEAWERIDKKVEGLSKHIKLEEERRSEDAQSKAALTDWLRAKASFVIEGLKEADKDEFCRCELKLQKWYGDLRGKPFAIEAENSILDISGFSKQYNCAFIWQKDGVKKLNLYLIINYFKGGKLRFKKIKPEAFEANRFYTVINKKSGEIVPMEVNFNFDDPNLIILPLAFGKRQGREFIWNDLLSLETGSLKLANGRVIEKTLYNRRTRQDEPALFVALTFERREVLDSSNIKPMNLIGVDRGENIPAVIALTDPEGCPLSRFKDSLGNPTHILRIGESYKEKQRTIQAKKEVEQRRAGGYSRKYASKAKNLADDMVRNTARDLLYYAVTQDAMLIFENLSRGFGRQGKRTFMAERQYTRMEDWLTAKLAYEGLPSKTYLSKTLAQYTSKTCSNCGFTITSADYDRMLEKLKKTATGWMTTINGKELKVEGQITYYNRYKRQNVVKDLSVELDRLSEESVNNDISSWTKGRSGEALSLLKKRFSHRPVQEKFVCLNCGFETHADEQAALNIARSWLFLRSQEYKKYQTNKTTGNTDKRAFVETWQSFYRKKLKEVWKPAV

SEQ ID NO: 32781 - protein, 978 aa, synthetic construct
  REGION 1..978: note = engineered CasX variant
QEIKRANKIRRRLVKDSNTKKAGKTGPMKTLLVRVMTPDLRERLENLRKKPENIPQPISNTSRANLNKLLTDYTEMKKAILHVYWEEFQKDPVGLMSRVAQPASKKIDQNKLKPEMDEKGNLTTAGFACSQCGQPLFVYKLEQVSEKGKAYTNYFGRCNVAEHEKLIKLAQLKPEKDSDEAVTYSLGKFGQRALDFYSIHVTKESTHPVKPLAQIAGNRYASGPVGKALSDACMGTIASFLSKYQDIIIEHQKVVKGNQKRLESLRELAGKENLEYPSVTLPPQPHTKEGVDAYNEVIARVRMWVNLNLWQKLKLSRDDAKPLLRLKGFPSFPLVERQANEVDWWDMVCNVKKLINEKKEDGKVFWQNLAGYKRQEALRPYLSSEEDRKKGKKFARYQLGDLLLHLEKKHGEDWGKVYDEAWERIDKKVEGLSKHIKLEEERRSEDAQSKAALTDWLRAKASFVIEGLKEADKDEFCRCELKLQKWYGDLRGKPFAIEAENSILDISGFSKQYNCAFIWQKDGVKKLNLYLIINYFKGGKLRFKKIKPEAFEANRFYTVINKKSGEIVPMEVNFNFDDPNLIILPLAFGKRQGREFIWNDLLSLETGSLKLANGRVIEKTLYNRRTRQDEPALFVALTFERREVLDSSNIKPMNLIGVDRGENIPAVIALTDPEGCPLSRFKDSLGNPTHILRIGESYKEKQRTIQAKKEVEQRRAGGYSRKYASKAKNLADDMVRNTARDLLYYAVTQDAMLIFENLSRGFGRQGKRTFMAERQYTRMEDWLTAKLAYEGLPSKTYLSKTLAQYTSKTCSNCGFTITSADYDRMLEKLKKTATGWMTTINGKELKVEGQITYYNRYKRQNVVKDLSVELDRLSEESVNNDISSWTKGRSGEALSLLKKRFSHRPVQEKFVCLNCGFETHADEQAALNIARSWLFLRSQEYKKYQTNKTTGNTDKRAFVETWQSFYRKKLKEVWKPAV

SEQ ID NO: 32782 - protein, 977 aa, synthetic construct
  REGION 1..977: note = engineered CasX variant
QEIKRANKIRRRLVKDSNTKKAGKTGPMKTLLVRVMTPDLRERLENLRKKPENIPQPISNTSRANLNKLLTDYTEMKKAILHVYWEEFQKDPVGLMSRVAQPASKKIDQNKLKPEMDEKGNLTTAGFACSQCGQPLFVYKLEQVSEKGKAYTNYFGRCNVAEHEKLILLAQLKPEKDSDEAVTYSLGKFGQRALDFYSIHVTKESTHPVKPLAQIAGNRYASPVGKALSDACMGTIASFLSKYQDIIIEHQKVVKGNQKRLESLRELAGKENLEYPSVTLPPQPHTKEGVDAYNEVIARVRMWVNLNLWQKLKLSRDDAKPLLRLKGFPSFPLVERQANEVDWWDMVCNVKKLINEKKEDGKVFWQNLAGYKRQEALRPYLSSEEDRKKGKKFARYQLGDLLLHLEKKHGEDWGKVYDEAWERIDKKVEGLSKHIKLEEERRSEDAQSKAALTDWLRAKASFVIEGLKEADKDEFCRCELKLQKWYGDLRGKPFAIEAENSILDISGFSKQYNCAFIWQKDGVKKLNLYLIINYFKGGKLRFKKIKPEAFEANRFYTVINKKSGEIVPMEVNFNFDDPNLIILPLAFGKRQGREFIWNDLLSLETGSLKLANGRVIEKTLYNRRTRQDEPALFVALTFERREVLDSSNIKPMNLIGVDRGENIPAVIALTDPEGCPLSRFKDSLGNPTHILRIGESYKEKQRTIQAKKEVEQRRAGGYSRKYASKAKNLADDMVRNTARDLLYYAVTQDAMLIFENLSRGFGRQGKRTFMAERQYTRMEDWLTAKLAYEGLPSKTYLSKTLAQYTSKTCSNCGFTITSADYDRMLEKLKKTATGWMTTINGKELKVEGQITYYNRYKRQNVVKDLSVELDRLSEESVNNDISSWTKGRSGEALSLLKKRFSHRPVQEKFVCLNCGFETHADEQAALNIARSWLFLRSQEYKKYQTNKTTGNTDKRAFVETWQSFYRKKLKEVWKPAV

SEQ ID NO: 32783 - protein, 978 aa, synthetic construct
  REGION 1..978: note = engineered CasX variant
QEIKRANKIRRRLVKDSNTKKAGKTGPMKTLLVRVMTPDLRERLENLRKKPENIPQPISNTSRANLNKLLTDYTEMKKAILHVYWEEFQKDPVGLMSRVAQPASKKIDQNKLKPEMDEKGNLTTAGFACSQCGQPLFVYKLEQVSEKGKAYTNYFGRCNVAEHEKLILLAQLKPEKDSDEAVTYSLGKFGQRALDFYSIHVTKESTHPVKPLAQIAGNRYASYPVGKALSDACMGTIASFLSKYQDIIIEHQKVVKGNQKRLESLRELAGKENLEYPSVTLPPQPHTKEGVDAYNEVIARVRMWVNLNLWQKLKLSRDDAKPLLRLKGFPSFPLVERQANEVDWWDMVCNVKKLINEKKEDGKVFWQNLAGYKRQEALRPYLSSEEDRKKGKKFARYQLGDLLLHLEKKHGEDWGKVYDEAWERIDKKVEGLSKHIKLEEERRSEDAQSKAALTDWLRAKASFVIEGLKEADKDEFCRCELKLQKWYGDLRGKPFAIEAENSILDISGFSKQYNCAFIWQKDGVKKLNLYLIINYFKGGKLRFKKIKPEAFEANRFYTVINKKSGEIVPMEVNFNFDDPNLIILPLAFGKRQGREFIWNDLLSLETGSLKLANGRVIEKTLYNRRTRQDEPALFVALTFERREVLDSSNIKPMNLIGVDRGENIPAVIALTDPEGCPLSRFKDSLGNPTHILRIGESYKEKQRTIQAKKEVEQRRAGGYSRKYASKAKNLADDMVRNTARDLLYYAVTQDAMLIFENLSRGFGRQGKRTFMAERQYTRMEDWLTAKLAYEGLPSKTYLSKTLAQYTSKTCSNCGFTITSADYDRVLEKLKKTATGWMTTINGKELKVEGQITYYNRYKRQNVVKDLSVELDRLSEESVNNDISSWTKGRQGEALSLLKKRFSHRPVQEKFVCLNCGFETHADEQAALNIARSWLFLRSQEYKKYQTNKTTGNTDKRAFVETWQSFYRKKLKEVWKPAV

SEQ ID NO: 32784 - protein, 978 aa, synthetic construct
  REGION 1..978: note = engineered CasX variant
QEIKRANKIRRRLVKDSNTKKAGKTGPMKTLLVRVMTPDLRERLENLRKKPENIPQPISNTSRANLNKLLTDYTEMKKAILHVYWEEFQKDPVGLMSRVAQPASKKIDQNKLKPEMDEKGNLTTAGFACSQCGQPLFVYKLEQVSEKGKAYTNYFGRCNVAEHEKLILLAQLKPEKDSDEAVTYSLGKFGQRALDFYSIHVTKESTHPVKPLAQIAGNRYASHPVGKALSDACMGTIASFLSKYQDIIIEHQKVVKGNQKRLESLRELAGKENLEYPSVTLPPQPHTKEGVDAYNEVIARVRMWVNLNLWQKLKLSRDDAKPLLRLKGFPSFPLVERQANEVDWWDMVCNVKKLINEKKEDGKVFWQNLAGYKRQEALRPYLSSEEDRKKGKKFARYQLGDLLLHLEKKHGEDWGKVYDEAWERIDKKVEGLSKHIKLEEERRSEDAQSKAALTDWLRAKASFVIEGLKEADKDEFCRCELKLQKWYGDLRGKPFAIEAENSILDISGFSKQYNCAFIWQKDGVKKLNLYLIINYFKGGKLRFKKIKPEAFEANRFYTVINKKSGEIVPMEVNFNFDDPNLIILPLAFGKRQGREFIWNDLLSLETGSLKLANGRVIEKTLYNRRTRQDEPALFVALTFERREVLDSSNIKPMNLIGVDRGENIPAVIALTDPEGCPLSRFKDSLGNPTHILRIGESYKEKQRTIQAKKEVEQRRAGGYSRKYASKAKNLADDMVRNTARDLLYYAVTQDAMLIFENLSRGFGRQGKRTFMAERQYTRMEDWLTAKLAYEGLPSKTYLSKTLAQYTSKTCSNCGFTITSADYDRVLEKLKKTATGWMTTINGKELKVEGQITYYNRYKRQNVVKDLSVELDRLSEESVNNDISSWTKGRQGEALSLLKKRFSHRPVQEKFVCLNCGFETHADEQAALNIARSWLFLRSQEYKKYQTNKTTGNTDKRAFVETWQSFYRKKLKEVWKPAV

SEQ ID NO: 32785 - protein, 978 aa, synthetic construct
  REGION 1..978: note = engineered CasX variant
QEIKRANKIRRRLVKDSNTKKAGKTGPMKTLLVRVMTPDLRERLENLRKKPENIPQPISNTSRANLNKLLTDYTEMKKAILHVYWEEFQKDPVGLMSRVAQPASKKIDQNKLKPEMDEKGNLTTAGFACSQCGQPLFVYKLEQVSEKGKAYTNYFGRCNVAEHEKLILLAQLKPEKDSDEAVTYSLGKFGQRALDFYSIHVTKESTHPVKPLAQIAGNRYASSPVGKALSDACMGTIASFLSKYQDIIIEHQKVVKGNQKRLESLRELAGKENLEYPSVTLPPQPHTKEGVDAYNEVIARVRMWVNLNLWQKLKLSRDDAKPLLRLKGFPSFPLVERQANEVDWWDMVCNVKKLINEKKEDGKVFWQNLAGYKRQEALRPYLSSEEDRKKGKKFARYQLGDLLLHLEKKHGEDWGKVYDEAWERIDKKVEGLSKHIKLEEERRSEDAQSKAALTDWLRAKASFVIEGLKEADKDEFCRCELKLQKWYGDLRGKPFAIEAENSILDISGFSKQYNCAFIWQKDGVKKLNLYLIINYFKGGKLRFKKIKPEAFEANRFYTVINKKSGEIVPMEVNFNFDDPNLIILPLAFGKRQGREFIWNDLLSLETGSLKLANGRVIEKTLYNRRTRQDEPALFVALTFERREVLDSSNIKPMNLIGVDRGENIPAVIALTDPEGCPLSRFKDSLGNPTHILRIGESYKEKQRTIQAKKEVEQRRAGGYSRKYASKAKNLADDMVRNTARDLLYYAVTQDAMLIFENLSRGFGRQGKRTFMAERQYTRMEDWLTAKLAYEGLPSKTYLSKTLAQYTSKTCSNCGFTITSADYDRVLEKLKKTATGWMTTINGKELKVEGQITYYNRYKRQNVVKDLSVELDRLSEESVNNDISSWTKGRQGEALSLLKKRFSHRPVQEKFVCLNCGFETHADEQAALNIARSWLFLRSQEYKKYQTNKTTGNTDKRAFVETWQSFYRKKLKEVWKPAV

SEQ ID NO: 32786 - protein, 978 aa, synthetic construct
  REGION 1..978: note = engineered CasX variant
QEIKRANKIRRRLVKDSNTKKAGKTGPMKTLLVRVMTPDLRERLENLRKKPENIPQPISNTSRANLNKLLTDYTEMKKAILHVYWEEFQKDPVGLMSRVAQPASKKIDQNKLKPEMDEKGNLTTAGFACSQCGQPLFVYKLEQVSEKGKAYTNYFGRCNVAEHEKLILLAQLKPEKDSDEAVTYSLGKFGQRALDFYSIHVTKESTHPVKPLAQIAGNRYASTPVGKALSDACMGTIASFLSKYQDIIIEHQKVVKGNQKRLESLRELAGKENLEYPSVTLPPQPHTKEGVDAYNEVIARVRMWVNLNLWQKLKLSRDDAKPLLRLKGFPSFPLVERQANEVDWWDMVCNVKKLINEKKEDGKVFWQNLAGYKRQEALRPYLSSEEDRKKGKKFARYQLGDLLLHLEKKHGEDWGKVYDEAWERIDKKVEGLSKHIKLEEERRSEDAQSKAALTDWLRAKASFVIEGLKEADKDEFCRCELKLQKWYGDLRGKPFAIEAENSILDISGFSKQYNCAFIWQKDGVKKLNLYLIINYFKGGKLRFKKIKPEAFEANRFYTVINKKSGEIVPMEVNFNFDDPNLIILPLAFGKRQGREFIWNDLLSLETGSLKLANGRVIEKTLYNRRTRQDEPALFVALTFERREVLDSSNIKPMNLIGVDRGENIPAVIALTDPEGCPLSRFKDSLGNPTHILRIGESYKEKQRTIQAKKEVEQRRAGGYSRKYASKAKNLADDMVRNTARDLLYYAVTQDAMLIFENLSRGFGRQGKRTFMAERQYTRMEDWLTAKLAYEGLPSKTYLSKTLAQYTSKTCSNCGFTITSADYDRVLEKLKKTATGWMTTINGKELKVEGQITYYNRYKRQNVVKDLSVELDRLSEESVNNDISSWTKGRQGEALSLLKKRFSHRPVQEKFVCLNCGFETHADEQAALNIARSWLFLRSQEYKKYQTNKTTGNTDKRAFVETWQSFYRKKLKEVWKPAV

SEQ ID NO: 32787 - protein, 978 aa, synthetic construct
  REGION 1..978: note = engineered CasX variant
QEIKRANKIRRRLVKDSNTKKAGKTGPMKTLLVRVMTPDLRERLENLRKKPENIPQPISNTSRANLNKLLTDYTEMKKAILHVYWEEFQKDPVGLMSRVAQPASKKIDQNKLKPEMDEKGNLTTAGFACSQCGQPLFVYKLEQVSEKGKAYTNYFGRCNVAEHEKLILLAQLKPEKDSDEAVTYSLGKFGQRALDFYSIHVTKESTHPVKPLAQIAGNRYASAPVGKALSDACMGTIASFLSKYQDIIIEHQKVVKGNQKRLESLRELAGKENLEYPSVTLPPQPHTKEGVDAYNEVIARVRMWVNLNLWQKLKLSRDDAKPLLRLKGFPSFPLVERQANEVDWWDMVCNVKKLINEKKEDGKVFWQNLAGYKRQEALRPYLSSEEDRKKGKKFARYQLGDLLLHLEKKHGEDWGKVYDEAWERIDKKVEGLSKHIKLEEERRSEDAQSKAALTDWLRAKASFVIEGLKEADKDEFCRCELKLQKWYGDLRGKPFAIEAENSILDISGFSKQYNCAFIWQKDGVKKLNLYLIINYFKGGKLRFKKIKPEAFEANRFYTVINKKSGEIVPMEVNFNFDDPNLIILPLAFGKRQGREFIWNDLLSLETGSLKLANGRVIEKTLYNRRTRQDEPALFVALTFERREVLDSSNIKPMNLIGVDRGENIPAVIALTDPEGCPLSRFKDSLGNPTHILRIGESYKEKQRTIQAKKEVEQRRAGGYSRKYASKAKNLADDMVRNTARDLLYYAVTQDAMLIFENLSRGFGRQGKRTFMAERQYTRMEDWLTAKLAYEGLPSKTYLSKTLAQYTSKTCSNCGFTITSADYDRVLEKLKKTATGWMTTINGKELKVEGQITYYNRYKRQNVVKDLSVELDRLSEESVNNDISSWTKGRQGEALSLLKKRFSHRPVQEKFVCLNCGFETHADEQAALNIARSWLFLRSQEYKKYQTNKTTGNTDKRAFVETWQSFYRKKLKEVWKPAV

SEQ ID NO: 32788 - protein, 978 aa, synthetic construct
  REGION 1..978: note = engineered CasX variant
QEIKRANKIRRRLVKDSNTKKAGKTGPMKTLLVRVMTPDLRERLENLRKKPENIPQPISNTSRANLNKLLTDYTEMKKAILHVYWEEFQKDPVGLMSRVAQPASKKIDQNKLKPEMDEKGNLTTAGFACSQCGQPLFVYKLEQVSEKGKAYTNYFGRCNVAEHEKLILLAQLKPEKDSDEAVTYSLGKFGQRALDFYSIHVTKESTHPVKPLAQIAGNRYASVPVGKALSDACMGTIASFLSKYQDIIIEHQKVVKGNQKRLESLRELAGKENLEYPSVTLPPQPHTKEGVDAYNEVIARVRMWVNLNLWQKLKLSRDDAKPLLRLKGFPSFPLVERQANEVDWWDMVCNVKKLINEKKEDGKVFWQNLAGYKRQEALRPYLSSEEDRKKGKKFARYQLGDLLLHLEKKHGEDWGKVYDEAWERIDKKVEGLSKHIKLEEERRSEDAQSKAALTDWLRAKASFVIEGLKEADKDEFCRCELKLQKWYGDLRGKPFAIEAENSILDISGFSKQYNCAFIWQKDGVKKLNLYLIINYFKGGKLRFKKIKPEAFEANRFYTVINKKSGEIVPMEVNFNFDDPNLIILPLAFGKRQGREFIWNDLLSLETGSLKLANGRVIEKTLYNRRTRQDEPALFVALTFERREVLDSSNIKPMNLIGVDRGENIPAVIALTDPEGCPLSRFKDSLGNPTHILRIGESYKEKQRTIQAKKEVEQRRAGGYSRKYASKAKNLADDMVRNTARDLLYYAVTQDAMLIFENLSRGFGRQGKRTFMAERQYTRMEDWLTAKLAYEGLPSKTYLSKTLAQYTSKTCSNCGFTITSADYDRVLEKLKKTATGWMTTINGKELKVEGQITYYNRYKRQNVVKDLSVELDRLSEESVNNDISSWTKGRQGEALSLLKKRFSHRPVQEKFVCLNCGFETHADEQAALNIARSWLFLRSQEYKKYQTNKTTGNTDKRAFVETWQSFYRKKLKEVWKPAV

SEQ ID NO: 32789 - protein, 978 aa, synthetic construct
  REGION 1..978: note = engineered CasX variant
QEIKRANKIRRRLVKDSNTKKAGKTGPMKTLLVRVMTPDLRERLENLRKKPENIPQPISNTSRANLNKLLTDYTEMKKAILHVYWEEFQKDPVGLMSRVAQPASKKIDQNKLKPEMDEKGNLTTAGFACSQCGQPLFVYKLEQVSEKGKAYTNYFGRCNVAEHEKLIKLAQLKPEKDSDEAVTYSLGKFGQRALDFYSIHVTKESTHPVKPLAQIAGNRYASGPVGKALSDACMGTIASFLSKYQDIIIEHQKVVKGNQKRLESLRELAGKENLEYPSVTLPPQPHTKEGVDAYNEVIARVRMWVNLNLWQKLKLSRDDAKPLLRLKGFPSFPLVERQANEVDWWDMVCNVKKLINEKKEDGKVFWQNLAGYKRQEALRPYLSSEEDRKKGKKFARYQLGDLLLHLEKKHGEDWGKVYDEAWERIDKKVEGLSKHIKLEEERRSEDAQSKAALTDWLRAKASFVIEGLKEADKDEFCRCELKLQKWYGDLRGKPFAIEAENSILDISGFSKQYNCAFIWQKDGVKKLNLYLIINYFKGGKLRFKKIKPEAFEANRFYTVINKKSGEIVPMEVNFNFDDPNLIILPLAFGKRQGREFIWNDLLSLETGSLKLANGRVIEKTLYNRRTRQDEPALFVALTFERREVLDSSNIKPMNLIGVDRGENIPAVIALTDPEGCPLSRFKDSLGNPTHILRIGESYKEKQRTIQAKKEVEQRRAGGYSRKYASKAKNLADDMVRNTARDLLYYAVTQDAMLIFENLSRGFGRQGKRTFMAERQYTRMEDWLTAKLAYEGLPSKTYLSKTLAQYTSKTCSNCGFTITSADYDRVLEKLKKTATGWMTTINGKELKVEGQITYYNRYKRQNVVKDLSVELDRLSEESVNNDISSWTKGRQGEALSLLKKRFSHRPVQEKFVCLNCGFETHADEQAALNIARSWLFLRSQEYKKYQTNKTTGNTDKRAFVETWQSFYRKKLKEVWKPAV

SEQ ID NO: 32790 - protein, 977 aa, synthetic construct
  REGION 1..977: note = engineered CasX variant
QEIKRANKIRRRLVKDSNTKKAGKTGPMKTLLVRVMTPDLRERLENLRKKPENIPQPISNTSRANLNKLLTDYTEMKKAILHVYWEEFQKDPVGLMSRVAQPASKKIDQNKLKPEMDEKGNLTTAGFACSQCGQPLFVYKLEQVSEKGKAYTNYFGRCNVAEHEKLILLAQLKPEKDSDEAVTYSLGKFGQRALDFYSIHVTKESTHPVKPLAQIAGNRYASPVGKALSDACMGTIASFLSKYQDIIIEHQKVVKGNQKRLESLRELAGKENLEYPSVTLPPQPHTKEGVDAYNEVIARVRMWVNLNLWQKLKLSRDDAKPLLRLKGFPSFPLVERQANEVDWWDMVCNVKKLINEKKEDGKVFWQNLAGYKRQEALRPYLSSEEDRKKGKKFARYQLGDLLLHLEKKHGEDWGKVYDEAWERIDKKVEGLSKHIKLEEERRSEDAQSKAALTDWLRAKASFVIEGLKEADKDEFCRCELKLQKWYGDLRGKPFAIEAENSILDISGFSKQYNCAFIWQKDGVKKLNLYLIINYFKGGKLRFKKIKPEAFEANRFYTVINKKSGEIVPMEVNFNFDDPNLIILPLAFGKRQGREFIWNDLLSLETGSLKLANGRVIEKTLYNRRTRQDEPALFVALTFERREVLDSSNIKPMNLIGVDRGENIPAVIALTDPEGCPLSRFKDSLGNPTHILRIGESYKEKQRTIQAKKEVEQRRAGGYSRKYASKAKNLADDMVRNTARDLLYYAVTQDAMLIFENLSRGFGRQGKRTFMAERQYTRMEDWLTAKLAYEGLPSKTYLSKTLAQYTSKTCSNCGFTITSADYDRVLEKLKKTATGWMTTINGKELKVEGQITYYNRYKRQNVVKDLSVELDRLSEESVNNDISSWTKGRQGEALSLLKKRFSHRPVQEKFVCLNCGFETHADEQAALNIARSWLFLRSQEYKKYQTNKTTGNTDKRAFVETWQSFYRKKLKEVWKPAV

SEQ ID NO: 32791 - protein, 978 aa, synthetic construct
  REGION 1..978: note = engineered CasX variant
QEIKRANKIRRRLVKDSNTKKAGKTGPMKTLLVRVMTPDLRERLENLRKKPENIPQPISNTSRANLNKLLTDYTEMKKAILHVYWEEFQKDPVGLMSRVAQPASKKIDQNKLKPEMDEKGNLTTAGFACSQCGQPLFVYKLEQVSEKGKAYTNYFGRCNVAEHEKLILLAQLKPEKDSDEAVTYSLGKFGQRALDFYSIHVTKESTHPVKPLAQIAGNRYASYPVGKALSDACMGTIASFLSKYQDIIIEHQKVVKGNQKRLESLRELAGKENLEYPSVTLPPQPHTKEGVDAYNEVIARVRMWVNLNLWQKLKLSRDDAKPLLRLKGFPSFPLVERQANEVDWWDMVCNVKKLINEKKEDGKVFWQNLAGYKRQEALRPYLSSEEDRKKGKKFARYQLGDLLLHLEKKHGEDWGKVYDEAWERIDKKVEGLSKHIKLEEERRSEDAQSKAALTDWLRAKASFVIEGLKEADKDEFCRCELKLQKWYGDLRGKPFAIEAENSILDISGFSKQYNCAFIWQKDGVKKLNLYLIINYFKGGKLRFKKIKPEAFEANRFYTVINKKSGEIVPMEVNFNFDDPNLIILPLAFGKRQGREFIWNDLLSLETGSLKLANGRVIEKTLYNRRTRQDEPALFVALTFERREVLDSSNIKPMNLIGVDRGENIPAVIALTDPEGCPLSRFKDSLGNPTHILRIGESYKEKQRTIQAKKEVEQRRAGGYSRKYASKAKNLADDMVRNTARDLLYYAVTQDAMLIFENLSRGFGRQGKRTFMAERQYTRMEDWLTAKLAYEGLPSKTYLSKTLAQYTSKTCSNCGFTITSADYDRVLEKLKKTATGWMTTINGKELKVEGQITYYNRYKRQNVVKDLSVELDRLSEESVNNDISSWTKGRSGEALSLLKKRFSHRPVQEKFVCLNCEFETHADEQAALNIARSWLFLRSQEYKKYQTNKTTGNTDKRAFVETWQSFYRKKLKEVWKPAV

SEQ ID NO: 32792 - protein, 978 aa, synthetic construct
  REGION 1..978: note = engineered CasX variant
QEIKRANKIRRRLVKDSNTKKAGKTGPMKTLLVRVMTPDLRERLENLRKKPENIPQPISNTSRANLNKLLTDYTEMKKAILHVYWEEFQKDPVGLMSRVAQPASKKIDQNKLKPEMDEKGNLTTAGFACSQCGQPLFVYKLEQVSEKGKAYTNYFGRCNVAEHEKLILLAQLKPEKDSDEAVTYSLGKFGQRALDFYSIHVTKESTHPVKPLAQIAGNRYASHPVGKALSDACMGTIASFLSKYQDIIIEHQKVVKGNQKRLESLRELAGKENLEYPSVTLPPQPHTKEGVDAYNEVIARVRMWVNLNLWQKLKLSRDDAKPLLRLKGFPSFPLVERQANEVDWWDMVCNVKKLINEKKEDGKVFWQNLAGYKRQEALRPYLSSEEDRKKGKKFARYQLGDLLLHLEKKHGEDWGKVYDEAWERIDKKVEGLSKHIKLEEERRSEDAQSKAALTDWLRAKASFVIEGLKEADKDEFCRCELKLQKWYGDLRGKPFAIEAENSILDISGFSKQYNCAFIWQKDGVKKLNLYLIINYFKGGKLRFKKIKPEAFEANRFYTVINKKSGEIVPMEVNFNFDDPNLIILPLAFGKRQGREFIWNDLLSLETGSLKLANGRVIEKTLYNRRTRQDEPALFVALTFERREVLDSSNIKPMNLIGVDRGENIPAVIALTDPEGCPLSRFKDSLGNPTHILRIGESYKEKQRTIQAKKEVEQRRAGGYSRKYASKAKNLADDMVRNTARDLLYYAVTQDAMLIFENLSRGFGRQGKRTFMAERQYTRMEDWLTAKLAYEGLPSKTYLSKTLAQYTSKTCSNCGFTITSADYDRVLEKLKKTATGWMTTINGKELKVEGQITYYNRYKRQNVVKDLSVELDRLSEESVNNDISSWTKGRSGEALSLLKKRFSHRPVQEKFVCLNCEFETHADEQAALNIARSWLFLRSQEYKKYQTNKTTGNTDKRAFVETWQSFYRKKLKEVWKPAV

SEQ ID NO: 32793 - protein, 978 aa, synthetic construct
  REGION 1..978: note = engineered CasX variant
QEIKRANKIRRRLVKDSNTKKAGKTGPMKTLLVRVMTPDLRERLENLRKKPENIPQPISNTSRANLNKLLTDYTEMKKAILHVYWEEFQKDPVGLMSRVAQPASKKIDQNKLKPEMDEKGNLTTAGFACSQCGQPLFVYKLEQVSEKGKAYTNYFGRCNVAEHEKLILLAQLKPEKDSDEAVTYSLGKFGQRALDFYSIHVTKESTHPVKPLAQIAGNRYASSPVGKALSDACMGTIASFLSKYQDIIIEHQKVVKGNQKRLESLRELAGKENLEYPSVTLPPQPHTKEGVDAYNEVIARVRMWVNLNLWQKLKLSRDDAKPLLRLKGFPSFPLVERQANEVDWWDMVCNVKKLINEKKEDGKVFWQNLAGYKRQEALRPYLSSEEDRKKGKKFARYQLGDLLLHLEKKHGEDWGKVYDEAWERIDKKVEGLSKHIKLEEERRSEDAQSKAALTDWLRAKASFVIEGLKEADKDEFCRCELKLQKWYGDLRGKPFAIEAENSILDISGFSKQYNCAFIWQKDGVKKLNLYLIINYFKGGKLRFKKIKPEAFEANRFYTVINKKSGEIVPMEVNFNFDDPNLIILPLAFGKRQGREFIWNDLLSLETGSLKLANGRVIEKTLYNRRTRQDEPALFVALTFERREVLDSSNIKPMNLIGVDRGENIPAVIALTDPEGCPLSRFKDSLGNPTHILRIGESYKEKQRTIQAKKEVEQRRAGGYSRKYASKAKNLADDMVRNTARDLLYYAVTQDAMLIFENLSRGFGRQGKRTFMAERQYTRMEDWLTAKLAYEGLPSKTYLSKTLAQYTSKTCSNCGFTITSADYDRVLEKLKKTATGWMTTINGKELKVEGQITYYNRYKRQNVVKDLSVELDRLSEESVNNDISSWTKGRSGEALSLLKKRFSHRPVQEKFVCLNCEFETHADEQAALNIARSWLFLRSQEYKKYQTNKTTGNTDKRAFVETWQSFYRKKLKEVWKPAV

SEQ ID NO: 32794 - protein, 978 aa, synthetic construct
  REGION 1..978: note = engineered CasX variant
QEIKRANKIRRRLVKDSNTKKAGKTGPMKTLLVRVMTPDLRERLENLRKKPENIPQPISNTSRANLNKLLTDYTEMKKAILHVYWEEFQKDPVGLMSRVAQPASKKIDQNKLKPEMDEKGNLTTAGFACSQCGQPLFVYKLEQVSEKGKAYTNYFGRCNVAEHEKLILLAQLKPEKDSDEAVTYSLGKFGQRALDFYSIHVTKESTHPVKPLAQIAGNRYASTPVGKALSDACMGTIASFLSKYQDIIIEHQKVVKGNQKRLESLRELAGKENLEYPSVTLPPQPHTKEGVDAYNEVIARVRMWVNLNLWQKLKLSRDDAKPLLRLKGFPSFPLVERQANEVDWWDMVCNVKKLINEKKEDGKVFWQNLAGYKRQEALRPYLSSEEDRKKGKKFARYQLGDLLLHLEKKHGEDWGKVYDEAWERIDKKVEGLSKHIKLEEERRSEDAQSKAALTDWLRAKASFVIEGLKEADKDEFCRCELKLQKWYGDLRGKPFAIEAENSILDISGFSKQYNCAFIWQKDGVKKLNLYLIINYFKGGKLRFKKIKPEAFEANRFYTVINKKSGEIVPMEVNFNFDDPNLIILPLAFGKRQGREFIWNDLLSLETGSLKLANGRVIEKTLYNRRTRQDEPALFVALTFERREVLDSSNIKPMNLIGVDRGENIPAVIALTDPEGCPLSRFKDSLGNPTHILRIGESYKEKQRTIQAKKEVEQRRAGGYSRKYASKAKNLADDMVRNTARDLLYYAVTQDAMLIFENLSRGFGRQGKRTFMAERQYTRMEDWLTAKLAYEGLPSKTYLSKTLAQYTSKTCSNCGFTITSADYDRVLEKLKKTATGWMTTINGKELKVEGQITYYNRYKRQNVVKDLSVELDRLSEESVNNDISSWTKGRSGEALSLLKKRFSHRPVQEKFVCLNCEFETHADEQAALNIARSWLFLRSQEYKKYQTNKTTGNTDKRAFVETWQSFYRKKLKEVWKPAV

SEQ ID NO: 32795 - protein, 978 aa, synthetic construct
  REGION 1..978: note = engineered CasX variant
QEIKRANKIRRRLVKDSNTKKAGKTGPMKTLLVRVMTPDLRERLENLRKKPENIPQPISNTSRANLNKLLTDYTEMKKAILHVYWEEFQKDPVGLMSRVAQPASKKIDQNKLKPEMDEKGNLTTAGFACSQCGQPLFVYKLEQVSEKGKAYTNYFGRCNVAEHEKLILLAQLKPEKDSDEAVTYSLGKFGQRALDFYSIHVTKESTHPVKPLAQIAGNRYASAPVGKALSDACMGTIASFLSKYQDIIIEHQKVVKGNQKRLESLRELAGKENLEYPSVTLPPQPHTKEGVDAYNEVIARVRMWVNLNLWQKLKLSRDDAKPLLRLKGFPSFPLVERQANEVDWWDMVCNVKKLINEKKEDGKVFWQNLAGYKRQEALRPYLSSEEDRKKGKKFARYQLGDLLLHLEKKHGEDWGKVYDEAWERIDKKVEGLSKHIKLEEERRSEDAQSKAALTDWLRAKASFVIEGLKEADKDEFCRCELKLQKWYGDLRGKPFAIEAENSILDISGFSKQYNCAFIWQKDGVKKLNLYLIINYFKGGKLRFKKIKPEAFEANRFYTVINKKSGEIVPMEVNFNFDDPNLIILPLAFGKRQGREFIWNDLLSLETGSLKLANGRVIEKTLYNRRTRQDEPALFVALTFERREVLDSSNIKPMNLIGVDRGENIPAVIALTDPEGCPLSRFKDSLGNPTHILRIGESYKEKQRTIQAKKEVEQRRAGGYSRKYASKAKNLADDMVRNTARDLLYYAVTQDAMLIFENLSRGFGRQGKRTFMAERQYTRMEDWLTAKLAYEGLPSKTYLSKTLAQYTSKTCSNCGFTITSADYDRVLEKLKKTATGWMTTINGKELKVEGQITYYNRYKRQNVVKDLSVELDRLSEESVNNDISSWTKGRSGEALSLLKKRFSHRPVQEKFVCLNCEFETHADEQAALNIARSWLFLRSQEYKKYQTNKTTGNTDKRAFVETWQSFYRKKLKEVWKPAV

SEQ ID NO: 32796 - protein, 978 aa, synthetic construct
  REGION 1..978: note = engineered CasX variant
QEIKRANKIRRRLVKDSNTKKAGKTGPMKTLLVRVMTPDLRERLENLRKKPENIPQPISNTSRANLNKLLTDYTEMKKAILHVYWEEFQKDPVGLMSRVAQPASKKIDQNKLKPEMDEKGNLTTAGFACSQCGQPLFVYKLEQVSEKGKAYTNYFGRCNVAEHEKLILLAQLKPEKDSDEAVTYSLGKFGQRALDFYSIHVTKESTHPVKPLAQIAGNRYASVPVGKALSDACMGTIASFLSKYQDIIIEHQKVVKGNQKRLESLRELAGKENLEYPSVTLPPQPHTKEGVDAYNEVIARVRMWVNLNLWQKLKLSRDDAKPLLRLKGFPSFPLVERQANEVDWWDMVCNVKKLINEKKEDGKVFWQNLAGYKRQEALRPYLSSEEDRKKGKKFARYQLGDLLLHLEKKHGEDWGKVYDEAWERIDKKVEGLSKHIKLEEERRSEDAQSKAALTDWLRAKASFVIEGLKEADKDEFCRCELKLQKWYGDLRGKPFAIEAENSILDISGFSKQYNCAFIWQKDGVKKLNLYLIINYFKGGKLRFKKIKPEAFEANRFYTVINKKSGEIVPMEVNFNFDDPNLIILPLAFGKRQGREFIWNDLLSLETGSLKLANGRVIEKTLYNRRTRQDEPALFVALTFERREVLDSSNIKPMNLIGVDRGENIPAVIALTDPEGCPLSRFKDSLGNPTHILRIGESYKEKQRTIQAKKEVEQRRAGGYSRKYASKAKNLADDMVRNTARDLLYYAVTQDAMLIFENLSRGFGRQGKRTFMAERQYTRMEDWLTAKLAYEGLPSKTYLSKTLAQYTSKTCSNCGFTITSADYDRVLEKLKKTATGWMTTINGKELKVEGQITYYNRYKRQNVVKDLSVELDRLSEESVNNDISSWTKGRSGEALSLLKKRFSHRPVQEKFVCLNCEFETHADEQAALNIARSWLFLRSQEYKKYQTNKTTGNTDKRAFVETWQSFYRKKLKEVWKPAV

SEQ ID NO: 32797 - protein, 978 aa, synthetic construct
  REGION 1..978: note = engineered CasX variant
QEIKRANKIRRRLVKDSNTKKAGKTGPMKTLLVRVMTPDLRERLENLRKKPENIPQPISNTSRANLNKLLTDYTEMKKAILHVYWEEFQKDPVGLMSRVAQPASKKIDQNKLKPEMDEKGNLTTAGFACSQCGQPLFVYKLEQVSEKGKAYTNYFGRCNVAEHEKLIKLAQLKPEKDSDEAVTYSLGKFGQRALDFYSIHVTKESTHPVKPLAQIAGNRYASGPVGKALSDACMGTIASFLSKYQDIIIEHQKVVKGNQKRLESLRELAGKENLEYPSVTLPPQPHTKEGVDAYNEVIARVRMWVNLNLWQKLKLSRDDAKPLLRLKGFPSFPLVERQANEVDWWDMVCNVKKLINEKKEDGKVFWQNLAGYKRQEALRPYLSSEEDRKKGKKFARYQLGDLLLHLEKKHGEDWGKVYDEAWERIDKKVEGLSKHIKLEEERRSEDAQSKAALTDWLRAKASFVIEGLKEADKDEFCRCELKLQKWYGDLRGKPFAIEAENSILDISGFSKQYNCAFIWQKDGVKKLNLYLIINYFKGGKLRFKKIKPEAFEANRFYTVINKKSGEIVPMEVNFNFDDPNLIILPLAFGKRQGREFIWNDLLSLETGSLKLANGRVIEKTLYNRRTRQDEPALFVALTFERREVLDSSNIKPMNLIGVDRGENIPAVIALTDPEGCPLSRFKDSLGNPTHILRIGESYKEKQRTIQAKKEVEQRRAGGYSRKYASKAKNLADDMVRNTARDLLYYAVTQDAMLIFENLSRGFGRQGKRTFMAERQYTRMEDWLTAKLAYEGLPSKTYLSKTLAQYTSKTCSNCGFTITSADYDRVLEKLKKTATGWMTTINGKELKVEGQITYYNRYKRQNVVKDLSVELDRLSEESVNNDISSWTKGRSGEALSLLKKRFSHRPVQEKFVCLNCEFETHADEQAALNIARSWLFLRSQEYKKYQTNKTTGNTDKRAFVETWQSFYRKKLKEVWKPAV

SEQ ID NO: 32798 - protein, 977 aa, synthetic construct
  REGION 1..977: note = engineered CasX variant
QEIKRANKIRRRLVKDSNTKKAGKTGPMKTLLVRVMTPDLRERLENLRKKPENIPQPISNTSRANLNKLLTDYTEMKKAILHVYWEEFQKDPVGLMSRVAQPASKKIDQNKLKPEMDEKGNLTTAGFACSQCGQPLFVYKLEQVSEKGKAYTNYFGRCNVAEHEKLILLAQLKPEKDSDEAVTYSLGKFGQRALDFYSIHVTKESTHPVKPLAQIAGNRYASPVGKALSDACMGTIASFLSKYQDIIIEHQKVVKGNQKRLESLRELAGKENLEYPSVTLPPQPHTKEGVDAYNEVIARVRMWVNLNLWQKLKLSRDDAKPLLRLKGFPSFPLVERQANEVDWWDMVCNVKKLINEKKEDGKVFWQNLAGYKRQEALRPYLSSEEDRKKGKKFARYQLGDLLLHLEKKHGEDWGKVYDEAWERIDKKVEGLSKHIKLEEERRSEDAQSKAALTDWLRAKASFVIEGLKEADKDEFCRCELKLQKWYGDLRGKPFAIEAENSILDISGFSKQYNCAFIWQKDGVKKLNLYLIINYFKGGKLRFKKIKPEAFEANRFYTVINKKSGEIVPMEVNFNFDDPNLIILPLAFGKRQGREFIWNDLLSLETGSLKLANGRVIEKTLYNRRTRQDEPALFVALTFERREVLDSSNIKPMNLIGVDRGENIPAVIALTDPEGCPLSRFKDSLGNPTHILRIGESYKEKQRTIQAKKEVEQRRAGGYSRKYASKAKNLADDMVRNTARDLLYYAVTQDAMLIFENLSRGFGRQGKRTFMAERQYTRMEDWLTAKLAYEGLPSKTYLSKTLAQYTSKTCSNCGFTITSADYDRVLEKLKKTATGWMTTINGKELKVEGQITYYNRYKRQNVVKDLSVELDRLSEESVNNDISSWTKGRSGEALSLLKKRFSHRPVQEKFVCLNCEFETHADEQAALNIARSWLFLRSQEYKKYQTNKTTGNTDKRAFVETWQSFYRKKLKEVWKPAV

SEQ ID NO: 32799 - protein, 979 aa, synthetic construct
  REGION 1..979: note = engineered CasX variant
QEIKRANKIRRRLVKDSNTKKAGKTGPMKTLLVRVMTPDLRERLENLRKKPENIPQPISNTSRANLNKLLTDYTEMKKAILHVYWEEFQKDPVGLMSRVAQPASKKIDQNKLKPEMDEKGNLTTAGFACSQCGQPLFVYKLEQVSEKGKAYTNYFGRCNVAEHEKLILLAQLKPEKDSDEAVTYSLGKFGQRALDFYSIHVTKESTHPVKPLAQIAGNRYASYPVGKALSDACMGTIASFLSKYQDIIIEHQKVVKGNQKRLESLRELAGKENLEYPSVTLPPQPHTKEGVDAYNEVIARVRMWVNLNLWQKLKLSRDDAKPLLRLKGFPSFPLVERQANEVDWWDMVCNVKKLINEKKEDGKVFWQNLAGYKRQEALRPYLSSEEDRKKGKKFARYQLGDLLLHLEKKHGEDWGKVYDEAWERIDKKVEGLSKHIKLEEERRSEDAQSKAALTDWLRAKASFVIEGLKEADKDEFCRCELKLQKWYGDLRGKPFAIEAENSILDISGFSKQYNCAFIWQKDGVKKLNLYLIINYFKGGKLRFKKIKPEAFEANRFYTVINKKSGEIVPMEVNFNFDDPNLIILPLAFGKRQGREFIWNDLLSLETGSLKLANGRVIEKTLYNRRTRQDEPALFVALTFERREVLDSSNIKPMNLIGVDRGENIPAVIALTDPEGCPLSRFKDSLGNPTHILRIGESYKEKQRTIQAKKEVEQRRAGGYSRKYASKAKNLADDMVRNTARDLLYYAVTQDAMLIFENLSRGFGRQGKRTFMAERQYTRMEDWLTAKLAYEGLPSKTYLSKTLAQYTSKTCSNCGFTITSADYDRVLEKLKKTATGWMTTINGKELKVEGQITYYNRYKRQNVVKDLSVELDRLSEESVNNDISSWTKGRSGEALSLLKKRFSHRPVQEKFVCLNCGFETHADEQAALNIARSWLFLRSQEYKKYQTNKTSTGNTDKRAFVETWQSFYRKKLKEVWKPAV

SEQ ID NO: 32800 - protein, 979 aa, synthetic construct
  REGION 1..979: note = engineered CasX variant
QEIKRANKIRRRLVKDSNTKKAGKTGPMKTLLVRVMTPDLRERLENLRKKPENIPQPISNTSRANLNKLLTDYTEMKKAILHVYWEEFQKDPVGLMSRVAQPASKKIDQNKLKPEMDEKGNLTTAGFACSQCGQPLFVYKLEQVSEKGKAYTNYFGRCNVAEHEKLILLAQLKPEKDSDEAVTYSLGKFGQRALDFYSIHVTKESTHPVKPLAQIAGNRYASHPVGKALSDACMGTIASFLSKYQDIIIEHQKVVKGNQKRLESLRELAGKENLEYPSVTLPPQPHTKEGVDAYNEVIARVRMWVNLNLWQKLKLSRDDAKPLLRLKGFPSFPLVERQANEVDWWDMVCNVKKLINEKKEDGKVFWQNLAGYKRQEALRPYLSSEEDRKKGKKFARYQLGDLLLHLEKKHGEDWGKVYDEAWERIDKKVEGLSKHIKLEEERRSEDAQSKAALTDWLRAKASFVIEGLKEADKDEFCRCELKLQKWYGDLRGKPFAIEAENSILDISGFSKQYNCAFIWQKDGVKKLNLYLIINYFKGGKLRFKKIKPEAFEANRFYTVINKKSGEIVPMEVNFNFDDPNLIILPLAFGKRQGREFIWNDLLSLETGSLKLANGRVIEKTLYNRRTRQDEPALFVALTFERREVLDSSNIKPMNLIGVDRGENIPAVIALTDPEGCPLSRFKDSLGNPTHILRIGESYKEKQRTIQAKKEVEQRRAGGYSRKYASKAKNLADDMVRNTARDLLYYAVTQDAMLIFENLSRGFGRQGKRTFMAERQYTRMEDWLTAKLAYEGLPSKTYLSKTLAQYTSKTCSNCGFTITSADYDRVLEKLKKTATGWMTTINGKELKVEGQITYYNRYKRQNVVKDLSVELDRLSEESVNNDISSWTKGRSGEALSLLKKRFSHRPVQEKFVCLNCGFETHADEQAALNIARSWLFLRSQEYKKYQTNKTSTGNTDKRAFVETWQSFYRKKLKEVWKPAV

SEQ ID NO: 32801 - protein, 979 aa, synthetic construct
  REGION 1..979: note = engineered CasX variant
QEIKRANKIRRRLVKDSNTKKAGKTGPMKTLLVRVMTPDLRERLENLRKKPENIPQPISNTSRANLNKLLTDYTEMKKAILHVYWEEFQKDPVGLMSRVAQPASKKIDQNKLKPEMDEKGNLTTAGFACSQCGQPLFVYKLEQVSEKGKAYTNYFGRCNVAEHEKLILLAQLKPEKDSDEAVTYSLGKFGQRALDFYSIHVTKESTHPVKPLAQIAGNRYASSPVGKALSDACMGTIASFLSKYQDIIIEHQKVVKGNQKRLESLRELAGKENLEYPSVTLPPQPHTKEGVDAYNEVIARVRMWVNLNLWQKLKLSRDDAKPLLRLKGFPSFPLVERQANEVDWWDMVCNVKKLINEKKEDGKVFWQNLAGYKRQEALRPYLSSEEDRKKGKKFARYQLGDLLLHLEKKHGEDWGKVYDEAWERIDKKVEGLSKHIKLEEERRSEDAQSKAALTDWLRAKASFVIEGLKEADKDEFCRCELKLQKWYGDLRGKPFAIEAENSILDISGFSKQYNCAFIWQKDGVKKLNLYLIINYFKGGKLRFKKIKPEAFEANRFYTVINKKSGEIVPMEVNFNFDDPNLIILPLAFGKRQGREFIWNDLLSLETGSLKLANGRVIEKTLYNRRTRQDEPALFVALTFERREVLDSSNIKPMNLIGVDRGENIPAVIALTDPEGCPLSRFKDSLGNPTHILRIGESYKEKQRTIQAKKEVEQRRAGGYSRKYASKAKNLADDMVRNTARDLLYYAVTQDAMLIFENLSRGFGRQGKRTFMAERQYTRMEDWLTAKLAYEGLPSKTYLSKTLAQYTSKTCSNCGFTITSADYDRVLEKLKKTATGWMTTINGKELKVEGQITYYNRYKRQNVVKDLSVELDRLSEESVNNDISSWTKGRSGEALSLLKKRFSHRPVQEKFVCLNCGFETHADEQAALNIARSWLFLRSQEYKKYQTNKTSTGNTDKRAFVETWQSFYRKKLKEVWKPAV

SEQ ID NO: 32802 - protein, 979 aa, synthetic construct
  REGION 1..979: note = engineered CasX variant
QEIKRANKIRRRLVKDSNTKKAGKTGPMKTLLVRVMTPDLRERLENLRKKPENIPQPISNTSRANLNKLLTDYTEMKKAILHVYWEEFQKDPVGLMSRVAQPASKKIDQNKLKPEMDEKGNLTTAGFACSQCGQPLFVYKLEQVSEKGKAYTNYFGRCNVAEHEKLILLAQLKPEKDSDEAVTYSLGKFGQRALDFYSIHVTKESTHPVKPLAQIAGNRYASTPVGKALSDACMGTIASFLSKYQDIIIEHQKVVKGNQKRLESLRELAGKENLEYPSVTLPPQPHTKEGVDAYNEVIARVRMWVNLNLWQKLKLSRDDAKPLLRLKGFPSFPLVERQANEVDWWDMVCNVKKLINEKKEDGKVFWQNLAGYKRQEALRPYLSSEEDRKKGKKFARYQLGDLLLHLEKKHGEDWGKVYDEAWERIDKKVEGLSKHIKLEEERRSEDAQSKAALTDWLRAKASFVIEGLKEADKDEFCRCELKLQKWYGDLRGKPFAIEAENSILDISGFSKQYNCAFIWQKDGVKKLNLYLIINYFKGGKLRFKKIKPEAFEANRFYTVINKKSGEIVPMEVNFNFDDPNLIILPLAFGKRQGREFIWNDLLSLETGSLKLANGRVIEKTLYNRRTRQDEPALFVALTFERREVLDSSNIKPMNLIGVDRGENIPAVIALTDPEGCPLSRFKDSLGNPTHILRIGESYKEKQRTIQAKKEVEQRRAGGYSRKYASKAKNLADDMVRNTARDLLYYAVTQDAMLIFENLSRGFGRQGKRTFMAERQYTRMEDWLTAKLAYEGLPSKTYLSKTLAQYTSKTCSNCGFTITSADYDRVLEKLKKTATGWMTTINGKELKVEGQITYYNRYKRQNVVKDLSVELDRLSEESVNNDISSWTKGRSGEALSLLKKRFSHRPVQEKFVCLNCGFETHADEQAALNIARSWLFLRSQEYKKYQTNKTSTGNTDKRAFVETWQSFYRKKLKEVWKPAV

SEQ ID NO: 32803 - protein, 979 aa, synthetic construct
  REGION 1..979: note = engineered CasX variant
QEIKRANKIRRRLVKDSNTKKAGKTGPMKTLLVRVMTPDLRERLENLRKKPENIPQPISNTSRANLNKLLTDYTEMKKAILHVYWEEFQKDPVGLMSRVAQPASKKIDQNKLKPEMDEKGNLTTAGFACSQCGQPLFVYKLEQVSEKGKAYTNYFGRCNVAEHEKLILLAQLKPEKDSDEAVTYSLGKFGQRALDFYSIHVTKESTHPVKPLAQIAGNRYASAPVGKALSDACMGTIASFLSKYQDIIIEHQKVVKGNQKRLESLRELAGKENLEYPSVTLPPQPHTKEGVDAYNEVIARVRMWVNLNLWQKLKLSRDDAKPLLRLKGFPSFPLVERQANEVDWWDMVCNVKKLINEKKEDGKVFWQNLAGYKRQEALRPYLSSEEDRKKGKKFARYQLGDLLLHLEKKHGEDWGKVYDEAWERIDKKVEGLSKHIKLEEERRSEDAQSKAALTDWLRAKASFVIEGLKEADKDEFCRCELKLQKWYGDLRGKPFAIEAENSILDISGFSKQYNCAFIWQKDGVKKLNLYLIINYFKGGKLRFKKIKPEAFEANRFYTVINKKSGEIVPMEVNFNFDDPNLIILPLAFGKRQGREFIWNDLLSLETGSLKLANGRVIEKTLYNRRTRQDEPALFVALTFERREVLDSSNIKPMNLIGVDRGENIPAVIALTDPEGCPLSRFKDSLGNPTHILRIGESYKEKQRTIQAKKEVEQRRAGGYSRKYASKAKNLADDMVRNTARDLLYYAVTQDAMLIFENLSRGFGRQGKRTFMAERQYTRMEDWLTAKLAYEGLPSKTYLSKTLAQYTSKTCSNCGFTITSADYDRVLEKLKKTATGWMTTINGKELKVEGQITYYNRYKRQNVVKDLSVELDRLSEESVNNDISSWTKGRSGEALSLLKKRFSHRPVQEKFVCLNCGFETHADEQAALNIARSWLFLRSQEYKKYQTNKTSTGNTDKRAFVETWQSFYRKKLKEVWKPAV

SEQ ID NO: 32804 - protein, 979 aa, synthetic construct
  REGION 1..979: note = engineered CasX variant
QEIKRANKIRRRLVKDSNTKKAGKTGPMKTLLVRVMTPDLRERLENLRKKPENIPQPISNTSRANLNKLLTDYTEMKKAILHVYWEEFQKDPVGLMSRVAQPASKKIDQNKLKPEMDEKGNLTTAGFACSQCGQPLFVYKLEQVSEKGKAYTNYFGRCNVAEHEKLILLAQLKPEKDSDEAVTYSLGKFGQRALDFYSIHVTKESTHPVKPLAQIAGNRYASVPVGKALSDACMGTIASFLSKYQDIIIEHQKVVKGNQKRLESLRELAGKENLEYPSVTLPPQPHTKEGVDAYNEVIARVRMWVNLNLWQKLKLSRDDAKPLLRLKGFPSFPLVERQANEVDWWDMVCNVKKLINEKKEDGKVFWQNLAGYKRQEALRPYLSSEEDRKKGKKFARYQLGDLLLHLEKKHGEDWGKVYDEAWERIDKKVEGLSKHIKLEEERRSEDAQSKAALTDWLRAKASFVIEGLKEADKDEFCRCELKLQKWYGDLRGKPFAIEAENSILDISGFSKQYNCAFIWQKDGVKKLNLYLIINYFKGGKLRFKKIKPEAFEANRFYTVINKKSGEIVPMEVNFNFDDPNLIILPLAFGKRQGREFIWNDLLSLETGSLKLANGRVIEKTLYNRRTRQDEPALFVALTFERREVLDSSNIKPMNLIGVDRGENIPAVIALTDPEGCPLSRFKDSLGNPTHILRIGESYKEKQRTIQAKKEVEQRRAGGYSRKYASKAKNLADDMVRNTARDLLYYAVTQDAMLIFENLSRGFGRQGKRTFMAERQYTRMEDWLTAKLAYEGLPSKTYLSKTLAQYTSKTCSNCGFTITSADYDRVLEKLKKTATGWMTTINGKELKVEGQITYYNRYKRQNVVKDLSVELDRLSEESVNNDISSWTKGRSGEALSLLKKRFSHRPVQEKFVCLNCGFETHADEQAALNIARSWLFLRSQEYKKYQTNKTSTGNTDKRAFVETWQSFYRKKLKEVWKPAV

SEQ ID NO: 32805 - protein, 979 aa, synthetic construct
  REGION 1..979: note = engineered CasX variant
QEIKRANKIRRRLVKDSNTKKAGKTGPMKTLLVRVMTPDLRERLENLRKKPENIPQPISNTSRANLNKLLTDYTEMKKAILHVYWEEFQKDPVGLMSRVAQPASKKIDQNKLKPEMDEKGNLTTAGFACSQCGQPLFVYKLEQVSEKGKAYTNYFGRCNVAEHEKLIKLAQLKPEKDSDEAVTYSLGKFGQRALDFYSIHVTKESTHPVKPLAQIAGNRYASGPVGKALSDACMGTIASFLSKYQDIIIEHQKVVKGNQKRLESLRELAGKENLEYPSVTLPPQPHTKEGVDAYNEVIARVRMWVNLNLWQKLKLSRDDAKPLLRLKGFPSFPLVERQANEVDWWDMVCNVKKLINEKKEDGKVFWQNLAGYKRQEALRPYLSSEEDRKKGKKFARYQLGDLLLHLEKKHGEDWGKVYDEAWERIDKKVEGLSKHIKLEEERRSEDAQSKAALTDWLRAKASFVIEGLKEADKDEFCRCELKLQKWYGDLRGKPFAIEAENSILDISGFSKQYNCAFIWQKDGVKKLNLYLIINYFKGGKLRFKKIKPEAFEANRFYTVINKKSGEIVPMEVNFNFDDPNLIILPLAFGKRQGREFIWNDLLSLETGSLKLANGRVIEKTLYNRRTRQDEPALFVALTFERREVLDSSNIKPMNLIGVDRGENIPAVIALTDPEGCPLSRFKDSLGNPTHILRIGESYKEKQRTIQAKKEVEQRRAGGYSRKYASKAKNLADDMVRNTARDLLYYAVTQDAMLIFENLSRGFGRQGKRTFMAERQYTRMEDWLTAKLAYEGLPSKTYLSKTLAQYTSKTCSNCGFTITSADYDRVLEKLKKTATGWMTTINGKELKVEGQITYYNRYKRQNVVKDLSVELDRLSEESVNNDISSWTKGRSGEALSLLKKRFSHRPVQEKFVCLNCGFETHADEQAALNIARSWLFLRSQEYKKYQTNKTSTGNTDKRAFVETWQSFYRKKLKEVWKPAV

SEQ ID NO: 32806 - protein, 978 aa, synthetic construct
  REGION 1..978: note = engineered CasX variant
QEIKRANKIRRRLVKDSNTKKAGKTGPMKTLLVRVMTPDLRERLENLRKKPENIPQPISNTSRANLNKLLTDYTEMKKAILHVYWEEFQKDPVGLMSRVAQPASKKIDQNKLKPEMDEKGNLTTAGFACSQCGQPLFVYKLEQVSEKGKAYTNYFGRCNVAEHEKLILLAQLKPEKDSDEAVTYSLGKFGQRALDFYSIHVTKESTHPVKPLAQIAGNRYASPVGKALSDACMGTIASFLSKYQDIIIEHQKVVKGNQKRLESLRELAGKENLEYPSVTLPPQPHTKEGVDAYNEVIARVRMWVNLNLWQKLKLSRDDAKPLLRLKGFPSFPLVERQANEVDWWDMVCNVKKLINEKKEDGKVFWQNLAGYKRQEALRPYLSSEEDRKKGKKFARYQLGDLLLHLEKKHGEDWGKVYDEAWERIDKKVEGLSKHIKLEEERRSEDAQSKAALTDWLRAKASFVIEGLKEADKDEFCRCELKLQKWYGDLRGKPFAIEAENSILDISGFSKQYNCAFIWQKDGVKKLNLYLIINYFKGGKLRFKKIKPEAFEANRFYTVINKKSGEIVPMEVNFNFDDPNLIILPLAFGKRQGREFIWNDLLSLETGSLKLANGRVIEKTLYNRRTRQDEPALFVALTFERREVLDSSNIKPMNLIGVDRGENIPAVIALTDPEGCPLSRFKDSLGNPTHILRIGESYKEKQRTIQAKKEVEQRRAGGYSRKYASKAKNLADDMVRNTARDLLYYAVTQDAMLIFENLSRGFGRQGKRTFMAERQYTRMEDWLTAKLAYEGLPSKTYLSKTLAQYTSKTCSNCGFTITSADYDRVLEKLKKTATGWMTTINGKELKVEGQITYYNRYKRQNVVKDLSVELDRLSEESVNNDISSWTKGRSGEALSLLKKRFSHRPVQEKFVCLNCGFETHADEQAALNIARSWLFLRSQEYKKYQTNKTSTGNTDKRAFVETWQSFYRKKLKEVWKPAV

SEQ ID NO: 32807 - protein, 979 aa, synthetic construct
  REGION 1..979: note = engineered CasX variant
QEIKRANKIRRRLVKDSNTKKAGKTGPMKTLLVRVMTPDLRERLENLRKKPENIPQPISNTSRANLNKLLTDYTEMKKAILHVYWEEFQKDPVGLMSRVAQPASKKIDQNKLKPEMDEKGNLTTAGFACSQCGQPLFVYKLEQVSEKGKAYTNYFGRCNVAEHEKLILLAQLKPEKDSDEAVTYSLGKFGQRALDFYSIHVTKESTHPVKPLAQIAGNRYASYPVGKALSDACMGTIASFLSKYQDIIIEHQKVVKGNQKRLESLRELAGKENLEYPSVTLPPQPHTKEGVDAYNEVIARVRMWVNLNLWQKLKLSRDDAKPLLRLKGFPSFPLVERQANEVDWWDMVCNVKKLINEKKEDGKVFWQNLAGYKRQEALRPYLSSEEDRKKGKKFARYQLGDLLLHLEKKHGEDWGKVYDEAWERIDKKVEGLSKHIKLEEERRSEDAQSKAALTDWLRAKASFVIEGLKEADKDEFCRCELKLQKWYGDLRGKPFAIEAENSILDISGFSKQYNCAFIWQKDGVKKLNLYLIINYFKGGKLRFKKIKPEAFEANRFYTVINKKSGEIVPMEVNFNFDDPNLIILPLAFGKRQGREFIWNDLLSLETGSLKLANGRVIEKTLYNRRTRQDEPALFVALTFERREVLDSSNIKPMNLIGVDRGENIPAVIALTDPEGCPLSRFKDSLGNPTHILRIGESYKEKQRTIQAKKEVEQRRAGGYSRKYASKAKNLADDMVRNTARDLLYYAVTQDAMLIFENLSRGFGRQGKRTFMAERQYTRMEDWLTAKLAYEGLPSKTYLSKTLAQYTSKTCSNCGFTITSADYDRVLEKLKKTATGWMTTINGKELKVEGQITYYNRYKRQNVVKDLSVELDRLSEESVNNDISSWTKGRSGEALSLLKKRFSHRPVQEKFVCLNCGFETHADEQAALNIARSWLFLRSQEYKKYQTNKTTGKNTDKRAFVETWQSFYRKKLKEVWKPAV

SEQ ID NO: 32808 - protein, 979 aa, synthetic construct
  REGION 1..979: note = engineered CasX variant
QEIKRANKIRRRLVKDSNTKKAGKTGPMKTLLVRVMTPDLRERLENLRKKPENIPQPISNTSRANLNKLLTDYTEMKKAILHVYWEEFQKDPVGLMSRVAQPASKKIDQNKLKPEMDEKGNLTTAGFACSQCGQPLFVYKLEQVSEKGKAYTNYFGRCNVAEHEKLILLAQLKPEKDSDEAVTYSLGKFGQRALDFYSIHVTKESTHPVKPLAQIAGNRYASHPVGKALSDACMGTIASFLSKYQDIIIEHQKVVKGNQKRLESLRELAGKENLEYPSVTLPPQPHTKEGVDAYNEVIARVRMWVNLNLWQKLKLSRDDAKPLLRLKGFPSFPLVERQANEVDWWDMVCNVKKLINEKKEDGKVFWQNLAGYKRQEALRPYLSSEEDRKKGKKFARYQLGDLLLHLEKKHGEDWGKVYDEAWERIDKKVEGLSKHIKLEEERRSEDAQSKAALTDWLRAKASFVIEGLKEADKDEFCRCELKLQKWYGDLRGKPFAIEAENSILDISGFSKQYNCAFIWQKDGVKKLNLYLIINYFKGGKLRFKKIKPEAFEANRFYTVINKKSGEIVPMEVNFNFDDPNLIILPLAFGKRQGREFIWNDLLSLETGSLKLANGRVIEKTLYNRRTRQDEPALFVALTFERREVLDSSNIKPMNLIGVDRGENIPAVIALTDPEGCPLSRFKDSLGNPTHILRIGESYKEKQRTIQAKKEVEQRRAGGYSRKYASKAKNLADDMVRNTARDLLYYAVTQDAMLIFENLSRGFGRQGKRTFMAERQYTRMEDWLTAKLAYEGLPSKTYLSKTLAQYTSKTCSNCGFTITSADYDRVLEKLKKTATGWMTTINGKELKVEGQITYYNRYKRQNVVKDLSVELDRLSEESVNNDISSWTKGRSGEALSLLKKRFSHRPVQEKFVCLNCGFETHADEQAALNIARSWLFLRSQEYKKYQTNKTTGKNTDKRAFVETWQSFYRKKLKEVWKPAV

SEQ ID NO: 32809 - protein, 979 aa, synthetic construct
  REGION 1..979: note = engineered CasX variant
QEIKRANKIRRRLVKDSNTKKAGKTGPMKTLLVRVMTPDLRERLENLRKKPENIPQPISNTSRANLNKLLTDYTEMKKAILHVYWEEFQKDPVGLMSRVAQPASKKIDQNKLKPEMDEKGNLTTAGFACSQCGQPLFVYKLEQVSEKGKAYTNYFGRCNVAEHEKLILLAQLKPEKDSDEAVTYSLGKFGQRALDFYSIHVTKESTHPVKPLAQIAGNRYASSPVGKALSDACMGTIASFLSKYQDIIIEHQKVVKGNQKRLESLRELAGKENLEYPSVTLPPQPHTKEGVDAYNEVIARVRMWVNLNLWQKLKLSRDDAKPLLRLKGFPSFPLVERQANEVDWWDMVCNVKKLINEKKEDGKVFWQNLAGYKRQEALRPYLSSEEDRKKGKKFARYQLGDLLLHLEKKHGEDWGKVYDEAWERIDKKVEGLSKHIKLEEERRSEDAQSKAALTDWLRAKASFVIEGLKEADKDEFCRCELKLQKWYGDLRGKPFAIEAENSILDISGFSKQYNCAFIWQKDGVKKLNLYLIINYFKGGKLRFKKIKPEAFEANRFYTVINKKSGEIVPMEVNFNFDDPNLIILPLAFGKRQGREFIWNDLLSLETGSLKLANGRVIEKTLYNRRTRQDEPALFVALTFERREVLDSSNIKPMNLIGVDRGENIPAVIALTDPEGCPLSRFKDSLGNPTHILRIGESYKEKQRTIQAKKEVEQRRAGGYSRKYASKAKNLADDMVRNTARDLLYYAVTQDAMLIFENLSRGFGRQGKRTFMAERQYTRMEDWLTAKLAYEGLPSKTYLSKTLAQYTSKTCSNCGFTITSADYDRVLEKLKKTATGWMTTINGKELKVEGQITYYNRYKRQNVVKDLSVELDRLSEESVNNDISSWTKGRSGEALSLLKKRFSHRPVQEKFVCLNCGFETHADEQAALNIARSWLFLRSQEYKKYQTNKTTGKNTDKRAFVETWQSFYRKKLKEVWKPAV

SEQ ID NO: 32810 - protein, 979 aa, synthetic construct
  REGION 1..979: note = engineered CasX variant
QEIKRANKIRRRLVKDSNTKKAGKTGPMKTLLVRVMTPDLRERLENLRKKPENIPQPISNTSRANLNKLLTDYTEMKKAILHVYWEEFQKDPVGLMSRVAQPASKKIDQNKLKPEMDEKGNLTTAGFACSQCGQPLFVYKLEQVSEKGKAYTNYFGRCNVAEHEKLILLAQLKPEKDSDEAVTYSLGKFGQRALDFYSIHVTKESTHPVKPLAQIAGNRYASTPVGKALSDACMGTIASFLSKYQDIIIEHQKVVKGNQKRLESLRELAGKENLEYPSVTLPPQPHTKEGVDAYNEVIARVRMWVNLNLWQKLKLSRDDAKPLLRLKGFPSFPLVERQANEVDWWDMVCNVKKLINEKKEDGKVFWQNLAGYKRQEALRPYLSSEEDRKKGKKFARYQLGDLLLHLEKKHGEDWGKVYDEAWERIDKKVEGLSKHIKLEEERRSEDAQSKAALTDWLRAKASFVIEGLKEADKDEFCRCELKLQKWYGDLRGKPFAIEAENSILDISGFSKQYNCAFIWQKDGVKKLNLYLIINYFKGGKLRFKKIKPEAFEANRFYTVINKKSGEIVPMEVNFNFDDPNLIILPLAFGKRQGREFIWNDLLSLETGSLKLANGRVIEKTLYNRRTRQDEPALFVALTFERREVLDSSNIKPMNLIGVDRGENIPAVIALTDPEGCPLSRFKDSLGNPTHILRIGESYKEKQRTIQAKKEVEQRRAGGYSRKYASKAKNLADDMVRNTARDLLYYAVTQDAMLIFENLSRGFGRQGKRTFMAERQYTRMEDWLTAKLAYEGLPSKTYLSKTLAQYTSKTCSNCGFTITSADYDRVLEKLKKTATGWMTTINGKELKVEGQITYYNRYKRQNVVKDLSVELDRLSEESVNNDISSWTKGRSGEALSLLKKRFSHRPVQEKFVCLNCGFETHADEQAALNIARSWLFLRSQEYKKYQTNKTTGKNTDKRAFVETWQSFYRKKLKEVWKPAV

SEQ ID NO: 32811 - protein, 979 aa, synthetic construct
  REGION 1..979: note = engineered CasX variant
QEIKRANKIRRRLVKDSNTKKAGKTGPMKTLLVRVMTPDLRERLENLRKKPENIPQPISNTSRANLNKLLTDYTEMKKAILHVYWEEFQKDPVGLMSRVAQPASKKIDQNKLKPEMDEKGNLTTAGFACSQCGQPLFVYKLEQVSEKGKAYTNYFGRCNVAEHEKLILLAQLKPEKDSDEAVTYSLGKFGQRALDFYSIHVTKESTHPVKPLAQIAGNRYASAPVGKALSDACMGTIASFLSKYQDIIIEHQKVVKGNQKRLESLRELAGKENLEYPSVTLPPQPHTKEGVDAYNEVIARVRMWVNLNLWQKLKLSRDDAKPLLRLKGFPSFPLVERQANEVDWWDMVCNVKKLINEKKEDGKVFWQNLAGYKRQEALRPYLSSEEDRKKGKKFARYQLGDLLLHLEKKHGEDWGKVYDEAWERIDKKVEGLSKHIKLEEERRSEDAQSKAALTDWLRAKASFVIEGLKEADKDEFCRCELKLQKWYGDLRGKPFAIEAENSILDISGFSKQYNCAFIWQKDGVKKLNLYLIINYFKGGKLRFKKIKPEAFEANRFYTVINKKSGEIVPMEVNFNFDDPNLIILPLAFGKRQGREFIWNDLLSLETGSLKLANGRVIEKTLYNRRTRQDEPALFVALTFERREVLDSSNIKPMNLIGVDRGENIPAVIALTDPEGCPLSRFKDSLGNPTHILRIGESYKEKQRTIQAKKEVEQRRAGGYSRKYASKAKNLADDMVRNTARDLLYYAVTQDAMLIFENLSRGFGRQGKRTFMAERQYTRMEDWLTAKLAYEGLPSKTYLSKTLAQYTSKTCSNCGFTITSADYDRVLEKLKKTATGWMTTINGKELKVEGQITYYNRYKRQNVVKDLSVELDRLSEESVNNDISSWTKGRSGEALSLLKKRFSHRPVQEKFVCLNCGFETHADEQAALNIARSWLFLRSQEYKKYQTNKTTGKNTDKRAFVETWQSFYRKKLKEVWKPAV

SEQ ID NO: 32812 - protein, 979 aa, synthetic construct
  REGION 1..979: note = engineered CasX variant
QEIKRANKIRRRLVKDSNTKKAGKTGPMKTLLVRVMTPDLRERLENLRKKPENIPQPISNTSRANLNKLLTDYTEMKKAILHVYWEEFQKDPVGLMSRVAQPASKKIDQNKLKPEMDEKGNLTTAGFACSQCGQPLFVYKLEQVSEKGKAYTNYFGRCNVAEHEKLILLAQLKPEKDSDEAVTYSLGKFGQRALDFYSIHVTKESTHPVKPLAQIAGNRYASVPVGKALSDACMGTIASFLSKYQDIIIEHQKVVKGNQKRLESLRELAGKENLEYPSVTLPPQPHTKEGVDAYNEVIARVRMWVNLNLWQKLKLSRDDAKPLLRLKGFPSFPLVERQANEVDWWDMVCNVKKLINEKKEDGKVFWQNLAGYKRQEALRPYLSSEEDRKKGKKFARYQLGDLLLHLEKKHGEDWGKVYDEAWERIDKKVEGLSKHIKLEEERRSEDAQSKAALTDWLRAKASFVIEGLKEADKDEFCRCELKLQKWYGDLRGKPFAIEAENSILDISGFSKQYNCAFIWQKDGVKKLNLYLIINYFKGGKLRFKKIKPEAFEANRFYTVINKKSGEIVPMEVNFNFDDPNLIILPLAFGKRQGREFIWNDLLSLETGSLKLANGRVIEKTLYNRRTRQDEPALFVALTFERREVLDSSNIKPMNLIGVDRGENIPAVIALTDPEGCPLSRFKDSLGNPTHILRIGESYKEKQRTIQAKKEVEQRRAGGYSRKYASKAKNLADDMVRNTARDLLYYAVTQDAMLIFENLSRGFGRQGKRTFMAERQYTRMEDWLTAKLAYEGLPSKTYLSKTLAQYTSKTCSNCGFTITSADYDRVLEKLKKTATGWMTTINGKELKVEGQITYYNRYKRQNVVKDLSVELDRLSEESVNNDISSWTKGRSGEALSLLKKRFSHRPVQEKFVCLNCGFETHADEQAALNIARSWLFLRSQEYKKYQTNKTTGKNTDKRAFVETWQSFYRKKLKEVWKPAV

SEQ ID NO: 32813 - protein, 979 aa, synthetic construct
  REGION 1..979: note = engineered CasX variant
QEIKRANKIRRRLVKDSNTKKAGKTGPMKTLLVRVMTPDLRERLENLRKKPENIPQPISNTSRANLNKLLTDYTEMKKAILHVYWEEFQKDPVGLMSRVAQPASKKIDQNKLKPEMDEKGNLTTAGFACSQCGQPLFVYKLEQVSEKGKAYTNYFGRCNVAEHEKLIKLAQLKPEKDSDEAVTYSLGKFGQRALDFYSIHVTKESTHPVKPLAQIAGNRYASGPVGKALSDACMGTIASFLSKYQDIIIEHQKVVKGNQKRLESLRELAGKENLEYPSVTLPPQPHTKEGVDAYNEVIARVRMWVNLNLWQKLKLSRDDAKPLLRLKGFPSFPLVERQANEVDWWDMVCNVKKLINEKKEDGKVFWQNLAGYKRQEALRPYLSSEEDRKKGKKFARYQLGDLLLHLEKKHGEDWGKVYDEAWERIDKKVEGLSKHIKLEEERRSEDAQSKAALTDWLRAKASFVIEGLKEADKDEFCRCELKLQKWYGDLRGKPFAIEAENSILDISGFSKQYNCAFIWQKDGVKKLNLYLIINYFKGGKLRFKKIKPEAFEANRFYTVINKKSGEIVPMEVNFNFDDPNLIILPLAFGKRQGREFIWNDLLSLETGSLKLANGRVIEKTLYNRRTRQDEPALFVALTFERREVLDSSNIKPMNLIGVDRGENIPAVIALTDPEGCPLSRFKDSLGNPTHILRIGESYKEKQRTIQAKKEVEQRRAGGYSRKYASKAKNLADDMVRNTARDLLYYAVTQDAMLIFENLSRGFGRQGKRTFMAERQYTRMEDWLTAKLAYEGLPSKTYLSKTLAQYTSKTCSNCGFTITSADYDRVLEKLKKTATGWMTTINGKELKVEGQITYYNRYKRQNVVKDLSVELDRLSEESVNNDISSWTKGRSGEALSLLKKRFSHRPVQEKFVCLNCGFETHADEQAALNIARSWLFLRSQEYKKYQTNKTTGKNTDKRAFVETWQSFYRKKLKEVWKPAV

SEQ ID NO: 32814 - protein, 978 aa, synthetic construct
  REGION 1..978: note = engineered CasX variant
QEIKRANKIRRRLVKDSNTKKAGKTGPMKTLLVRVMTPDLRERLENLRKKPENIPQPISNTSRANLNKLLTDYTEMKKAILHVYWEEFQKDPVGLMSRVAQPASKKIDQNKLKPEMDEKGNLTTAGFACSQCGQPLFVYKLEQVSEKGKAYTNYFGRCNVAEHEKLILLAQLKPEKDSDEAVTYSLGKFGQRALDFYSIHVTKESTHPVKPLAQIAGNRYASPVGKALSDACMGTIASFLSKYQDIIIEHQKVVKGNQKRLESLRELAGKENLEYPSVTLPPQPHTKEGVDAYNEVIARVRMWVNLNLWQKLKLSRDDAKPLLRLKGFPSFPLVERQANEVDWWDMVCNVKKLINEKKEDGKVFWQNLAGYKRQEALRPYLSSEEDRKKGKKFARYQLGDLLLHLEKKHGEDWGKVYDEAWERIDKKVEGLSKHIKLEEERRSEDAQSKAALTDWLRAKASFVIEGLKEADKDEFCRCELKLQKWYGDLRGKPFAIEAENSILDISGFSKQYNCAFIWQKDGVKKLNLYLIINYFKGGKLRFKKIKPEAFEANRFYTVINKKSGEIVPMEVNFNFDDPNLIILPLAFGKRQGREFIWNDLLSLETGSLKLANGRVIEKTLYNRRTRQDEPALFVALTFERREVLDSSNIKPMNLIGVDRGENIPAVIALTDPEGCPLSRFKDSLGNPTHILRIGESYKEKQRTIQAKKEVEQRRAGGYSRKYASKAKNLADDMVRNTARDLLYYAVTQDAMLIFENLSRGFGRQGKRTFMAERQYTRMEDWLTAKLAYEGLPSKTYLSKTLAQYTSKTCSNCGFTITSADYDRVLEKLKKTATGWMTTINGKELKVEGQITYYNRYKRQNVVKDLSVELDRLSEESVNNDISSWTKGRSGEALSLLKKRFSHRPVQEKFVCLNCGFETHADEQAALNIARSWLFLRSQEYKKYQTNKTTGKNTDKRAFVETWQSFYRKKLKEVWKPAV

SEQ ID NO: 32815 - protein, 978 aa, synthetic construct
  REGION 1..978: note = engineered CasX variant
QEIKRANKIRRRLVKDSNTKKAGKTGPMKTLLVRVMTPDLRERLENLRKKPENIPQPISNTSRANLNKLLTDYTEMKKAILHVYWEEFQKDPVGLMSRVAQPASKKIDQNKLKPEMDEKGNLTTAGFACSQCGQPLFVYKLEQVSEKGKAYTNYFGRCNVAEHEKLILLAQLKPEKDSDEAVTYSLGKFGQRALDFYSIHVTKESTHPVKPLAQIAGNRYASYPVGKALSDACMGTIASFLSKYQDIIIEHQKVVKGNQKRLESLRELAGKENLEYPSVTLPPQPHTKEGVDAYNEVIARVRMWVNLNLWQKLKLSRDDAKPLLRLKKFPSFPLVERQANEVDWWDMVCNVKKLINEKKEDGKVFWQNLAGYKRQEALRPYLSSEEDRKKGKKFARYQLGDLLLHLEKKHGEDWGKVYDEAWERIDKKVEGLSKHIKLEEERRSEDAQSKAALTDWLRAKASFVIEGLKEADKDEFCRCELKLQKWYGDLRGKPFAIEAENSILDISGFSKQYNCAFIWQKDGVKKLNLYLIINYFKGGKLRFKKIKPEAFEANRFYTVINKKSGEIVPMEVNFNFDDPNLIILPLAFGKRQGREFIWNDLLSLETGSLKLANGRVIEKTLYNRRTRQDEPALFVALTFERREVLDSSNIKPMNLIGVDRGENIPAVIALTDPEGCPLSRFKDSLGNPTHILRIGESYKEKQRTIQAKKEVEQRRAGGYSRKYASKAKNLADDMVRNTARDLLYYAVTQDAMLIFENLSRGFGRQGKRTFMAERQYTRMEDWLTAKLAYEGLPSKTYLSKTLAQYTSKTCSNCGFTITSADYDRVLEKLKKTATGWMTTINGKELKVEGQITYYNRYKRQNVVKDLSVELDRLSEESVNNDISSWTKGRSGEALSLLKKRFSHRPVQEKFVCLNCGFETHADEQAALNIARSWLFLRSQEYKKYQTNKTTGNTDKRAFVETWQSFYRKKLKEVWKPAV

SEQ ID NO: 32816 - protein, 978 aa, synthetic construct
  REGION 1..978: note = engineered CasX variant
QEIKRANKIRRRLVKDSNTKKAGKTGPMKTLLVRVMTPDLRERLENLRKKPENIPQPISNTSRANLNKLLTDYTEMKKAILHVYWEEFQKDPVGLMSRVAQPASKKIDQNKLKPEMDEKGNLTTAGFACSQCGQPLFVYKLEQVSEKGKAYTNYFGRCNVAEHEKLILLAQLKPEKDSDEAVTYSLGKFGQRALDFYSIHVTKESTHPVKPLAQIAGNRYASHPVGKALSDACMGTIASFLSKYQDIIIEHQKVVKGNQKRLESLRELAGKENLEYPSVTLPPQPHTKEGVDAYNEVIARVRMWVNLNLWQKLKLSRDDAKPLLRLKKFPSFPLVERQANEVDWWDMVCNVKKLINEKKEDGKVFWQNLAGYKRQEALRPYLSSEEDRKKGKKFARYQLGDLLLHLEKKHGEDWGKVYDEAWERIDKKVEGLSKHIKLEEERRSEDAQSKAALTDWLRAKASFVIEGLKEADKDEFCRCELKLQKWYGDLRGKPFAIEAENSILDISGFSKQYNCAFIWQKDGVKKLNLYLIINYFKGGKLRFKKIKPEAFEANRFYTVINKKSGEIVPMEVNFNFDDPNLIILPLAFGKRQGREFIWNDLLSLETGSLKLANGRVIEKTLYNRRTRQDEPALFVALTFERREVLDSSNIKPMNLIGVDRGENIPAVIALTDPEGCPLSRFKDSLGNPTHILRIGESYKEKQRTIQAKKEVEQRRAGGYSRKYASKAKNLADDMVRNTARDLLYYAVTQDAMLIFENLSRGFGRQGKRTFMAERQYTRMEDWLTAKLAYEGLPSKTYLSKTLAQYTSKTCSNCGFTITSADYDRVLEKLKKTATGWMTTINGKELKVEGQITYYNRYKRQNVVKDLSVELDRLSEESVNNDISSWTKGRSGEALSLLKKRFSHRPVQEKFVCLNCGFETHADEQAALNIARSWLFLRSQEYKKYQTNKTTGNTDKRAFVETWQSFYRKKLKEVWKPAV

SEQ ID NO: 32817 - protein, 978 aa, synthetic construct
  REGION 1..978: note = engineered CasX variant
QEIKRANKIRRRLVKDSNTKKAGKTGPMKTLLVRVMTPDLRERLENLRKKPENIPQPISNTSRANLNKLLTDYTEMKKAILHVYWEEFQKDPVGLMSRVAQPASKKIDQNKLKPEMDEKGNLTTAGFACSQCGQPLFVYKLEQVSEKGKAYTNYFGRCNVAEHEKLILLAQLKPEKDSDEAVTYSLGKFGQRALDFYSIHVTKESTHPVKPLAQIAGNRYASSPVGKALSDACMGTIASFLSKYQDIIIEHQKVVKGNQKRLESLRELAGKENLEYPSVTLPPQPHTKEGVDAYNEVIARVRMWVNLNLWQKLKLSRDDAKPLLRLKKFPSFPLVERQANEVDWWDMVCNVKKLINEKKEDGKVFWQNLAGYKRQEALRPYLSSEEDRKKGKKFARYQLGDLLLHLEKKHGEDWGKVYDEAWERIDKKVEGLSKHIKLEEERRSEDAQSKAALTDWLRAKASFVIEGLKEADKDEFCRCELKLQKWYGDLRGKPFAIEAENSILDISGFSKQYNCAFIWQKDGVKKLNLYLIINYFKGGKLRFKKIKPEAFEANRFYTVINKKSGEIVPMEVNFNFDDPNLIILPLAFGKRQGREFIWNDLLSLETGSLKLANGRVIEKTLYNRRTRQDEPALFVALTFERREVLDSSNIKPMNLIGVDRGENIPAVIALTDPEGCPLSRFKDSLGNPTHILRIGESYKEKQRTIQAKKEVEQRRAGGYSRKYASKAKNLADDMVRNTARDLLYYAVTQDAMLIFENLSRGFGRQGKRTFMAERQYTRMEDWLTAKLAYEGLPSKTYLSKTLAQYTSKTCSNCGFTITSADYDRVLEKLKKTATGWMTTINGKELKVEGQITYYNRYKRQNVVKDLSVELDRLSEESVNNDISSWTKGRSGEALSLLKKRFSHRPVQEKFVCLNCGFETHADEQAALNIARSWLFLRSQEYKKYQTNKTTGNTDKRAFVETWQSFYRKKLKEVWKPAV

SEQ ID NO: 32818 - protein, 978 aa, synthetic construct
  REGION 1..978: note = engineered CasX variant
QEIKRANKIRRRLVKDSNTKKAGKTGPMKTLLVRVMTPDLRERLENLRKKPENIPQPISNTSRANLNKLLTDYTEMKKAILHVYWEEFQKDPVGLMSRVAQPASKKIDQNKLKPEMDEKGNLTTAGFACSQCGQPLFVYKLEQVSEKGKAYTNYFGRCNVAEHEKLILLAQLKPEKDSDEAVTYSLGKFGQRALDFYSIHVTKESTHPVKPLAQIAGNRYASTPVGKALSDACMGTIASFLSKYQDIIIEHQKVVKGNQKRLESLRELAGKENLEYPSVTLPPQPHTKEGVDAYNEVIARVRMWVNLNLWQKLKLSRDDAKPLLRLKKFPSFPLVERQANEVDWWDMVCNVKKLINEKKEDGKVFWQNLAGYKRQEALRPYLSSEEDRKKGKKFARYQLGDLLLHLEKKHGEDWGKVYDEAWERIDKKVEGLSKHIKLEEERRSEDAQSKAALTDWLRAKASFVIEGLKEADKDEFCRCELKLQKWYGDLRGKPFAIEAENSILDISGFSKQYNCAFIWQKDGVKKLNLYLIINYFKGGKLRFKKIKPEAFEANRFYTVINKKSGEIVPMEVNFNFDDPNLIILPLAFGKRQGREFIWNDLLSLETGSLKLANGRVIEKTLYNRRTRQDEPALFVALTFERREVLDSSNIKPMNLIGVDRGENIPAVIALTDPEGCPLSRFKDSLGNPTHILRIGESYKEKQRTIQAKKEVEQRRAGGYSRKYASKAKNLADDMVRNTARDLLYYAVTQDAMLIFENLSRGFGRQGKRTFMAERQYTRMEDWLTAKLAYEGLPSKTYLSKTLAQYTSKTCSNCGFTITSADYDRVLEKLKKTATGWMTTINGKELKVEGQITYYNRYKRQNVVKDLSVELDRLSEESVNNDISSWTKGRSGEALSLLKKRFSHRPVQEKFVCLNCGFETHADEQAALNIARSWLFLRSQEYKKYQTNKTTGNTDKRAFVETWQSFYRKKLKEVWKPAV

SEQ ID NO: 32819 - protein, 978 aa, synthetic construct
  REGION 1..978: note = engineered CasX variant
QEIKRANKIRRRLVKDSNTKKAGKTGPMKTLLVRVMTPDLRERLENLRKKPENIPQPISNTSRANLNKLLTDYTEMKKAILHVYWEEFQKDPVGLMSRVAQPASKKIDQNKLKPEMDEKGNLTTAGFACSQCGQPLFVYKLEQVSEKGKAYTNYFGRCNVAEHEKLILLAQLKPEKDSDEAVTYSLGKFGQRALDFYSIHVTKESTHPVKPLAQIAGNRYASAPVGKALSDACMGTIASFLSKYQDIIIEHQKVVKGNQKRLESLRELAGKENLEYPSVTLPPQPHTKEGVDAYNEVIARVRMWVNLNLWQKLKLSRDDAKPLLRLKKFPSFPLVERQANEVDWWDMVCNVKKLINEKKEDGKVFWQNLAGYKRQEALRPYLSSEEDRKKGKKFARYQLGDLLLHLEKKHGEDWGKVYDEAWERIDKKVEGLSKHIKLEEERRSEDAQSKAALTDWLRAKASFVIEGLKEADKDEFCRCELKLQKWYGDLRGKPFAIEAENSILDISGFSKQYNCAFIWQKDGVKKLNLYLIINYFKGGKLRFKKIKPEAFEANRFYTVINKKSGEIVPMEVNFNFDDPNLIILPLAFGKRQGREFIWNDLLSLETGSLKLANGRVIEKTLYNRRTRQDEPALFVALTFERREVLDSSNIKPMNLIGVDRGENIPAVIALTDPEGCPLSRFKDSLGNPTHILRIGESYKEKQRTIQAKKEVEQRRAGGYSRKYASKAKNLADDMVRNTARDLLYYAVTQDAMLIFENLSRGFGRQGKRTFMAERQYTRMEDWLTAKLAYEGLPSKTYLSKTLAQYTSKTCSNCGFTITSADYDRVLEKLKKTATGWMTTINGKELKVEGQITYYNRYKRQNVVKDLSVELDRLSEESVNNDISSWTKGRSGEALSLLKKRFSHRPVQEKFVCLNCGFETHADEQAALNIARSWLFLRSQEYKKYQTNKTTGNTDKRAFVETWQSFYRKKLKEVWKPAV

SEQ ID NO: 32820 - protein, 978 aa, synthetic construct
  REGION 1..978: note = engineered CasX variant
QEIKRANKIRRRLVKDSNTKKAGKTGPMKTLLVRVMTPDLRERLENLRKKPENIPQPISNTSRANLNKLLTDYTEMKKAILHVYWEEFQKDPVGLMSRVAQPASKKIDQNKLKPEMDEKGNLTTAGFACSQCGQPLFVYKLEQVSEKGKAYTNYFGRCNVAEHEKLILLAQLKPEKDSDEAVTYSLGKFGQRALDFYSIHVTKESTHPVKPLAQIAGNRYASVPVGKALSDACMGTIASFLSKYQDIIIEHQKVVKGNQKRLESLRELAGKENLEYPSVTLPPQPHTKEGVDAYNEVIARVRMWVNLNLWQKLKLSRDDAKPLLRLKKFPSFPLVERQANEVDWWDMVCNVKKLINEKKEDGKVFWQNLAGYKRQEALRPYLSSEEDRKKGKKFARYQLGDLLLHLEKKHGEDWGKVYDEAWERIDKKVEGLSKHIKLEEERRSEDAQSKAALTDWLRAKASFVIEGLKEADKDEFCRCELKLQKWYGDLRGKPFAIEAENSILDISGFSKQYNCAFIWQKDGVKKLNLYLIINYFKGGKLRFKKIKPEAFEANRFYTVINKKSGEIVPMEVNFNFDDPNLIILPLAFGKRQGREFIWNDLLSLETGSLKLANGRVIEKTLYNRRTRQDEPALFVALTFERREVLDSSNIKPMNLIGVDRGENIPAVIALTDPEGCPLSRFKDSLGNPTHILRIGESYKEKQRTIQAKKEVEQRRAGGYSRKYASKAKNLADDMVRNTARDLLYYAVTQDAMLIFENLSRGFGRQGKRTFMAERQYTRMEDWLTAKLAYEGLPSKTYLSKTLAQYTSKTCSNCGFTITSADYDRVLEKLKKTATGWMTTINGKELKVEGQITYYNRYKRQNVVKDLSVELDRLSEESVNNDISSWTKGRSGEALSLLKKRFSHRPVQEKFVCLNCGFETHADEQAALNIARSWLFLRSQEYKKYQTNKTTGNTDKRAFVETWQSFYRKKLKEVWKPAV

SEQ ID NO: 32821 - protein, 978 aa, synthetic construct
  REGION 1..978: note = engineered CasX variant
QEIKRANKIRRRLVKDSNTKKAGKTGPMKTLLVRVMTPDLRERLENLRKKPENIPQPISNTSRANLNKLLTDYTEMKKAILHVYWEEFQKDPVGLMSRVAQPASKKIDQNKLKPEMDEKGNLTTAGFACSQCGQPLFVYKLEQVSEKGKAYTNYFGRCNVAEHEKLIKLAQLKPEKDSDEAVTYSLGKFGQRALDFYSIHVTKESTHPVKPLAQIAGNRYASGPVGKALSDACMGTIASFLSKYQDIIIEHQKVVKGNQKRLESLRELAGKENLEYPSVTLPPQPHTKEGVDAYNEVIARVRMWVNLNLWQKLKLSRDDAKPLLRLKKFPSFPLVERQANEVDWWDMVCNVKKLINEKKEDGKVFWQNLAGYKRQEALRPYLSSEEDRKKGKKFARYQLGDLLLHLEKKHGEDWGKVYDEAWERIDKKVEGLSKHIKLEEERRSEDAQSKAALTDWLRAKASFVIEGLKEADKDEFCRCELKLQKWYGDLRGKPFAIEAENSILDISGFSKQYNCAFIWQKDGVKKLNLYLIINYFKGGKLRFKKIKPEAFEANRFYTVINKKSGEIVPMEVNFNFDDPNLIILPLAFGKRQGREFIWNDLLSLETGSLKLANGRVIEKTLYNRRTRQDEPALFVALTFERREVLDSSNIKPMNLIGVDRGENIPAVIALTDPEGCPLSRFKDSLGNPTHILRIGESYKEKQRTIQAKKEVEQRRAGGYSRKYASKAKNLADDMVRNTARDLLYYAVTQDAMLIFENLSRGFGRQGKRTFMAERQYTRMEDWLTAKLAYEGLPSKTYLSKTLAQYTSKTCSNCGFTITSADYDRVLEKLKKTATGWMTTINGKELKVEGQITYYNRYKRQNVVKDLSVELDRLSEESVNNDISSWTKGRSGEALSLLKKRFSHRPVQEKFVCLNCGFETHADEQAALNIARSWLFLRSQEYKKYQTNKTTGNTDKRAFVETWQSFYRKKLKEVWKPAV

SEQ ID NO: 32822 - protein, 977 aa, synthetic construct
  REGION 1..977: note = engineered CasX variant
QEIKRANKIRRRLVKDSNTKKAGKTGPMKTLLVRVMTPDLRERLENLRKKPENIPQPISNTSRANLNKLLTDYTEMKKAILHVYWEEFQKDPVGLMSRVAQPASKKIDQNKLKPEMDEKGNLTTAGFACSQCGQPLFVYKLEQVSEKGKAYTNYFGRCNVAEHEKLILLAQLKPEKDSDEAVTYSLGKFGQRALDFYSIHVTKESTHPVKPLAQIAGNRYASPVGKALSDACMGTIASFLSKYQDIIIEHQKVVKGNQKRLESLRELAGKENLEYPSVTLPPQPHTKEGVDAYNEVIARVRMWVNLNLWQKLKLSRDDAKPLLRLKKFPSFPLVERQANEVDWWDMVCNVKKLINEKKEDGKVFWQNLAGYKRQEALRPYLSSEEDRKKGKKFARYQLGDLLLHLEKKHGEDWGKVYDEAWERIDKKVEGLSKHIKLEEERRSEDAQSKAALTDWLRAKASFVIEGLKEADKDEFCRCELKLQKWYGDLRGKPFAIEAENSILDISGFSKQYNCAFIWQKDGVKKLNLYLIINYFKGGKLRFKKIKPEAFEANRFYTVINKKSGEIVPMEVNFNFDDPNLIILPLAFGKRQGREFIWNDLLSLETGSLKLANGRVIEKTLYNRRTRQDEPALFVALTFERREVLDSSNIKPMNLIGVDRGENIPAVIALTDPEGCPLSRFKDSLGNPTHILRIGESYKEKQRTIQAKKEVEQRRAGGYSRKYASKAKNLADDMVRNTARDLLYYAVTQDAMLIFENLSRGFGRQGKRTFMAERQYTRMEDWLTAKLAYEGLPSKTYLSKTLAQYTSKTCSNCGFTITSADYDRVLEKLKKTATGWMTTINGKELKVEGQITYYNRYKRQNVVKDLSVELDRLSEESVNNDISSWTKGRSGEALSLLKKRFSHRPVQEKFVCLNCGFETHADEQAALNIARSWLFLRSQEYKKYQTNKTTGNTDKRAFVETWQSFYRKKLKEVWKPAV

SEQ ID NO: 32823 - protein, 978 aa, synthetic construct
  REGION 1..978: note = engineered CasX variant
QEIKRANKIRRRLVKDSNTKKAGKTGPMKTLLVRVMTPDLRERLENLRKKPENIPQPISNTSRANLNKLLTDYTEMKKAILHVYWEEFQKDPVGLMSRVAQPASKKIDQNKLKPEMDEKGNLTTAGFACSQCGQPLFVYKLEQVSEKGKAYTNYFGRCNVAEHEKLILLAQLKPEKDSDEAVTYSLGKFGQRALDFYSIHVTKESTHPVKPLAQIAGNRYASYPVGKALSDACMGTIASFLSKYQDIIIEHQKVVKGNQKRLESLRELAGKENLEYPSVTLPPQPHTKEGVDAYNEVIARVRMWVNLNLWQKLKLSRDDAKPLLRLKGFPSFPLVERQANEVDWWDMVCNVKKLINEKKEDGKVFWQNLAGYKRQEALRPYLSSEEDRKKGKKFARYQLGDLLLHLEKKHGEDWGKVYDEAWERIDKKVEGLSKHIKLEEERRSEDAQSKAALTDWLRAKASFVIEGLKEADKDEFCRCELKLQKWYGDLRGKPFAIEAENSILDISGFSKQYNCAFIWQKDGVKKLNLYLIINYFKGGKLRFKKIKPEAFEANRFYTVINKKSGEIVPMEVNFNFDDPNLIILPLAFGKRQGREFIWNDLLSLETGSLKLANGRVIEKTLYNRRTRQDEPALFVALTFERREVLDSSNIKPMNLIGVDRGENIPAVIALTDPEGCPLSRFKDSLGNPTHILRIGERYKEKQRTIQAKKEVEQRRAGGYSRKYASKAKNLADDMVRNTARDLLYYAVTQDAMLIFENLSRGFGRQGKRTFMAERQYTRMEDWLTAKLAYEGLPSKTYLSKTLAQYTSKTCSNCGFTITSADYDRVLEKLKKTATGWMTTINGKELKVEGQITYYNRYKRQNVVKDLSVELDRLSEESVNNDISSWTKGRSGEALSLLKKRFSHRPVQEKFVCLNCGFETHADEQAALNIARSWLFLRSQEYKKYQTNKTTGNTDKRAFVETWQSFYRKKLKEVWKPAV

SEQ ID NO: 32824 - protein, 978 aa, synthetic construct
  REGION 1..978: note = engineered CasX variant
QEIKRANKIRRRLVKDSNTKKAGKTGPMKTLLVRVMTPDLRERLENLRKKPENIPQPISNTSRANLNKLLTDYTEMKKAILHVYWEEFQKDPVGLMSRVAQPASKKIDQNKLKPEMDEKGNLTTAGFACSQCGQPLFVYKLEQVSEKGKAYTNYFGRCNVAEHEKLILLAQLKPEKDSDEAVTYSLGKFGQRALDFYSIHVTKESTHPVKPLAQIAGNRYASHPVGKALSDACMGTIASFLSKYQDIIIEHQKVVKGNQKRLESLRELAGKENLEYPSVTLPPQPHTKEGVDAYNEVIARVRMWVNLNLWQKLKLSRDDAKPLLRLKGFPSFPLVERQANEVDWWDMVCNVKKLINEKKEDGKVFWQNLAGYKRQEALRPYLSSEEDRKKGKKFARYQLGDLLLHLEKKHGEDWGKVYDEAWERIDKKVEGLSKHIKLEEERRSEDAQSKAALTDWLRAKASFVIEGLKEADKDEFCRCELKLQKWYGDLRGKPFAIEAENSILDISGFSKQYNCAFIWQKDGVKKLNLYLIINYFKGGKLRFKKIKPEAFEANRFYTVINKKSGEIVPMEVNFNFDDPNLIILPLAFGKRQGREFIWNDLLSLETGSLKLANGRVIEKTLYNRRTRQDEPALFVALTFERREVLDSSNIKPMNLIGVDRGENIPAVIALTDPEGCPLSRFKDSLGNPTHILRIGERYKEKQRTIQAKKEVEQRRAGGYSRKYASKAKNLADDMVRNTARDLLYYAVTQDAMLIFENLSRGFGRQGKRTFMAERQYTRMEDWLTAKLAYEGLPSKTYLSKTLAQYTSKTCSNCGFTITSADYDRVLEKLKKTATGWMTTINGKELKVEGQITYYNRYKRQNVVKDLSVELDRLSEESVNNDISSWTKGRSGEALSLLKKRFSHRPVQEKFVCLNCGFETHADEQAALNIARSWLFLRSQEYKKYQTNKTTGNTDKRAFVETWQSFYRKKLKEVWKPAV

SEQ ID NO: 32825 - protein, 978 aa, synthetic construct
  REGION 1..978: note = engineered CasX variant
QEIKRANKIRRRLVKDSNTKKAGKTGPMKTLLVRVMTPDLRERLENLRKKPENIPQPISNTSRANLNKLLTDYTEMKKAILHVYWEEFQKDPVGLMSRVAQPASKKIDQNKLKPEMDEKGNLTTAGFACSQCGQPLFVYKLEQVSEKGKAYTNYFGRCNVAEHEKLILLAQLKPEKDSDEAVTYSLGKFGQRALDFYSIHVTKESTHPVKPLAQIAGNRYASSPVGKALSDACMGTIASFLSKYQDIIIEHQKVVKGNQKRLESLRELAGKENLEYPSVTLPPQPHTKEGVDAYNEVIARVRMWVNLNLWQKLKLSRDDAKPLLRLKGFPSFPLVERQANEVDWWDMVCNVKKLINEKKEDGKVFWQNLAGYKRQEALRPYLSSEEDRKKGKKFARYQLGDLLLHLEKKHGEDWGKVYDEAWERIDKKVEGLSKHIKLEEERRSEDAQSKAALTDWLRAKASFVIEGLKEADKDEFCRCELKLQKWYGDLRGKPFAIEAENSILDISGFSKQYNCAFIWQKDGVKKLNLYLIINYFKGGKLRFKKIKPEAFEANRFYTVINKKSGEIVPMEVNFNFDDPNLIILPLAFGKRQGREFIWNDLLSLETGSLKLANGRVIEKTLYNRRTRQDEPALFVALTFERREVLDSSNIKPMNLIGVDRGENIPAVIALTDPEGCPLSRFKDSLGNPTHILRIGERYKEKQRTIQAKKEVEQRRAGGYSRKYASKAKNLADDMVRNTARDLLYYAVTQDAMLIFENLSRGFGRQGKRTFMAERQYTRMEDWLTAKLAYEGLPSKTYLSKTLAQYTSKTCSNCGFTITSADYDRVLEKLKKTATGWMTTINGKELKVEGQITYYNRYKRQNVVKDLSVELDRLSEESVNNDISSWTKGRSGEALSLLKKRFSHRPVQEKFVCLNCGFETHADEQAALNIARSWLFLRSQEYKKYQTNKTTGNTDKRAFVETWQSFYRKKLKEVWKPAV

SEQ ID NO: 32826 - protein, 978 aa, synthetic construct
  REGION 1..978: note = engineered CasX variant
QEIKRANKIRRRLVKDSNTKKAGKTGPMKTLLVRVMTPDLRERLENLRKKPENIPQPISNTSRANLNKLLTDYTEMKKAILHVYWEEFQKDPVGLMSRVAQPASKKIDQNKLKPEMDEKGNLTTAGFACSQCGQPLFVYKLEQVSEKGKAYTNYFGRCNVAEHEKLILLAQLKPEKDSDEAVTYSLGKFGQRALDFYSIHVTKESTHPVKPLAQIAGNRYASTPVGKALSDACMGTIASFLSKYQDIIIEHQKVVKGNQKRLESLRELAGKENLEYPSVTLPPQPHTKEGVDAYNEVIARVRMWVNLNLWQKLKLSRDDAKPLLRLKGFPSFPLVERQANEVDWWDMVCNVKKLINEKKEDGKVFWQNLAGYKRQEALRPYLSSEEDRKKGKKFARYQLGDLLLHLEKKHGEDWGKVYDEAWERIDKKVEGLSKHIKLEEERRSEDAQSKAALTDWLRAKASFVIEGLKEADKDEFCRCELKLQKWYGDLRGKPFAIEAENSILDISGFSKQYNCAFIWQKDGVKKLNLYLIINYFKGGKLRFKKIKPEAFEANRFYTVINKKSGEIVPMEVNFNFDDPNLIILPLAFGKRQGREFIWNDLLSLETGSLKLANGRVIEKTLYNRRTRQDEPALFVALTFERREVLDSSNIKPMNLIGVDRGENIPAVIALTDPEGCPLSRFKDSLGNPTHILRIGERYKEKQRTIQAKKEVEQRRAGGYSRKYASKAKNLADDMVRNTARDLLYYAVTQDAMLIFENLSRGFGRQGKRTFMAERQYTRMEDWLTAKLAYEGLPSKTYLSKTLAQYTSKTCSNCGFTITSADYDRVLEKLKKTATGWMTTINGKELKVEGQITYYNRYKRQNVVKDLSVELDRLSEESVNNDISSWTKGRSGEALSLLKKRFSHRPVQEKFVCLNCGFETHADEQAALNIARSWLFLRSQEYKKYQTNKTTGNTDKRAFVETWQSFYRKKLKEVWKPAV

SEQ ID NO: 32827 - protein, 978 aa, synthetic construct
  REGION 1..978: note = engineered CasX variant
QEIKRANKIRRRLVKDSNTKKAGKTGPMKTLLVRVMTPDLRERLENLRKKPENIPQPISNTSRANLNKLLTDYTEMKKAILHVYWEEFQKDPVGLMSRVAQPASKKIDQNKLKPEMDEKGNLTTAGFACSQCGQPLFVYKLEQVSEKGKAYTNYFGRCNVAEHEKLILLAQLKPEKDSDEAVTYSLGKFGQRALDFYSIHVTKESTHPVKPLAQIAGNRYASAPVGKALSDACMGTIASFLSKYQDIIIEHQKVVKGNQKRLESLRELAGKENLEYPSVTLPPQPHTKEGVDAYNEVIARVRMWVNLNLWQKLKLSRDDAKPLLRLKGFPSFPLVERQANEVDWWDMVCNVKKLINEKKEDGKVFWQNLAGYKRQEALRPYLSSEEDRKKGKKFARYQLGDLLLHLEKKHGEDWGKVYDEAWERIDKKVEGLSKHIKLEEERRSEDAQSKAALTDWLRAKASFVIEGLKEADKDEFCRCELKLQKWYGDLRGKPFAIEAENSILDISGFSKQYNCAFIWQKDGVKKLNLYLIINYFKGGKLRFKKIKPEAFEANRFYTVINKKSGEIVPMEVNFNFDDPNLIILPLAFGKRQGREFIWNDLLSLETGSLKLANGRVIEKTLYNRRTRQDEPALFVALTFERREVLDSSNIKPMNLIGVDRGENIPAVIALTDPEGCPLSRFKDSLGNPTHILRIGERYKEKQRTIQAKKEVEQRRAGGYSRKYASKAKNLADDMVRNTARDLLYYAVTQDAMLIFENLSRGFGRQGKRTFMAERQYTRMEDWLTAKLAYEGLPSKTYLSKTLAQYTSKTCSNCGFTITSADYDRVLEKLKKTATGWMTTINGKELKVEGQITYYNRYKRQNVVKDLSVELDRLSEESVNNDISSWTKGRSGEALSLLKKRFSHRPVQEKFVCLNCGFETHADEQAALNIARSWLFLRSQEYKKYQTNKTTGNTDKRAFVETWQSFYRKKLKEVWKPAV

SEQ ID NO: 32828 - protein, 978 aa, synthetic construct
  REGION 1..978: note = engineered CasX variant
QEIKRANKIRRRLVKDSNTKKAGKTGPMKTLLVRVMTPDLRERLENLRKKPENIPQPISNTSRANLNKLLTDYTEMKKAILHVYWEEFQKDPVGLMSRVAQPASKKIDQNKLKPEMDEKGNLTTAGFACSQCGQPLFVYKLEQVSEKGKAYTNYFGRCNVAEHEKLILLAQLKPEKDSDEAVTYSLGKFGQRALDFYSIHVTKESTHPVKPLAQIAGNRYASVPVGKALSDACMGTIASFLSKYQDIIIEHQKVVKGNQKRLESLRELAGKENLEYPSVTLPPQPHTKEGVDAYNEVIARVRMWVNLNLWQKLKLSRDDAKPLLRLKGFPSFPLVERQANEVDWWDMVCNVKKLINEKKEDGKVFWQNLAGYKRQEALRPYLSSEEDRKKGKKFARYQLGDLLLHLEKKHGEDWGKVYDEAWERIDKKVEGLSKHIKLEEERRSEDAQSKAALTDWLRAKASFVIEGLKEADKDEFCRCELKLQKWYGDLRGKPFAIEAENSILDISGFSKQYNCAFIWQKDGVKKLNLYLIINYFKGGKLRFKKIKPEAFEANRFYTVINKKSGEIVPMEVNFNFDDPNLIILPLAFGKRQGREFIWNDLLSLETGSLKLANGRVIEKTLYNRRTRQDEPALFVALTFERREVLDSSNIKPMNLIGVDRGENIPAVIALTDPEGCPLSRFKDSLGNPTHILRIGERYKEKQRTIQAKKEVEQRRAGGYSRKYASKAKNLADDMVRNTARDLLYYAVTQDAMLIFENLSRGFGRQGKRTFMAERQYTRMEDWLTAKLAYEGLPSKTYLSKTLAQYTSKTCSNCGFTITSADYDRVLEKLKKTATGWMTTINGKELKVEGQITYYNRYKRQNVVKDLSVELDRLSEESVNNDISSWTKGRSGEALSLLKKRFSHRPVQEKFVCLNCGFETHADEQAALNIARSWLFLRSQEYKKYQTNKTTGNTDKRAFVETWQSFYRKKLKEVWKPAV

SEQ ID NO: 32829 - protein, 978 aa, synthetic construct
  REGION 1..978: note = engineered CasX variant
QEIKRANKIRRRLVKDSNTKKAGKTGPMKTLLVRVMTPDLRERLENLRKKPENIPQPISNTSRANLNKLLTDYTEMKKAILHVYWEEFQKDPVGLMSRVAQPASKKIDQNKLKPEMDEKGNLTTAGFACSQCGQPLFVYKLEQVSEKGKAYTNYFGRCNVAEHEKLIKLAQLKPEKDSDEAVTYSLGKFGQRALDFYSIHVTKESTHPVKPLAQIAGNRYASGPVGKALSDACMGTIASFLSKYQDIIIEHQKVVKGNQKRLESLRELAGKENLEYPSVTLPPQPHTKEGVDAYNEVIARVRMWVNLNLWQKLKLSRDDAKPLLRLKGFPSFPLVERQANEVDWWDMVCNVKKLINEKKEDGKVFWQNLAGYKRQEALRPYLSSEEDRKKGKKFARYQLGDLLLHLEKKHGEDWGKVYDEAWERIDKKVEGLSKHIKLEEERRSEDAQSKAALTDWLRAKASFVIEGLKEADKDEFCRCELKLQKWYGDLRGKPFAIEAENSILDISGFSKQYNCAFIWQKDGVKKLNLYLIINYFKGGKLRFKKIKPEAFEANRFYTVINKKSGEIVPMEVNFNFDDPNLIILPLAFGKRQGREFIWNDLLSLETGSLKLANGRVIEKTLYNRRTRQDEPALFVALTFERREVLDSSNIKPMNLIGVDRGENIPAVIALTDPEGCPLSRFKDSLGNPTHILRIGERYKEKQRTIQAKKEVEQRRAGGYSRKYASKAKNLADDMVRNTARDLLYYAVTQDAMLIFENLSRGFGRQGKRTFMAERQYTRMEDWLTAKLAYEGLPSKTYLSKTLAQYTSKTCSNCGFTITSADYDRVLEKLKKTATGWMTTINGKELKVEGQITYYNRYKRQNVVKDLSVELDRLSEESVNNDISSWTKGRSGEALSLLKKRFSHRPVQEKFVCLNCGFETHADEQAALNIARSWLFLRSQEYKKYQTNKTTGNTDKRAFVETWQSFYRKKLKEVWKPAV

SEQ ID NO: 32830 - protein, 977 aa, synthetic construct
  REGION 1..977: note = engineered CasX variant
QEIKRANKIRRRLVKDSNTKKAGKTGPMKTLLVRVMTPDLRERLENLRKKPENIPQPISNTSRANLNKLLTDYTEMKKAILHVYWEEFQKDPVGLMSRVAQPASKKIDQNKLKPEMDEKGNLTTAGFACSQCGQPLFVYKLEQVSEKGKAYTNYFGRCNVAEHEKLILLAQLKPEKDSDEAVTYSLGKFGQRALDFYSIHVTKESTHPVKPLAQIAGNRYASPVGKALSDACMGTIASFLSKYQDIIIEHQKVVKGNQKRLESLRELAGKENLEYPSVTLPPQPHTKEGVDAYNEVIARVRMWVNLNLWQKLKLSRDDAKPLLRLKGFPSFPLVERQANEVDWWDMVCNVKKLINEKKEDGKVFWQNLAGYKRQEALRPYLSSEEDRKKGKKFARYQLGDLLLHLEKKHGEDWGKVYDEAWERIDKKVEGLSKHIKLEEERRSEDAQSKAALTDWLRAKASFVIEGLKEADKDEFCRCELKLQKWYGDLRGKPFAIEAENSILDISGFSKQYNCAFIWQKDGVKKLNLYLIINYFKGGKLRFKKIKPEAFEANRFYTVINKKSGEIVPMEVNFNFDDPNLIILPLAFGKRQGREFIWNDLLSLETGSLKLANGRVIEKTLYNRRTRQDEPALFVALTFERREVLDSSNIKPMNLIGVDRGENIPAVIALTDPEGCPLSRFKDSLGNPTHILRIGERYKEKQRTIQAKKEVEQRRAGGYSRKYASKAKNLADDMVRNTARDLLYYAVTQDAMLIFENLSRGFGRQGKRTFMAERQYTRMEDWLTAKLAYEGLPSKTYLSKTLAQYTSKTCSNCGFTITSADYDRVLEKLKKTATGWMTTINGKELKVEGQITYYNRYKRQNVVKDLSVELDRLSEESVNNDISSWTKGRSGEALSLLKKRFSHRPVQEKFVCLNCGFETHADEQAALNIARSWLFLRSQEYKKYQTNKTTGNTDKRAFVETWQSFYRKKLKEVWKPAV

SEQ ID NO: 32831 - protein, 978 aa, synthetic construct
  REGION 1..978: note = engineered CasX variant
QEIKRANKIRRRLVKDSNTKKAGKTGPMKTLLVRVMTPDLRERLENLRKKPENIPQPISNTSRANLNKLLTDYTEMKKAILHVYWEEFQKDPVGLMSRVAQPASKKIDQNKLKPEMDEKGNLTTAGFACSQCGQPLFVYKLEQVSEKGKAYTNYFGRCNVAEHEKLILLAQLKPEKDSDEAVTYSLGKFGQRALDFYSIHVTKESTHPVKPLAQIAGNRYASYPVGKALSDACMGTIASFLSKYQDIIIEHQKVVKGNQKRLESLRELAGKENLEYPSVTLPPQPHTKEGVDAYNEVIARVRMWVNLNLWQKLKLSRDDAKPLLRLKGFPSFPLVERQANEVDWWDMVCNVKKLINEKKEDGKVFWQNLAGYKRQEALRPYLSSEEDRKKGKKFARYQLGDLLLHLEKKHGEDWGKVYDEAWERIDKKVEGLSKHIKLEEERRSEDAQSKAALTDWLRAKASFVIEGLKEADKDEFCRCELKLQKWYGDLRGKPFAIEAENSILDISGFSKQYNCAFIWQKDGVKKLNLYLIINYFKGGKLRFKKIKPEAFEANRFYTVINKKSGEIVPMEVNFNFDDPNLIILPLAFGKRQGREFIWNDLLSLETGSLQLANGRVIEKTLYNRRTRQDEPALFVALTFERREVLDSSNIKPMNLIGVDRGENIPAVIALTDPEGCPLSRFKDSLGNPTHILRIGESYKEKQRTIQAKKEVEQRRAGGYSRKYASKAKNLADDMVRNTARDLLYYAVTQDAMLIFENLSRGFGRQGKRTFMAERQYTRMEDWLTAKLAYEGLPSKTYLSKTLAQYTSKTCSNCGFTITSADYDRVLEKLKKTATGWMTTINGKELKVEGQITYYNRYKRQNVVKDLSVELDRLSEESVNNDISSWTKGRSGEALSLLKKRFSHRPVQEKFVCLNCGFETHADEQAALNIARSWLFLRSQEYKKYQTNKTTGNTDKRAFVETWQSFYRKKLKEVWKPAV

SEQ ID NO: 32832 - protein, 978 aa, synthetic construct
  REGION 1..978: note = engineered CasX variant
QEIKRANKIRRRLVKDSNTKKAGKTGPMKTLLVRVMTPDLRERLENLRKKPENIPQPISNTSRANLNKLLTDYTEMKKAILHVYWEEFQKDPVGLMSRVAQPASKKIDQNKLKPEMDEKGNLTTAGFACSQCGQPLFVYKLEQVSEKGKAYTNYFGRCNVAEHEKLILLAQLKPEKDSDEAVTYSLGKFGQRALDFYSIHVTKESTHPVKPLAQIAGNRYASHPVGKALSDACMGTIASFLSKYQDIIIEHQKVVKGNQKRLESLRELAGKENLEYPSVTLPPQPHTKEGVDAYNEVIARVRMWVNLNLWQKLKLSRDDAKPLLRLKGFPSFPLVERQANEVDWWDMVCNVKKLINEKKEDGKVFWQNLAGYKRQEALRPYLSSEEDRKKGKKFARYQLGDLLLHLEKKHGEDWGKVYDEAWERIDKKVEGLSKHIKLEEERRSEDAQSKAALTDWLRAKASFVIEGLKEADKDEFCRCELKLQKWYGDLRGKPFAIEAENSILDISGFSKQYNCAFIWQKDGVKKLNLYLIINYFKGGKLRFKKIKPEAFEANRFYTVINKKSGEIVPMEVNFNFDDPNLIILPLAFGKRQGREFIWNDLLSLETGSLQLANGRVIEKTLYNRRTRQDEPALFVALTFERREVLDSSNIKPMNLIGVDRGENIPAVIALTDPEGCPLSRFKDSLGNPTHILRIGESYKEKQRTIQAKKEVEQRRAGGYSRKYASKAKNLADDMVRNTARDLLYYAVTQDAMLIFENLSRGFGRQGKRTFMAERQYTRMEDWLTAKLAYEGLPSKTYLSKTLAQYTSKTCSNCGFTITSADYDRVLEKLKKTATGWMTTINGKELKVEGQITYYNRYKRQNVVKDLSVELDRLSEESVNNDISSWTKGRSGEALSLLKKRFSHRPVQEKFVCLNCGFETHADEQAALNIARSWLFLRSQEYKKYQTNKTTGNTDKRAFVETWQSFYRKKLKEVWKPAV

SEQ ID NO: 32833 - protein, 978 aa, synthetic construct
  REGION 1..978: note = engineered CasX variant
QEIKRANKIRRRLVKDSNTKKAGKTGPMKTLLVRVMTPDLRERLENLRKKPENIPQPISNTSRANLNKLLTDYTEMKKAILHVYWEEFQKDPVGLMSRVAQPASKKIDQNKLKPEMDEKGNLTTAGFACSQCGQPLFVYKLEQVSEKGKAYTNYFGRCNVAEHEKLILLAQLKPEKDSDEAVTYSLGKFGQRALDFYSIHVTKESTHPVKPLAQIAGNRYASSPVGKALSDACMGTIASFLSKYQDIIIEHQKVVKGNQKRLESLRELAGKENLEYPSVTLPPQPHTKEGVDAYNEVIARVRMWVNLNLWQKLKLSRDDAKPLLRLKGFPSFPLVERQANEVDWWDMVCNVKKLINEKKEDGKVFWQNLAGYKRQEALRPYLSSEEDRKKGKKFARYQLGDLLLHLEKKHGEDWGKVYDEAWERIDKKVEGLSKHIKLEEERRSEDAQSKAALTDWLRAKASFVIEGLKEADKDEFCRCELKLQKWYGDLRGKPFAIEAENSILDISGFSKQYNCAFIWQKDGVKKLNLYLIINYFKGGKLRFKKIKPEAFEANRFYTVINKKSGEIVPMEVNFNFDDPNLIILPLAFGKRQGREFIWNDLLSLETGSLQLANGRVIEKTLYNRRTRQDEPALFVALTFERREVLDSSNIKPMNLIGVDRGENIPAVIALTDPEGCPLSRFKDSLGNPTHILRIGESYKEKQRTIQAKKEVEQRRAGGYSRKYASKAKNLADDMVRNTARDLLYYAVTQDAMLIFENLSRGFGRQGKRTFMAERQYTRMEDWLTAKLAYEGLPSKTYLSKTLAQYTSKTCSNCGFTITSADYDRVLEKLKKTATGWMTTINGKELKVEGQITYYNRYKRQNVVKDLSVELDRLSEESVNNDISSWTKGRSGEALSLLKKRFSHRPVQEKFVCLNCGFETHADEQAALNIARSWLFLRSQEYKKYQTNKTTGNTDKRAFVETWQSFYRKKLKEVWKPAV

SEQ ID NO: 32834 - protein, 978 aa, synthetic construct
  REGION 1..978: note = engineered CasX variant
QEIKRANKIRRRLVKDSNTKKAGKTGPMKTLLVRVMTPDLRERLENLRKKPENIPQPISNTSRANLNKLLTDYTEMKKAILHVYWEEFQKDPVGLMSRVAQPASKKIDQNKLKPEMDEKGNLTTAGFACSQCGQPLFVYKLEQVSEKGKAYTNYFGRCNVAEHEKLILLAQLKPEKDSDEAVTYSLGKFGQRALDFYSIHVTKESTHPVKPLAQIAGNRYASTPVGKALSDACMGTIASFLSKYQDIIIEHQKVVKGNQKRLESLRELAGKENLEYPSVTLPPQPHTKEGVDAYNEVIARVRMWVNLNLWQKLKLSRDDAKPLLRLKGFPSFPLVERQANEVDWWDMVCNVKKLINEKKEDGKVFWQNLAGYKRQEALRPYLSSEEDRKKGKKFARYQLGDLLLHLEKKHGEDWGKVYDEAWERIDKKVEGLSKHIKLEEERRSEDAQSKAALTDWLRAKASFVIEGLKEADKDEFCRCELKLQKWYGDLRGKPFAIEAENSILDISGFSKQYNCAFIWQKDGVKKLNLYLIINYFKGGKLRFKKIKPEAFEANRFYTVINKKSGEIVPMEVNFNFDDPNLIILPLAFGKRQGREFIWNDLLSLETGSLQLANGRVIEKTLYNRRTRQDEPALFVALTFERREVLDSSNIKPMNLIGVDRGENIPAVIALTDPEGCPLSRFKDSLGNPTHILRIGESYKEKQRTIQAKKEVEQRRAGGYSRKYASKAKNLADDMVRNTARDLLYYAVTQDAMLIFENLSRGFGRQGKRTFMAERQYTRMEDWLTAKLAYEGLPSKTYLSKTLAQYTSKTCSNCGFTITSADYDRVLEKLKKTATGWMTTINGKELKVEGQITYYNRYKRQNVVKDLSVELDRLSEESVNNDISSWTKGRSGEALSLLKKRFSHRPVQEKFVCLNCGFETHADEQAALNIARSWLFLRSQEYKKYQTNKTTGNTDKRAFVETWQSFYRKKLKEVWKPAV

SEQ ID NO: 32835 - protein, 978 aa, synthetic construct
  REGION 1..978: note = engineered CasX variant
QEIKRANKIRRRLVKDSNTKKAGKTGPMKTLLVRVMTPDLRERLENLRKKPENIPQPISNTSRANLNKLLTDYTEMKKAILHVYWEEFQKDPVGLMSRVAQPASKKIDQNKLKPEMDEKGNLTTAGFACSQCGQPLFVYKLEQVSEKGKAYTNYFGRCNVAEHEKLILLAQLKPEKDSDEAVTYSLGKFGQRALDFYSIHVTKESTHPVKPLAQIAGNRYASAPVGKALSDACMGTIASFLSKYQDIIIEHQKVVKGNQKRLESLRELAGKENLEYPSVTLPPQPHTKEGVDAYNEVIARVRMWVNLNLWQKLKLSRDDAKPLLRLKGFPSFPLVERQANEVDWWDMVCNVKKLINEKKEDGKVFWQNLAGYKRQEALRPYLSSEEDRKKGKKFARYQLGDLLLHLEKKHGEDWGKVYDEAWERIDKKVEGLSKHIKLEEERRSEDAQSKAALTDWLRAKASFVIEGLKEADKDEFCRCELKLQKWYGDLRGKPFAIEAENSILDISGFSKQYNCAFIWQKDGVKKLNLYLIINYFKGGKLRFKKIKPEAFEANRFYTVINKKSGEIVPMEVNFNFDDPNLIILPLAFGKRQGREFIWNDLLSLETGSLQLANGRVIEKTLYNRRTRQDEPALFVALTFERREVLDSSNIKPMNLIGVDRGENIPAVIALTDPEGCPLSRFKDSLGNPTHILRIGESYKEKQRTIQAKKEVEQRRAGGYSRKYASKAKNLADDMVRNTARDLLYYAVTQDAMLIFENLSRGFGRQGKRTFMAERQYTRMEDWLTAKLAYEGLPSKTYLSKTLAQYTSKTCSNCGFTITSADYDRVLEKLKKTATGWMTTINGKELKVEGQITYYNRYKRQNVVKDLSVELDRLSEESVNNDISSWTKGRSGEALSLLKKRFSHRPVQEKFVCLNCGFETHADEQAALNIARSWLFLRSQEYKKYQTNKTTGNTDKRAFVETWQSFYRKKLKEVWKPAV

SEQ ID NO: 32836 - protein, 978 aa, synthetic construct
  REGION 1..978: note = engineered CasX variant
QEIKRANKIRRRLVKDSNTKKAGKTGPMKTLLVRVMTPDLRERLENLRKKPENIPQPISNTSRANLNKLLTDYTEMKKAILHVYWEEFQKDPVGLMSRVAQPASKKIDQNKLKPEMDEKGNLTTAGFACSQCGQPLFVYKLEQVSEKGKAYTNYFGRCNVAEHEKLILLAQLKPEKDSDEAVTYSLGKFGQRALDFYSIHVTKESTHPVKPLAQIAGNRYASVPVGKALSDACMGTIASFLSKYQDIIIEHQKVVKGNQKRLESLRELAGKENLEYPSVTLPPQPHTKEGVDAYNEVIARVRMWVNLNLWQKLKLSRDDAKPLLRLKGFPSFPLVERQANEVDWWDMVCNVKKLINEKKEDGKVFWQNLAGYKRQEALRPYLSSEEDRKKGKKFARYQLGDLLLHLEKKHGEDWGKVYDEAWERIDKKVEGLSKHIKLEEERRSEDAQSKAALTDWLRAKASFVIEGLKEADKDEFCRCELKLQKWYGDLRGKPFAIEAENSILDISGFSKQYNCAFIWQKDGVKKLNLYLIINYFKGGKLRFKKIKPEAFEANRFYTVINKKSGEIVPMEVNFNFDDPNLIILPLAFGKRQGREFIWNDLLSLETGSLQLANGRVIEKTLYNRRTRQDEPALFVALTFERREVLDSSNIKPMNLIGVDRGENIPAVIALTDPEGCPLSRFKDSLGNPTHILRIGESYKEKQRTIQAKKEVEQRRAGGYSRKYASKAKNLADDMVRNTARDLLYYAVTQDAMLIFENLSRGFGRQGKRTFMAERQYTRMEDWLTAKLAYEGLPSKTYLSKTLAQYTSKTCSNCGFTITSADYDRVLEKLKKTATGWMTTINGKELKVEGQITYYNRYKRQNVVKDLSVELDRLSEESVNNDISSWTKGRSGEALSLLKKRFSHRPVQEKFVCLNCGFETHADEQAALNIARSWLFLRSQEYKKYQTNKTTGNTDKRAFVETWQSFYRKKLKEVWKPAV

SEQ ID NO: 32837 - protein, 978 aa, synthetic construct
  REGION 1..978: note = engineered CasX variant
QEIKRANKIRRRLVKDSNTKKAGKTGPMKTLLVRVMTPDLRERLENLRKKPENIPQPISNTSRANLNKLLTDYTEMKKAILHVYWEEFQKDPVGLMSRVAQPASKKIDQNKLKPEMDEKGNLTTAGFACSQCGQPLFVYKLEQVSEKGKAYTNYFGRCNVAEHEKLIKLAQLKPEKDSDEAVTYSLGKFGQRALDFYSIHVTKESTHPVKPLAQIAGNRYASGPVGKALSDACMGTIASFLSKYQDIIIEHQKVVKGNQKRLESLRELAGKENLEYPSVTLPPQPHTKEGVDAYNEVIARVRMWVNLNLWQKLKLSRDDAKPLLRLKGFPSFPLVERQANEVDWWDMVCNVKKLINEKKEDGKVFWQNLAGYKRQEALRPYLSSEEDRKKGKKFARYQLGDLLLHLEKKHGEDWGKVYDEAWERIDKKVEGLSKHIKLEEERRSEDAQSKAALTDWLRAKASFVIEGLKEADKDEFCRCELKLQKWYGDLRGKPFAIEAENSILDISGFSKQYNCAFIWQKDGVKKLNLYLIINYFKGGKLRFKKIKPEAFEANRFYTVINKKSGEIVPMEVNFNFDDPNLIILPLAFGKRQGREFIWNDLLSLETGSLQLANGRVIEKTLYNRRTRQDEPALFVALTFERREVLDSSNIKPMNLIGVDRGENIPAVIALTDPEGCPLSRFKDSLGNPTHILRIGESYKEKQRTIQAKKEVEQRRAGGYSRKYASKAKNLADDMVRNTARDLLYYAVTQDAMLIFENLSRGFGRQGKRTFMAERQYTRMEDWLTAKLAYEGLPSKTYLSKTLAQYTSKTCSNCGFTITSADYDRVLEKLKKTATGWMTTINGKELKVEGQITYYNRYKRQNVVKDLSVELDRLSEESVNNDISSWTKGRSGEALSLLKKRFSHRPVQEKFVCLNCGFETHADEQAALNIARSWLFLRSQEYKKYQTNKTTGNTDKRAFVETWQSFYRKKLKEVWKPAV

SEQ ID NO: 32838 - protein, 977 aa, synthetic construct
  REGION 1..977: note = engineered CasX variant
QEIKRANKIRRRLVKDSNTKKAGKTGPMKTLLVRVMTPDLRERLENLRKKPENIPQPISNTSRANLNKLLTDYTEMKKAILHVYWEEFQKDPVGLMSRVAQPASKKIDQNKLKPEMDEKGNLTTAGFACSQCGQPLFVYKLEQVSEKGKAYTNYFGRCNVAEHEKLILLAQLKPEKDSDEAVTYSLGKFGQRALDFYSIHVTKESTHPVKPLAQIAGNRYASPVGKALSDACMGTIASFLSKYQDIIIEHQKVVKGNQKRLESLRELAGKENLEYPSVTLPPQPHTKEGVDAYNEVIARVRMWVNLNLWQKLKLSRDDAKPLLRLKGFPSFPLVERQANEVDWWDMVCNVKKLINEKKEDGKVFWQNLAGYKRQEALRPYLSSEEDRKKGKKFARYQLGDLLLHLEKKHGEDWGKVYDEAWERIDKKVEGLSKHIKLEEERRSEDAQSKAALTDWLRAKASFVIEGLKEADKDEFCRCELKLQKWYGDLRGKPFAIEAENSILDISGFSKQYNCAFIWQKDGVKKLNLYLIINYFKGGKLRFKKIKPEAFEANRFYTVINKKSGEIVPMEVNFNFDDPNLIILPLAFGKRQGREFIWNDLLSLETGSLQLANGRVIEKTLYNRRTRQDEPALFVALTFERREVLDSSNIKPMNLIGVDRGENIPAVIALTDPEGCPLSRFKDSLGNPTHILRIGESYKEKQRTIQAKKEVEQRRAGGYSRKYASKAKNLADDMVRNTARDLLYYAVTQDAMLIFENLSRGFGRQGKRTFMAERQYTRMEDWLTAKLAYEGLPSKTYLSKTLAQYTSKTCSNCGFTITSADYDRVLEKLKKTATGWMTTINGKELKVEGQITYYNRYKRQNVVKDLSVELDRLSEESVNNDISSWTKGRSGEALSLLKKRFSHRPVQEKFVCLNCGFETHADEQAALNIARSWLFLRSQEYKKYQTNKTTGNTDKRAFVETWQSFYRKKLKEVWKPAV

SEQ ID NO: 32839 - protein, 978 aa, synthetic construct
  REGION 1..978: note = engineered CasX variant
QEIKRISGIRRRLVKDSNTKKAGKTGPMKTLLVRVMTPDLRERLENLRKKPENIPQPISNTSRANLNKLLTDYTEMKKAILHVYWEEFQKDPVGLMSRVAQPASKKIDQNKLKPEMDEKGNLTTAGFACSQCGQPLFVYKLEQVSEKGKAYTNYFGRCNVAEHEKLILLAQLKPEKDSDEAVTYSLGKFGQRALDFYSIHVTKESTHPVKPLAQIAGNRYASYPVGKALSDACMGTIASFLSKYQDIIIEHQKVVKGNQKRLESLRELAGKENLEYPSVTLPPQPHTKEGVDAYNEVIARVRMWVNLNLWQKLKLSRDDAKPLLRLKGFPSFPLVERQANEVDWWDMVCNVKKLINEKKEDGKVFWQNLAGYKRQEALRPYLSSEEDRKKGKKFARYQLGDLLLHLEKKHGEDWGKVYDEAWERIDKKVEGLSKHIKLEEERRSEDAQSKAALTDWLRAKASFVIEGLKEADKDEFCRCELKLQKWYGDLRGKPFAIEAENSILDISGFSKQYNCAFIWQKDGVKKLNLYLIINYFKGGKLRFKKIKPEAFEANRFYTVINKKSGEIVPMEVNFNFDDPNLIILPLAFGKRQGREFIWNDLLSLETGSLKLANGRVIEKTLYNRRTRQDEPALFVALTFERREVLDSSNIKPMNLIGVDRGENIPAVIALTDPEGCPLSRFKDSLGNPTHILRIGESYKEKQRTIQAKKEVEQRRAGGYSRKYASKAKNLADDMVRNTARDLLYYAVTQDAMLIFENLSRGFGRQGKRTFMAERQYTRMEDWLTAKLAYEGLPSKTYLSKTLAQYTSKTCSNCGFTITSADYDRVLEKLKKTATGWMTTINGKELKVEGQITYYNRYKRQNVVKDLSVELDRLSEESVNNDISSWTKGRSGEALSLLKKRFSHRPVQEKFVCLNCGFETHADEQAALNIARSWLFLRSQEYKKYQTNKTTGNTDKRAFVETWQSFYRKKLKEVWKPAV

SEQ ID NO: 32840 - protein, 978 aa, synthetic construct
  REGION 1..978: note = engineered CasX variant
QEIKRISGIRRRLVKDSNTKKAGKTGPMKTLLVRVMTPDLRERLENLRKKPENIPQPISNTSRANLNKLLTDYTEMKKAILHVYWEEFQKDPVGLMSRVAQPASKKIDQNKLKPEMDEKGNLTTAGFACSQCGQPLFVYKLEQVSEKGKAYTNYFGRCNVAEHEKLILLAQLKPEKDSDEAVTYSLGKFGQRALDFYSIHVTKESTHPVKPLAQIAGNRYASHPVGKALSDACMGTIASFLSKYQDIIIEHQKVVKGNQKRLESLRELAGKENLEYPSVTLPPQPHTKEGVDAYNEVIARVRMWVNLNLWQKLKLSRDDAKPLLRLKGFPSFPLVERQANEVDWWDMVCNVKKLINEKKEDGKVFWQNLAGYKRQEALRPYLSSEEDRKKGKKFARYQLGDLLLHLEKKHGEDWGKVYDEAWERIDKKVEGLSKHIKLEEERRSEDAQSKAALTDWLRAKASFVIEGLKEADKDEFCRCELKLQKWYGDLRGKPFAIEAENSILDISGFSKQYNCAFIWQKDGVKKLNLYLIINYFKGGKLRFKKIKPEAFEANRFYTVINKKSGEIVPMEVNFNFDDPNLIILPLAFGKRQGREFIWNDLLSLETGSLKLANGRVIEKTLYNRRTRQDEPALFVALTFERREVLDSSNIKPMNLIGVDRGENIPAVIALTDPEGCPLSRFKDSLGNPTHILRIGESYKEKQRTIQAKKEVEQRRAGGYSRKYASKAKNLADDMVRNTARDLLYYAVTQDAMLIFENLSRGFGRQGKRTFMAERQYTRMEDWLTAKLAYEGLPSKTYLSKTLAQYTSKTCSNCGFTITSADYDRVLEKLKKTATGWMTTINGKELKVEGQITYYNRYKRQNVVKDLSVELDRLSEESVNNDISSWTKGRSGEALSLLKKRFSHRPVQEKFVCLNCGFETHADEQAALNIARSWLFLRSQEYKKYQTNKTTGNTDKRAFVETWQSFYRKKLKEVWKPAV

SEQ ID NO: 32841 - protein, 978 aa, synthetic construct
  REGION 1..978: note = engineered CasX variant
QEIKRISGIRRRLVKDSNTKKAGKTGPMKTLLVRVMTPDLRERLENLRKKPENIPQPISNTSRANLNKLLTDYTEMKKAILHVYWEEFQKDPVGLMSRVAQPASKKIDQNKLKPEMDEKGNLTTAGFACSQCGQPLFVYKLEQVSEKGKAYTNYFGRCNVAEHEKLILLAQLKPEKDSDEAVTYSLGKFGQRALDFYSIHVTKESTHPVKPLAQIAGNRYASSPVGKALSDACMGTIASFLSKYQDIIIEHQKVVKGNQKRLESLRELAGKENLEYPSVTLPPQPHTKEGVDAYNEVIARVRMWVNLNLWQKLKLSRDDAKPLLRLKGFPSFPLVERQANEVDWWDMVCNVKKLINEKKEDGKVFWQNLAGYKRQEALRPYLSSEEDRKKGKKFARYQLGDLLLHLEKKHGEDWGKVYDEAWERIDKKVEGLSKHIKLEEERRSEDAQSKAALTDWLRAKASFVIEGLKEADKDEFCRCELKLQKWYGDLRGKPFAIEAENSILDISGFSKQYNCAFIWQKDGVKKLNLYLIINYFKGGKLRFKKIKPEAFEANRFYTVINKKSGEIVPMEVNFNFDDPNLIILPLAFGKRQGREFIWNDLLSLETGSLKLANGRVIEKTLYNRRTRQDEPALFVALTFERREVLDSSNIKPMNLIGVDRGENIPAVIALTDPEGCPLSRFKDSLGNPTHILRIGESYKEKQRTIQAKKEVEQRRAGGYSRKYASKAKNLADDMVRNTARDLLYYAVTQDAMLIFENLSRGFGRQGKRTFMAERQYTRMEDWLTAKLAYEGLPSKTYLSKTLAQYTSKTCSNCGFTITSADYDRVLEKLKKTATGWMTTINGKELKVEGQITYYNRYKRQNVVKDLSVELDRLSEESVNNDISSWTKGRSGEALSLLKKRFSHRPVQEKFVCLNCGFETHADEQAALNIARSWLFLRSQEYKKYQTNKTTGNTDKRAFVETWQSFYRKKLKEVWKPAV

SEQ ID NO: 32842 - protein, 978 aa, synthetic construct
  REGION 1..978: note = engineered CasX variant
QEIKRISGIRRRLVKDSNTKKAGKTGPMKTLLVRVMTPDLRERLENLRKKPENIPQPISNTSRANLNKLLTDYTEMKKAILHVYWEEFQKDPVGLMSRVAQPASKKIDQNKLKPEMDEKGNLTTAGFACSQCGQPLFVYKLEQVSEKGKAYTNYFGRCNVAEHEKLILLAQLKPEKDSDEAVTYSLGKFGQRALDFYSIHVTKESTHPVKPLAQIAGNRYASTPVGKALSDACMGTIASFLSKYQDIIIEHQKVVKGNQKRLESLRELAGKENLEYPSVTLPPQPHTKEGVDAYNEVIARVRMWVNLNLWQKLKLSRDDAKPLLRLKGFPSFPLVERQANEVDWWDMVCNVKKLINEKKEDGKVFWQNLAGYKRQEALRPYLSSEEDRKKGKKFARYQLGDLLLHLEKKHGEDWGKVYDEAWERIDKKVEGLSKHIKLEEERRSEDAQSKAALTDWLRAKASFVIEGLKEADKDEFCRCELKLQKWYGDLRGKPFAIEAENSILDISGFSKQYNCAFIWQKDGVKKLNLYLIINYFKGGKLRFKKIKPEAFEANRFYTVINKKSGEIVPMEVNFNFDDPNLIILPLAFGKRQGREFIWNDLLSLETGSLKLANGRVIEKTLYNRRTRQDEPALFVALTFERREVLDSSNIKPMNLIGVDRGENIPAVIALTDPEGCPLSRFKDSLGNPTHILRIGESYKEKQRTIQAKKEVEQRRAGGYSRKYASKAKNLADDMVRNTARDLLYYAVTQDAMLIFENLSRGFGRQGKRTFMAERQYTRMEDWLTAKLAYEGLPSKTYLSKTLAQYTSKTCSNCGFTITSADYDRVLEKLKKTATGWMTTINGKELKVEGQITYYNRYKRQNVVKDLSVELDRLSEESVNNDISSWTKGRSGEALSLLKKRFSHRPVQEKFVCLNCGFETHADEQAALNIARSWLFLRSQEYKKYQTNKTTGNTDKRAFVETWQSFYRKKLKEVWKPAV

SEQ ID NO: 32843 - protein, 978 aa, synthetic construct
  REGION 1..978: note = engineered CasX variant
QEIKRISGIRRRLVKDSNTKKAGKTGPMKTLLVRVMTPDLRERLENLRKKPENIPQPISNTSRANLNKLLTDYTEMKKAILHVYWEEFQKDPVGLMSRVAQPASKKIDQNKLKPEMDEKGNLTTAGFACSQCGQPLFVYKLEQVSEKGKAYTNYFGRCNVAEHEKLILLAQLKPEKDSDEAVTYSLGKFGQRALDFYSIHVTKESTHPVKPLAQIAGNRYASAPVGKALSDACMGTIASFLSKYQDIIIEHQKVVKGNQKRLESLRELAGKENLEYPSVTLPPQPHTKEGVDAYNEVIARVRMWVNLNLWQKLKLSRDDAKPLLRLKGFPSFPLVERQANEVDWWDMVCNVKKLINEKKEDGKVFWQNLAGYKRQEALRPYLSSEEDRKKGKKFARYQLGDLLLHLEKKHGEDWGKVYDEAWERIDKKVEGLSKHIKLEEERRSEDAQSKAALTDWLRAKASFVIEGLKEADKDEFCRCELKLQKWYGDLRGKPFAIEAENSILDISGFSKQYNCAFIWQKDGVKKLNLYLIINYFKGGKLRFKKIKPEAFEANRFYTVINKKSGEIVPMEVNFNFDDPNLIILPLAFGKRQGREFIWNDLLSLETGSLKLANGRVIEKTLYNRRTRQDEPALFVALTFERREVLDSSNIKPMNLIGVDRGENIPAVIALTDPEGCPLSRFKDSLGNPTHILRIGESYKEKQRTIQAKKEVEQRRAGGYSRKYASKAKNLADDMVRNTARDLLYYAVTQDAMLIFENLSRGFGRQGKRTFMAERQYTRMEDWLTAKLAYEGLPSKTYLSKTLAQYTSKTCSNCGFTITSADYDRVLEKLKKTATGWMTTINGKELKVEGQITYYNRYKRQNVVKDLSVELDRLSEESVNNDISSWTKGRSGEALSLLKKRFSHRPVQEKFVCLNCGFETHADEQAALNIARSWLFLRSQEYKKYQTNKTTGNTDKRAFVETWQSFYRKKLKEVWKPAV

SEQ ID NO: 32844 - protein, 978 aa, synthetic construct
  REGION 1..978: note = engineered CasX variant
QEIKRISGIRRRLVKDSNTKKAGKTGPMKTLLVRVMTPDLRERLENLRKKPENIPQPISNTSRANLNKLLTDYTEMKKAILHVYWEEFQKDPVGLMSRVAQPASKKIDQNKLKPEMDEKGNLTTAGFACSQCGQPLFVYKLEQVSEKGKAYTNYFGRCNVAEHEKLILLAQLKPEKDSDEAVTYSLGKFGQRALDFYSIHVTKESTHPVKPLAQIAGNRYASVPVGKALSDACMGTIASFLSKYQDIIIEHQKVVKGNQKRLESLRELAGKENLEYPSVTLPPQPHTKEGVDAYNEVIARVRMWVNLNLWQKLKLSRDDAKPLLRLKGFPSFPLVERQANEVDWWDMVCNVKKLINEKKEDGKVFWQNLAGYKRQEALRPYLSSEEDRKKGKKFARYQLGDLLLHLEKKHGEDWGKVYDEAWERIDKKVEGLSKHIKLEEERRSEDAQSKAALTDWLRAKASFVIEGLKEADKDEFCRCELKLQKWYGDLRGKPFAIEAENSILDISGFSKQYNCAFIWQKDGVKKLNLYLIINYFKGGKLRFKKIKPEAFEANRFYTVINKKSGEIVPMEVNFNFDDPNLIILPLAFGKRQGREFIWNDLLSLETGSLKLANGRVIEKTLYNRRTRQDEPALFVALTFERREVLDSSNIKPMNLIGVDRGENIPAVIALTDPEGCPLSRFKDSLGNPTHILRIGESYKEKQRTIQAKKEVEQRRAGGYSRKYASKAKNLADDMVRNTARDLLYYAVTQDAMLIFENLSRGFGRQGKRTFMAERQYTRMEDWLTAKLAYEGLPSKTYLSKTLAQYTSKTCSNCGFTITSADYDRVLEKLKKTATGWMTTINGKELKVEGQITYYNRYKRQNVVKDLSVELDRLSEESVNNDISSWTKGRSGEALSLLKKRFSHRPVQEKFVCLNCGFETHADEQAALNIARSWLFLRSQEYKKYQTNKTTGNTDKRAFVETWQSFYRKKLKEVWKPAV

SEQ ID NO: 32845 - protein, 978 aa, synthetic construct
  REGION 1..978: note = engineered CasX variant
QEIKRISGIRRRLVKDSNTKKAGKTGPMKTLLVRVMTPDLRERLENLRKKPENIPQPISNTSRANLNKLLTDYTEMKKAILHVYWEEFQKDPVGLMSRVAQPASKKIDQNKLKPEMDEKGNLTTAGFACSQCGQPLFVYKLEQVSEKGKAYTNYFGRCNVAEHEKLIKLAQLKPEKDSDEAVTYSLGKFGQRALDFYSIHVTKESTHPVKPLAQIAGNRYASGPVGKALSDACMGTIASFLSKYQDIIIEHQKVVKGNQKRLESLRELAGKENLEYPSVTLPPQPHTKEGVDAYNEVIARVRMWVNLNLWQKLKLSRDDAKPLLRLKGFPSFPLVERQANEVDWWDMVCNVKKLINEKKEDGKVFWQNLAGYKRQEALRPYLSSEEDRKKGKKFARYQLGDLLLHLEKKHGEDWGKVYDEAWERIDKKVEGLSKHIKLEEERRSEDAQSKAALTDWLRAKASFVIEGLKEADKDEFCRCELKLQKWYGDLRGKPFAIEAENSILDISGFSKQYNCAFIWQKDGVKKLNLYLIINYFKGGKLRFKKIKPEAFEANRFYTVINKKSGEIVPMEVNFNFDDPNLIILPLAFGKRQGREFIWNDLLSLETGSLKLANGRVIEKTLYNRRTRQDEPALFVALTFERREVLDSSNIKPMNLIGVDRGENIPAVIALTDPEGCPLSRFKDSLGNPTHILRIGESYKEKQRTIQAKKEVEQRRAGGYSRKYASKAKNLADDMVRNTARDLLYYAVTQDAMLIFENLSRGFGRQGKRTFMAERQYTRMEDWLTAKLAYEGLPSKTYLSKTLAQYTSKTCSNCGFTITSADYDRVLEKLKKTATGWMTTINGKELKVEGQITYYNRYKRQNVVKDLSVELDRLSEESVNNDISSWTKGRSGEALSLLKKRFSHRPVQEKFVCLNCGFETHADEQAALNIARSWLFLRSQEYKKYQTNKTTGNTDKRAFVETWQSFYRKKLKEVWKPAV

SEQ ID NO: 32846 - protein, 977 aa, synthetic construct
  REGION 1..977: note = engineered CasX variant
QEIKRISGIRRRLVKDSNTKKAGKTGPMKTLLVRVMTPDLRERLENLRKKPENIPQPISNTSRANLNKLLTDYTEMKKAILHVYWEEFQKDPVGLMSRVAQPASKKIDQNKLKPEMDEKGNLTTAGFACSQCGQPLFVYKLEQVSEKGKAYTNYFGRCNVAEHEKLILLAQLKPEKDSDEAVTYSLGKFGQRALDFYSIHVTKESTHPVKPLAQIAGNRYASPVGKALSDACMGTIASFLSKYQDIIIEHQKVVKGNQKRLESLRELAGKENLEYPSVTLPPQPHTKEGVDAYNEVIARVRMWVNLNLWQKLKLSRDDAKPLLRLKGFPSFPLVERQANEVDWWDMVCNVKKLINEKKEDGKVFWQNLAGYKRQEALRPYLSSEEDRKKGKKFARYQLGDLLLHLEKKHGEDWGKVYDEAWERIDKKVEGLSKHIKLEEERRSEDAQSKAALTDWLRAKASFVIEGLKEADKDEFCRCELKLQKWYGDLRGKPFAIEAENSILDISGFSKQYNCAFIWQKDGVKKLNLYLIINYFKGGKLRFKKIKPEAFEANRFYTVINKKSGEIVPMEVNFNFDDPNLIILPLAFGKRQGREFIWNDLLSLETGSLKLANGRVIEKTLYNRRTRQDEPALFVALTFERREVLDSSNIKPMNLIGVDRGENIPAVIALTDPEGCPLSRFKDSLGNPTHILRIGESYKEKQRTIQAKKEVEQRRAGGYSRKYASKAKNLADDMVRNTARDLLYYAVTQDAMLIFENLSRGFGRQGKRTFMAERQYTRMEDWLTAKLAYEGLPSKTYLSKTLAQYTSKTCSNCGFTITSADYDRVLEKLKKTATGWMTTINGKELKVEGQITYYNRYKRQNVVKDLSVELDRLSEESVNNDISSWTKGRSGEALSLLKKRFSHRPVQEKFVCLNCGFETHADEQAALNIARSWLFLRSQEYKKYQTNKTTGNTDKRAFVETWQSFYRKKLKEVWKPAV

SEQ ID NO: 32847 - protein, 978 aa, synthetic construct
  REGION 1..978: note = engineered CasX variant
QEIKRISKIRRRLVKDSNTKKAGKTGPMKTLLVPVMTPDLRERLENLRKKPENIPQPISNTSRANLNKLLTDYTEMKKAILHVYWEEFQKDPVGLMSRVAQPASKKIDQNKLKPEMDEKGNLTTAGFACSQCGQPLFVYKLEQVSEKGKAYTNYFGRCNVAEHEKLILLAQLKPEKDSDEAVTYSLGKFGQRALDFYSIHVTKESTHPVKPLAQIAGNRYASYPVGKALSDACMGTIASFLSKYQDIIIEHQKVVKGNQKRLESLRELAGKENLEYPSVTLPPQPHTKEGVDAYNEVIARVRMWVNLNLWQKLKLSRDDAKPLLRLKGFPSFPLVERQANEVDWWDMVCNVKKLINEKKEDGKVFWQNLAGYKRQEALRPYLSSEEDRKKGKKFARYQLGDLLLHLEKKHGEDWGKVYDEAWERIDKKVEGLSKHIKLEEERRSEDAQSKAALTDWLRAKASFVIEGLKEADKDEFCRCELKLQKWYGDLRGKPFAIEAENSILDISGFSKQYNCAFIWQKDGVKKLNLYLIINYFKGGKLRFKKIKPEAFEANRFYTVINKKSGEIVPMEVNFNFDDPNLIILPLAFGKRQGREFIWNDLLSLETGSLKLANGRVIEKTLYNRRTRQDEPALFVALTFERREVLDSSNIKPMNLIGVDRGENIPAVIALTDPEGCPLSRFKDSLGNPTHILRIGESYKEKQRTIQAKKEVEQRRAGGYSRKYASKAKNLADDMVRNTARDLLYYAVTQDAMLIFENLSRGFGRQGKRTFMAERQYTRMEDWLTAKLAYEGLPSKTYLSKTLAQYTSKTCSNCGFTITSADYDRVLEKLKKTATGWMTTINGKELKVEGQITYYNRYKRQNVVKDLSVELDRLSEESVNNDISSWTKGRSGEALSLLKKRFSHRPVQEKFVCLNCGFETHADEQAALNIARSWLFLRSQEYKKYQTNKTTGNTDKRAFVETWQSFYRKKLKEVWKPAV

SEQ ID NO: 32848 - protein, 978 aa, synthetic construct
  REGION 1..978: note = engineered CasX variant
QEIKRISKIRRRLVKDSNTKKAGKTGPMKTLLVPVMTPDLRERLENLRKKPENIPQPISNTSRANLNKLLTDYTEMKKAILHVYWEEFQKDPVGLMSRVAQPASKKIDQNKLKPEMDEKGNLTTAGFACSQCGQPLFVYKLEQVSEKGKAYTNYFGRCNVAEHEKLILLAQLKPEKDSDEAVTYSLGKFGQRALDFYSIHVTKESTHPVKPLAQIAGNRYASHPVGKALSDACMGTIASFLSKYQDIIIEHQKVVKGNQKRLESLRELAGKENLEYPSVTLPPQPHTKEGVDAYNEVIARVRMWVNLNLWQKLKLSRDDAKPLLRLKGFPSFPLVERQANEVDWWDMVCNVKKLINEKKEDGKVFWQNLAGYKRQEALRPYLSSEEDRKKGKKFARYQLGDLLLHLEKKHGEDWGKVYDEAWERIDKKVEGLSKHIKLEEERRSEDAQSKAALTDWLRAKASFVIEGLKEADKDEFCRCELKLQKWYGDLRGKPFAIEAENSILDISGFSKQYNCAFIWQKDGVKKLNLYLIINYFKGGKLRFKKIKPEAFEANRFYTVINKKSGEIVPMEVNFNFDDPNLIILPLAFGKRQGREFIWNDLLSLETGSLKLANGRVIEKTLYNRRTRQDEPALFVALTFERREVLDSSNIKPMNLIGVDRGENIPAVIALTDPEGCPLSRFKDSLGNPTHILRIGESYKEKQRTIQAKKEVEQRRAGGYSRKYASKAKNLADDMVRNTARDLLYYAVTQDAMLIFENLSRGFGRQGKRTFMAERQYTRMEDWLTAKLAYEGLPSKTYLSKTLAQYTSKTCSNCGFTITSADYDRVLEKLKKTATGWMTTINGKELKVEGQITYYNRYKRQNVVKDLSVELDRLSEESVNNDISSWTKGRSGEALSLLKKRFSHRPVQEKFVCLNCGFETHADEQAALNIARSWLFLRSQEYKKYQTNKTTGNTDKRAFVETWQSFYRKKLKEVWKPAV

SEQ ID NO: 32849 - protein, 978 aa, synthetic construct
  REGION 1..978: note = engineered CasX variant
QEIKRISKIRRRLVKDSNTKKAGKTGPMKTLLVPVMTPDLRERLENLRKKPENIPQPISNTSRANLNKLLTDYTEMKKAILHVYWEEFQKDPVGLMSRVAQPASKKIDQNKLKPEMDEKGNLTTAGFACSQCGQPLFVYKLEQVSEKGKAYTNYFGRCNVAEHEKLILLAQLKPEKDSDEAVTYSLGKFGQRALDFYSIHVTKESTHPVKPLAQIAGNRYASSPVGKALSDACMGTIASFLSKYQDIIIEHQKVVKGNQKRLESLRELAGKENLEYPSVTLPPQPHTKEGVDAYNEVIARVRMWVNLNLWQKLKLSRDDAKPLLRLKGFPSFPLVERQANEVDWWDMVCNVKKLINEKKEDGKVFWQNLAGYKRQEALRPYLSSEEDRKKGKKFARYQLGDLLLHLEKKHGEDWGKVYDEAWERIDKKVEGLSKHIKLEEERRSEDAQSKAALTDWLRAKASFVIEGLKEADKDEFCRCELKLQKWYGDLRGKPFAIEAENSILDISGFSKQYNCAFIWQKDGVKKLNLYLIINYFKGGKLRFKKIKPEAFEANRFYTVINKKSGEIVPMEVNFNFDDPNLIILPLAFGKRQGREFIWNDLLSLETGSLKLANGRVIEKTLYNRRTRQDEPALFVALTFERREVLDSSNIKPMNLIGVDRGENIPAVIALTDPEGCPLSRFKDSLGNPTHILRIGESYKEKQRTIQAKKEVEQRRAGGYSRKYASKAKNLADDMVRNTARDLLYYAVTQDAMLIFENLSRGFGRQGKRTFMAERQYTRMEDWLTAKLAYEGLPSKTYLSKTLAQYTSKTCSNCGFTITSADYDRVLEKLKKTATGWMTTINGKELKVEGQITYYNRYKRQNVVKDLSVELDRLSEESVNNDISSWTKGRSGEALSLLKKRFSHRPVQEKFVCLNCGFETHADEQAALNIARSWLFLRSQEYKKYQTNKTTGNTDKRAFVETWQSFYRKKLKEVWKPAV

SEQ ID NO: 32850 - protein, 978 aa, synthetic construct
  REGION 1..978: note = engineered CasX variant
QEIKRISKIRRRLVKDSNTKKAGKTGPMKTLLVPVMTPDLRERLENLRKKPENIPQPISNTSRANLNKLLTDYTEMKKAILHVYWEEFQKDPVGLMSRVAQPASKKIDQNKLKPEMDEKGNLTTAGFACSQCGQPLFVYKLEQVSEKGKAYTNYFGRCNVAEHEKLILLAQLKPEKDSDEAVTYSLGKFGQRALDFYSIHVTKESTHPVKPLAQIAGNRYASTPVGKALSDACMGTIASFLSKYQDIIIEHQKVVKGNQKRLESLRELAGKENLEYPSVTLPPQPHTKEGVDAYNEVIARVRMWVNLNLWQKLKLSRDDAKPLLRLKGFPSFPLVERQANEVDWWDMVCNVKKLINEKKEDGKVFWQNLAGYKRQEALRPYLSSEEDRKKGKKFARYQLGDLLLHLEKKHGEDWGKVYDEAWERIDKKVEGLSKHIKLEEERRSEDAQSKAALTDWLRAKASFVIEGLKEADKDEFCRCELKLQKWYGDLRGKPFAIEAENSILDISGFSKQYNCAFIWQKDGVKKLNLYLIINYFKGGKLRFKKIKPEAFEANRFYTVINKKSGEIVPMEVNFNFDDPNLIILPLAFGKRQGREFIWNDLLSLETGSLKLANGRVIEKTLYNRRTRQDEPALFVALTFERREVLDSSNIKPMNLIGVDRGENIPAVIALTDPEGCPLSRFKDSLGNPTHILRIGESYKEKQRTIQAKKEVEQRRAGGYSRKYASKAKNLADDMVRNTARDLLYYAVTQDAMLIFENLSRGFGRQGKRTFMAERQYTRMEDWLTAKLAYEGLPSKTYLSKTLAQYTSKTCSNCGFTITSADYDRVLEKLKKTATGWMTTINGKELKVEGQITYYNRYKRQNVVKDLSVELDRLSEESVNNDISSWTKGRSGEALSLLKKRFSHRPVQEKFVCLNCGFETHADEQAALNIARSWLFLRSQEYKKYQTNKTTGNTDKRAFVETWQSFYRKKLKEVWKPAV

SEQ ID NO: 32851 - protein, 978 aa, synthetic construct
  REGION 1..978: note = engineered CasX variant
QEIKRISKIRRRLVKDSNTKKAGKTGPMKTLLVPVMTPDLRERLENLRKKPENIPQPISNTSRANLNKLLTDYTEMKKAILHVYWEEFQKDPVGLMSRVAQPASKKIDQNKLKPEMDEKGNLTTAGFACSQCGQPLFVYKLEQVSEKGKAYTNYFGRCNVAEHEKLILLAQLKPEKDSDEAVTYSLGKFGQRALDFYSIHVTKESTHPVKPLAQIAGNRYASAPVGKALSDACMGTIASFLSKYQDIIIEHQKVVKGNQKRLESLRELAGKENLEYPSVTLPPQPHTKEGVDAYNEVIARVRMWVNLNLWQKLKLSRDDAKPLLRLKGFPSFPLVERQANEVDWWDMVCNVKKLINEKKEDGKVFWQNLAGYKRQEALRPYLSSEEDRKKGKKFARYQLGDLLLHLEKKHGEDWGKVYDEAWERIDKKVEGLSKHIKLEEERRSEDAQSKAALTDWLRAKASFVIEGLKEADKDEFCRCELKLQKWYGDLRGKPFAIEAENSILDISGFSKQYNCAFIWQKDGVKKLNLYLIINYFKGGKLRFKKIKPEAFEANRFYTVINKKSGEIVPMEVNFNFDDPNLIILPLAFGKRQGREFIWNDLLSLETGSLKLANGRVIEKTLYNRRTRQDEPALFVALTFERREVLDSSNIKPMNLIGVDRGENIPAVIALTDPEGCPLSRFKDSLGNPTHILRIGESYKEKQRTIQAKKEVEQRRAGGYSRKYASKAKNLADDMVRNTARDLLYYAVTQDAMLIFENLSRGFGRQGKRTFMAERQYTRMEDWLTAKLAYEGLPSKTYLSKTLAQYTSKTCSNCGFTITSADYDRVLEKLKKTATGWMTTINGKELKVEGQITYYNRYKRQNVVKDLSVELDRLSEESVNNDISSWTKGRSGEALSLLKKRFSHRPVQEKFVCLNCGFETHADEQAALNIARSWLFLRSQEYKKYQTNKTTGNTDKRAFVETWQSFYRKKLKEVWKPAV

SEQ ID NO: 32852 - protein, 978 aa, synthetic construct
  REGION 1..978: note = engineered CasX variant
QEIKRISKIRRRLVKDSNTKKAGKTGPMKTLLVPVMTPDLRERLENLRKKPENIPQPISNTSRANLNKLLTDYTEMKKAILHVYWEEFQKDPVGLMSRVAQPASKKIDQNKLKPEMDEKGNLTTAGFACSQCGQPLFVYKLEQVSEKGKAYTNYFGRCNVAEHEKLILLAQLKPEKDSDEAVTYSLGKFGQRALDFYSIHVTKESTHPVKPLAQIAGNRYASVPVGKALSDACMGTIASFLSKYQDIIIEHQKVVKGNQKRLESLRELAGKENLEYPSVTLPPQPHTKEGVDAYNEVIARVRMWVNLNLWQKLKLSRDDAKPLLRLKGFPSFPLVERQANEVDWWDMVCNVKKLINEKKEDGKVFWQNLAGYKRQEALRPYLSSEEDRKKGKKFARYQLGDLLLHLEKKHGEDWGKVYDEAWERIDKKVEGLSKHIKLEEERRSEDAQSKAALTDWLRAKASFVIEGLKEADKDEFCRCELKLQKWYGDLRGKPFAIEAENSILDISGFSKQYNCAFIWQKDGVKKLNLYLIINYFKGGKLRFKKIKPEAFEANRFYTVINKKSGEIVPMEVNFNFDDPNLIILPLAFGKRQGREFIWNDLLSLETGSLKLANGRVIEKTLYNRRTRQDEPALFVALTFERREVLDSSNIKPMNLIGVDRGENIPAVIALTDPEGCPLSRFKDSLGNPTHILRIGESYKEKQRTIQAKKEVEQRRAGGYSRKYASKAKNLADDMVRNTARDLLYYAVTQDAMLIFENLSRGFGRQGKRTFMAERQYTRMEDWLTAKLAYEGLPSKTYLSKTLAQYTSKTCSNCGFTITSADYDRVLEKLKKTATGWMTTINGKELKVEGQITYYNRYKRQNVVKDLSVELDRLSEESVNNDISSWTKGRSGEALSLLKKRFSHRPVQEKFVCLNCGFETHADEQAALNIARSWLFLRSQEYKKYQTNKTTGNTDKRAFVETWQSFYRKKLKEVWKPAV

SEQ ID NO: 32853 - protein, 978 aa, synthetic construct
  REGION 1..978: note = engineered CasX variant
QEIKRISKIRRRLVKDSNTKKAGKTGPMKTLLVPVMTPDLRERLENLRKKPENIPQPISNTSRANLNKLLTDYTEMKKAILHVYWEEFQKDPVGLMSRVAQPASKKIDQNKLKPEMDEKGNLTTAGFACSQCGQPLFVYKLEQVSEKGKAYTNYFGRCNVAEHEKLIKLAQLKPEKDSDEAVTYSLGKFGQRALDFYSIHVTKESTHPVKPLAQIAGNRYASGPVGKALSDACMGTIASFLSKYQDIIIEHQKVVKGNQKRLESLRELAGKENLEYPSVTLPPQPHTKEGVDAYNEVIARVRMWVNLNLWQKLKLSRDDAKPLLRLKGFPSFPLVERQANEVDWWDMVCNVKKLINEKKEDGKVFWQNLAGYKRQEALRPYLSSEEDRKKGKKFARYQLGDLLLHLEKKHGEDWGKVYDEAWERIDKKVEGLSKHIKLEEERRSEDAQSKAALTDWLRAKASFVIEGLKEADKDEFCRCELKLQKWYGDLRGKPFAIEAENSILDISGFSKQYNCAFIWQKDGVKKLNLYLIINYFKGGKLRFKKIKPEAFEANRFYTVINKKSGEIVPMEVNFNFDDPNLIILPLAFGKRQGREFIWNDLLSLETGSLKLANGRVIEKTLYNRRTRQDEPALFVALTFERREVLDSSNIKPMNLIGVDRGENIPAVIALTDPEGCPLSRFKDSLGNPTHILRIGESYKEKQRTIQAKKEVEQRRAGGYSRKYASKAKNLADDMVRNTARDLLYYAVTQDAMLIFENLSRGFGRQGKRTFMAERQYTRMEDWLTAKLAYEGLPSKTYLSKTLAQYTSKTCSNCGFTITSADYDRVLEKLKKTATGWMTTINGKELKVEGQITYYNRYKRQNVVKDLSVELDRLSEESVNNDISSWTKGRSGEALSLLKKRFSHRPVQEKFVCLNCGFETHADEQAALNIARSWLFLRSQEYKKYQTNKTTGNTDKRAFVETWQSFYRKKLKEVWKPAV

SEQ ID NO: 32854 - protein, 977 aa, synthetic construct
  REGION 1..977: note = engineered CasX variant
QEIKRISKIRRRLVKDSNTKKAGKTGPMKTLLVPVMTPDLRERLENLRKKPENIPQPISNTSRANLNKLLTDYTEMKKAILHVYWEEFQKDPVGLMSRVAQPASKKIDQNKLKPEMDEKGNLTTAGFACSQCGQPLFVYKLEQVSEKGKAYTNYFGRCNVAEHEKLILLAQLKPEKDSDEAVTYSLGKFGQRALDFYSIHVTKESTHPVKPLAQIAGNRYASPVGKALSDACMGTIASFLSKYQDIIIEHQKVVKGNQKRLESLRELAGKENLEYPSVTLPPQPHTKEGVDAYNEVIARVRMWVNLNLWQKLKLSRDDAKPLLRLKGFPSFPLVERQANEVDWWDMVCNVKKLINEKKEDGKVFWQNLAGYKRQEALRPYLSSEEDRKKGKKFARYQLGDLLLHLEKKHGEDWGKVYDEAWERIDKKVEGLSKHIKLEEERRSEDAQSKAALTDWLRAKASFVIEGLKEADKDEFCRCELKLQKWYGDLRGKPFAIEAENSILDISGFSKQYNCAFIWQKDGVKKLNLYLIINYFKGGKLRFKKIKPEAFEANRFYTVINKKSGEIVPMEVNFNFDDPNLIILPLAFGKRQGREFIWNDLLSLETGSLKLANGRVIEKTLYNRRTRQDEPALFVALTFERREVLDSSNIKPMNLIGVDRGENIPAVIALTDPEGCPLSRFKDSLGNPTHILRIGESYKEKQRTIQAKKEVEQRRAGGYSRKYASKAKNLADDMVRNTARDLLYYAVTQDAMLIFENLSRGFGRQGKRTFMAERQYTRMEDWLTAKLAYEGLPSKTYLSKTLAQYTSKTCSNCGFTITSADYDRVLEKLKKTATGWMTTINGKELKVEGQITYYNRYKRQNVVKDLSVELDRLSEESVNNDISSWTKGRSGEALSLLKKRFSHRPVQEKFVCLNCGFETHADEQAALNIARSWLFLRSQEYKKYQTNKTTGNTDKRAFVETWQSFYRKKLKEVWKPAV

SEQ ID NO: 32855 - protein, 978 aa, synthetic construct
  REGION 1..978: note = engineered CasX variant
QEIKRISKIRRRLVKDSNTKKAGKTGPMKTLLVRVMTPDLRERLENLRKKPPNIPQPISNTSRANLNKLLTDYTEMKKAILHVYWEEFQKDPVGLMSRVAQPASKKIDQNKLKPEMDEKGNLTTAGFACSQCGQPLFVYKLEQVSEKGKAYTNYFGRCNVAEHEKLILLAQLKPEKDSDEAVTYSLGKFGQRALDFYSIHVTKESTHPVKPLAQIAGNRYASYPVGKALSDACMGTIASFLSKYQDIIIEHQKVVKGNQKRLESLRELAGKENLEYPSVTLPPQPHTKEGVDAYNEVIARVRMWVNLNLWQKLKLSRDDAKPLLRLKGFPSFPLVERQANEVDWWDMVCNVKKLINEKKEDGKVFWQNLAGYKRQEALRPYLSSEEDRKKGKKFARYQLGDLLLHLEKKHGEDWGKVYDEAWERIDKKVEGLSKHIKLEEERRSEDAQSKAALTDWLRAKASFVIEGLKEADKDEFCRCELKLQKWYGDLRGKPFAIEAENSILDISGFSKQYNCAFIWQKDGVKKLNLYLIINYFKGGKLRFKKIKPEAFEANRFYTVINKKSGEIVPMEVNFNFDDPNLIILPLAFGKRQGREFIWNDLLSLETGSLKLANGRVIEKTLYNRRTRQDEPALFVALTFERREVLDSSNIKPMNLIGVDRGENIPAVIALTDPEGCPLSRFKDSLGNPTHILRIGESYKEKQRTIQAKKEVEQRRAGGYSRKYASKAKNLADDMVRNTARDLLYYAVTQDAMLIFENLSRGFGRQGKRTFMAERQYTRMEDWLTAKLAYEGLPSKTYLSKTLAQYTSKTCSNCGFTITSADYDRVLEKLKKTATGWMTTINGKELKVEGQITYYNRYKRQNVVKDLSVELDRLSEESVNNDISSWTKGRSGEALSLLKKRFSHRPVQEKFVCLNCGFETHADEQAALNIARSWLFLRSQEYKKYQTNKTTGNTDKRAFVETWQSFYRKKLKEVWKPAV

SEQ ID NO: 32856 - protein, 978 aa, synthetic construct
  REGION 1..978: note = engineered CasX variant
QEIKRISKIRRRLVKDSNTKKAGKTGPMKTLLVRVMTPDLRERLENLRKKPPNIPQPISNTSRANLNKLLTDYTEMKKAILHVYWEEFQKDPVGLMSRVAQPASKKIDQNKLKPEMDEKGNLTTAGFACSQCGQPLFVYKLEQVSEKGKAYTNYFGRCNVAEHEKLILLAQLKPEKDSDEAVTYSLGKFGQRALDFYSIHVTKESTHPVKPLAQIAGNRYASHPVGKALSDACMGTIASFLSKYQDIIIEHQKVVKGNQKRLESLRELAGKENLEYPSVTLPPQPHTKEGVDAYNEVIARVRMWVNLNLWQKLKLSRDDAKPLLRLKGFPSFPLVERQANEVDWWDMVCNVKKLINEKKEDGKVFWQNLAGYKRQEALRPYLSSEEDRKKGKKFARYQLGDLLLHLEKKHGEDWGKVYDEAWERIDKKVEGLSKHIKLEEERRSEDAQSKAALTDWLRAKASFVIEGLKEADKDEFCRCELKLQKWYGDLRGKPFAIEAENSILDISGFSKQYNCAFIWQKDGVKKLNLYLIINYFKGGKLRFKKIKPEAFEANRFYTVINKKSGEIVPMEVNFNFDDPNLIILPLAFGKRQGREFIWNDLLSLETGSLKLANGRVIEKTLYNRRTRQDEPALFVALTFERREVLDSSNIKPMNLIGVDRGENIPAVIALTDPEGCPLSRFKDSLGNPTHILRIGESYKEKQRTIQAKKEVEQRRAGGYSRKYASKAKNLADDMVRNTARDLLYYAVTQDAMLIFENLSRGFGRQGKRTFMAERQYTRMEDWLTAKLAYEGLPSKTYLSKTLAQYTSKTCSNCGFTITSADYDRVLEKLKKTATGWMTTINGKELKVEGQITYYNRYKRQNVVKDLSVELDRLSEESVNNDISSWTKGRSGEALSLLKKRFSHRPVQEKFVCLNCGFETHADEQAALNIARSWLFLRSQEYKKYQTNKTTGNTDKRAFVETWQSFYRKKLKEVWKPAV

SEQ ID NO: 32857 - protein, 978 aa, synthetic construct
  REGION 1..978: note = engineered CasX variant
QEIKRISKIRRRLVKDSNTKKAGKTGPMKTLLVRVMTPDLRERLENLRKKPPNIPQPISNTSRANLNKLLTDYTEMKKAILHVYWEEFQKDPVGLMSRVAQPASKKIDQNKLKPEMDEKGNLTTAGFACSQCGQPLFVYKLEQVSEKGKAYTNYFGRCNVAEHEKLILLAQLKPEKDSDEAVTYSLGKFGQRALDFYSIHVTKESTHPVKPLAQIAGNRYASSPVGKALSDACMGTIASFLSKYQDIIIEHQKVVKGNQKRLESLRELAGKENLEYPSVTLPPQPHTKEGVDAYNEVIARVRMWVNLNLWQKLKLSRDDAKPLLRLKGFPSFPLVERQANEVDWWDMVCNVKKLINEKKEDGKVFWQNLAGYKRQEALRPYLSSEEDRKKGKKFARYQLGDLLLHLEKKHGEDWGKVYDEAWERIDKKVEGLSKHIKLEEERRSEDAQSKAALTDWLRAKASFVIEGLKEADKDEFCRCELKLQKWYGDLRGKPFAIEAENSILDISGFSKQYNCAFIWQKDGVKKLNLYLIINYFKGGKLRFKKIKPEAFEANRFYTVINKKSGEIVPMEVNFNFDDPNLIILPLAFGKRQGREFIWNDLLSLETGSLKLANGRVIEKTLYNRRTRQDEPALFVALTFERREVLDSSNIKPMNLIGVDRGENIPAVIALTDPEGCPLSRFKDSLGNPTHILRIGESYKEKQRTIQAKKEVEQRRAGGYSRKYASKAKNLADDMVRNTARDLLYYAVTQDAMLIFENLSRGFGRQGKRTFMAERQYTRMEDWLTAKLAYEGLPSKTYLSKTLAQYTSKTCSNCGFTITSADYDRVLEKLKKTATGWMTTINGKELKVEGQITYYNRYKRQNVVKDLSVELDRLSEESVNNDISSWTKGRSGEALSLLKKRFSHRPVQEKFVCLNCGFETHADEQAALNIARSWLFLRSQEYKKYQTNKTTGNTDKRAFVETWQSFYRKKLKEVWKPAV

SEQ ID NO: 32858 - protein, 978 aa, synthetic construct
  REGION 1..978: note = engineered CasX variant
QEIKRISKIRRRLVKDSNTKKAGKTGPMKTLLVRVMTPDLRERLENLRKKPPNIPQPISNTSRANLNKLLTDYTEMKKAILHVYWEEFQKDPVGLMSRVAQPASKKIDQNKLKPEMDEKGNLTTAGFACSQCGQPLFVYKLEQVSEKGKAYTNYFGRCNVAEHEKLILLAQLKPEKDSDEAVTYSLGKFGQRALDFYSIHVTKESTHPVKPLAQIAGNRYASTPVGKALSDACMGTIASFLSKYQDIIIEHQKVVKGNQKRLESLRELAGKENLEYPSVTLPPQPHTKEGVDAYNEVIARVRMWVNLNLWQKLKLSRDDAKPLLRLKGFPSFPLVERQANEVDWWDMVCNVKKLINEKKEDGKVFWQNLAGYKRQEALRPYLSSEEDRKKGKKFARYQLGDLLLHLEKKHGEDWGKVYDEAWERIDKKVEGLSKHIKLEEERRSEDAQSKAALTDWLRAKASFVIEGLKEADKDEFCRCELKLQKWYGDLRGKPFAIEAENSILDISGFSKQYNCAFIWQKDGVKKLNLYLIINYFKGGKLRFKKIKPEAFEANRFYTVINKKSGEIVPMEVNFNFDDPNLIILPLAFGKRQGREFIWNDLLSLETGSLKLANGRVIEKTLYNRRTRQDEPALFVALTFERREVLDSSNIKPMNLIGVDRGENIPAVIALTDPEGCPLSRFKDSLGNPTHILRIGESYKEKQRTIQAKKEVEQRRAGGYSRKYASKAKNLADDMVRNTARDLLYYAVTQDAMLIFENLSRGFGRQGKRTFMAERQYTRMEDWLTAKLAYEGLPSKTYLSKTLAQYTSKTCSNCGFTITSADYDRVLEKLKKTATGWMTTINGKELKVEGQITYYNRYKRQNVVKDLSVELDRLSEESVNNDISSWTKGRSGEALSLLKKRFSHRPVQEKFVCLNCGFETHADEQAALNIARSWLFLRSQEYKKYQTNKTTGNTDKRAFVETWQSFYRKKLKEVWKPAV

SEQ ID NO: 32859 - protein, 978 aa, synthetic construct
  REGION 1..978: note = engineered CasX variant
QEIKRISKIRRRLVKDSNTKKAGKTGPMKTLLVRVMTPDLRERLENLRKKPPNIPQPISNTSRANLNKLLTDYTEMKKAILHVYWEEFQKDPVGLMSRVAQPASKKIDQNKLKPEMDEKGNLTTAGFACSQCGQPLFVYKLEQVSEKGKAYTNYFGRCNVAEHEKLILLAQLKPEKDSDEAVTYSLGKFGQRALDFYSIHVTKESTHPVKPLAQIAGNRYASAPVGKALSDACMGTIASFLSKYQDIIIEHQKVVKGNQKRLESLRELAGKENLEYPSVTLPPQPHTKEGVDAYNEVIARVRMWVNLNLWQKLKLSRDDAKPLLRLKGFPSFPLVERQANEVDWWDMVCNVKKLINEKKEDGKVFWQNLAGYKRQEALRPYLSSEEDRKKGKKFARYQLGDLLLHLEKKHGEDWGKVYDEAWERIDKKVEGLSKHIKLEEERRSEDAQSKAALTDWLRAKASFVIEGLKEADKDEFCRCELKLQKWYGDLRGKPFAIEAENSILDISGFSKQYNCAFIWQKDGVKKLNLYLIINYFKGGKLRFKKIKPEAFEANRFYTVINKKSGEIVPMEVNFNFDDPNLIILPLAFGKRQGREFIWNDLLSLETGSLKLANGRVIEKTLYNRRTRQDEPALFVALTFERREVLDSSNIKPMNLIGVDRGENIPAVIALTDPEGCPLSRFKDSLGNPTHILRIGESYKEKQRTIQAKKEVEQRRAGGYSRKYASKAKNLADDMVRNTARDLLYYAVTQDAMLIFENLSRGFGRQGKRTFMAERQYTRMEDWLTAKLAYEGLPSKTYLSKTLAQYTSKTCSNCGFTITSADYDRVLEKLKKTATGWMTTINGKELKVEGQITYYNRYKRQNVVKDLSVELDRLSEESVNNDISSWTKGRSGEALSLLKKRFSHRPVQEKFVCLNCGFETHADEQAALNIARSWLFLRSQEYKKYQTNKTTGNTDKRAFVETWQSFYRKKLKEVWKPAV

SEQ ID NO: 32860 - protein, 978 aa, synthetic construct
  REGION 1..978: note = engineered CasX variant
QEIKRISKIRRRLVKDSNTKKAGKTGPMKTLLVRVMTPDLRERLENLRKKPPNIPQPISNTSRANLNKLLTDYTEMKKAILHVYWEEFQKDPVGLMSRVAQPASKKIDQNKLKPEMDEKGNLTTAGFACSQCGQPLFVYKLEQVSEKGKAYTNYFGRCNVAEHEKLILLAQLKPEKDSDEAVTYSLGKFGQRALDFYSIHVTKESTHPVKPLAQIAGNRYASVPVGKALSDACMGTIASFLSKYQDIIIEHQKVVKGNQKRLESLRELAGKENLEYPSVTLPPQPHTKEGVDAYNEVIARVRMWVNLNLWQKLKLSRDDAKPLLRLKGFPSFPLVERQANEVDWWDMVCNVKKLINEKKEDGKVFWQNLAGYKRQEALRPYLSSEEDRKKGKKFARYQLGDLLLHLEKKHGEDWGKVYDEAWERIDKKVEGLSKHIKLEEERRSEDAQSKAALTDWLRAKASFVIEGLKEADKDEFCRCELKLQKWYGDLRGKPFAIEAENSILDISGFSKQYNCAFIWQKDGVKKLNLYLIINYFKGGKLRFKKIKPEAFEANRFYTVINKKSGEIVPMEVNFNFDDPNLIILPLAFGKRQGREFIWNDLLSLETGSLKLANGRVIEKTLYNRRTRQDEPALFVALTFERREVLDSSNIKPMNLIGVDRGENIPAVIALTDPEGCPLSRFKDSLGNPTHILRIGESYKEKQRTIQAKKEVEQRRAGGYSRKYASKAKNLADDMVRNTARDLLYYAVTQDAMLIFENLSRGFGRQGKRTFMAERQYTRMEDWLTAKLAYEGLPSKTYLSKTLAQYTSKTCSNCGFTITSADYDRVLEKLKKTATGWMTTINGKELKVEGQITYYNRYKRQNVVKDLSVELDRLSEESVNNDISSWTKGRSGEALSLLKKRFSHRPVQEKFVCLNCGFETHADEQAALNIARSWLFLRSQEYKKYQTNKTTGNTDKRAFVETWQSFYRKKLKEVWKPAV

SEQ ID NO: 32861 - protein, 978 aa, synthetic construct
  REGION 1..978: note = engineered CasX variant
QEIKRISKIRRRLVKDSNTKKAGKTGPMKTLLVRVMTPDLRERLENLRKKPPNIPQPISNTSRANLNKLLTDYTEMKKAILHVYWEEFQKDPVGLMSRVAQPASKKIDQNKLKPEMDEKGNLTTAGFACSQCGQPLFVYKLEQVSEKGKAYTNYFGRCNVAEHEKLIKLAQLKPEKDSDEAVTYSLGKFGQRALDFYSIHVTKESTHPVKPLAQIAGNRYASGPVGKALSDACMGTIASFLSKYQDIIIEHQKVVKGNQKRLESLRELAGKENLEYPSVTLPPQPHTKEGVDAYNEVIARVRMWVNLNLWQKLKLSRDDAKPLLRLKGFPSFPLVERQANEVDWWDMVCNVKKLINEKKEDGKVFWQNLAGYKRQEALRPYLSSEEDRKKGKKFARYQLGDLLLHLEKKHGEDWGKVYDEAWERIDKKVEGLSKHIKLEEERRSEDAQSKAALTDWLRAKASFVIEGLKEADKDEFCRCELKLQKWYGDLRGKPFAIEAENSILDISGFSKQYNCAFIWQKDGVKKLNLYLIINYFKGGKLRFKKIKPEAFEANRFYTVINKKSGEIVPMEVNFNFDDPNLIILPLAFGKRQGREFIWNDLLSLETGSLKLANGRVIEKTLYNRRTRQDEPALFVALTFERREVLDSSNIKPMNLIGVDRGENIPAVIALTDPEGCPLSRFKDSLGNPTHILRIGESYKEKQRTIQAKKEVEQRRAGGYSRKYASKAKNLADDMVRNTARDLLYYAVTQDAMLIFENLSRGFGRQGKRTFMAERQYTRMEDWLTAKLAYEGLPSKTYLSKTLAQYTSKTCSNCGFTITSADYDRVLEKLKKTATGWMTTINGKELKVEGQITYYNRYKRQNVVKDLSVELDRLSEESVNNDISSWTKGRSGEALSLLKKRFSHRPVQEKFVCLNCGFETHADEQAALNIARSWLFLRSQEYKKYQTNKTTGNTDKRAFVETWQSFYRKKLKEVWKPAV

SEQ ID NO: 32862 - protein, 977 aa, synthetic construct
  REGION 1..977: note = engineered CasX variant
QEIKRISKIRRRLVKDSNTKKAGKTGPMKTLLVRVMTPDLRERLENLRKKPPNIPQPISNTSRANLNKLLTDYTEMKKAILHVYWEEFQKDPVGLMSRVAQPASKKIDQNKLKPEMDEKGNLTTAGFACSQCGQPLFVYKLEQVSEKGKAYTNYFGRCNVAEHEKLILLAQLKPEKDSDEAVTYSLGKFGQRALDFYSIHVTKESTHPVKPLAQIAGNRYASPVGKALSDACMGTIASFLSKYQDIIIEHQKVVKGNQKRLESLRELAGKENLEYPSVTLPPQPHTKEGVDAYNEVIARVRMWVNLNLWQKLKLSRDDAKPLLRLKGFPSFPLVERQANEVDWWDMVCNVKKLINEKKEDGKVFWQNLAGYKRQEALRPYLSSEEDRKKGKKFARYQLGDLLLHLEKKHGEDWGKVYDEAWERIDKKVEGLSKHIKLEEERRSEDAQSKAALTDWLRAKASFVIEGLKEADKDEFCRCELKLQKWYGDLRGKPFAIEAENSILDISGFSKQYNCAFIWQKDGVKKLNLYLIINYFKGGKLRFKKIKPEAFEANRFYTVINKKSGEIVPMEVNFNFDDPNLIILPLAFGKRQGREFIWNDLLSLETGSLKLANGRVIEKTLYNRRTRQDEPALFVALTFERREVLDSSNIKPMNLIGVDRGENIPAVIALTDPEGCPLSRFKDSLGNPTHILRIGESYKEKQRTIQAKKEVEQRRAGGYSRKYASKAKNLADDMVRNTARDLLYYAVTQDAMLIFENLSRGFGRQGKRTFMAERQYTRMEDWLTAKLAYEGLPSKTYLSKTLAQYTSKTCSNCGFTITSADYDRVLEKLKKTATGWMTTINGKELKVEGQITYYNRYKRQNVVKDLSVELDRLSEESVNNDISSWTKGRSGEALSLLKKRFSHRPVQEKFVCLNCGFETHADEQAALNIARSWLFLRSQEYKKYQTNKTTGNTDKRAFVETWQSFYRKKLKEVWKPAV

SEQ ID NO: 32863 - protein, 978 aa, synthetic construct
  REGION 1..978: note = engineered CasX variant
QEIKRISKIRRRLVKDSNTKKAGKTGPMKTLLVRVMTPDLRERLENLRKKPENIPQPISNTSQANLNKLLTDYTEMKKAILHVYWEEFQKDPVGLMSRVAQPASKKIDQNKLKPEMDEKGNLTTAGFACSQCGQPLFVYKLEQVSEKGKAYTNYFGRCNVAEHEKLILLAQLKPEKDSDEAVTYSLGKFGQRALDFYSIHVTKESTHPVKPLAQIAGNRYASYPVGKALSDACMGTIASFLSKYQDIIIEHQKVVKGNQKRLESLRELAGKENLEYPSVTLPPQPHTKEGVDAYNEVIARVRMWVNLNLWQKLKLSRDDAKPLLRLKGFPSFPLVERQANEVDWWDMVCNVKKLINEKKEDGKVFWQNLAGYKRQEALRPYLSSEEDRKKGKKFARYQLGDLLLHLEKKHGEDWGKVYDEAWERIDKKVEGLSKHIKLEEERRSEDAQSKAALTDWLRAKASFVIEGLKEADKDEFCRCELKLQKWYGDLRGKPFAIEAENSILDISGFSKQYNCAFIWQKDGVKKLNLYLIINYFKGGKLRFKKIKPEAFEANRFYTVINKKSGEIVPMEVNFNFDDPNLIILPLAFGKRQGREFIWNDLLSLETGSLKLANGRVIEKTLYNRRTRQDEPALFVALTFERREVLDSSNIKPMNLIGVDRGENIPAVIALTDPEGCPLSRFKDSLGNPTHILRIGESYKEKQRTIQAKKEVEQRRAGGYSRKYASKAKNLADDMVRNTARDLLYYAVTQDAMLIFENLSRGFGRQGKRTFMAERQYTRMEDWLTAKLAYEGLPSKTYLSKTLAQYTSKTCSNCGFTITSADYDRVLEKLKKTATGWMTTINGKELKVEGQITYYNRYKRQNVVKDLSVELDRLSEESVNNDISSWTKGRSGEALSLLKKRFSHRPVQEKFVCLNCGFETHADEQAALNIARSWLFLRSQEYKKYQTNKTTGNTDKRAFVETWQSFYRKKLKEVWKPAV

SEQ ID NO: 32864 - protein, 978 aa, synthetic construct
  REGION 1..978: note = engineered CasX variant
QEIKRISKIRRRLVKDSNTKKAGKTGPMKTLLVRVMTPDLRERLENLRKKPENIPQPISNTSQANLNKLLTDYTEMKKAILHVYWEEFQKDPVGLMSRVAQPASKKIDQNKLKPEMDEKGNLTTAGFACSQCGQPLFVYKLEQVSEKGKAYTNYFGRCNVAEHEKLILLAQLKPEKDSDEAVTYSLGKFGQRALDFYSIHVTKESTHPVKPLAQIAGNRYASHPVGKALSDACMGTIASFLSKYQDIIIEHQKVVKGNQKRLESLRELAGKENLEYPSVTLPPQPHTKEGVDAYNEVIARVRMWVNLNLWQKLKLSRDDAKPLLRLKGFPSFPLVERQANEVDWWDMVCNVKKLINEKKEDGKVFWQNLAGYKRQEALRPYLSSEEDRKKGKKFARYQLGDLLLHLEKKHGEDWGKVYDEAWERIDKKVEGLSKHIKLEEERRSEDAQSKAALTDWLRAKASFVIEGLKEADKDEFCRCELKLQKWYGDLRGKPFAIEAENSILDISGFSKQYNCAFIWQKDGVKKLNLYLIINYFKGGKLRFKKIKPEAFEANRFYTVINKKSGEIVPMEVNFNFDDPNLIILPLAFGKRQGREFIWNDLLSLETGSLKLANGRVIEKTLYNRRTRQDEPALFVALTFERREVLDSSNIKPMNLIGVDRGENIPAVIALTDPEGCPLSRFKDSLGNPTHILRIGESYKEKQRTIQAKKEVEQRRAGGYSRKYASKAKNLADDMVRNTARDLLYYAVTQDAMLIFENLSRGFGRQGKRTFMAERQYTRMEDWLTAKLAYEGLPSKTYLSKTLAQYTSKTCSNCGFTITSADYDRVLEKLKKTATGWMTTINGKELKVEGQITYYNRYKRQNVVKDLSVELDRLSEESVNNDISSWTKGRSGEALSLLKKRFSHRPVQEKFVCLNCGFETHADEQAALNIARSWLFLRSQEYKKYQTNKTTGNTDKRAFVETWQSFYRKKLKEVWKPAV

SEQ ID NO: 32865 - protein, 978 aa, synthetic construct
  REGION 1..978: note = engineered CasX variant
QEIKRISKIRRRLVKDSNTKKAGKTGPMKTLLVRVMTPDLRERLENLRKKPENIPQPISNTSQANLNKLLTDYTEMKKAILHVYWEEFQKDPVGLMSRVAQPASKKIDQNKLKPEMDEKGNLTTAGFACSQCGQPLFVYKLEQVSEKGKAYTNYFGRCNVAEHEKLILLAQLKPEKDSDEAVTYSLGKFGQRALDFYSIHVTKESTHPVKPLAQIAGNRYASSPVGKALSDACMGTIASFLSKYQDIIIEHQKVVKGNQKRLESLRELAGKENLEYPSVTLPPQPHTKEGVDAYNEVIARVRMWVNLNLWQKLKLSRDDAKPLLRLKGFPSFPLVERQANEVDWWDMVCNVKKLINEKKEDGKVFWQNLAGYKRQEALRPYLSSEEDRKKGKKFARYQLGDLLLHLEKKHGEDWGKVYDEAWERIDKKVEGLSKHIKLEEERRSEDAQSKAALTDWLRAKASFVIEGLKEADKDEFCRCELKLQKWYGDLRGKPFAIEAENSILDISGFSKQYNCAFIWQKDGVKKLNLYLIINYFKGGKLRFKKIKPEAFEANRFYTVINKKSGEIVPMEVNFNFDDPNLIILPLAFGKRQGREFIWNDLLSLETGSLKLANGRVIEKTLYNRRTRQDEPALFVALTFERREVLDSSNIKPMNLIGVDRGENIPAVIALTDPEGCPLSRFKDSLGNPTHILRIGESYKEKQRTIQAKKEVEQRRAGGYSRKYASKAKNLADDMVRNTARDLLYYAVTQDAMLIFENLSRGFGRQGKRTFMAERQYTRMEDWLTAKLAYEGLPSKTYLSKTLAQYTSKTCSNCGFTITSADYDRVLEKLKKTATGWMTTINGKELKVEGQITYYNRYKRQNVVKDLSVELDRLSEESVNNDISSWTKGRSGEALSLLKKRFSHRPVQEKFVCLNCGFETHADEQAALNIARSWLFLRSQEYKKYQTNKTTGNTDKRAFVETWQSFYRKKLKEVWKPAV

SEQ ID NO: 32866 - protein, 978 aa, synthetic construct
  REGION 1..978: note = engineered CasX variant
QEIKRISKIRRRLVKDSNTKKAGKTGPMKTLLVRVMTPDLRERLENLRKKPENIPQPISNTSQANLNKLLTDYTEMKKAILHVYWEEFQKDPVGLMSRVAQPASKKIDQNKLKPEMDEKGNLTTAGFACSQCGQPLFVYKLEQVSEKGKAYTNYFGRCNVAEHEKLILLAQLKPEKDSDEAVTYSLGKFGQRALDFYSIHVTKESTHPVKPLAQIAGNRYASTPVGKALSDACMGTIASFLSKYQDIIIEHQKVVKGNQKRLESLRELAGKENLEYPSVTLPPQPHTKEGVDAYNEVIARVRMWVNLNLWQKLKLSRDDAKPLLRLKGFPSFPLVERQANEVDWWDMVCNVKKLINEKKEDGKVFWQNLAGYKRQEALRPYLSSEEDRKKGKKFARYQLGDLLLHLEKKHGEDWGKVYDEAWERIDKKVEGLSKHIKLEEERRSEDAQSKAALTDWLRAKASFVIEGLKEADKDEFCRCELKLQKWYGDLRGKPFAIEAENSILDISGFSKQYNCAFIWQKDGVKKLNLYLIINYFKGGKLRFKKIKPEAFEANRFYTVINKKSGEIVPMEVNFNFDDPNLIILPLAFGKRQGREFIWNDLLSLETGSLKLANGRVIEKTLYNRRTRQDEPALFVALTFERREVLDSSNIKPMNLIGVDRGENIPAVIALTDPEGCPLSRFKDSLGNPTHILRIGESYKEKQRTIQAKKEVEQRRAGGYSRKYASKAKNLADDMVRNTARDLLYYAVTQDAMLIFENLSRGFGRQGKRTFMAERQYTRMEDWLTAKLAYEGLPSKTYLSKTLAQYTSKTCSNCGFTITSADYDRVLEKLKKTATGWMTTINGKELKVEGQITYYNRYKRQNVVKDLSVELDRLSEESVNNDISSWTKGRSGEALSLLKKRFSHRPVQEKFVCLNCGFETHADEQAALNIARSWLFLRSQEYKKYQTNKTTGNTDKRAFVETWQSFYRKKLKEVWKPAV

SEQ ID NO: 32867 - protein, 978 aa, synthetic construct
  REGION 1..978: note = engineered CasX variant
QEIKRISKIRRRLVKDSNTKKAGKTGPMKTLLVRVMTPDLRERLENLRKKPENIPQPISNTSQANLNKLLTDYTEMKKAILHVYWEEFQKDPVGLMSRVAQPASKKIDQNKLKPEMDEKGNLTTAGFACSQCGQPLFVYKLEQVSEKGKAYTNYFGRCNVAEHEKLILLAQLKPEKDSDEAVTYSLGKFGQRALDFYSIHVTKESTHPVKPLAQIAGNRYASAPVGKALSDACMGTIASFLSKYQDIIIEHQKVVKGNQKRLESLRELAGKENLEYPSVTLPPQPHTKEGVDAYNEVIARVRMWVNLNLWQKLKLSRDDAKPLLRLKGFPSFPLVERQANEVDWWDMVCNVKKLINEKKEDGKVFWQNLAGYKRQEALRPYLSSEEDRKKGKKFARYQLGDLLLHLEKKHGEDWGKVYDEAWERIDKKVEGLSKHIKLEEERRSEDAQSKAALTDWLRAKASFVIEGLKEADKDEFCRCELKLQKWYGDLRGKPFAIEAENSILDISGFSKQYNCAFIWQKDGVKKLNLYLIINYFKGGKLRFKKIKPEAFEANRFYTVINKKSGEIVPMEVNFNFDDPNLIILPLAFGKRQGREFIWNDLLSLETGSLKLANGRVIEKTLYNRRTRQDEPALFVALTFERREVLDSSNIKPMNLIGVDRGENIPAVIALTDPEGCPLSRFKDSLGNPTHILRIGESYKEKQRTIQAKKEVEQRRAGGYSRKYASKAKNLADDMVRNTARDLLYYAVTQDAMLIFENLSRGFGRQGKRTFMAERQYTRMEDWLTAKLAYEGLPSKTYLSKTLAQYTSKTCSNCGFTITSADYDRVLEKLKKTATGWMTTINGKELKVEGQITYYNRYKRQNVVKDLSVELDRLSEESVNNDISSWTKGRSGEALSLLKKRFSHRPVQEKFVCLNCGFETHADEQAALNIARSWLFLRSQEYKKYQTNKTTGNTDKRAFVETWQSFYRKKLKEVWKPAV

SEQ ID NO: 32868 - protein, 978 aa, synthetic construct
  REGION 1..978: note = engineered CasX variant
QEIKRISKIRRRLVKDSNTKKAGKTGPMKTLLVRVMTPDLRERLENLRKKPENIPQPISNTSQANLNKLLTDYTEMKKAILHVYWEEFQKDPVGLMSRVAQPASKKIDQNKLKPEMDEKGNLTTAGFACSQCGQPLFVYKLEQVSEKGKAYTNYFGRCNVAEHEKLILLAQLKPEKDSDEAVTYSLGKFGQRALDFYSIHVTKESTHPVKPLAQIAGNRYASVPVGKALSDACMGTIASFLSKYQDIIIEHQKVVKGNQKRLESLRELAGKENLEYPSVTLPPQPHTKEGVDAYNEVIARVRMWVNLNLWQKLKLSRDDAKPLLRLKGFPSFPLVERQANEVDWWDMVCNVKKLINEKKEDGKVFWQNLAGYKRQEALRPYLSSEEDRKKGKKFARYQLGDLLLHLEKKHGEDWGKVYDEAWERIDKKVEGLSKHIKLEEERRSEDAQSKAALTDWLRAKASFVIEGLKEADKDEFCRCELKLQKWYGDLRGKPFAIEAENSILDISGFSKQYNCAFIWQKDGVKKLNLYLIINYFKGGKLRFKKIKPEAFEANRFYTVINKKSGEIVPMEVNFNFDDPNLIILPLAFGKRQGREFIWNDLLSLETGSLKLANGRVIEKTLYNRRTRQDEPALFVALTFERREVLDSSNIKPMNLIGVDRGENIPAVIALTDPEGCPLSRFKDSLGNPTHILRIGESYKEKQRTIQAKKEVEQRRAGGYSRKYASKAKNLADDMVRNTARDLLYYAVTQDAMLIFENLSRGFGRQGKRTFMAERQYTRMEDWLTAKLAYEGLPSKTYLSKTLAQYTSKTCSNCGFTITSADYDRVLEKLKKTATGWMTTINGKELKVEGQITYYNRYKRQNVVKDLSVELDRLSEESVNNDISSWTKGRSGEALSLLKKRFSHRPVQEKFVCLNCGFETHADEQAALNIARSWLFLRSQEYKKYQTNKTTGNTDKRAFVETWQSFYRKKLKEVWKPAV

SEQ ID NO: 32869 - protein, 978 aa, synthetic construct
  REGION 1..978: note = engineered CasX variant
QEIKRISKIRRRLVKDSNTKKAGKTGPMKTLLVRVMTPDLRERLENLRKKPENIPQPISNTSQANLNKLLTDYTEMKKAILHVYWEEFQKDPVGLMSRVAQPASKKIDQNKLKPEMDEKGNLTTAGFACSQCGQPLFVYKLEQVSEKGKAYTNYFGRCNVAEHEKLIKLAQLKPEKDSDEAVTYSLGKFGQRALDFYSIHVTKESTHPVKPLAQIAGNRYASGPVGKALSDACMGTIASFLSKYQDIIIEHQKVVKGNQKRLESLRELAGKENLEYPSVTLPPQPHTKEGVDAYNEVIARVRMWVNLNLWQKLKLSRDDAKPLLRLKGFPSFPLVERQANEVDWWDMVCNVKKLINEKKEDGKVFWQNLAGYKRQEALRPYLSSEEDRKKGKKFARYQLGDLLLHLEKKHGEDWGKVYDEAWERIDKKVEGLSKHIKLEEERRSEDAQSKAALTDWLRAKASFVIEGLKEADKDEFCRCELKLQKWYGDLRGKPFAIEAENSILDISGFSKQYNCAFIWQKDGVKKLNLYLIINYFKGGKLRFKKIKPEAFEANRFYTVINKKSGEIVPMEVNFNFDDPNLIILPLAFGKRQGREFIWNDLLSLETGSLKLANGRVIEKTLYNRRTRQDEPALFVALTFERREVLDSSNIKPMNLIGVDRGENIPAVIALTDPEGCPLSRFKDSLGNPTHILRIGESYKEKQRTIQAKKEVEQRRAGGYSRKYASKAKNLADDMVRNTARDLLYYAVTQDAMLIFENLSRGFGRQGKRTFMAERQYTRMEDWLTAKLAYEGLPSKTYLSKTLAQYTSKTCSNCGFTITSADYDRVLEKLKKTATGWMTTINGKELKVEGQITYYNRYKRQNVVKDLSVELDRLSEESVNNDISSWTKGRSGEALSLLKKRFSHRPVQEKFVCLNCGFETHADEQAALNIARSWLFLRSQEYKKYQTNKTTGNTDKRAFVETWQSFYRKKLKEVWKPAV

SEQ ID NO: 32870 - protein, 977 aa, synthetic construct
  REGION 1..977: note = engineered CasX variant
QEIKRISKIRRRLVKDSNTKKAGKTGPMKTLLVRVMTPDLRERLENLRKKPENIPQPISNTSQANLNKLLTDYTEMKKAILHVYWEEFQKDPVGLMSRVAQPASKKIDQNKLKPEMDEKGNLTTAGFACSQCGQPLFVYKLEQVSEKGKAYTNYFGRCNVAEHEKLILLAQLKPEKDSDEAVTYSLGKFGQRALDFYSIHVTKESTHPVKPLAQIAGNRYASPVGKALSDACMGTIASFLSKYQDIIIEHQKVVKGNQKRLESLRELAGKENLEYPSVTLPPQPHTKEGVDAYNEVIARVRMWVNLNLWQKLKLSRDDAKPLLRLKGFPSFPLVERQANEVDWWDMVCNVKKLINEKKEDGKVFWQNLAGYKRQEALRPYLSSEEDRKKGKKFARYQLGDLLLHLEKKHGEDWGKVYDEAWERIDKKVEGLSKHIKLEEERRSEDAQSKAALTDWLRAKASFVIEGLKEADKDEFCRCELKLQKWYGDLRGKPFAIEAENSILDISGFSKQYNCAFIWQKDGVKKLNLYLIINYFKGGKLRFKKIKPEAFEANRFYTVINKKSGEIVPMEVNFNFDDPNLIILPLAFGKRQGREFIWNDLLSLETGSLKLANGRVIEKTLYNRRTRQDEPALFVALTFERREVLDSSNIKPMNLIGVDRGENIPAVIALTDPEGCPLSRFKDSLGNPTHILRIGESYKEKQRTIQAKKEVEQRRAGGYSRKYASKAKNLADDMVRNTARDLLYYAVTQDAMLIFENLSRGFGRQGKRTFMAERQYTRMEDWLTAKLAYEGLPSKTYLSKTLAQYTSKTCSNCGFTITSADYDRVLEKLKKTATGWMTTINGKELKVEGQITYYNRYKRQNVVKDLSVELDRLSEESVNNDISSWTKGRSGEALSLLKKRFSHRPVQEKFVCLNCGFETHADEQAALNIARSWLFLRSQEYKKYQTNKTTGNTDKRAFVETWQSFYRKKLKEVWKPAV

SEQ ID NO: 32871 - protein, 978 aa, synthetic construct
  REGION 1..978: note = engineered CasX variant
QEIKRISKIRRRLVKDSNTKKAGKTGPMKTLLVRVMTPDLRERLENLRKKPENIPQPISNTSRANLNKLLTDYTEMKKAILHVYDEEFQKDPVGLMSRVAQPASKKIDQNKLKPEMDEKGNLTTAGFACSQCGQPLFVYKLEQVSEKGKAYTNYFGRCNVAEHEKLILLAQLKPEKDSDEAVTYSLGKFGQRALDFYSIHVTKESTHPVKPLAQIAGNRYASYPVGKALSDACMGTIASFLSKYQDIIIEHQKVVKGNQKRLESLRELAGKENLEYPSVTLPPQPHTKEGVDAYNEVIARVRMWVNLNLWQKLKLSRDDAKPLLRLKGFPSFPLVERQANEVDWWDMVCNVKKLINEKKEDGKVFWQNLAGYKRQEALRPYLSSEEDRKKGKKFARYQLGDLLLHLEKKHGEDWGKVYDEAWERIDKKVEGLSKHIKLEEERRSEDAQSKAALTDWLRAKASFVIEGLKEADKDEFCRCELKLQKWYGDLRGKPFAIEAENSILDISGFSKQYNCAFIWQKDGVKKLNLYLIINYFKGGKLRFKKIKPEAFEANRFYTVINKKSGEIVPMEVNFNFDDPNLIILPLAFGKRQGREFIWNDLLSLETGSLKLANGRVIEKTLYNRRTRQDEPALFVALTFERREVLDSSNIKPMNLIGVDRGENIPAVIALTDPEGCPLSRFKDSLGNPTHILRIGESYKEKQRTIQAKKEVEQRRAGGYSRKYASKAKNLADDMVRNTARDLLYYAVTQDAMLIFENLSRGFGRQGKRTFMAERQYTRMEDWLTAKLAYEGLPSKTYLSKTLAQYTSKTCSNCGFTITSADYDRVLEKLKKTATGWMTTINGKELKVEGQITYYNRYKRQNVVKDLSVELDRLSEESVNNDISSWTKGRSGEALSLLKKRFSHRPVQEKFVCLNCGFETHADEQAALNIARSWLFLRSQEYKKYQTNKTTGNTDKRAFVETWQSFYRKKLKEVWKPAV

SEQ ID NO: 32872 - protein, 978 aa, synthetic construct
  REGION 1..978: note = engineered CasX variant
QEIKRISKIRRRLVKDSNTKKAGKTGPMKTLLVRVMTPDLRERLENLRKKPENIPQPISNTSRANLNKLLTDYTEMKKAILHVYDEEFQKDPVGLMSRVAQPASKKIDQNKLKPEMDEKGNLTTAGFACSQCGQPLFVYKLEQVSEKGKAYTNYFGRCNVAEHEKLILLAQLKPEKDSDEAVTYSLGKFGQRALDFYSIHVTKESTHPVKPLAQIAGNRYASHPVGKALSDACMGTIASFLSKYQDIIIEHQKVVKGNQKRLESLRELAGKENLEYPSVTLPPQPHTKEGVDAYNEVIARVRMWVNLNLWQKLKLSRDDAKPLLRLKGFPSFPLVERQANEVDWWDMVCNVKKLINEKKEDGKVFWQNLAGYKRQEALRPYLSSEEDRKKGKKFARYQLGDLLLHLEKKHGEDWGKVYDEAWERIDKKVEGLSKHIKLEEERRSEDAQSKAALTDWLRAKASFVIEGLKEADKDEFCRCELKLQKWYGDLRGKPFAIEAENSILDISGFSKQYNCAFIWQKDGVKKLNLYLIINYFKGGKLRFKKIKPEAFEANRFYTVINKKSGEIVPMEVNFNFDDPNLIILPLAFGKRQGREFIWNDLLSLETGSLKLANGRVIEKTLYNRRTRQDEPALFVALTFERREVLDSSNIKPMNLIGVDRGENIPAVIALTDPEGCPLSRFKDSLGNPTHILRIGESYKEKQRTIQAKKEVEQRRAGGYSRKYASKAKNLADDMVRNTARDLLYYAVTQDAMLIFENLSRGFGRQGKRTFMAERQYTRMEDWLTAKLAYEGLPSKTYLSKTLAQYTSKTCSNCGFTITSADYDRVLEKLKKTATGWMTTINGKELKVEGQITYYNRYKRQNVVKDLSVELDRLSEESVNNDISSWTKGRSGEALSLLKKRFSHRPVQEKFVCLNCGFETHADEQAALNIARSWLFLRSQEYKKYQTNKTTGNTDKRAFVETWQSFYRKKLKEVWKPAV

SEQ ID NO: 32873 - protein, 978 aa, synthetic construct
  REGION 1..978: note = engineered CasX variant
QEIKRISKIRRRLVKDSNTKKAGKTGPMKTLLVRVMTPDLRERLENLRKKPENIPQPISNTSRANLNKLLTDYTEMKKAILHVYDEEFQKDPVGLMSRVAQPASKKIDQNKLKPEMDEKGNLTTAGFACSQCGQPLFVYKLEQVSEKGKAYTNYFGRCNVAEHEKLILLAQLKPEKDSDEAVTYSLGKFGQRALDFYSIHVTKESTHPVKPLAQIAGNRYASSPVGKALSDACMGTIASFLSKYQDIIIEHQKVVKGNQKRLESLRELAGKENLEYPSVTLPPQPHTKEGVDAYNEVIARVRMWVNLNLWQKLKLSRDDAKPLLRLKGFPSFPLVERQANEVDWWDMVCNVKKLINEKKEDGKVFWQNLAGYKRQEALRPYLSSEEDRKKGKKFARYQLGDLLLHLEKKHGEDWGKVYDEAWERIDKKVEGLSKHIKLEEERRSEDAQSKAALTDWLRAKASFVIEGLKEADKDEFCRCELKLQKWYGDLRGKPFAIEAENSILDISGFSKQYNCAFIWQKDGVKKLNLYLIINYFKGGKLRFKKIKPEAFEANRFYTVINKKSGEIVPMEVNFNFDDPNLIILPLAFGKRQGREFIWNDLLSLETGSLKLANGRVIEKTLYNRRTRQDEPALFVALTFERREVLDSSNIKPMNLIGVDRGENIPAVIALTDPEGCPLSRFKDSLGNPTHILRIGESYKEKQRTIQAKKEVEQRRAGGYSRKYASKAKNLADDMVRNTARDLLYYAVTQDAMLIFENLSRGFGRQGKRTFMAERQYTRMEDWLTAKLAYEGLPSKTYLSKTLAQYTSKTCSNCGFTITSADYDRVLEKLKKTATGWMTTINGKELKVEGQITYYNRYKRQNVVKDLSVELDRLSEESVNNDISSWTKGRSGEALSLLKKRFSHRPVQEKFVCLNCGFETHADEQAALNIARSWLFLRSQEYKKYQTNKTTGNTDKRAFVETWQSFYRKKLKEVWKPAV

SEQ ID NO: 32874 - protein, 978 aa, synthetic construct
  REGION 1..978: note = engineered CasX variant
QEIKRISKIRRRLVKDSNTKKAGKTGPMKTLLVRVMTPDLRERLENLRKKPENIPQPISNTSRANLNKLLTDYTEMKKAILHVYDEEFQKDPVGLMSRVAQPASKKIDQNKLKPEMDEKGNLTTAGFACSQCGQPLFVYKLEQVSEKGKAYTNYFGRCNVAEHEKLILLAQLKPEKDSDEAVTYSLGKFGQRALDFYSIHVTKESTHPVKPLAQIAGNRYASTPVGKALSDACMGTIASFLSKYQDIIIEHQKVVKGNQKRLESLRELAGKENLEYPSVTLPPQPHTKEGVDAYNEVIARVRMWVNLNLWQKLKLSRDDAKPLLRLKGFPSFPLVERQANEVDWWDMVCNVKKLINEKKEDGKVFWQNLAGYKRQEALRPYLSSEEDRKKGKKFARYQLGDLLLHLEKKHGEDWGKVYDEAWERIDKKVEGLSKHIKLEEERRSEDAQSKAALTDWLRAKASFVIEGLKEADKDEFCRCELKLQKWYGDLRGKPFAIEAENSILDISGFSKQYNCAFIWQKDGVKKLNLYLIINYFKGGKLRFKKIKPEAFEANRFYTVINKKSGEIVPMEVNFNFDDPNLIILPLAFGKRQGREFIWNDLLSLETGSLKLANGRVIEKTLYNRRTRQDEPALFVALTFERREVLDSSNIKPMNLIGVDRGENIPAVIALTDPEGCPLSRFKDSLGNPTHILRIGESYKEKQRTIQAKKEVEQRRAGGYSRKYASKAKNLADDMVRNTARDLLYYAVTQDAMLIFENLSRGFGRQGKRTFMAERQYTRMEDWLTAKLAYEGLPSKTYLSKTLAQYTSKTCSNCGFTITSADYDRVLEKLKKTATGWMTTINGKELKVEGQITYYNRYKRQNVVKDLSVELDRLSEESVNNDISSWTKGRSGEALSLLKKRFSHRPVQEKFVCLNCGFETHADEQAALNIARSWLFLRSQEYKKYQTNKTTGNTDKRAFVETWQSFYRKKLKEVWKPAV

SEQ ID NO: 32875 - protein, 978 aa, synthetic construct
  REGION 1..978: note = engineered CasX variant
QEIKRISKIRRRLVKDSNTKKAGKTGPMKTLLVRVMTPDLRERLENLRKKPENIPQPISNTSRANLNKLLTDYTEMKKAILHVYDEEFQKDPVGLMSRVAQPASKKIDQNKLKPEMDEKGNLTTAGFACSQCGQPLFVYKLEQVSEKGKAYTNYFGRCNVAEHEKLILLAQLKPEKDSDEAVTYSLGKFGQRALDFYSIHVTKESTHPVKPLAQIAGNRYASAPVGKALSDACMGTIASFLSKYQDIIIEHQKVVKGNQKRLESLRELAGKENLEYPSVTLPPQPHTKEGVDAYNEVIARVRMWVNLNLWQKLKLSRDDAKPLLRLKGFPSFPLVERQANEVDWWDMVCNVKKLINEKKEDGKVFWQNLAGYKRQEALRPYLSSEEDRKKGKKFARYQLGDLLLHLEKKHGEDWGKVYDEAWERIDKKVEGLSKHIKLEEERRSEDAQSKAALTDWLRAKASFVIEGLKEADKDEFCRCELKLQKWYGDLRGKPFAIEAENSILDISGFSKQYNCAFIWQKDGVKKLNLYLIINYFKGGKLRFKKIKPEAFEANRFYTVINKKSGEIVPMEVNFNFDDPNLIILPLAFGKRQGREFIWNDLLSLETGSLKLANGRVIEKTLYNRRTRQDEPALFVALTFERREVLDSSNIKPMNLIGVDRGENIPAVIALTDPEGCPLSRFKDSLGNPTHILRIGESYKEKQRTIQAKKEVEQRRAGGYSRKYASKAKNLADDMVRNTARDLLYYAVTQDAMLIFENLSRGFGRQGKRTFMAERQYTRMEDWLTAKLAYEGLPSKTYLSKTLAQYTSKTCSNCGFTITSADYDRVLEKLKKTATGWMTTINGKELKVEGQITYYNRYKRQNVVKDLSVELDRLSEESVNNDISSWTKGRSGEALSLLKKRFSHRPVQEKFVCLNCGFETHADEQAALNIARSWLFLRSQEYKKYQTNKTTGNTDKRAFVETWQSFYRKKLKEVWKPAV

SEQ ID NO: 32876 - protein, 978 aa, synthetic construct
  REGION 1..978: note = engineered CasX variant
QEIKRISKIRRRLVKDSNTKKAGKTGPMKTLLVRVMTPDLRERLENLRKKPENIPQPISNTSRANLNKLLTDYTEMKKAILHVYDEEFQKDPVGLMSRVAQPASKKIDQNKLKPEMDEKGNLTTAGFACSQCGQPLFVYKLEQVSEKGKAYTNYFGRCNVAEHEKLILLAQLKPEKDSDEAVTYSLGKFGQRALDFYSIHVTKESTHPVKPLAQIAGNRYASVPVGKALSDACMGTIASFLSKYQDIIIEHQKVVKGNQKRLESLRELAGKENLEYPSVTLPPQPHTKEGVDAYNEVIARVRMWVNLNLWQKLKLSRDDAKPLLRLKGFPSFPLVERQANEVDWWDMVCNVKKLINEKKEDGKVFWQNLAGYKRQEALRPYLSSEEDRKKGKKFARYQLGDLLLHLEKKHGEDWGKVYDEAWERIDKKVEGLSKHIKLEEERRSEDAQSKAALTDWLRAKASFVIEGLKEADKDEFCRCELKLQKWYGDLRGKPFAIEAENSILDISGFSKQYNCAFIWQKDGVKKLNLYLIINYFKGGKLRFKKIKPEAFEANRFYTVINKKSGEIVPMEVNFNFDDPNLIILPLAFGKRQGREFIWNDLLSLETGSLKLANGRVIEKTLYNRRTRQDEPALFVALTFERREVLDSSNIKPMNLIGVDRGENIPAVIALTDPEGCPLSRFKDSLGNPTHILRIGESYKEKQRTIQAKKEVEQRRAGGYSRKYASKAKNLADDMVRNTARDLLYYAVTQDAMLIFENLSRGFGRQGKRTFMAERQYTRMEDWLTAKLAYEGLPSKTYLSKTLAQYTSKTCSNCGFTITSADYDRVLEKLKKTATGWMTTINGKELKVEGQITYYNRYKRQNVVKDLSVELDRLSEESVNNDISSWTKGRSGEALSLLKKRFSHRPVQEKFVCLNCGFETHADEQAALNIARSWLFLRSQEYKKYQTNKTTGNTDKRAFVETWQSFYRKKLKEVWKPAV

SEQ ID NO: 32877 - protein, 978 aa, synthetic construct
  REGION 1..978: note = engineered CasX variant
QEIKRISKIRRRLVKDSNTKKAGKTGPMKTLLVRVMTPDLRERLENLRKKPENIPQPISNTSRANLNKLLTDYTEMKKAILHVYDEEFQKDPVGLMSRVAQPASKKIDQNKLKPEMDEKGNLTTAGFACSQCGQPLFVYKLEQVSEKGKAYTNYFGRCNVAEHEKLIKLAQLKPEKDSDEAVTYSLGKFGQRALDFYSIHVTKESTHPVKPLAQIAGNRYASGPVGKALSDACMGTIASFLSKYQDIIIEHQKVVKGNQKRLESLRELAGKENLEYPSVTLPPQPHTKEGVDAYNEVIARVRMWVNLNLWQKLKLSRDDAKPLLRLKGFPSFPLVERQANEVDWWDMVCNVKKLINEKKEDGKVFWQNLAGYKRQEALRPYLSSEEDRKKGKKFARYQLGDLLLHLEKKHGEDWGKVYDEAWERIDKKVEGLSKHIKLEEERRSEDAQSKAALTDWLRAKASFVIEGLKEADKDEFCRCELKLQKWYGDLRGKPFAIEAENSILDISGFSKQYNCAFIWQKDGVKKLNLYLIINYFKGGKLRFKKIKPEAFEANRFYTVINKKSGEIVPMEVNFNFDDPNLIILPLAFGKRQGREFIWNDLLSLETGSLKLANGRVIEKTLYNRRTRQDEPALFVALTFERREVLDSSNIKPMNLIGVDRGENIPAVIALTDPEGCPLSRFKDSLGNPTHILRIGESYKEKQRTIQAKKEVEQRRAGGYSRKYASKAKNLADDMVRNTARDLLYYAVTQDAMLIFENLSRGFGRQGKRTFMAERQYTRMEDWLTAKLAYEGLPSKTYLSKTLAQYTSKTCSNCGFTITSADYDRVLEKLKKTATGWMTTINGKELKVEGQITYYNRYKRQNVVKDLSVELDRLSEESVNNDISSWTKGRSGEALSLLKKRFSHRPVQEKFVCLNCGFETHADEQAALNIARSWLFLRSQEYKKYQTNKTTGNTDKRAFVETWQSFYRKKLKEVWKPAV

SEQ ID NO: 32878 - protein, 977 aa, synthetic construct
  REGION 1..977: note = engineered CasX variant
QEIKRISKIRRRLVKDSNTKKAGKTGPMKTLLVRVMTPDLRERLENLRKKPENIPQPISNTSRANLNKLLTDYTEMKKAILHVYDEEFQKDPVGLMSRVAQPASKKIDQNKLKPEMDEKGNLTTAGFACSQCGQPLFVYKLEQVSEKGKAYTNYFGRCNVAEHEKLILLAQLKPEKDSDEAVTYSLGKFGQRALDFYSIHVTKESTHPVKPLAQIAGNRYASPVGKALSDACMGTIASFLSKYQDIIIEHQKVVKGNQKRLESLRELAGKENLEYPSVTLPPQPHTKEGVDAYNEVIARVRMWVNLNLWQKLKLSRDDAKPLLRLKGFPSFPLVERQANEVDWWDMVCNVKKLINEKKEDGKVFWQNLAGYKRQEALRPYLSSEEDRKKGKKFARYQLGDLLLHLEKKHGEDWGKVYDEAWERIDKKVEGLSKHIKLEEERRSEDAQSKAALTDWLRAKASFVIEGLKEADKDEFCRCELKLQKWYGDLRGKPFAIEAENSILDISGFSKQYNCAFIWQKDGVKKLNLYLIINYFKGGKLRFKKIKPEAFEANRFYTVINKKSGEIVPMEVNFNFDDPNLIILPLAFGKRQGREFIWNDLLSLETGSLKLANGRVIEKTLYNRRTRQDEPALFVALTFERREVLDSSNIKPMNLIGVDRGENIPAVIALTDPEGCPLSRFKDSLGNPTHILRIGESYKEKQRTIQAKKEVEQRRAGGYSRKYASKAKNLADDMVRNTARDLLYYAVTQDAMLIFENLSRGFGRQGKRTFMAERQYTRMEDWLTAKLAYEGLPSKTYLSKTLAQYTSKTCSNCGFTITSADYDRVLEKLKKTATGWMTTINGKELKVEGQITYYNRYKRQNVVKDLSVELDRLSEESVNNDISSWTKGRSGEALSLLKKRFSHRPVQEKFVCLNCGFETHADEQAALNIARSWLFLRSQEYKKYQTNKTTGNTDKRAFVETWQSFYRKKLKEVWKPAV

SEQ ID NO: 32879 - protein, 978 aa, synthetic construct
  REGION 1..978: note = engineered CasX variant
QEIKRISKIRRRLVKDSNTKKAGKTGPMKTLLVRVMTPDLRERLENLRKKPENIPQPISNTSRANLNKLLTDYTEMKKAILHVYWEEFQKDPVGLMSRVAQPASKKIDQNKLKPEMDEKGNLTTAGFACSQCGQPLFVYKLEQVSEKGKAYTNYFGRCNVAEHEKLIKLAQLKPEKDSDEAVTYSLGKFGQRALDFYSIHVTKESTHPVKPLAQIAGNRYASYPVGKALSDACMGTIASFLSKYQDIIIEHQKVVKGNQKRLESLRELAGKENLEYPSVTLPPQPHTKEGVDAYNEVIARVRMWVNLNLWQKLKLSRDDAKPLLRLKGFPSFPLVERQANEVDWWDMVCNVKKLINEKKEDGKVFWQNLAGYKRQEALRPYLSSEEDRKKGKKFARYQLGDLLLHLEKKHGEDWGKVYDEAWERIDKKVEGLSKHIKLEEERRSEDAQSKAALTDWLRAKASFVIEGLKEADKDEFCRCELKLQKWYGDLRGKPFAIEAENSILDISGFSKQYNCAFIWQKDGVKKLNLYLIINYFKGGKLRFKKIKPEAFEANRFYTVINKKSGEIVPMEVNFNFDDPNLIILPLAFGKRQGREFIWNDLLSLETGSLKLANGRVIEKTLYNRRTRQDEPALFVALTFERREVLDSSNIKPMNLIGVDRGENIPAVIALTDPEGCPLSRFKDSLGNPTHILRIGESYKEKQRTIQAKKEVEQRRAGGYSRKYASKAKNLADDMVRNTARDLLYYAVTQDAMLIFENLSRGFGRQGKRTFMAERQYTRMEDWLTAKLAYEGLPSKTYLSKTLAQYTSKTCSNCGFTITSADYDRVLEKLKKTATGWMTTINGKELKVEGQITYYNRYKRQNVVKDLSVELDRLSEESVNNDISSWTKGRSGEALSLLKKRFSHRPVQEKFVCLNCGFETHADEQAALNIARSWLFLRSQEYKKYQTNKTTGNTDKRAFVETWQSFYRKKLKEVWKPAV

SEQ ID NO: 32880 - protein, 978 aa, synthetic construct
  REGION 1..978: note = engineered CasX variant
QEIKRISKIRRRLVKDSNTKKAGKTGPMKTLLVRVMTPDLRERLENLRKKPENIPQPISNTSRANLNKLLTDYTEMKKAILHVYWEEFQKDPVGLMSRVAQPASKKIDQNKLKPEMDEKGNLTTAGFACSQCGQPLFVYKLEQVSEKGKAYTNYFGRCNVAEHEKLIKLAQLKPEKDSDEAVTYSLGKFGQRALDFYSIHVTKESTHPVKPLAQIAGNRYASHPVGKALSDACMGTIASFLSKYQDIIIEHQKVVKGNQKRLESLRELAGKENLEYPSVTLPPQPHTKEGVDAYNEVIARVRMWVNLNLWQKLKLSRDDAKPLLRLKGFPSFPLVERQANEVDWWDMVCNVKKLINEKKEDGKVFWQNLAGYKRQEALRPYLSSEEDRKKGKKFARYQLGDLLLHLEKKHGEDWGKVYDEAWERIDKKVEGLSKHIKLEEERRSEDAQSKAALTDWLRAKASFVIEGLKEADKDEFCRCELKLQKWYGDLRGKPFAIEAENSILDISGFSKQYNCAFIWQKDGVKKLNLYLIINYFKGGKLRFKKIKPEAFEANRFYTVINKKSGEIVPMEVNFNFDDPNLIILPLAFGKRQGREFIWNDLLSLETGSLKLANGRVIEKTLYNRRTRQDEPALFVALTFERREVLDSSNIKPMNLIGVDRGENIPAVIALTDPEGCPLSRFKDSLGNPTHILRIGESYKEKQRTIQAKKEVEQRRAGGYSRKYASKAKNLADDMVRNTARDLLYYAVTQDAMLIFENLSRGFGRQGKRTFMAERQYTRMEDWLTAKLAYEGLPSKTYLSKTLAQYTSKTCSNCGFTITSADYDRVLEKLKKTATGWMTTINGKELKVEGQITYYNRYKRQNVVKDLSVELDRLSEESVNNDISSWTKGRSGEALSLLKKRFSHRPVQEKFVCLNCGFETHADEQAALNIARSWLFLRSQEYKKYQTNKTTGNTDKRAFVETWQSFYRKKLKEVWKPAV

SEQ ID NO: 32881 - protein, 978 aa, synthetic construct
  REGION 1..978: note = engineered CasX variant
QEIKRISKIRRRLVKDSNTKKAGKTGPMKTLLVRVMTPDLRERLENLRKKPENIPQPISNTSRANLNKLLTDYTEMKKAILHVYWEEFQKDPVGLMSRVAQPASKKIDQNKLKPEMDEKGNLTTAGFACSQCGQPLFVYKLEQVSEKGKAYTNYFGRCNVAEHEKLIKLAQLKPEKDSDEAVTYSLGKFGQRALDFYSIHVTKESTHPVKPLAQIAGNRYASTPVGKALSDACMGTIASFLSKYQDIIIEHQKVVKGNQKRLESLRELAGKENLEYPSVTLPPQPHTKEGVDAYNEVIARVRMWVNLNLWQKLKLSRDDAKPLLRLKGFPSFPLVERQANEVDWWDMVCNVKKLINEKKEDGKVFWQNLAGYKRQEALRPYLSSEEDRKKGKKFARYQLGDLLLHLEKKHGEDWGKVYDEAWERIDKKVEGLSKHIKLEEERRSEDAQSKAALTDWLRAKASFVIEGLKEADKDEFCRCELKLQKWYGDLRGKPFAIEAENSILDISGFSKQYNCAFIWQKDGVKKLNLYLIINYFKGGKLRFKKIKPEAFEANRFYTVINKKSGEIVPMEVNFNFDDPNLIILPLAFGKRQGREFIWNDLLSLETGSLKLANGRVIEKTLYNRRTRQDEPALFVALTFERREVLDSSNIKPMNLIGVDRGENIPAVIALTDPEGCPLSRFKDSLGNPTHILRIGESYKEKQRTIQAKKEVEQRRAGGYSRKYASKAKNLADDMVRNTARDLLYYAVTQDAMLIFENLSRGFGRQGKRTFMAERQYTRMEDWLTAKLAYEGLPSKTYLSKTLAQYTSKTCSNCGFTITSADYDRVLEKLKKTATGWMTTINGKELKVEGQITYYNRYKRQNVVKDLSVELDRLSEESVNNDISSWTKGRSGEALSLLKKRFSHRPVQEKFVCLNCGFETHADEQAALNIARSWLFLRSQEYKKYQTNKTTGNTDKRAFVETWQSFYRKKLKEVWKPAV

SEQ ID NO: 32882 - protein, 978 aa, synthetic construct
  REGION 1..978: note = engineered CasX variant
QEIKRISKIRRRLVKDSNTKKAGKTGPMKTLLVRVMTPDLRERLENLRKKPENIPQPISNTSRANLNKLLTDYTEMKKAILHVYWEEFQKDPVGLMSRVAQPASKKIDQNKLKPEMDEKGNLTTAGFACSQCGQPLFVYKLEQVSEKGKAYTNYFGRCNVAEHEKLIKLAQLKPEKDSDEAVTYSLGKFGQRALDFYSIHVTKESTHPVKPLAQIAGNRYASAPVGKALSDACMGTIASFLSKYQDIIIEHQKVVKGNQKRLESLRELAGKENLEYPSVTLPPQPHTKEGVDAYNEVIARVRMWVNLNLWQKLKLSRDDAKPLLRLKGFPSFPLVERQANEVDWWDMVCNVKKLINEKKEDGKVFWQNLAGYKRQEALRPYLSSEEDRKKGKKFARYQLGDLLLHLEKKHGEDWGKVYDEAWERIDKKVEGLSKHIKLEEERRSEDAQSKAALTDWLRAKASFVIEGLKEADKDEFCRCELKLQKWYGDLRGKPFAIEAENSILDISGFSKQYNCAFIWQKDGVKKLNLYLIINYFKGGKLRFKKIKPEAFEANRFYTVINKKSGEIVPMEVNFNFDDPNLIILPLAFGKRQGREFIWNDLLSLETGSLKLANGRVIEKTLYNRRTRQDEPALFVALTFERREVLDSSNIKPMNLIGVDRGENIPAVIALTDPEGCPLSRFKDSLGNPTHILRIGESYKEKQRTIQAKKEVEQRRAGGYSRKYASKAKNLADDMVRNTARDLLYYAVTQDAMLIFENLSRGFGRQGKRTFMAERQYTRMEDWLTAKLAYEGLPSKTYLSKTLAQYTSKTCSNCGFTITSADYDRVLEKLKKTATGWMTTINGKELKVEGQITYYNRYKRQNVVKDLSVELDRLSEESVNNDISSWTKGRSGEALSLLKKRFSHRPVQEKFVCLNCGFETHADEQAALNIARSWLFLRSQEYKKYQTNKTTGNTDKRAFVETWQSFYRKKLKEVWKPAV

SEQ ID NO: 32883 - protein, 978 aa, synthetic construct
  REGION 1..978: note = engineered CasX variant
QEIKRISKIRRRLVKDSNTKKAGKTGPMKTLLVRVMTPDLRERLENLRKKPENIPQPISNTSRANLNKLLTDYTEMKKAILHVYWEEFQKDPVGLMSRVAQPASKKIDQNKLKPEMDEKGNLTTAGFACSQCGQPLFVYKLEQVSEKGKAYTNYFGRCNVAEHEKLIKLAQLKPEKDSDEAVTYSLGKFGQRALDFYSIHVTKESTHPVKPLAQIAGNRYASVPVGKALSDACMGTIASFLSKYQDIIIEHQKVVKGNQKRLESLRELAGKENLEYPSVTLPPQPHTKEGVDAYNEVIARVRMWVNLNLWQKLKLSRDDAKPLLRLKGFPSFPLVERQANEVDWWDMVCNVKKLINEKKEDGKVFWQNLAGYKRQEALRPYLSSEEDRKKGKKFARYQLGDLLLHLEKKHGEDWGKVYDEAWERIDKKVEGLSKHIKLEEERRSEDAQSKAALTDWLRAKASFVIEGLKEADKDEFCRCELKLQKWYGDLRGKPFAIEAENSILDISGFSKQYNCAFIWQKDGVKKLNLYLIINYFKGGKLRFKKIKPEAFEANRFYTVINKKSGEIVPMEVNFNFDDPNLIILPLAFGKRQGREFIWNDLLSLETGSLKLANGRVIEKTLYNRRTRQDEPALFVALTFERREVLDSSNIKPMNLIGVDRGENIPAVIALTDPEGCPLSRFKDSLGNPTHILRIGESYKEKQRTIQAKKEVEQRRAGGYSRKYASKAKNLADDMVRNTARDLLYYAVTQDAMLIFENLSRGFGRQGKRTFMAERQYTRMEDWLTAKLAYEGLPSKTYLSKTLAQYTSKTCSNCGFTITSADYDRVLEKLKKTATGWMTTINGKELKVEGQITYYNRYKRQNVVKDLSVELDRLSEESVNNDISSWTKGRSGEALSLLKKRFSHRPVQEKFVCLNCGFETHADEQAALNIARSWLFLRSQEYKKYQTNKTTGNTDKRAFVETWQSFYRKKLKEVWKPAV

SEQ ID NO: 32884 - protein, 979 aa, synthetic construct
  REGION 1..979: note = engineered CasX variant
QEIKRISKIRRRLVKDSNTKKAGKTGPMKTLLVRVMTPDLRERLENLRKKPENIPQPISNTSRANLNKLLTDYTEMKKAILHVYWEEFQKDPVGLMSRVAQPASKKIDQNKLKPEMDEKGNLTTAGFACSQCGQPLFVYKLEQVSEKGKAYTNYFGRCNVAEHEKLIKKLAQLKPEKDSDEAVTYSLGKFGQRALDFYSIHVTKESTHPVKPLAQIAGNRYASGPVGKALSDACMGTIASFLSKYQDIIIEHQKVVKGNQKRLESLRELAGKENLEYPSVTLPPQPHTKEGVDAYNEVIARVRMWVNLNLWQKLKLSRDDAKPLLRLKGFPSFPLVERQANEVDWWDMVCNVKKLINEKKEDGKVFWQNLAGYKRQEALRPYLSSEEDRKKGKKFARYQLGDLLLHLEKKHGEDWGKVYDEAWERIDKKVEGLSKHIKLEEERRSEDAQSKAALTDWLRAKASFVIEGLKEADKDEFCRCELKLQKWYGDLRGKPFAIEAENSILDISGFSKQYNCAFIWQKDGVKKLNLYLIINYFKGGKLRFKKIKPEAFEANRFYTVINKKSGEIVPMEVNFNFDDPNLIILPLAFGKRQGREFIWNDLLSLETGSLKLANGRVIEKTLYNRRTRQDEPALFVALTFERREVLDSSNIKPMNLIGVDRGENIPAVIALTDPEGCPLSRFKDSLGNPTHILRIGESYKEKQRTIQAKKEVEQRRAGGYSRKYASKAKNLADDMVRNTARDLLYYAVTQDAMLIFENLSRGFGRQGKRTFMAERQYTRMEDWLTAKLAYEGLPSKTYLSKTLAQYTSKTCSNCGFTITSADYDRVLEKLKKTATGWMTTINGKELKVEGQITYYNRYKRQNVVKDLSVELDRLSEESVNNDISSWTKGRSGEALSLLKKRFSHRPVQEKFVCLNCGFETHADEQAALNIARSWLFLRSQEYKKYQTNKTTGNTDKRAFVETWQSFYRKKLKEVWKPAV

SEQ ID NO: 32885 - protein, 977 aa, synthetic construct
  REGION 1..977: note = engineered CasX variant
QEIKRISKIRRRLVKDSNTKKAGKTGPMKTLLVRVMTPDLRERLENLRKKPENIPQPISNTSRANLNKLLTDYTEMKKAILHVYWEEFQKDPVGLMSRVAQPASKKIDQNKLKPEMDEKGNLTTAGFACSQCGQPLFVYKLEQVSEKGKAYTNYFGRCNVAEHEKLIKLAQLKPEKDSDEAVTYSLGKFGQRALDFYSIHVTKESTHPVKPLAQIAGNRYASPVGKALSDACMGTIASFLSKYQDIIIEHQKVVKGNQKRLESLRELAGKENLEYPSVTLPPQPHTKEGVDAYNEVIARVRMWVNLNLWQKLKLSRDDAKPLLRLKGFPSFPLVERQANEVDWWDMVCNVKKLINEKKEDGKVFWQNLAGYKRQEALRPYLSSEEDRKKGKKFARYQLGDLLLHLEKKHGEDWGKVYDEAWERIDKKVEGLSKHIKLEEERRSEDAQSKAALTDWLRAKASFVIEGLKEADKDEFCRCELKLQKWYGDLRGKPFAIEAENSILDISGFSKQYNCAFIWQKDGVKKLNLYLIINYFKGGKLRFKKIKPEAFEANRFYTVINKKSGEIVPMEVNFNFDDPNLIILPLAFGKRQGREFIWNDLLSLETGSLKLANGRVIEKTLYNRRTRQDEPALFVALTFERREVLDSSNIKPMNLIGVDRGENIPAVIALTDPEGCPLSRFKDSLGNPTHILRIGESYKEKQRTIQAKKEVEQRRAGGYSRKYASKAKNLADDMVRNTARDLLYYAVTQDAMLIFENLSRGFGRQGKRTFMAERQYTRMEDWLTAKLAYEGLPSKTYLSKTLAQYTSKTCSNCGFTITSADYDRVLEKLKKTATGWMTTINGKELKVEGQITYYNRYKRQNVVKDLSVELDRLSEESVNNDISSWTKGRSGEALSLLKKRFSHRPVQEKFVCLNCGFETHADEQAALNIARSWLFLRSQEYKKYQTNKTTGNTDKRAFVETWQSFYRKKLKEVWKPAV

SEQ ID NO: 32886 - protein, 978 aa, synthetic construct
  REGION 1..978: note = engineered CasX variant
QEIKRISKIRRRLVKDSNTKKAGKTGPMKTLLVRVMTPDLRERLENLRKKPENIPQPISNTSRANLNKLLTDYTEMKKAILHVYWEEFQKDPVGLMSRVAQPASKKIDQNKLKPEMDEKGNLTTAGFACSQCGQPLFVYKLEQVSEKGKAYTNYFGRCNVAEHEKLILLYQLKPEKDSDEAVTYSLGKFGQRALDFYSIHVTKESTHPVKPLAQIAGNRYASYPVGKALSDACMGTIASFLSKYQDIIIEHQKVVKGNQKRLESLRELAGKENLEYPSVTLPPQPHTKEGVDAYNEVIARVRMWVNLNLWQKLKLSRDDAKPLLRLKGFPSFPLVERQANEVDWWDMVCNVKKLINEKKEDGKVFWQNLAGYKRQEALRPYLSSEEDRKKGKKFARYQLGDLLLHLEKKHGEDWGKVYDEAWERIDKKVEGLSKHIKLEEERRSEDAQSKAALTDWLRAKASFVIEGLKEADKDEFCRCELKLQKWYGDLRGKPFAIEAENSILDISGFSKQYNCAFIWQKDGVKKLNLYLIINYFKGGKLRFKKIKPEAFEANRFYTVINKKSGEIVPMEVNFNFDDPNLIILPLAFGKRQGREFIWNDLLSLETGSLKLANGRVIEKTLYNRRTRQDEPALFVALTFERREVLDSSNIKPMNLIGVDRGENIPAVIALTDPEGCPLSRFKDSLGNPTHILRIGESYKEKQRTIQAKKEVEQRRAGGYSRKYASKAKNLADDMVRNTARDLLYYAVTQDAMLIFENLSRGFGRQGKRTFMAERQYTRMEDWLTAKLAYEGLPSKTYLSKTLAQYTSKTCSNCGFTITSADYDRVLEKLKKTATGWMTTINGKELKVEGQITYYNRYKRQNVVKDLSVELDRLSEESVNNDISSWTKGRSGEALSLLKKRFSHRPVQEKFVCLNCGFETHADEQAALNIARSWLFLRSQEYKKYQTNKTTGNTDKRAFVETWQSFYRKKLKEVWKPAV

SEQ ID NO: 32887 - protein, 978 aa, synthetic construct
  REGION 1..978: note = engineered CasX variant
QEIKRISKIRRRLVKDSNTKKAGKTGPMKTLLVRVMTPDLRERLENLRKKPENIPQPISNTSRANLNKLLTDYTEMKKAILHVYWEEFQKDPVGLMSRVAQPASKKIDQNKLKPEMDEKGNLTTAGFACSQCGQPLFVYKLEQVSEKGKAYTNYFGRCNVAEHEKLILLYQLKPEKDSDEAVTYSLGKFGQRALDFYSIHVTKESTHPVKPLAQIAGNRYASHPVGKALSDACMGTIASFLSKYQDIIIEHQKVVKGNQKRLESLRELAGKENLEYPSVTLPPQPHTKEGVDAYNEVIARVRMWVNLNLWQKLKLSRDDAKPLLRLKGFPSFPLVERQANEVDWWDMVCNVKKLINEKKEDGKVFWQNLAGYKRQEALRPYLSSEEDRKKGKKFARYQLGDLLLHLEKKHGEDWGKVYDEAWERIDKKVEGLSKHIKLEEERRSEDAQSKAALTDWLRAKASFVIEGLKEADKDEFCRCELKLQKWYGDLRGKPFAIEAENSILDISGFSKQYNCAFIWQKDGVKKLNLYLIINYFKGGKLRFKKIKPEAFEANRFYTVINKKSGEIVPMEVNFNFDDPNLIILPLAFGKRQGREFIWNDLLSLETGSLKLANGRVIEKTLYNRRTRQDEPALFVALTFERREVLDSSNIKPMNLIGVDRGENIPAVIALTDPEGCPLSRFKDSLGNPTHILRIGESYKEKQRTIQAKKEVEQRRAGGYSRKYASKAKNLADDMVRNTARDLLYYAVTQDAMLIFENLSRGFGRQGKRTFMAERQYTRMEDWLTAKLAYEGLPSKTYLSKTLAQYTSKTCSNCGFTITSADYDRVLEKLKKTATGWMTTINGKELKVEGQITYYNRYKRQNVVKDLSVELDRLSEESVNNDISSWTKGRSGEALSLLKKRFSHRPVQEKFVCLNCGFETHADEQAALNIARSWLFLRSQEYKKYQTNKTTGNTDKRAFVETWQSFYRKKLKEVWKPAV

SEQ ID NO: 32888 - protein, 978 aa, synthetic construct
  REGION 1..978: note = engineered CasX variant
QEIKRISKIRRRLVKDSNTKKAGKTGPMKTLLVRVMTPDLRERLENLRKKPENIPQPISNTSRANLNKLLTDYTEMKKAILHVYWEEFQKDPVGLMSRVAQPASKKIDQNKLKPEMDEKGNLTTAGFACSQCGQPLFVYKLEQVSEKGKAYTNYFGRCNVAEHEKLILLYQLKPEKDSDEAVTYSLGKFGQRALDFYSIHVTKESTHPVKPLAQIAGNRYASSPVGKALSDACMGTIASFLSKYQDIIIEHQKVVKGNQKRLESLRELAGKENLEYPSVTLPPQPHTKEGVDAYNEVIARVRMWVNLNLWQKLKLSRDDAKPLLRLKGFPSFPLVERQANEVDWWDMVCNVKKLINEKKEDGKVFWQNLAGYKRQEALRPYLSSEEDRKKGKKFARYQLGDLLLHLEKKHGEDWGKVYDEAWERIDKKVEGLSKHIKLEEERRSEDAQSKAALTDWLRAKASFVIEGLKEADKDEFCRCELKLQKWYGDLRGKPFAIEAENSILDISGFSKQYNCAFIWQKDGVKKLNLYLIINYFKGGKLRFKKIKPEAFEANRFYTVINKKSGEIVPMEVNFNFDDPNLIILPLAFGKRQGREFIWNDLLSLETGSLKLANGRVIEKTLYNRRTRQDEPALFVALTFERREVLDSSNIKPMNLIGVDRGENIPAVIALTDPEGCPLSRFKDSLGNPTHILRIGESYKEKQRTIQAKKEVEQRRAGGYSRKYASKAKNLADDMVRNTARDLLYYAVTQDAMLIFENLSRGFGRQGKRTFMAERQYTRMEDWLTAKLAYEGLPSKTYLSKTLAQYTSKTCSNCGFTITSADYDRVLEKLKKTATGWMTTINGKELKVEGQITYYNRYKRQNVVKDLSVELDRLSEESVNNDISSWTKGRSGEALSLLKKRFSHRPVQEKFVCLNCGFETHADEQAALNIARSWLFLRSQEYKKYQTNKTTGNTDKRAFVETWQSFYRKKLKEVWKPAV

SEQ ID NO: 32889 - protein, 978 aa, synthetic construct
  REGION 1..978: note = engineered CasX variant
QEIKRISKIRRRLVKDSNTKKAGKTGPMKTLLVRVMTPDLRERLENLRKKPENIPQPISNTSRANLNKLLTDYTEMKKAILHVYWEEFQKDPVGLMSRVAQPASKKIDQNKLKPEMDEKGNLTTAGFACSQCGQPLFVYKLEQVSEKGKAYTNYFGRCNVAEHEKLILLYQLKPEKDSDEAVTYSLGKFGQRALDFYSIHVTKESTHPVKPLAQIAGNRYASTPVGKALSDACMGTIASFLSKYQDIIIEHQKVVKGNQKRLESLRELAGKENLEYPSVTLPPQPHTKEGVDAYNEVIARVRMWVNLNLWQKLKLSRDDAKPLLRLKGFPSFPLVERQANEVDWWDMVCNVKKLINEKKEDGKVFWQNLAGYKRQEALRPYLSSEEDRKKGKKFARYQLGDLLLHLEKKHGEDWGKVYDEAWERIDKKVEGLSKHIKLEEERRSEDAQSKAALTDWLRAKASFVIEGLKEADKDEFCRCELKLQKWYGDLRGKPFAIEAENSILDISGFSKQYNCAFIWQKDGVKKLNLYLIINYFKGGKLRFKKIKPEAFEANRFYTVINKKSGEIVPMEVNFNFDDPNLIILPLAFGKRQGREFIWNDLLSLETGSLKLANGRVIEKTLYNRRTRQDEPALFVALTFERREVLDSSNIKPMNLIGVDRGENIPAVIALTDPEGCPLSRFKDSLGNPTHILRIGESYKEKQRTIQAKKEVEQRRAGGYSRKYASKAKNLADDMVRNTARDLLYYAVTQDAMLIFENLSRGFGRQGKRTFMAERQYTRMEDWLTAKLAYEGLPSKTYLSKTLAQYTSKTCSNCGFTITSADYDRVLEKLKKTATGWMTTINGKELKVEGQITYYNRYKRQNVVKDLSVELDRLSEESVNNDISSWTKGRSGEALSLLKKRFSHRPVQEKFVCLNCGFETHADEQAALNIARSWLFLRSQEYKKYQTNKTTGNTDKRAFVETWQSFYRKKLKEVWKPAV

SEQ ID NO: 32890 - protein, 978 aa, synthetic construct
  REGION 1..978: note = engineered CasX variant
QEIKRISKIRRRLVKDSNTKKAGKTGPMKTLLVRVMTPDLRERLENLRKKPENIPQPISNTSRANLNKLLTDYTEMKKAILHVYWEEFQKDPVGLMSRVAQPASKKIDQNKLKPEMDEKGNLTTAGFACSQCGQPLFVYKLEQVSEKGKAYTNYFGRCNVAEHEKLILLYQLKPEKDSDEAVTYSLGKFGQRALDFYSIHVTKESTHPVKPLAQIAGNRYASAPVGKALSDACMGTIASFLSKYQDIIIEHQKVVKGNQKRLESLRELAGKENLEYPSVTLPPQPHTKEGVDAYNEVIARVRMWVNLNLWQKLKLSRDDAKPLLRLKGFPSFPLVERQANEVDWWDMVCNVKKLINEKKEDGKVFWQNLAGYKRQEALRPYLSSEEDRKKGKKFARYQLGDLLLHLEKKHGEDWGKVYDEAWERIDKKVEGLSKHIKLEEERRSEDAQSKAALTDWLRAKASFVIEGLKEADKDEFCRCELKLQKWYGDLRGKPFAIEAENSILDISGFSKQYNCAFIWQKDGVKKLNLYLIINYFKGGKLRFKKIKPEAFEANRFYTVINKKSGEIVPMEVNFNFDDPNLIILPLAFGKRQGREFIWNDLLSLETGSLKLANGRVIEKTLYNRRTRQDEPALFVALTFERREVLDSSNIKPMNLIGVDRGENIPAVIALTDPEGCPLSRFKDSLGNPTHILRIGESYKEKQRTIQAKKEVEQRRAGGYSRKYASKAKNLADDMVRNTARDLLYYAVTQDAMLIFENLSRGFGRQGKRTFMAERQYTRMEDWLTAKLAYEGLPSKTYLSKTLAQYTSKTCSNCGFTITSADYDRVLEKLKKTATGWMTTINGKELKVEGQITYYNRYKRQNVVKDLSVELDRLSEESVNNDISSWTKGRSGEALSLLKKRFSHRPVQEKFVCLNCGFETHADEQAALNIARSWLFLRSQEYKKYQTNKTTGNTDKRAFVETWQSFYRKKLKEVWKPAV

SEQ ID NO: 32891 - protein, 978 aa, synthetic construct
  REGION 1..978: note = engineered CasX variant
QEIKRISKIRRRLVKDSNTKKAGKTGPMKTLLVRVMTPDLRERLENLRKKPENIPQPISNTSRANLNKLLTDYTEMKKAILHVYWEEFQKDPVGLMSRVAQPASKKIDQNKLKPEMDEKGNLTTAGFACSQCGQPLFVYKLEQVSEKGKAYTNYFGRCNVAEHEKLILLYQLKPEKDSDEAVTYSLGKFGQRALDFYSIHVTKESTHPVKPLAQIAGNRYASVPVGKALSDACMGTIASFLSKYQDIIIEHQKVVKGNQKRLESLRELAGKENLEYPSVTLPPQPHTKEGVDAYNEVIARVRMWVNLNLWQKLKLSRDDAKPLLRLKGFPSFPLVERQANEVDWWDMVCNVKKLINEKKEDGKVFWQNLAGYKRQEALRPYLSSEEDRKKGKKFARYQLGDLLLHLEKKHGEDWGKVYDEAWERIDKKVEGLSKHIKLEEERRSEDAQSKAALTDWLRAKASFVIEGLKEADKDEFCRCELKLQKWYGDLRGKPFAIEAENSILDISGFSKQYNCAFIWQKDGVKKLNLYLIINYFKGGKLRFKKIKPEAFEANRFYTVINKKSGEIVPMEVNFNFDDPNLIILPLAFGKRQGREFIWNDLLSLETGSLKLANGRVIEKTLYNRRTRQDEPALFVALTFERREVLDSSNIKPMNLIGVDRGENIPAVIALTDPEGCPLSRFKDSLGNPTHILRIGESYKEKQRTIQAKKEVEQRRAGGYSRKYASKAKNLADDMVRNTARDLLYYAVTQDAMLIFENLSRGFGRQGKRTFMAERQYTRMEDWLTAKLAYEGLPSKTYLSKTLAQYTSKTCSNCGFTITSADYDRVLEKLKKTATGWMTTINGKELKVEGQITYYNRYKRQNVVKDLSVELDRLSEESVNNDISSWTKGRSGEALSLLKKRFSHRPVQEKFVCLNCGFETHADEQAALNIARSWLFLRSQEYKKYQTNKTTGNTDKRAFVETWQSFYRKKLKEVWKPAV

SEQ ID NO: 32892 - protein, 978 aa, synthetic construct
  REGION 1..978: note = engineered CasX variant
QEIKRISKIRRRLVKDSNTKKAGKTGPMKTLLVRVMTPDLRERLENLRKKPENIPQPISNTSRANLNKLLTDYTEMKKAILHVYWEEFQKDPVGLMSRVAQPASKKIDQNKLKPEMDEKGNLTTAGFACSQCGQPLFVYKLEQVSEKGKAYTNYFGRCNVAEHEKLIKLYQLKPEKDSDEAVTYSLGKFGQRALDFYSIHVTKESTHPVKPLAQIAGNRYASGPVGKALSDACMGTIASFLSKYQDIIIEHQKVVKGNQKRLESLRELAGKENLEYPSVTLPPQPHTKEGVDAYNEVIARVRMWVNLNLWQKLKLSRDDAKPLLRLKGFPSFPLVERQANEVDWWDMVCNVKKLINEKKEDGKVFWQNLAGYKRQEALRPYLSSEEDRKKGKKFARYQLGDLLLHLEKKHGEDWGKVYDEAWERIDKKVEGLSKHIKLEEERRSEDAQSKAALTDWLRAKASFVIEGLKEADKDEFCRCELKLQKWYGDLRGKPFAIEAENSILDISGFSKQYNCAFIWQKDGVKKLNLYLIINYFKGGKLRFKKIKPEAFEANRFYTVINKKSGEIVPMEVNFNFDDPNLIILPLAFGKRQGREFIWNDLLSLETGSLKLANGRVIEKTLYNRRTRQDEPALFVALTFERREVLDSSNIKPMNLIGVDRGENIPAVIALTDPEGCPLSRFKDSLGNPTHILRIGESYKEKQRTIQAKKEVEQRRAGGYSRKYASKAKNLADDMVRNTARDLLYYAVTQDAMLIFENLSRGFGRQGKRTFMAERQYTRMEDWLTAKLAYEGLPSKTYLSKTLAQYTSKTCSNCGFTITSADYDRVLEKLKKTATGWMTTINGKELKVEGQITYYNRYKRQNVVKDLSVELDRLSEESVNNDISSWTKGRSGEALSLLKKRFSHRPVQEKFVCLNCGFETHADEQAALNIARSWLFLRSQEYKKYQTNKTTGNTDKRAFVETWQSFYRKKLKEVWKPAV

SEQ ID NO: 32893 - protein, 977 aa, synthetic construct
  REGION 1..977: note = engineered CasX variant
QEIKRISKIRRRLVKDSNTKKAGKTGPMKTLLVRVMTPDLRERLENLRKKPENIPQPISNTSRANLNKLLTDYTEMKKAILHVYWEEFQKDPVGLMSRVAQPASKKIDQNKLKPEMDEKGNLTTAGFACSQCGQPLFVYKLEQVSEKGKAYTNYFGRCNVAEHEKLILLYQLKPEKDSDEAVTYSLGKFGQRALDFYSIHVTKESTHPVKPLAQIAGNRYASPVGKALSDACMGTIASFLSKYQDIIIEHQKVVKGNQKRLESLRELAGKENLEYPSVTLPPQPHTKEGVDAYNEVIARVRMWVNLNLWQKLKLSRDDAKPLLRLKGFPSFPLVERQANEVDWWDMVCNVKKLINEKKEDGKVFWQNLAGYKRQEALRPYLSSEEDRKKGKKFARYQLGDLLLHLEKKHGEDWGKVYDEAWERIDKKVEGLSKHIKLEEERRSEDAQSKAALTDWLRAKASFVIEGLKEADKDEFCRCELKLQKWYGDLRGKPFAIEAENSILDISGFSKQYNCAFIWQKDGVKKLNLYLIINYFKGGKLRFKKIKPEAFEANRFYTVINKKSGEIVPMEVNFNFDDPNLIILPLAFGKRQGREFIWNDLLSLETGSLKLANGRVIEKTLYNRRTRQDEPALFVALTFERREVLDSSNIKPMNLIGVDRGENIPAVIALTDPEGCPLSRFKDSLGNPTHILRIGESYKEKQRTIQAKKEVEQRRAGGYSRKYASKAKNLADDMVRNTARDLLYYAVTQDAMLIFENLSRGFGRQGKRTFMAERQYTRMEDWLTAKLAYEGLPSKTYLSKTLAQYTSKTCSNCGFTITSADYDRVLEKLKKTATGWMTTINGKELKVEGQITYYNRYKRQNVVKDLSVELDRLSEESVNNDISSWTKGRSGEALSLLKKRFSHRPVQEKFVCLNCGFETHADEQAALNIARSWLFLRSQEYKKYQTNKTTGNTDKRAFVETWQSFYRKKLKEVWKPAV

SEQ ID NO: 32894 - protein, 978 aa, synthetic construct
  REGION 1..978: note = engineered CasX variant
QEIKRISKIRRRLVKDSNTKKAGKTGPMKTLLVRVMTPDLRERLENLRKKPENIPQPISNTSRANLNKLLTDYTEMKKAILHVYWEEFQKDPVGLMSRVAQPASKKIDQNKLKPEMDEKGNLTTAGFACSQCGQPLFVYKLEQVSEKGKAYTNYFGRCNVAEHEKLILLSQLKPEKDSDEAVTYSLGKFGQRALDFYSIHVTKESTHPVKPLAQIAGNRYASYPVGKALSDACMGTIASFLSKYQDIIIEHQKVVKGNQKRLESLRELAGKENLEYPSVTLPPQPHTKEGVDAYNEVIARVRMWVNLNLWQKLKLSRDDAKPLLRLKGFPSFPLVERQANEVDWWDMVCNVKKLINEKKEDGKVFWQNLAGYKRQEALRPYLSSEEDRKKGKKFARYQLGDLLLHLEKKHGEDWGKVYDEAWERIDKKVEGLSKHIKLEEERRSEDAQSKAALTDWLRAKASFVIEGLKEADKDEFCRCELKLQKWYGDLRGKPFAIEAENSILDISGFSKQYNCAFIWQKDGVKKLNLYLIINYFKGGKLRFKKIKPEAFEANRFYTVINKKSGEIVPMEVNFNFDDPNLIILPLAFGKRQGREFIWNDLLSLETGSLKLANGRVIEKTLYNRRTRQDEPALFVALTFERREVLDSSNIKPMNLIGVDRGENIPAVIALTDPEGCPLSRFKDSLGNPTHILRIGESYKEKQRTIQAKKEVEQRRAGGYSRKYASKAKNLADDMVRNTARDLLYYAVTQDAMLIFENLSRGFGRQGKRTFMAERQYTRMEDWLTAKLAYEGLPSKTYLSKTLAQYTSKTCSNCGFTITSADYDRVLEKLKKTATGWMTTINGKELKVEGQITYYNRYKRQNVVKDLSVELDRLSEESVNNDISSWTKGRSGEALSLLKKRFSHRPVQEKFVCLNCGFETHADEQAALNIARSWLFLRSQEYKKYQTNKTTGNTDKRAFVETWQSFYRKKLKEVWKPAV

SEQ ID NO: 32895 - protein, 978 aa, synthetic construct
  REGION 1..978: note = engineered CasX variant
QEIKRISKIRRRLVKDSNTKKAGKTGPMKTLLVRVMTPDLRERLENLRKKPENIPQPISNTSRANLNKLLTDYTEMKKAILHVYWEEFQKDPVGLMSRVAQPASKKIDQNKLKPEMDEKGNLTTAGFACSQCGQPLFVYKLEQVSEKGKAYTNYFGRCNVAEHEKLILLSQLKPEKDSDEAVTYSLGKFGQRALDFYSIHVTKESTHPVKPLAQIAGNRYASHPVGKALSDACMGTIASFLSKYQDIIIEHQKVVKGNQKRLESLRELAGKENLEYPSVTLPPQPHTKEGVDAYNEVIARVRMWVNLNLWQKLKLSRDDAKPLLRLKGFPSFPLVERQANEVDWWDMVCNVKKLINEKKEDGKVFWQNLAGYKRQEALRPYLSSEEDRKKGKKFARYQLGDLLLHLEKKHGEDWGKVYDEAWERIDKKVEGLSKHIKLEEERRSEDAQSKAALTDWLRAKASFVIEGLKEADKDEFCRCELKLQKWYGDLRGKPFAIEAENSILDISGFSKQYNCAFIWQKDGVKKLNLYLIINYFKGGKLRFKKIKPEAFEANRFYTVINKKSGEIVPMEVNFNFDDPNLIILPLAFGKRQGREFIWNDLLSLETGSLKLANGRVIEKTLYNRRTRQDEPALFVALTFERREVLDSSNIKPMNLIGVDRGENIPAVIALTDPEGCPLSRFKDSLGNPTHILRIGESYKEKQRTIQAKKEVEQRRAGGYSRKYASKAKNLADDMVRNTARDLLYYAVTQDAMLIFENLSRGFGRQGKRTFMAERQYTRMEDWLTAKLAYEGLPSKTYLSKTLAQYTSKTCSNCGFTITSADYDRVLEKLKKTATGWMTTINGKELKVEGQITYYNRYKRQNVVKDLSVELDRLSEESVNNDISSWTKGRSGEALSLLKKRFSHRPVQEKFVCLNCGFETHADEQAALNIARSWLFLRSQEYKKYQTNKTTGNTDKRAFVETWQSFYRKKLKEVWKPAV

SEQ ID NO: 32896 - protein, 978 aa, synthetic construct
  REGION 1..978: note = engineered CasX variant
QEIKRISKIRRRLVKDSNTKKAGKTGPMKTLLVRVMTPDLRERLENLRKKPENIPQPISNTSRANLNKLLTDYTEMKKAILHVYWEEFQKDPVGLMSRVAQPASKKIDQNKLKPEMDEKGNLTTAGFACSQCGQPLFVYKLEQVSEKGKAYTNYFGRCNVAEHEKLILLSQLKPEKDSDEAVTYSLGKFGQRALDFYSIHVTKESTHPVKPLAQIAGNRYASSPVGKALSDACMGTIASFLSKYQDIIIEHQKVVKGNQKRLESLRELAGKENLEYPSVTLPPQPHTKEGVDAYNEVIARVRMWVNLNLWQKLKLSRDDAKPLLRLKGFPSFPLVERQANEVDWWDMVCNVKKLINEKKEDGKVFWQNLAGYKRQEALRPYLSSEEDRKKGKKFARYQLGDLLLHLEKKHGEDWGKVYDEAWERIDKKVEGLSKHIKLEEERRSEDAQSKAALTDWLRAKASFVIEGLKEADKDEFCRCELKLQKWYGDLRGKPFAIEAENSILDISGFSKQYNCAFIWQKDGVKKLNLYLIINYFKGGKLRFKKIKPEAFEANRFYTVINKKSGEIVPMEVNFNFDDPNLIILPLAFGKRQGREFIWNDLLSLETGSLKLANGRVIEKTLYNRRTRQDEPALFVALTFERREVLDSSNIKPMNLIGVDRGENIPAVIALTDPEGCPLSRFKDSLGNPTHILRIGESYKEKQRTIQAKKEVEQRRAGGYSRKYASKAKNLADDMVRNTARDLLYYAVTQDAMLIFENLSRGFGRQGKRTFMAERQYTRMEDWLTAKLAYEGLPSKTYLSKTLAQYTSKTCSNCGFTITSADYDRVLEKLKKTATGWMTTINGKELKVEGQITYYNRYKRQNVVKDLSVELDRLSEESVNNDISSWTKGRSGEALSLLKKRFSHRPVQEKFVCLNCGFETHADEQAALNIARSWLFLRSQEYKKYQTNKTTGNTDKRAFVETWQSFYRKKLKEVWKPAV

SEQ ID NO: 32897 - protein, 978 aa, synthetic construct
  REGION 1..978: note = engineered CasX variant
QEIKRISKIRRRLVKDSNTKKAGKTGPMKTLLVRVMTPDLRERLENLRKKPENIPQPISNTSRANLNKLLTDYTEMKKAILHVYWEEFQKDPVGLMSRVAQPASKKIDQNKLKPEMDEKGNLTTAGFACSQCGQPLFVYKLEQVSEKGKAYTNYFGRCNVAEHEKLILLSQLKPEKDSDEAVTYSLGKFGQRALDFYSIHVTKESTHPVKPLAQIAGNRYASTPVGKALSDACMGTIASFLSKYQDIIIEHQKVVKGNQKRLESLRELAGKENLEYPSVTLPPQPHTKEGVDAYNEVIARVRMWVNLNLWQKLKLSRDDAKPLLRLKGFPSFPLVERQANEVDWWDMVCNVKKLINEKKEDGKVFWQNLAGYKRQEALRPYLSSEEDRKKGKKFARYQLGDLLLHLEKKHGEDWGKVYDEAWERIDKKVEGLSKHIKLEEERRSEDAQSKAALTDWLRAKASFVIEGLKEADKDEFCRCELKLQKWYGDLRGKPFAIEAENSILDISGFSKQYNCAFIWQKDGVKKLNLYLIINYFKGGKLRFKKIKPEAFEANRFYTVINKKSGEIVPMEVNFNFDDPNLIILPLAFGKRQGREFIWNDLLSLETGSLKLANGRVIEKTLYNRRTRQDEPALFVALTFERREVLDSSNIKPMNLIGVDRGENIPAVIALTDPEGCPLSRFKDSLGNPTHILRIGESYKEKQRTIQAKKEVEQRRAGGYSRKYASKAKNLADDMVRNTARDLLYYAVTQDAMLIFENLSRGFGRQGKRTFMAERQYTRMEDWLTAKLAYEGLPSKTYLSKTLAQYTSKTCSNCGFTITSADYDRVLEKLKKTATGWMTTINGKELKVEGQITYYNRYKRQNVVKDLSVELDRLSEESVNNDISSWTKGRSGEALSLLKKRFSHRPVQEKFVCLNCGFETHADEQAALNIARSWLFLRSQEYKKYQTNKTTGNTDKRAFVETWQSFYRKKLKEVWKPAV

SEQ ID NO: 32898 - protein, 978 aa, synthetic construct
  REGION 1..978: note = engineered CasX variant
QEIKRISKIRRRLVKDSNTKKAGKTGPMKTLLVRVMTPDLRERLENLRKKPENIPQPISNTSRANLNKLLTDYTEMKKAILHVYWEEFQKDPVGLMSRVAQPASKKIDQNKLKPEMDEKGNLTTAGFACSQCGQPLFVYKLEQVSEKGKAYTNYFGRCNVAEHEKLILLSQLKPEKDSDEAVTYSLGKFGQRALDFYSIHVTKESTHPVKPLAQIAGNRYASAPVGKALSDACMGTIASFLSKYQDIIIEHQKVVKGNQKRLESLRELAGKENLEYPSVTLPPQPHTKEGVDAYNEVIARVRMWVNLNLWQKLKLSRDDAKPLLRLKGFPSFPLVERQANEVDWWDMVCNVKKLINEKKEDGKVFWQNLAGYKRQEALRPYLSSEEDRKKGKKFARYQLGDLLLHLEKKHGEDWGKVYDEAWERIDKKVEGLSKHIKLEEERRSEDAQSKAALTDWLRAKASFVIEGLKEADKDEFCRCELKLQKWYGDLRGKPFAIEAENSILDISGFSKQYNCAFIWQKDGVKKLNLYLIINYFKGGKLRFKKIKPEAFEANRFYTVINKKSGEIVPMEVNFNFDDPNLIILPLAFGKRQGREFIWNDLLSLETGSLKLANGRVIEKTLYNRRTRQDEPALFVALTFERREVLDSSNIKPMNLIGVDRGENIPAVIALTDPEGCPLSRFKDSLGNPTHILRIGESYKEKQRTIQAKKEVEQRRAGGYSRKYASKAKNLADDMVRNTARDLLYYAVTQDAMLIFENLSRGFGRQGKRTFMAERQYTRMEDWLTAKLAYEGLPSKTYLSKTLAQYTSKTCSNCGFTITSADYDRVLEKLKKTATGWMTTINGKELKVEGQITYYNRYKRQNVVKDLSVELDRLSEESVNNDISSWTKGRSGEALSLLKKRFSHRPVQEKFVCLNCGFETHADEQAALNIARSWLFLRSQEYKKYQTNKTTGNTDKRAFVETWQSFYRKKLKEVWKPAV

SEQ ID NO: 32899 - protein, 978 aa, synthetic construct
  REGION 1..978: note = engineered CasX variant
QEIKRISKIRRRLVKDSNTKKAGKTGPMKTLLVRVMTPDLRERLENLRKKPENIPQPISNTSRANLNKLLTDYTEMKKAILHVYWEEFQKDPVGLMSRVAQPASKKIDQNKLKPEMDEKGNLTTAGFACSQCGQPLFVYKLEQVSEKGKAYTNYFGRCNVAEHEKLILLSQLKPEKDSDEAVTYSLGKFGQRALDFYSIHVTKESTHPVKPLAQIAGNRYASVPVGKALSDACMGTIASFLSKYQDIIIEHQKVVKGNQKRLESLRELAGKENLEYPSVTLPPQPHTKEGVDAYNEVIARVRMWVNLNLWQKLKLSRDDAKPLLRLKGFPSFPLVERQANEVDWWDMVCNVKKLINEKKEDGKVFWQNLAGYKRQEALRPYLSSEEDRKKGKKFARYQLGDLLLHLEKKHGEDWGKVYDEAWERIDKKVEGLSKHIKLEEERRSEDAQSKAALTDWLRAKASFVIEGLKEADKDEFCRCELKLQKWYGDLRGKPFAIEAENSILDISGFSKQYNCAFIWQKDGVKKLNLYLIINYFKGGKLRFKKIKPEAFEANRFYTVINKKSGEIVPMEVNFNFDDPNLIILPLAFGKRQGREFIWNDLLSLETGSLKLANGRVIEKTLYNRRTRQDEPALFVALTFERREVLDSSNIKPMNLIGVDRGENIPAVIALTDPEGCPLSRFKDSLGNPTHILRIGESYKEKQRTIQAKKEVEQRRAGGYSRKYASKAKNLADDMVRNTARDLLYYAVTQDAMLIFENLSRGFGRQGKRTFMAERQYTRMEDWLTAKLAYEGLPSKTYLSKTLAQYTSKTCSNCGFTITSADYDRVLEKLKKTATGWMTTINGKELKVEGQITYYNRYKRQNVVKDLSVELDRLSEESVNNDISSWTKGRSGEALSLLKKRFSHRPVQEKFVCLNCGFETHADEQAALNIARSWLFLRSQEYKKYQTNKTTGNTDKRAFVETWQSFYRKKLKEVWKPAV

SEQ ID NO: 32900 - protein, 978 aa, synthetic construct
  REGION 1..978: note = engineered CasX variant
QEIKRISKIRRRLVKDSNTKKAGKTGPMKTLLVRVMTPDLRERLENLRKKPENIPQPISNTSRANLNKLLTDYTEMKKAILHVYWEEFQKDPVGLMSRVAQPASKKIDQNKLKPEMDEKGNLTTAGFACSQCGQPLFVYKLEQVSEKGKAYTNYFGRCNVAEHEKLIKLSQLKPEKDSDEAVTYSLGKFGQRALDFYSIHVTKESTHPVKPLAQIAGNRYASGPVGKALSDACMGTIASFLSKYQDIIIEHQKVVKGNQKRLESLRELAGKENLEYPSVTLPPQPHTKEGVDAYNEVIARVRMWVNLNLWQKLKLSRDDAKPLLRLKGFPSFPLVERQANEVDWWDMVCNVKKLINEKKEDGKVFWQNLAGYKRQEALRPYLSSEEDRKKGKKFARYQLGDLLLHLEKKHGEDWGKVYDEAWERIDKKVEGLSKHIKLEEERRSEDAQSKAALTDWLRAKASFVIEGLKEADKDEFCRCELKLQKWYGDLRGKPFAIEAENSILDISGFSKQYNCAFIWQKDGVKKLNLYLIINYFKGGKLRFKKIKPEAFEANRFYTVINKKSGEIVPMEVNFNFDDPNLIILPLAFGKRQGREFIWNDLLSLETGSLKLANGRVIEKTLYNRRTRQDEPALFVALTFERREVLDSSNIKPMNLIGVDRGENIPAVIALTDPEGCPLSRFKDSLGNPTHILRIGESYKEKQRTIQAKKEVEQRRAGGYSRKYASKAKNLADDMVRNTARDLLYYAVTQDAMLIFENLSRGFGRQGKRTFMAERQYTRMEDWLTAKLAYEGLPSKTYLSKTLAQYTSKTCSNCGFTITSADYDRVLEKLKKTATGWMTTINGKELKVEGQITYYNRYKRQNVVKDLSVELDRLSEESVNNDISSWTKGRSGEALSLLKKRFSHRPVQEKFVCLNCGFETHADEQAALNIARSWLFLRSQEYKKYQTNKTTGNTDKRAFVETWQSFYRKKLKEVWKPAV

SEQ ID NO: 32901 - protein, 977 aa, synthetic construct
  REGION 1..977: note = engineered CasX variant
QEIKRISKIRRRLVKDSNTKKAGKTGPMKTLLVRVMTPDLRERLENLRKKPENIPQPISNTSRANLNKLLTDYTEMKKAILHVYWEEFQKDPVGLMSRVAQPASKKIDQNKLKPEMDEKGNLTTAGFACSQCGQPLFVYKLEQVSEKGKAYTNYFGRCNVAEHEKLILLSQLKPEKDSDEAVTYSLGKFGQRALDFYSIHVTKESTHPVKPLAQIAGNRYASPVGKALSDACMGTIASFLSKYQDIIIEHQKVVKGNQKRLESLRELAGKENLEYPSVTLPPQPHTKEGVDAYNEVIARVRMWVNLNLWQKLKLSRDDAKPLLRLKGFPSFPLVERQANEVDWWDMVCNVKKLINEKKEDGKVFWQNLAGYKRQEALRPYLSSEEDRKKGKKFARYQLGDLLLHLEKKHGEDWGKVYDEAWERIDKKVEGLSKHIKLEEERRSEDAQSKAALTDWLRAKASFVIEGLKEADKDEFCRCELKLQKWYGDLRGKPFAIEAENSILDISGFSKQYNCAFIWQKDGVKKLNLYLIINYFKGGKLRFKKIKPEAFEANRFYTVINKKSGEIVPMEVNFNFDDPNLIILPLAFGKRQGREFIWNDLLSLETGSLKLANGRVIEKTLYNRRTRQDEPALFVALTFERREVLDSSNIKPMNLIGVDRGENIPAVIALTDPEGCPLSRFKDSLGNPTHILRIGESYKEKQRTIQAKKEVEQRRAGGYSRKYASKAKNLADDMVRNTARDLLYYAVTQDAMLIFENLSRGFGRQGKRTFMAERQYTRMEDWLTAKLAYEGLPSKTYLSKTLAQYTSKTCSNCGFTITSADYDRVLEKLKKTATGWMTTINGKELKVEGQITYYNRYKRQNVVKDLSVELDRLSEESVNNDISSWTKGRSGEALSLLKKRFSHRPVQEKFVCLNCGFETHADEQAALNIARSWLFLRSQEYKKYQTNKTTGNTDKRAFVETWQSFYRKKLKEVWKPAV

SEQ ID NO: 32902 - protein, 978 aa, synthetic construct
  REGION 1..978: note = engineered CasX variant
QEIKRISKIRRRLVKDSNTKKAGKTGPMKTLLVRVMTPDLRERLENLRKKPENIPQPISNTSRANLNKLLTDYTEMKKAILHVYWEEFQKDPVGLMSRVAQPASKKIDQNKLKPEMDEKGNLTTAGFACSQCGQPLFVYKLEQVSEKGKAYTNYFGRCNVAEHEKLILLAQLKPEKDSDEAVTYSLGKFGQRALDFYSIHVTKESTHPVKPLAQIAGNRYASYPVGKALSDACMGTIASFLSKYQDIIIEHQKVVKGNQKRLESLRELAGKENLEYPSVTLPPQPHTKEGVDAYNEVIARVRMWVNLNLWQKLKLSRDDAKPLLRLKGFPSFPLVERQANEVDWWDMVCNVKKLINEKKEDGKVFWQNLAGYKRQEALRPYLSSEEDRKKGKKFARYQLGDLLLHLEKKHGEDWGKVYDEAWERIDKKVEGLSKHIKLEEERRSEDAQSKAALTDWLRAKASFVIEGLKEADKDEFCRCELKLQKWYGDLRGKPFAIEAENSILDISGFSKQYNCAFIWQKDGVKKLNLYLIINYFKGGKLRFKKIKPEAFEANRFYTVINKKSGEIVPMEVNFNFDDPNLIILPLAFGKRQGREFIWNDLLSLETGSLKLANGRVIEKTLYNRRTRQDEPALFVALTFERREVLDSSNIKPMNLIGVDRGENIPAVIALTDPEGCPLSRFKDSLGNPTHILRIGESYKEKQRTIQAKKEVEQRRAGGYSRKYASKAKNLADDMVRNTARDLLYYAVTQDAMLIFENLSRGFGRQGKRTFMAERQYTRMEDWLTAKLAYEGLPSKTYLSKTLAQYTSKTCSNCGFTITSADYDRVLEKLKKTATGWMTTINGKELKVEGQITYYNRYKRQNVVKDLSVELDRLSEESVNNDISSWTKGRSGEALSLLKKRFSHRPVQEKFVCLNCGFETHADEQAALNIARSWLFLRSQEYKKYQTNKTTGNTDKRAFVETWQSFYRKKLKEVWKPAV

SEQ ID NO: 32903 - protein, 978 aa, synthetic construct
  REGION 1..978: note = engineered CasX variant
QEIKRISKIRRRLVKDSNTKKAGKTGPMKTLLVRVMTPDLRERLENLRKKPENIPQPISNTSRANLNKLLTDYTEMKKAILHVYWEEFQKDPVGLMSRVAQPASKKIDQNKLKPEMDEKGNLTTAGFACSQCGQPLFVYKLEQVSEKGKAYTNYFGRCNVAEHEKLILLAQLKPEKDSDEAVTYSLGKFGQRALDFYSIHVTKESTHPVKPLAQIAGNRYASHPVGKALSDACMGTIASFLSKYQDIIIEHQKVVKGNQKRLESLRELAGKENLEYPSVTLPPQPHTKEGVDAYNEVIARVRMWVNLNLWQKLKLSRDDAKPLLRLKGFPSFPLVERQANEVDWWDMVCNVKKLINEKKEDGKVFWQNLAGYKRQEALRPYLSSEEDRKKGKKFARYQLGDLLLHLEKKHGEDWGKVYDEAWERIDKKVEGLSKHIKLEEERRSEDAQSKAALTDWLRAKASFVIEGLKEADKDEFCRCELKLQKWYGDLRGKPFAIEAENSILDISGFSKQYNCAFIWQKDGVKKLNLYLIINYFKGGKLRFKKIKPEAFEANRFYTVINKKSGEIVPMEVNFNFDDPNLIILPLAFGKRQGREFIWNDLLSLETGSLKLANGRVIEKTLYNRRTRQDEPALFVALTFERREVLDSSNIKPMNLIGVDRGENIPAVIALTDPEGCPLSRFKDSLGNPTHILRIGESYKEKQRTIQAKKEVEQRRAGGYSRKYASKAKNLADDMVRNTARDLLYYAVTQDAMLIFENLSRGFGRQGKRTFMAERQYTRMEDWLTAKLAYEGLPSKTYLSKTLAQYTSKTCSNCGFTITSADYDRVLEKLKKTATGWMTTINGKELKVEGQITYYNRYKRQNVVKDLSVELDRLSEESVNNDISSWTKGRSGEALSLLKKRFSHRPVQEKFVCLNCGFETHADEQAALNIARSWLFLRSQEYKKYQTNKTTGNTDKRAFVETWQSFYRKKLKEVWKPAV

SEQ ID NO: 32904 - protein, 978 aa, synthetic construct
  REGION 1..978: note = engineered CasX variant
QEIKRISKIRRRLVKDSNTKKAGKTGPMKTLLVRVMTPDLRERLENLRKKPENIPQPISNTSRANLNKLLTDYTEMKKAILHVYWEEFQKDPVGLMSRVAQPASKKIDQNKLKPEMDEKGNLTTAGFACSQCGQPLFVYKLEQVSEKGKAYTNYFGRCNVAEHEKLILLAQLKPEKDSDEAVTYSLGKFGQRALDFYSIHVTKESTHPVKPLAQIAGNRYASTPVGKALSDACMGTIASFLSKYQDIIIEHQKVVKGNQKRLESLRELAGKENLEYPSVTLPPQPHTKEGVDAYNEVIARVRMWVNLNLWQKLKLSRDDAKPLLRLKGFPSFPLVERQANEVDWWDMVCNVKKLINEKKEDGKVFWQNLAGYKRQEALRPYLSSEEDRKKGKKFARYQLGDLLLHLEKKHGEDWGKVYDEAWERIDKKVEGLSKHIKLEEERRSEDAQSKAALTDWLRAKASFVIEGLKEADKDEFCRCELKLQKWYGDLRGKPFAIEAENSILDISGFSKQYNCAFIWQKDGVKKLNLYLIINYFKGGKLRFKKIKPEAFEANRFYTVINKKSGEIVPMEVNFNFDDPNLIILPLAFGKRQGREFIWNDLLSLETGSLKLANGRVIEKTLYNRRTRQDEPALFVALTFERREVLDSSNIKPMNLIGVDRGENIPAVIALTDPEGCPLSRFKDSLGNPTHILRIGESYKEKQRTIQAKKEVEQRRAGGYSRKYASKAKNLADDMVRNTARDLLYYAVTQDAMLIFENLSRGFGRQGKRTFMAERQYTRMEDWLTAKLAYEGLPSKTYLSKTLAQYTSKTCSNCGFTITSADYDRVLEKLKKTATGWMTTINGKELKVEGQITYYNRYKRQNVVKDLSVELDRLSEESVNNDISSWTKGRSGEALSLLKKRFSHRPVQEKFVCLNCGFETHADEQAALNIARSWLFLRSQEYKKYQTNKTTGNTDKRAFVETWQSFYRKKLKEVWKPAV

SEQ ID NO: 32905 - protein, 978 aa, synthetic construct
  REGION 1..978: note = engineered CasX variant
QEIKRISKIRRRLVKDSNTKKAGKTGPMKTLLVRVMTPDLRERLENLRKKPENIPQPISNTSRANLNKLLTDYTEMKKAILHVYWEEFQKDPVGLMSRVAQPASKKIDQNKLKPEMDEKGNLTTAGFACSQCGQPLFVYKLEQVSEKGKAYTNYFGRCNVAEHEKLILLAQLKPEKDSDEAVTYSLGKFGQRALDFYSIHVTKESTHPVKPLAQIAGNRYASAPVGKALSDACMGTIASFLSKYQDIIIEHQKVVKGNQKRLESLRELAGKENLEYPSVTLPPQPHTKEGVDAYNEVIARVRMWVNLNLWQKLKLSRDDAKPLLRLKGFPSFPLVERQANEVDWWDMVCNVKKLINEKKEDGKVFWQNLAGYKRQEALRPYLSSEEDRKKGKKFARYQLGDLLLHLEKKHGEDWGKVYDEAWERIDKKVEGLSKHIKLEEERRSEDAQSKAALTDWLRAKASFVIEGLKEADKDEFCRCELKLQKWYGDLRGKPFAIEAENSILDISGFSKQYNCAFIWQKDGVKKLNLYLIINYFKGGKLRFKKIKPEAFEANRFYTVINKKSGEIVPMEVNFNFDDPNLIILPLAFGKRQGREFIWNDLLSLETGSLKLANGRVIEKTLYNRRTRQDEPALFVALTFERREVLDSSNIKPMNLIGVDRGENIPAVIALTDPEGCPLSRFKDSLGNPTHILRIGESYKEKQRTIQAKKEVEQRRAGGYSRKYASKAKNLADDMVRNTARDLLYYAVTQDAMLIFENLSRGFGRQGKRTFMAERQYTRMEDWLTAKLAYEGLPSKTYLSKTLAQYTSKTCSNCGFTITSADYDRVLEKLKKTATGWMTTINGKELKVEGQITYYNRYKRQNVVKDLSVELDRLSEESVNNDISSWTKGRSGEALSLLKKRFSHRPVQEKFVCLNCGFETHADEQAALNIARSWLFLRSQEYKKYQTNKTTGNTDKRAFVETWQSFYRKKLKEVWKPAV

SEQ ID NO: 32906 - protein, 978 aa, synthetic construct
  REGION 1..978: note = engineered CasX variant
QEIKRISKIRRRLVKDSNTKKAGKTGPMKTLLVRVMTPDLRERLENLRKKPENIPQPISNTSRANLNKLLTDYTEMKKAILHVYWEEFQKDPVGLMSRVAQPASKKIDQNKLKPEMDEKGNLTTAGFACSQCGQPLFVYKLEQVSEKGKAYTNYFGRCNVAEHEKLILLAQLKPEKDSDEAVTYSLGKFGQRALDFYSIHVTKESTHPVKPLAQIAGNRYASVPVGKALSDACMGTIASFLSKYQDIIIEHQKVVKGNQKRLESLRELAGKENLEYPSVTLPPQPHTKEGVDAYNEVIARVRMWVNLNLWQKLKLSRDDAKPLLRLKGFPSFPLVERQANEVDWWDMVCNVKKLINEKKEDGKVFWQNLAGYKRQEALRPYLSSEEDRKKGKKFARYQLGDLLLHLEKKHGEDWGKVYDEAWERIDKKVEGLSKHIKLEEERRSEDAQSKAALTDWLRAKASFVIEGLKEADKDEFCRCELKLQKWYGDLRGKPFAIEAENSILDISGFSKQYNCAFIWQKDGVKKLNLYLIINYFKGGKLRFKKIKPEAFEANRFYTVINKKSGEIVPMEVNFNFDDPNLIILPLAFGKRQGREFIWNDLLSLETGSLKLANGRVIEKTLYNRRTRQDEPALFVALTFERREVLDSSNIKPMNLIGVDRGENIPAVIALTDPEGCPLSRFKDSLGNPTHILRIGESYKEKQRTIQAKKEVEQRRAGGYSRKYASKAKNLADDMVRNTARDLLYYAVTQDAMLIFENLSRGFGRQGKRTFMAERQYTRMEDWLTAKLAYEGLPSKTYLSKTLAQYTSKTCSNCGFTITSADYDRVLEKLKKTATGWMTTINGKELKVEGQITYYNRYKRQNVVKDLSVELDRLSEESVNNDISSWTKGRSGEALSLLKKRFSHRPVQEKFVCLNCGFETHADEQAALNIARSWLFLRSQEYKKYQTNKTTGNTDKRAFVETWQSFYRKKLKEVWKPAV

SEQ ID NO: 32907 - protein, 978 aa, synthetic construct
  REGION 1..978: note = engineered CasX variant
QEIKRISKIRRRLVKDSNTKKAGKTGPMKTLLVRVMTPDLRERLENLRKKPENIPQPISNTSRANLNKLLTDYTEMKKAILHVYWEEFQKDPVGLMSRVAQPASKKIDQNKLKPEMDEKGNLTTAGFACSQCGQPLFVYKLEQVSEKGKAYTNYFGRCNVAEHEKLILLAQLKPEKDSDEAVTYSLGKFGQRALDFYSIHVTKESTHPVKPLAQIAGNRYASYPVGKALSDACMGTIASFLSKYQDIIIEHQKVVKGNQKRLESLRELAGKENLEYPSVTLPPQPHTSEGVDAYNEVIARVRMWVNLNLWQKLKLSRDDAKPLLRLKGFPSFPLVERQANEVDWWDMVCNVKKLINEKKEDGKVFWQNLAGYKRQEALRPYLSSEEDRKKGKKFARYQLGDLLLHLEKKHGEDWGKVYDEAWERIDKKVEGLSKHIKLEEERRSEDAQSKAALTDWLRAKASFVIEGLKEADKDEFCRCELKLQKWYGDLRGKPFAIEAENSILDISGFSKQYNCAFIWQKDGVKKLNLYLIINYFKGGKLRFKKIKPEAFEANRFYTVINKKSGEIVPMEVNFNFDDPNLIILPLAFGKRQGREFIWNDLLSLETGSLKLANGRVIEKTLYNRRTRQDEPALFVALTFERREVLDSSNIKPMNLIGVDRGENIPAVIALTDPEGCPLSRFKDSLGNPTHILRIGESYKEKQRTIQAKKEVEQRRAGGYSRKYASKAKNLADDMVRNTARDLLYYAVTQDAMLIFENLSRGFGRQGKRTFMAERQYTRMEDWLTAKLAYEGLPSKTYLSKTLAQYTSKTCSNCGFTITSADYDRVLEKLKKTATGWMTTINGKELKVEGQITYYNRYKRQNVVKDLSVELDRLSEESVNNDISSWTKGRSGEALSLLKKRFSHRPVQEKFVCLNCGFETHADEQAALNIARSWLFLRSQEYKKYQTNKTTGNTDKRAFVETWQSFYRKKLKEVWKPAV

SEQ ID NO: 32908 - protein, 978 aa, synthetic construct
  REGION 1..978: note = engineered CasX variant
QEIKRISKIRRRLVKDSNTKKAGKTGPMKTLLVRVMTPDLRERLENLRKKPENIPQPISNTSRANLNKLLTDYTEMKKAILHVYWEEFQKDPVGLMSRVAQPASKKIDQNKLKPEMDEKGNLTTAGFACSQCGQPLFVYKLEQVSEKGKAYTNYFGRCNVAEHEKLILLAQLKPEKDSDEAVTYSLGKFGQRALDFYSIHVTKESTHPVKPLAQIAGNRYASHPVGKALSDACMGTIASFLSKYQDIIIEHQKVVKGNQKRLESLRELAGKENLEYPSVTLPPQPHTSEGVDAYNEVIARVRMWVNLNLWQKLKLSRDDAKPLLRLKGFPSFPLVERQANEVDWWDMVCNVKKLINEKKEDGKVFWQNLAGYKRQEALRPYLSSEEDRKKGKKFARYQLGDLLLHLEKKHGEDWGKVYDEAWERIDKKVEGLSKHIKLEEERRSEDAQSKAALTDWLRAKASFVIEGLKEADKDEFCRCELKLQKWYGDLRGKPFAIEAENSILDISGFSKQYNCAFIWQKDGVKKLNLYLIINYFKGGKLRFKKIKPEAFEANRFYTVINKKSGEIVPMEVNFNFDDPNLIILPLAFGKRQGREFIWNDLLSLETGSLKLANGRVIEKTLYNRRTRQDEPALFVALTFERREVLDSSNIKPMNLIGVDRGENIPAVIALTDPEGCPLSRFKDSLGNPTHILRIGESYKEKQRTIQAKKEVEQRRAGGYSRKYASKAKNLADDMVRNTARDLLYYAVTQDAMLIFENLSRGFGRQGKRTFMAERQYTRMEDWLTAKLAYEGLPSKTYLSKTLAQYTSKTCSNCGFTITSADYDRVLEKLKKTATGWMTTINGKELKVEGQITYYNRYKRQNVVKDLSVELDRLSEESVNNDISSWTKGRSGEALSLLKKRFSHRPVQEKFVCLNCGFETHADEQAALNIARSWLFLRSQEYKKYQTNKTTGNTDKRAFVETWQSFYRKKLKEVWKPAV
